United States Patent Application Publication US 2018/0126003 A1 - sequence listing, part 55

SEQ ID NO: 96728 - DNA, 2175 bp, Artificial Sequence
  derived and/or modified sequence
atgcccgaggaggtgcaccacggcgaggaggaggtggagaccttcgccttccaggccgagatcgcccagctgatgagcctgatcatcaacaccttctacagcaacaaggagatcttcctgagagagctgatcagcaacgccagcgacgccctggacaagatcagatacgagagcctgaccgaccccagcaagctggacagcggcaaggagctgaagatcgacatcatccccaacccccaggagagaaccctgaccctggtggacaccggcatcggcatgaccaaggccgacctgatcaacaacctgggcaccatcgccaagagcggcaccaaggccttcatggaggccctgcaggccggcgccgacatcagcatgatcggccagttcggcgtgggcttctacagcgcctacctggtggccgagaaggtggtggtgatcaccaagcacaacgacgacgagcagtacgcctgggagagcagcgccggcggcagcttcaccgtgagagccgaccacggcgagcccatcggcagaggcaccaaggtgatcctgcacctgaaggaggaccagaccgagtacctggaggagagaagagtgaaggaggtggtgaagaagcacagccagttcatcggctaccccatcaccctgtacctggagaaggagagagagaaggagatcagcgacgacgaggccgaggaggagaagggcgagaaggaggaggaggacaaggacgacgaggagaagcccaagatcgaggacgtgggcagcgacgaggaggacgacagcggcaaggacaagaagaagaagaccaagaagatcaaggagaagtacatcgaccaggaggagctgaacaagaccaagcccatctggaccagaaaccccgacgacatcacccaggaggagtacggcgagttctacaagagcctgaccaacgactgggaggaccacctggccgtgaagcacttcagcgtggagggccagctggagttcagagccctgctgttcatccccagaagagcccccttcgacctgttcgagaacaagaagaagaagaacaacatcaagctgtacgtgagaagagtgttcatcatggacagctgcgacgagctgatccccgagtacctgaacttcatcagaggcgtggtggacagcgaggacctgcccctgaacatcagcagagagatgctgcagcagagcaagatcctgaaggtgatcagaaagaacatcgtgaagaagtgcctggagctgttcagcgagctggccgaggacaaggagaactacaagaagttctacgaggccttcagcaagaacctgaagctgggcatccacgaggacagcaccaacagaagaagactgagcgagctgctgagataccacaccagccagagcggcgacgagatgaccagcctgagcgagtacgtgagcagaatgaaggagacccagaagagcatctactacatcaccggcgagagcaaggagcaggtggccaacagcgccttcgtggagagagtgagaaagagaggcttcgaggtggtgtacatgaccgagcccatcgacgagtactgcgtgcagcagctgaaggagttcgacggcaagagcctggtgagcgtgaccaaggagggcctggagctgcccgaggacgaggaggagaagaagaagatggaggagagcaaggccaagttcgagaacctgtgcaagctgatgaaggagatcctggacaagaaggtggagaaggtgaccatcagcaacagactggtgagcagcccctgctgcatcgtgaccagcacctacggctggaccgccaacatggagagaatcatgaaggcccaggccctgagagacaacagcaccatgggctacatgatggccaagaagcacctggagatcaaccccgaccaccccatcgtggagaccctgagacagaaggccgaggccgacaagaacgacaaggccgtgaaggacctggtggtgctgctgttcgagaccgccctgctgagcagcggcttcagcctggaggacccccagacccacagcaacagaatctacagaatgatcaagctgggcctgggcatcgacgaggacgaggtggccgccgaggagcccaacgccgccgtgcccgacgagatcccccccctggagggcgacgaggacgccagcagaatggaggaggtggactag

SEQ ID NO: 96729 - DNA, 2567 bp, Artificial Sequence
  derived and/or modified sequence
ctccggcgcagtgttgggactgtctgggtatcggaaagcaagcctacgttgctcactattacgtataatccttttcttttcaagatgcctgaggaagtgcaccatggagaggaggaggtggagacttttgcctttcaggcagaaattgcccaactcatgtccctcatcatcaataccttctattccaacaaggagattttccttcgggagttgatctctaatgcttctgatgccttggacaagattcgctatgagagcctgacagacccttcgaagttggacagtggtaaagagctgaaaattgacatcatccccaaccctcaggaacgtaccctgactttggtagacacaggcattggcatgaccaaagctgatctcataaataatttgggaaccattgccaagtctggtactaaagcattcatggaggctcttcaggctggtgcagacatctccatgattgggcagtttggtgttggcttttattctgcctacttggtggcagagaaagtggttgtgatcacaaagcacaacgatgatgaacagtatgcttgggagtcttctgctggaggttccttcactgtgcgtgctgaccatggtgagcccattggcaggggtaccaaagtgatcctccatcttaaagaagatcagacagagtacctagaagagaggcgggtcaaagaagtagtgaagaagcattctcagttcataggctatcccatcaccctttatttggagaaggaacgagagaaggaaattagtgatgatgaggcagaggaagagaaaggtgagaaagaagaggaagataaagatgatgaagaaaaacccaagatcgaagatgtgggttcagatgaggaggatgacagcggtaaggataagaagaagaaaactaagaagatcaaagagaaatacattgatcaggaagaactaaacaagaccaagcctatttggaccagaaaccctgatgacatcacccaagaggagtatggagaattctacaagagcctcactaatgactgggaagaccacttggcagtcaagcacttttctgtagaaggtcagttggaattcagggcattgctatttattcctcgtcgggctccctttgacctttttgagaacaagaagaaaaagaacaacatcaaactctatgtccgccgtgtgttcatcatggacagctgtgatgagttgataccagagtatctcaattttatccgtggtgtggttgactctgaggatctgcccctgaacatctcccgagaaatgctccagcagagcaaaatcttgaaagtcattcgcaaaaacattgttaagaagtgccttgagctcttctctgagctggcagaagacaaggagaattacaagaaattctatgaggcattctctaaaaatctcaagcttggaatccacgaagactccactaaccgccgccgcctgtctgagctgctgcgctatcatacctcccagtctggagatgagatgacatctctgtcagagtatgtttctcgcatgaaggagacacagaagtccatctattacatcactggtgagagcaaagagcaggtggccaactcagcttttgtggagcgagtgcggaaacggggcttcgaggtggtatatatgaccgagcccattgacgagtactgtgtgcagcagctcaaggaatttgatgggaagagcctggtctcagttaccaaggagggtctggagctgcctgaggatgaggaggagaagaagaagatggaagagagcaaggcaaagtttgagaacctctgcaagctcatgaaagaaatcttagataagaaggttgagaaggtgacaatctccaatagacttgtgtcttcaccttgctgcattgtgaccagcacctacggctggacagccaatatggagcggatcatgaaagcccaggcacttcgggacaactccaccatgggctatatgatggccaaaaagcacctggagatcaaccctgaccaccccattgtggagacgctgcggcagaaggctgaggccgacaagaatgataaggcagttaaggacctggtggtgctgctgtttgaaaccgccctgctatcttctggcttttcccttgaggatccccagacccactccaaccgcatctatcgcatgatcaagctaggtctaggtattgatgaagatgaagtggcagcagaggaacccaatgctgcagttcctgatgagatcccccctctcgagggcgatgaggatgcgtctcgcatggaagaagtcgattaggttaggagttcatagttggaaaacttgtgcccttgtatagtgtccccatgggctcccactgcagcctcgagtgcccctgtcccacctggctccccctgctggtgtctagtgtttttttccctctcctgtccttgtgttgaaggcagtaaactaagggtgtcaagccccattccctctctactcttgacagcaggattggatgttgtgtattgtggtttattttattttcttcattttgttctgaaattaaagtatgcaaaataaagaatatgccgttttaaaaaaaaaaaaaaaaaaaaaaaaaaaaa

SEQ ID NO: 96730 - protein, 168 aa, Artificial Sequence
  derived and/or modified sequence
MPEEVHHGEEEVETFAFQAEIAQLMSLIINTFYSNKEIFLRELISNASDALDKIRYESLTDPSKLDSGKELKIDISMIGQFGVGFYSAYLVAEKVVVITKHNDDEQYAWESSAGGSFTVRADHGEPIGRGTKVILHLKEDQTEYLEERRVKEVVKKHSQFIGYPITLY

SEQ ID NO: 96731 - DNA, 465 bp, Artificial Sequence
  derived and/or modified sequence
atggattcatgtgacgaactgatacctgagtacctgaacttcattcgaggggtggtagattcagaggacctccccctcaacattagcagggagatgctgcaacaatctaagatcttgaaggtaattaggaaaaacattgtcaaaaagtgcttagaactcttttcagaactggcagaggataaggaaaactataagaagttttatgaggcattttcgaaaaacctcaagttaggaattcacgaggattccacaaaccgcagacggctgtctgaattattaaggtatcacaccagtcagagcggcgacgagatgacctccctgagcgaatacgtcagcagaatgaaggagacgcagaagtctatttactacatcaccggggaaagtaaagagcaggtttgcccttgccctacttggctccctctgctggtaagctccgtctttttccctctgctgtcgctgtgctag

SEQ ID NO: 96732 - DNA, 489 bp, Artificial Sequence
  derived and/or modified sequence
atggattcttgtgacgagctgatacccgaatacctcaactttattagaggtgtggtggattcggaggatcttcctcttaacatctcccgggagatgctccaacagtctaagatcctgaaggtgatccgcaagaatatcgtcaaaaagtgtctagaactcttctccgaactggctgaggacaaggagaattacaagaaattctatgaagcattctctaagaatttgaagctgggtatccacgaggactctactaatagacggaggctgtctgagttactgaggtaccacacttcgcagagcggcgacgagatgacatccctctctgagtatgtatccaggatgaaagagacacagaaatccatctactacatcaccggagaatccaaggaacaggtggcaaattcggcatttgtcgagcggtgtccttgtcccacttggctcccgctccttgtctctagtgtgtttttcccactactcagtttgtgctag

SEQ ID NO: 96733 - DNA, 552 bp, Artificial Sequence
  derived and/or modified sequence
atggatagttgcgacgagttgatacccgaatatctcaacttcattcggggcgttgtcgattccgaggatctgcccctgaacattagtagggagatgctccagcagagcaagatcctgaaagtgattcgcaagaacatcgtcaagaagtgtttggagctgttttctgaactcgcggaggacaaagagaattataagaaattttacgaggccttttccaaaaatctgaaacttggaatccatgaagattctactaatcgcaggaggctgtctgagctcttgagatatcatacgtcacagtctggagatgaaatgacctctctgtccgagtacgtctctcggatgaaggagacccagaaaagcatctattatatcaccggatctccctgctggtgcttagtgttcttctccctttcctgtccatgcgtcgaaggctccaaattaagggtcagctcgcctattcccagcctgctcctcacggcaggtcttgacgtggtatattgtggcctcttctactttctccacttcgttctcaaactgaagtacgcgaagtag

SEQ ID NO: 96734 - DNA, 429 bp, Artificial Sequence
  derived and/or modified sequence
tagttcatcaggggtgtcgtagactccgaagatctccccctgaacatttctagagaaatgctccagcagagtaagatcctcaaagtgatccgaaagaatatcgtaaaaaaatgcctggagctgtttagtgaactcgccgaggataaagagaactacaagaaattctacgaggcattcagcaagaacctgaaactcggaattcatgaggattcaactaataggaggcgactgagtgaactcctacgctatcacacatcccagtcgggggacgaaatgacttcactgagcgaatacgtgtccaggatgaaggagacccagaaatctatctattatattacaggagagtccaaagagcaggtgtgcccctgtcccacatggctacctctgttggtgagtagcgtcttctttccattgctgtctttgtgttag

SEQ ID NO: 96735 - DNA, 453 bp, Artificial Sequence
  derived and/or modified sequence
tgatttatccgaggggtagtggatagtgaggatttgcccctgaacatcagcagggagatgctacaacagtctaagatattgaaggtcattcggaaaaatatagtaaagaaatgtctggagctcttctctgagctagccgaggataaggaaaattataagaagttttacgaagcgttctcgaaaaatctgaaacttggaatccacgaagattcaacgaatcgtcgcaggctgagtgagctactgcggtatcacacctcacagagtggcgacgaaatgacatctttgtccgaatatgtatctaggatgaaggagactcaaaagtcgatttactatattactggcgagtccaaggaacaggtcgccaacagcgctttcgtggaacggtgtccatgtcctacctggttgcccctgctggtgagttctgtcttcttccccctgcttagcttatgttag

SEQ ID NO: 96736 - DNA, 516 bp, Artificial Sequence
  derived and/or modified sequence
tgattcatccggggcgtggtggacagcgaggacttaccattgaacattagtcgggagatgttgcagcagagcaagatactaaaagtgatcaggaagaacatagtaaagaaatgtctggaactgtttagcgaattggccgaggacaaagaaaattataagaagttttatgaggcctttagcaagaacctgaagctgggaatacacgaggacagtaccaataggcgccggctctccgagctgctgagataccacacatcacaatctggggatgaaatgacctctctaagtgaatacgttagccggatgaaagagacccagaagtctatttactacataacagggtcaccatgttggtgtctggtatttttttctctgagctgcccctgtgtggagggtagcaagctgcgcgtctcatcacccatcccgtctctactactaaccgcggggctggatgtcgtctactgcgggctgttctattttctgcacttcgttctcaagctcaaatatgcaaagtag

SEQ ID NO: 96737 - DNA, 507 bp, Artificial Sequence
  derived and/or modified sequence
atgcctgaagaagtgcatcacggggaagaagaagtggagacatttgcctttcaggccgagattgcacagctcatgagtctcataatcaacacattttatagcaataaggagatctttctcagagagctgatatcaaacgcctccgacgcgctggacaagattcggtacgagtcgctcacagatccttcgaaattagactccgggaaggaattgaaaatcgatatttcgatgatcgggcagttcggagttggcttttacagcgcttacctcgtcgccgaaaaggtcgtggtgattaccaagcataacgacgacgagcagtacgcatgggaatctagcgcgggcggctccttcactgttcgggctgaccatggggagcctatcggacgaggtaccaaagtaatcctgcacttgaaggaggaccagaccgagtatctcgaagagagacgggtcaaggaagtcgttaaaaagcattcacaatttatcgggtatcccataacgctctactag

SEQ ID NO: 96738 - DNA, 573 bp, Artificial Sequence
  derived and/or modified sequence
attttatccgtggtgtggttgactctgaggatctgcccctgaacatctcccgagaaatgctccagcagagcaaaatcttgaaagtcattcgcaaaaacattgttaagaagtgccttgagctcttctctgagctggcagaagacaaggagaattacaagaaattctatgaggcattctctaaaaatctcaagcttggaatccacgaagactccactaaccgccgccgcctgtctgagctgctgcgctatcatacctcccagtctggagatgagatgacatctctgtcagagtatgtttctcgcatgaaggagacacagaagtccatctattacatcactggtgagagcaaagagcaggtgtgcccctgtcccacctggctccccctgctggtgtctagtgtttttttccctctcctgtccttgtgttgaaggcagtaaactaagggtgtcaagccccattccctctctactcttgacagcaggattggatgttgtgtattgtggtttattttattttcttcattttgttctgaaattaaagtatgcaaaataaagaatatgccgtttttataca

SEQ ID NO: 96739 - DNA, 597 bp, Artificial Sequence
  derived and/or modified sequence
attttatccgtggtgtggttgactctgaggatctgcccctgaacatctcccgagaaatgctccagcagagcaaaatcttgaaagtcattcgcaaaaacattgttaagaagtgccttgagctcttctctgagctggcagaagacaaggagaattacaagaaattctatgaggcattctctaaaaatctcaagcttggaatccacgaagactccactaaccgccgccgcctgtctgagctgctgcgctatcatacctcccagtctggagatgagatgacatctctgtcagagtatgtttctcgcatgaaggagacacagaagtccatctattacatcactggtgagagcaaagagcaggtggccaactcagcttttgtggagcgatgcccctgtcccacctggctccccctgctggtgtctagtgtttttttccctctcctgtccttgtgttgaaggcagtaaactaagggtgtcaagccccattccctctctactcttgacagcaggattggatgttgtgtattgtggtttattttattttcttcattttgttctgaaattaaagtatgcaaaataaagaatatgccgtttttataca

SEQ ID NO: 96740 - DNA, 536 bp, Artificial Sequence
  derived and/or modified sequence
attttatccgtggtgtggttgactctgaggatctgcccctgaacatctcccgagaaatgctccagcagagcaaaatcttgaaagtcattcgcaaaaacattgttaagaagtgccttgagctcttctctgagctggcagaagacaaggagaattacaagaaattctatgaggcattctctaaaaatctcaagcttggaatccacgaagactccactaaccgccgccgcctgtctgagctgctgcgctatcatacctcccagtctggagatgagatgacatctctgtcagagtatgtttctcgcatgaaggagacacagaagtccatctattacatcactggctccccctgctggtgtctagtgtttttttccctctcctgtccttgtgttgaaggcagtaaactaagggtgtcaagccccattccctctctactcttgacagcaggattggatgttgtgtattgtggtttattttattttcttcattttgttctgaaattaaagtatgcaaaataaagaatatgccgtttttataca

SEQ ID NO: 96741 - DNA, 613 bp, Artificial Sequence
  derived and/or modified sequence
ggcacgcagtagctctctcgagtcactccggcgcagtgttgggactgtctgggtatcggaaagcaagcctacgttgctcactattacgtataatccttttcttttcaagatgcctgaggaagtgcaccatggagaggaggaggtggagacttttgcctttcaggcagaaattgcccaactcatgtccctcatcatcaataccttctattccaacaaggagattttccttcgggagttgatctctaatgcttctgatgccttggacaagattcgctatgagagcctgacagacccttcgaagttggacagtggtaaagagctgaaaattgacatctccatgattgggcagtttggtgttggcttttattctgcctacttggtggcagagaaagtggttgtgatcacaaagcacaacgatgatgaacagtatgcttgggagtcttctgctggaggttccttcactgtgcgtgctgaccatggtgagcccattggcaggggtaccaaagtgatcctccatcttaaagaagatcagacagagtacctagaagagaggcgggtcaaagaagtagtgaagaagcattctcagttcataggctatcccatcaccctttat

SEQ ID NO: 96742 - DNA, 465 bp, Artificial Sequence
  derived and/or modified sequence
atggacagctgtgatgagctgatccctgagtacctgaacttcatccggggcgtggtggacagcgaggacctgcccctgaacatcagccgggagatgctgcagcagagcaagatcctgaaggtgatcaggaagaacatcgtgaagaagtgcctggagctgttcagcgagctggccgaggacaaggagaactacaagaagttctatgaggccttcagcaagaacctgaagctgggcatccacgaggacagcaccaacagaagaaggctgtctgagctgctgcgctaccacaccagccagagcggagatgagatgaccagcctgtctgaatatgtgtccaggatgaaggagacccagaagagcatctactacatcactggagagagcaaggagcaggtgtgcccctgccccacctggctgcccctgctggtgtcctctgtgttcttccccctgctgagcctgtgctag

SEQ ID NO: 96743 - DNA, 489 bp, Artificial Sequence
  derived and/or modified sequence
atggacagctgtgatgagctgatccctgagtacctgaacttcatccggggcgtggtggacagcgaggacctgcccctgaacatcagccgggagatgctgcagcagagcaagatcctgaaggtgatcaggaagaacatcgtgaagaagtgcctggagctgttcagcgagctggccgaggacaaggagaactacaagaagttctatgaggccttcagcaagaacctgaagctgggcatccacgaggacagcaccaacagaagaaggctgtctgagctgctgcgctaccacaccagccagagcggagatgagatgaccagcctgtctgaatatgtgtccaggatgaaggagacccagaagagcatctactacatcactggagagagcaaggagcaggtggccaacagcgcctttgtggagcgctgcccctgccccacctggctgcccctgctggtgtcctctgtgttcttccccctgctgagcctgtgctag

SEQ ID NO: 96744 - DNA, 552 bp, Artificial Sequence
  derived and/or modified sequence
atggacagctgtgatgagctgatccctgagtacctgaacttcatccggggcgtggtggacagcgaggacctgcccctgaacatcagccgggagatgctgcagcagagcaagatcctgaaggtgatcaggaagaacatcgtgaagaagtgcctggagctgttcagcgagctggccgaggacaaggagaactacaagaagttctatgaggccttcagcaagaacctgaagctgggcatccacgaggacagcaccaacagaagaaggctgtctgagctgctgcgctaccacaccagccagagcggagatgagatgaccagcctgtctgaatatgtgtccaggatgaaggagacccagaagagcatctactacatcaccggcagcccctgctggtgcctggtgttcttcagcctgagctgcccctgtgtggagggcagcaagctgcgggtgagcagccccatccccagcctgctgctgacagctggcctggatgtggtgtactgcggcctcttctacttcctgcactttgtgctgaagctgaagtatgccaagtag

SEQ ID NO: 96745 - DNA, 429 bp, Artificial Sequence
  derived and/or modified sequence
tgattcatccggggcgtggtggacagcgaggacctgcccctgaacatcagccgggagatgctgcagcagagcaagatcctgaaggtgatcaggaagaacatcgtgaagaagtgcctggagctgttcagcgagctggccgaggacaaggagaactacaagaagttctatgaggccttcagcaagaacctgaagctgggcatccacgaggacagcaccaacagaagaaggctgtctgagctgctgcgctaccacaccagccagagcggagatgagatgaccagcctgtctgaatatgtgtccaggatgaaggagacccagaagagcatctactacatcactggagagagcaaggagcaggtgtgcccctgccccacctggctgcccctgctggtgtcctctgtgttcttccccctgctgagcctgtgctag

SEQ ID NO: 96746 - DNA, 453 bp, Artificial Sequence
  derived and/or modified sequence
tgattcatccggggcgtggtggacagcgaggacctgcccctgaacatcagccgggagatgctgcagcagagcaagatcctgaaggtgatcaggaagaacatcgtgaagaagtgcctggagctgttcagcgagctggccgaggacaaggagaactacaagaagttctatgaggccttcagcaagaacctgaagctgggcatccacgaggacagcaccaacagaagaaggctgtctgagctgctgcgctaccacaccagccagagcggagatgagatgaccagcctgtctgaatatgtgtccaggatgaaggagacccagaagagcatctactacatcactggagagagcaaggagcaggtggccaacagcgcctttgtggagcgctgcccctgccccacctggctgcccctgctggtgtcctctgtgttcttccccctgctgagcctgtgctag

SEQ ID NO: 96747 - DNA, 516 bp, Artificial Sequence
  derived and/or modified sequence
tgattcatccggggcgtggtggacagcgaggacctgcccctgaacatcagccgggagatgctgcagcagagcaagatcctgaaggtgatcaggaagaacatcgtgaagaagtgcctggagctgttcagcgagctggccgaggacaaggagaactacaagaagttctatgaggccttcagcaagaacctgaagctgggcatccacgaggacagcaccaacagaagaaggctgtctgagctgctgcgctaccacaccagccagagcggagatgagatgaccagcctgtctgaatatgtgtccaggatgaaggagacccagaagagcatctactacatcaccggcagcccctgctggtgcctggtgttcttcagcctgagctgcccctgtgtggagggcagcaagctgcgggtgagcagccccatccccagcctgctgctgacagctggcctggatgtggtgtactgcggcctcttctacttcctgcactttgtgctgaagctgaagtatgccaagtag

SEQ ID NO: 96748 - DNA, 507 bp, Artificial Sequence
  derived and/or modified sequence
atgcctgaggaggtgcaccacggggaggaggaggtggagacctttgccttccaggccgagatcgcccagctgatgagcctcatcatcaacaccttctacagcaacaaggagatcttcctgcgggagctgatcagcaatgccagtgatgccctggacaagatccgctatgagagcctgacagaccccagcaagctggacagcggcaaggagctgaagattgacatctccatgattggccagtttggagtgggcttctacagcgcctacctggtggccgagaaggtggtggtgatcaccaagcacaatgatgatgagcagtatgcctgggagagcagcgctgggggcagcttcaccgtgcgggctgaccatggagagcccatcggccggggcaccaaggtgatcctgcacctgaaggaggaccagacagagtacctggaggagcggcgggtgaaggaggtggtgaagaagcacagccagttcatcggctaccccatcaccctgtactag

SEQ ID NO: 96749 - DNA, 465 bp, Artificial Sequence
  derived and/or modified sequence
atggacagctgcgacgagctgatccccgagtacctgaacttcatcagaggcgttgttgattctgaggaccttccactgaatatcagtcgcgagatgctgcagcagtccaagatactgaaggtgattcggaaaaacattgtgaaaaaatgcctggagctcttctctgagctcgcggaagataaagagaattataaaaagttctacgaagccttcagtaagaacctgaagctggggattcacgaggatagtacaaacagacggaggctgtccgaactccttcgctaccatacaagccagagcggcgatgaaatgacgtcgttgagcgaatatgtaagccgcatgaaggaaacccagaaatccatctattacatcaccggggaatctaaggaacaggtgtgtccttgcccaacgtggctcccgttgttggtgagctccgtcttcttcccgttgctctccctgtgttag

SEQ ID NO: 96750 - DNA, 489 bp, Artificial Sequence
  derived and/or modified sequence
atggacagctgcgacgagctgatccccgagtacctgaacttcatccgaggcgtcgttgattctgaggatctcccacttaacatcagtcgagagatgctccagcagtccaaaatcttgaaagtgatacggaaaaacattgtaaagaagtgccttgaactcttcagcgagctggccgaggacaaggaaaattacaagaagttctacgaagccttctccaaaaacctgaagctggggattcacgaggattcgacaaatcgtcggcggctgagcgagctcctgcgttatcacacctcacagagcggggatgaaatgacctccctgtctgaatatgtaagtagaatgaaagaaacgcagaagagtatctattatatcacgggtgagtcaaaggagcaggtggcaaactccgcttttgtggagcgctgtccttgtcccacttggttacctctgttggtctcctccgttttctttccactcttgtctctgtgttag

SEQ ID NO: 96751 - DNA, 552 bp, Artificial Sequence
  derived and/or modified sequence
atggacagctgcgacgagctgatccccgagtacctgaacttcatccgcggcgtggtggactctgaagaccttccacttaatataagtcgcgaaatgttgcagcagtcaaagatcttgaaagtgatcaggaagaacattgttaagaagtgcctcgagcttttcagcgagctggctgaggacaaagagaactacaagaaattctacgaagccttcagcaagaatctaaaactgggcatacacgaggattctacgaaccgaagacggctgagcgagcttctgaggtaccacacttcccagagcggagacgagatgaccagcctaagcgaatacgtgagcagaatgaaagaaacgcagaaatctatttactacatcacaggatccccgtgctggtgtttagttttcttctctttgagttgcccctgtgtggaaggatctaaactgagagtgagttctccgataccgagtctcttgttaactgctggcctggatgtggtgtactgtggactcttctacttcctgcacttcgttctaaaactcaagtacgctaaatag

SEQ ID NO: 96752 - DNA, 429 bp, Artificial Sequence
  derived and/or modified sequence
tgattcatccggggcgtggtggacagcgaggacctgcccctgaacatttcaagagagatgcttcaacagtctaagatactgaaagtgatcagaaagaatattgtgaagaagtgcttggaactttttagtgagttagcggaagacaaagaaaactacaagaagttctatgaagcattctctaaaaatcttaagctgggcatccacgaagactccacaaatagacggcggttgagtgaattgttgcggtaccatactagccagtccggcgacgagatgacttcactgagcgagtatgttagcagaatgaaagaaacccagaagtctatctattacatcactggcgagagtaaggaacaggtgtgcccatgccccacatggcttccactgcttgttagcagcgtatttttcccgctgctgtccttatgttag

SEQ ID NO: 96753 - DNA, 453 bp, Artificial Sequence
  derived and/or modified sequence
tgattcatccggggcgtggtggacagcgaggacctgcccctgaacatctctagggaaatgcttcagcagtctaaaatacttaaggtgattagaaaaaatattgtgaaaaaatgtttggagctgtttagcgaattggctgaagataaggagaattacaagaagttctacgaggcctttagcaagaaccttaaactcggcatccacgaggatagcactaaccgcaggaggttatcagagttactcagataccatacaagccagtctggcgacgagatgacatcactgtctgagtacgtgtccagaatgaaagaaacccaaaagtcaatctattatataacaggggaaagcaaggagcaggtggctaactcagcatttgtcgaacgatgcccctgcccaacttggctgccactcctggtgagcagtgtgttctttccgctgctgtccctatgctag

SEQ ID NO: 96754 - DNA, 516 bp, Artificial Sequence
  derived and/or modified sequence
tgattcatccggggcgtggtggacagcgaggacctgcccctgaacatctcccgggagatgctccagcaatccaagatactgaaggttatacgaaaaaacattgttaagaagtgcttggaactgtttagcgagctggcagaggataaagaaaactacaaaaagttctacgaggcttttagcaagaacctcaaactgggcattcacgaggactcgacgaataggcgtcgcctgtccgaactgctgaggtaccatacaagtcagagcggagacgagatgacgagtctcagtgaatacgtgtcccgtatgaaagagacacagaagtctatctattacataacaggcagtccctgttggtgccttgtctttttctccttaagttgcccctgtgtggagggttctaagctgcgtgtgagttcacctatcccctcactgctgctgactgcaggactggacgttgtgtactgcggtttgttttattttcttcacttcgttctgaagttgaaatacgcaaaatag

SEQ ID NO: 96755 - DNA, 507 bp, Artificial Sequence
  derived and/or modified sequence
atgcccgaggaggtgcaccacggcgaggaggaggtggagaccttcgcattccaggccgagattgctcagctgatgagccttataattaataccttctatagcaataaggagatattcctgcgggagctgattagtaatgcttcggacgctttggacaagatcagatacgagtctttgactgatcctagtaagttggattctggaaaggaattaaagatagacatttctatgatcggacaattcggggtgggattttattccgcatatctcgttgcggagaaagtggtggtcataacaaagcacaacgatgacgagcagtacgcttgggaatcctccgctggggggtcgtttaccgtgagagcagatcacggcgagccaatcggcagggggaccaaggttatcttacacctcaaggaagatcagacagaatacttagaggagcgccgggtcaaagaggttgttaagaagcactcgcaattcattggttatccaatcactctctactag

SEQ ID NO: 96756 - DNA, 465 bp, Artificial Sequence
  derived and/or modified sequence
atggacagctgcgatgagctgatacccgaatatctgaactttatccgcggtgtggtggatagcgaggacctgccgctgaacatcagccgtgagatgctgcagcagtctaagattttgaaagtcatcaggaagaacattgtgaagaagtgccttgaactcttctccgagctcgcggaagacaaagagaattacaagaagttttatgaagccttctcaaagaacctgaagctgggaatccacgaagacagtaccaaccgaagaagactgagcgagctcctgagataccacacatctcaatccggagacgagatgactagtctcagtgagtacgtgagtagaatgaaggagacccagaagagtatttattatattactggcgaaagcaaggaacaggtgtgcccatgtcctacttggctccctctcctcgtgtcttccgtgttcttccccctgcttagcctgtgctag

SEQ ID NO: 96757 - DNA, 489 bp, Artificial Sequence
  derived and/or modified sequence
atggatagttgtgacgagctgatcccagaatacctgaatttcattagaggagtggtagactcggaggatctgccactgaatatatctcgggagatgctgcagcagtccaaaatcttgaaggtgatccgcaagaacatcgtgaagaagtgtctggaactgttcagcgagctagcagaggacaaggagaattacaaaaaattctacgaggcattcagtaagaatctgaagctcggaattcacgaggactcgaccaatcggcgtcgtttgtcagagctgcttaggtatcatacctctcagtcaggggacgagatgacgtccttgtccgaatatgtttctcgtatgaaagaaacgcagaagagcatctattacatcacaggtgagtccaaagagcaagtcgccaactccgcttttgtggagcgatgcccctgccccacatggctgcctctgctggtgtcctcagtctttttccctcttttatctctctgctag

SEQ ID NO: 96758 - DNA, 552 bp, Artificial Sequence
  derived and/or modified sequence
atggacagctgcgacgagctcattcccgaatacctcaattttatcaggggcgtggtagattcagaggatctgccacttaacatcagccgagagatgctgcagcaatccaagatcctgaaagtgatcaggaagaatattgtgaagaaatgtctggaactcttctcagaactggcagaggataaggagaactataagaaattttatgaagcatttagtaaaaatctgaaattgggaattcacgaagacagtacaaacagacgcaggctgtccgagctgcttagatatcacacttctcagagcggcgacgagatgacatcgctgtctgaatacgtctctagaatgaaggagacccagaagtcaatatactatatcacggggagcccatgctggtgtctcgtgtttttctccttgtcatgcccttgcgtagaggggtccaagttacgagtcagcagccctatccccagcctgctgttgaccgccggattggacgtcgtctactgcgggcttttctacttcttgcattttgtgctgaaattgaagtatgcgaagtag

SEQ ID NO: 96759 - DNA, 429 bp, Artificial Sequence
  derived and/or modified sequence
taatttattaggggcgtggtggattccgaggatctgccacttaatatctctcgtgaaatgctccagcagtcaaagattctgaaagttatacgcaaaaatattgtgaaaaaatgcctcgagttgttctctgagttggccgaggacaaagagaactacaaaaagttctacgaggcattctctaaaaacctgaaactgggcatccacgaagacagtaccaataggcgccgactgtctgagctgctgcgatatcacacaagccagagcggcgatgaaatgacctccctttctgagtacgtttcccggatgaaagagacccaaaagagcatttactatataaccggagagtccaaggagcaggtatgcccctgccctacttggctgccccttctcgtgagctccgttttctttccgctcttgtcactctgttag

SEQ ID NO: 96760 - DNA, 453 bp, Artificial Sequence
  derived and/or modified sequence
tgattcatcagaggagtggtggacagtgaagatctgcctttaaacatttcccgcgaaatgctgcaacagtctaagattttgaaagtgatcaggaagaatattgttaaaaagtgcctggaactgtttagcgagctagccgaagacaaagaaaactataaaaaattctatgaagcctttagcaagaatctgaaactaggcatacacgaggactccaccaataggagacgccttagcgagctgttgcgctaccacacgagtcagtcaggagatgagatgacatcactcagtgagtatgttagtcgtatgaaggaaacccaaaagtctatctattacattactggggagagtaaggaacaagtcgccaacagcgccttcgtcgaacggtgtccatgccctacatggctgcccctgctagtgtcttcagtctttttccccctcctttctttgtgttag

SEQ ID NO: 96761 - DNA, 516 bp, Artificial Sequence
  derived and/or modified sequence
taatttattagaggtgttgtcgacagtgaggatctcccgctgaatattagtcgagagatgcttcaacagtccaagattctcaaggtgattcggaagaatatcgtgaagaagtgtcttgaactcttttcagaactggctgaggataaggaaaattataagaagttctacgaagcgttcagcaaaaaccttaagttaggtatccacgaggacagcacgaacagaaggagactgtccgaattgctccgttatcatacctcccagtcaggtgatgaaatgacctctctgagcgagtatgtgtctcgtatgaaggaaacccaaaaaagtatctattatatcaccggctctccctgctggtgccttgtgtttttttctttaagctgtccttgcgtggagggaagcaagttgagggtgagctcccccatcccttcacttctgttgacagccggtctggatgtggtctattgcggtttgttttatttcctccactttgtgctgaaactcaagtatgcaaagtag

SEQ ID NO: 96762 - DNA, 507 bp, Artificial Sequence
  derived and/or modified sequence
atgcctgaggaagtgcaccatggcgaagaagaagtggagacttttgcattccaggccgagattgcccagttaatgagcctcatcatcaacactttctactcaaacaaagagatttttctgcgggaattgattagcaacgcatcagacgccctggacaaaattagatatgagtcattgacagacccatctaaactggattccggcaaggaattgaaaatcgatatctctatgatcggccagtttggtgtaggcttctacagcgcatacttagtggcagaaaaagtcgtggtgattactaagcacaacgatgatgagcagtacgcctgggaaagttctgccggaggatcgttcacagtccgggctgatcacggtgagccaatcgggcgagggacgaaggtgattctgcacctgaaggaggatcagactgaatatttagaagagagaagagtgaaggaggtggtgaagaagcactctcagttcattggataccccattactctgtattag

SEQ ID NO: 96763 - DNA, 465 bp, Artificial Sequence
  derived and/or modified sequence
atggacagctgcgacgagctgatccccgagtacctgaacttcatcagaggcgtggtggacagcgaggacctgcccctgaacatcagcagagagatgctgcagcagagcaagatcctgaaggtgatcagaaagaacatcgtgaagaagtgcctggagctgttcagcgagctggccgaggacaaggagaactacaagaagttctacgaggccttcagcaagaacctgaagctgggcatccacgaggacagcaccaacagaagaagactgagcgagctgctgagataccacaccagccagagcggcgacgagatgaccagcctgagcgagtacgtgagcagaatgaaggagacccagaagagcatctactacatcaccggcgagagcaaggagcaggtgtgcccctgccccacctggctgcccctgctggtgagcagcgtgttcttccccctgctgagcctgtgctag

SEQ ID NO: 96764 - DNA, 489 bp, Artificial Sequence
  derived and/or modified sequence
atggacagctgcgacgagctgatccccgagtacctgaacttcatcagaggcgtggtggacagcgaggacctgcccctgaacatcagcagagagatgctgcagcagagcaagatcctgaaggtgatcagaaagaacatcgtgaagaagtgcctggagctgttcagcgagctggccgaggacaaggagaactacaagaagttctacgaggccttcagcaagaacctgaagctgggcatccacgaggacagcaccaacagaagaagactgagcgagctgctgagataccacaccagccagagcggcgacgagatgaccagcctgagcgagtacgtgagcagaatgaaggagacccagaagagcatctactacatcaccggcgagagcaaggagcaggtggccaacagcgccttcgtggagagatgcccctgccccacctggctgcccctgctggtgagcagcgtgttcttccccctgctgagcctgtgctag

SEQ ID NO: 96765 - DNA, 552 bp, Artificial Sequence
  derived and/or modified sequence
atggacagctgcgacgagctgatccccgagtacctgaacttcatcagaggcgtggtggacagcgaggacctgcccctgaacatcagcagagagatgctgcagcagagcaagatcctgaaggtgatcagaaagaacatcgtgaagaagtgcctggagctgttcagcgagctggccgaggacaaggagaactacaagaagttctacgaggccttcagcaagaacctgaagctgggcatccacgaggacagcaccaacagaagaagactgagcgagctgctgagataccacaccagccagagcggcgacgagatgaccagcctgagcgagtacgtgagcagaatgaaggagacccagaagagcatctactacatcaccggcagcccctgctggtgcctggtgttcttcagcctgagctgcccctgcgtggagggcagcaagctgagagtgagcagccccatccccagcctgctgctgaccgccggcctggacgtggtgtactgcggcctgttctacttcctgcacttcgtgctgaagctgaagtacgccaagtag

SEQ ID NO: 96766 - DNA, 429 bp, Artificial Sequence
  derived and/or modified sequence
tgattcatcagaggcgtggtggacagcgaggacctgcccctgaacatcagcagagagatgctgcagcagagcaagatcctgaaggtgatcagaaagaacatcgtgaagaagtgcctggagctgttcagcgagctggccgaggacaaggagaactacaagaagttctacgaggccttcagcaagaacctgaagctgggcatccacgaggacagcaccaacagaagaagactgagcgagctgctgagataccacaccagccagagcggcgacgagatgaccagcctgagcgagtacgtgagcagaatgaaggagacccagaagagcatctactacatcaccggcgagagcaaggagcaggtgtgcccctgccccacctggctgcccctgctggtgagcagcgtgttcttccccctgctgagcctgtgctag

SEQ ID NO: 96767 - DNA, 453 bp, Artificial Sequence
  derived and/or modified sequence
tgattcatcagaggcgtggtggacagcgaggacctgcccctgaacatcagcagagagatgctgcagcagagcaagatcctgaaggtgatcagaaagaacatcgtgaagaagtgcctggagctgttcagcgagctggccgaggacaaggagaactacaagaagttctacgaggccttcagcaagaacctgaagctgggcatccacgaggacagcaccaacagaagaagactgagcgagctgctgagataccacaccagccagagcggcgacgagatgaccagcctgagcgagtacgtgagcagaatgaaggagacccagaagagcatctactacatcaccggcgagagcaaggagcaggtggccaacagcgccttcgtggagagatgcccctgccccacctggctgcccctgctggtgagcagcgtgttcttccccctgctgagcctgtgctag

SEQ ID NO: 96768 - DNA, 516 bp, Artificial Sequence
  derived and/or modified sequence
tgattcatcagaggcgtggtggacagcgaggacctgcccctgaacatcagcagagagatgctgcagcagagcaagatcctgaaggtgatcagaaagaacatcgtgaagaagtgcctggagctgttcagcgagctggccgaggacaaggagaactacaagaagttctacgaggccttcagcaagaacctgaagctgggcatccacgaggacagcaccaacagaagaagactgagcgagctgctgagataccacaccagccagagcggcgacgagatgaccagcctgagcgagtacgtgagcagaatgaaggagacccagaagagcatctactacatcaccggcagcccctgctggtgcctggtgttcttcagcctgagctgcccctgcgtggagggcagcaagctgagagtgagcagccccatccccagcctgctgctgaccgccggcctggacgtggtgtactgcggcctgttctacttcctgcacttcgtgctgaagctgaagtacgccaagtag

SEQ ID NO: 96769 - DNA, 507 bp, Artificial Sequence
  derived and/or modified sequence
atgcccgaggaggtgcaccacggcgaggaggaggtggagaccttcgccttccaggccgagatcgcccagctgatgagcctgatcatcaacaccttctacagcaacaaggagatcttcctgagagagctgatcagcaacgccagcgacgccctggacaagatcagatacgagagcctgaccgaccccagcaagctggacagcggcaaggagctgaagatcgacatcagcatgatcggccagttcggcgtgggcttctacagcgcctacctggtggccgagaaggtggtggtgatcaccaagcacaacgacgacgagcagtacgcctgggagagcagcgccggcggcagcttcaccgtgagagccgaccacggcgagcccatcggcagaggcaccaaggtgatcctgcacctgaaggaggaccagaccgagtacctggaggagagaagagtgaaggaggtggtgaagaagcacagccagttcatcggctaccccatcaccctgtactag

SEQ ID NO: 96770 - protein, 162 aa, Artificial Sequence
  derived and/or modified sequence
MDSCDELIPEYLNFIRGVVDSEDLPLNISREMLQQSKILKVIRKNIVKKCLELFSELAEDKENYKKFYEAFSKNLKLGIHEDSTNRRRLSELLRYHTSQSGDEMTSLSEYVSRMKETQKSIYYITGESKEQVANSAFVERCPCPTWLPLLVSSVFFPLLSLC

SEQ ID NO: 96771 - DNA, 1616 bp, Artificial Sequence
  derived and/or modified sequence
ctctcgagtcactccggcgcagtgttgggactgtctgggtatcggaaagcaagcctacgttgctcactattacgtataatccttttcttttcaagatgcctgaggaagtgcaccatggagaggaggaggtggagacttttgcctttcaggcagaaattgcccaactcatgtccctcatcatcaataccttctattccaacaaggagattttccttcgggagttgatctctaatgcttctgatgccttggacaagattcgctatgagagcctgacagacccttcgaagttggacagtggtaaagagctgaaaattgacatcatccccaaccctcaggaacgtaccctgactttggtagacacaggcattggcatgaccaaagctgatctcataaataatttgggaaccattgccaagtctggtactaaagcattcatggaggctcttcagtttggtgttggcttttattctgcctacttggtggcagagaaagtggttgtgatcacaaagcacaacgatgatgaacagtatgcttgggagtcttctgctggaggttccttcactgtgcgtgctgaccatggtgagcccattggcaggggtaccaaagtgatcctccatcttaaagaagatcagacagagtacctagaagagaggcgggtcaaagaagtagtgaagaagcattctcagttcataggctatcccatcaccctttatttggagaaggaacgagagaaggaaattagtgatgatgaggcagaggaagagaaaggtgagaaagaagaggaagataaagatgatgaagaaaaacccaagatcgaagatgtgggttcagatgaggaggatgacagcggtaaggataagaagaagaaaactaagaagatcaaagagaaatacattgatcaggaagaactaaacaagaccaagcctatttggaccagaaaccctgatgacatcacccaagaggagtatggagaattctacaagagcctcactaatgactgggaagaccacttggcagtcaagcacttttctgtagaaggtcagttggaattcagggcattgctatttattcctcgtcgggctccctttgacctttttgagaacaagaagaaaaagaacaacatcaaactctatgtccgccgtgtgttcatcatggacagctgtgatgagttgataccagagtatctcaattttatccgtggtgtggttgactctgaggatctgcccctgaacatctcccgagaaatgctccagcagagcaaaatcttgaaagtcattcgcaaaaacattgttaagaagtgccttgagctcttctctgagctggcagaagacaaggagaattacaagaaattctatgaggcattctctaaaaatctcaagcttggaatccacgaagactccactaaccgccgccgcctgtctgagctgctgcgctatcatacctcccagtctggagatgagatgacatctctgtcagagtatgtttctcgcatgaaggagacacagaagtccatctattacatcactggtgagagcaaagagcaggtgtgcccctgtcccacctggctccccctgctggtgtctagtgtttttttccctctcctgtccttgtgttga

SEQ ID NO: 96772 - DNA, 1640 bp, Artificial Sequence
  derived and/or modified sequence
ctctcgagtcactccggcgcagtgttgggactgtctgggtatcggaaagcaagcctacgttgctcactattacgtataatccttttcttttcaagatgcctgaggaagtgcaccatggagaggaggaggtggagacttttgcctttcaggcagaaattgcccaactcatgtccctcatcatcaataccttctattccaacaaggagattttccttcgggagttgatctctaatgcttctgatgccttggacaagattcgctatgagagcctgacagacccttcgaagttggacagtggtaaagagctgaaaattgacatcatccccaaccctcaggaacgtaccctgactttggtagacacaggcattggcatgaccaaagctgatctcataaataatttgggaaccattgccaagtctggtactaaagcattcatggaggctcttcagtttggtgttggcttttattctgcctacttggtggcagagaaagtggttgtgatcacaaagcacaacgatgatgaacagtatgcttgggagtcttctgctggaggttccttcactgtgcgtgctgaccatggtgagcccattggcaggggtaccaaagtgatcctccatcttaaagaagatcagacagagtacctagaagagaggcgggtcaaagaagtagtgaagaagcattctcagttcataggctatcccatcaccctttatttggagaaggaacgagagaaggaaattagtgatgatgaggcagaggaagagaaaggtgagaaagaagaggaagataaagatgatgaagaaaaacccaagatcgaagatgtgggttcagatgaggaggatgacagcggtaaggataagaagaagaaaactaagaagatcaaagagaaatacattgatcaggaagaactaaacaagaccaagcctatttggaccagaaaccctgatgacatcacccaagaggagtatggagaattctacaagagcctcactaatgactgggaagaccacttggcagtcaagcacttttctgtagaaggtcagttggaattcagggcattgctatttattcctcgtcgggctccctttgacctttttgagaacaagaagaaaaagaacaacatcaaactctatgtccgccgtgtgttcatcatggacagctgtgatgagttgataccagagtatctcaattttatccgtggtgtggttgactctgaggatctgcccctgaacatctcccgagaaatgctccagcagagcaaaatcttgaaagtcattcgcaaaaacattgttaagaagtgccttgagctcttctctgagctggcagaagacaaggagaattacaagaaattctatgaggcattctctaaaaatctcaagcttggaatccacgaagactccactaaccgccgccgcctgtctgagctgctgcgctatcatacctcccagtctggagatgagatgacatctctgtcagagtatgtttctcgcatgaaggagacacagaagtccatctattacatcactggtgagagcaaagagcaggtggccaactcagcttttgtggagcgatgcccctgtcccacctggctccccctgctggtgtctagtgtttttttccctctcctgtccttgtgttga

SEQ ID NO: 96773 - DNA, 1703 bp, Artificial Sequence
  derived and/or modified sequence
ctctcgagtcactccggcgcagtgttgggactgtctgggtatcggaaagcaagcctacgttgctcactattacgtataatccttttcttttcaagatgcctgaggaagtgcaccatggagaggaggaggtggagacttttgcctttcaggcagaaattgcccaactcatgtccctcatcatcaataccttctattccaacaaggagattttccttcgggagttgatctctaatgcttctgatgccttggacaagattcgctatgagagcctgacagacccttcgaagttggacagtggtaaagagctgaaaattgacatcatccccaaccctcaggaacgtaccctgactttggtagacacaggcattggcatgaccaaagctgatctcataaataatttgggaaccattgccaagtctggtactaaagcattcatggaggctcttcagtttggtgttggcttttattctgcctacttggtggcagagaaagtggttgtgatcacaaagcacaacgatgatgaacagtatgcttgggagtcttctgctggaggttccttcactgtgcgtgctgaccatggtgagcccattggcaggggtaccaaagtgatcctccatcttaaagaagatcagacagagtacctagaagagaggcgggtcaaagaagtagtgaagaagcattctcagttcataggctatcccatcaccctttatttggagaaggaacgagagaaggaaattagtgatgatgaggcagaggaagagaaaggtgagaaagaagaggaagataaagatgatgaagaaaaacccaagatcgaagatgtgggttcagatgaggaggatgacagcggtaaggataagaagaagaaaactaagaagatcaaagagaaatacattgatcaggaagaactaaacaagaccaagcctatttggaccagaaaccctgatgacatcacccaagaggagtatggagaattctacaagagcctcactaatgactgggaagaccacttggcagtcaagcacttttctgtagaaggtcagttggaattcagggcattgctatttattcctcgtcgggctccctttgacctttttgagaacaagaagaaaaagaacaacatcaaactctatgtccgccgtgtgttcatcatggacagctgtgatgagttgataccagagtatctcaattttatccgtggtgtggttgactctgaggatctgcccctgaacatctcccgagaaatgctccagcagagcaaaatcttgaaagtcattcgcaaaaacattgttaagaagtgccttgagctcttctctgagctggcagaagacaaggagaattacaagaaattctatgaggcattctctaaaaatctcaagcttggaatccacgaagactccactaaccgccgccgcctgtctgagctgctgcgctatcatacctcccagtctggagatgagatgacatctctgtcagagtatgtttctcgcatgaaggagacacagaagtccatctattacatcactggctccccctgctggtgtctagtgtttttttccctctcctgtccttgtgttgaaggcagtaaactaagggtgtcaagccccattccctctctactcttgacagcaggattggatgttgtgtattgtggtttattttattttcttcattttgttctgaaattaaagtatgcaaaataa

SEQ ID NO: 96774 - protein, 426 aa, Artificial Sequence
  derived and/or modified sequence
MAHLRGFANQHSRVDPEELFTKLDRIGKGSFGEVYKGIDNHTKEVVAIKIIDLEEAEDEIEDIQQEITVLSQCDSPYITRYFGSYLKSTKLWIIMEYLGGGSALDLLKPGPLEETYIATILREILKGLDYLHSERKIHRDIKAANVLLSEQGDVKLADFGVAGQLTDTQIKRNTFVGTPFWMAPEVIKQSAYDFKADIWSLGITAIELAKGEPPNSDLHPMRVLFLIPKNSPPTLEGQHSKPFKEFVEACLNKDPRFRPTAKELLKHKFITRYTKKTSFLTELIDRYKRWKSEGHGEESSSEDSDIDGEAEDGEQGPIWTFPPTIRPSPHSKLHKGTALHSSQKPAEPVKRQPRSQCLSTLVRPVFGELKEKHKQSGGSVGALEELENAFSLAEESCPGISDKLMVHLVERVQRFSHNRNHLTSTR

SEQ ID NO: 96775 - protein, 336 aa, Artificial Sequence
  derived and/or modified sequence
MEYLGGGSALDLLKPGPLEETYIATILREILKGLDYLHSERKIHRDIKAANVLLSEQGDVKLADFGVAGQLTDTQIKRNTFVGTPFWMAPEVIKQSAYDFKADIWSLGITAIELAKGEPPNSDLHPMRVLFLIPKNSPPTLEGQHSKPFKEFVEACLNKDPRFRPTAKELLKHKFITRYTKKTSFLTELIDRYKRWKSEGHGEESSSEDSDIDGEAEDGEQGPIWTFPPTIRPSPHSKLHKGTALHSSQKPAEPVKRQPRSQCLSTLVRPVFGEVFSQLKEKHKQSGGSVGALEELENAFSLAEESCPGISDKLMVHLVERVQRFSHNRNHLTSTR

SEQ ID NO: 96776 - DNA, 1281 bp, Artificial Sequence
  derived and/or modified sequence
atggctcacctgaggggctttgccaaccagcactcacgcgttgacccagaagaactgtttacaaagttagaccggattggcaagggcagcttcggagaagtgtataaaggtattgacaatcacactaaggaagtggtcgcgattaaaatcatagacctcgaagaagctgaggacgagatcgaagacattcagcaagagatcaccgtgttgagccaatgtgattcaccgtacattacccgatacttcgggagttacttaaagtctaccaagctgtggattattatggagtacctaggaggaggttccgcgcttgatttgcttaaacctgggcctctggaagagacctacatcgcaaccattctcagggaaatcttgaagggactggactatttacactctgaacgcaagatccatcgggacataaaggccgccaatgttctcctgagtgaacagggggacgtgaaactggctgacttcggcgttgccgggcagctgacagatacacagatcaaacgcaatacctttgttgggactcccttttggatggcacccgaagtcatcaagcagtctgcctatgatttcaaagctgacatttggtctcttggcatcactgccatcgagctggcaaaaggcgagccaccaaattctgatttgcatccaatgcgggtactgtttcttattcctaaaaatagtcccccaacattggaaggccagcacagcaagccctttaaggagttcgtggaggcatgcctgaacaaggatccgcggtttcgccccaccgctaaggagttgttgaaacacaagtttataactcgctataccaaaaaaacgtcttttctgaccgaactgattgataggtataagcgttggaagtcggaaggtcacggggaggaaagctcgagcgaggactcagatatcgacggtgaagccgaagatggggagcagggccctatctggactttccctcccaccattcgacctagcccgcactctaagcttcataaaggaacagccctccattcatcgcagaaacccgcggaaccagtaaagaggcagcctcgctcacagtgcctgtccacgctcgttcgtcccgtgttcggggagttaaaggagaagcataaacagagtggcggctctgtgggggccctggaagagctggagaacgccttctctctggctgaagagtcctgcccggggatctcggacaagctgatggtgcatctggtcgagcgagtgcagaggttctcacacaaccggaaccatctaacctcaactaggtag

SEQ ID NO: 96777 - DNA, 1281 bp, Artificial Sequence
  derived and/or modified sequence
atggcacaccttcggggctttgcaaatcaacactcccgggttgatccggaagaacttttcacgaagctggacagaattgggaagggtagtttcggagaggtatacaagggaatcgacaatcatactaaagaggtagtcgcaattaaaataatcgatctggaggaagccgaggacgagatcgaggacattcagcaagaaattactgttctgagccagtgcgactccccatacataactagatatttcggaagttatctaaaatccaccaagttgtggattatcatggagtacctgggaggaggatccgccctcgacttactcaagcctggtcctctagaagagacatacatcgctacaattctgcgcgagatcctgaaagggctagactacctgcatagtgagcgcaaaattcaccgcgacatcaaagcggctaatgtactgttaagcgagcaaggcgatgtgaaattggctgattttggcgtagcaggacagctgaccgatacacaaatcaagaggaatacctttgttggaaccccgttctggatggcccctgaggttattaaacagtctgcatatgacttcaaggctgatatttggtctctcggaatcaccgcaatagaactggctaaaggtgaaccacctaactccgacctgcaccccatgagggtattgttccttatccctaagaactccccacccacactggagggccagcactccaagccgttcaaagagtttgttgaggcttgtttaaataaagatccaagatttcgccccacagctaaggagctgctgaagcacaagttcattacaaggtacaccaaaaagaccagttttctcacggagcttattgacagatacaaacgctggaagtcggaaggacacggcgaggagagttcttcagaggatagtgacattgatggcgaggccgaggatggggaacaggggcccatctggacttttccaccaacgatacggcctagcccacacagcaagttacataaaggcaccgctctgcacagctcacaaaagcccgccgagcctgttaagcggcaacccagaagccaatgtctgagtacccttgtgagacctgtcttcggtgaattaaaggaaaaacacaagcagagcggagggagcgtgggggctttggaagaactagaaaacgctttcagcctggctgaggaatcatgcccgggtatctccgataagctgatggtccatctggtggagcgagttcagagattcagtcacaaccgtaaccacctgacatcaacccggtag

SEQ ID NO: 96778 - DNA, 1281 bp, Artificial Sequence
  derived and/or modified sequence
atggctcatcttagagggttcgctaatcagcattccagagtcgaccccgaagagctgtttaccaaattggaccgaatcggtaagggctctttcggggaggtttataagggcatagacaaccatactaaggaggtggtagccataaagatcatagatttggaggaagccgaagatgagatagaagacatccagcaggagataacagtgctgtctcagtgtgacagcccctatattacccggtacttcggctcatacctgaagagtacaaagctctggatcataatggagtatctggggggagggagcgcactggaccttttaaagccgggccctctagaggagacctacatcgccactattctgcgggagatcctcaagggactggattacctgcattccgagagaaaaattcatagagacatcaaggccgccaacgttttgctatctgagcagggtgatgttaagctggcagactttggagtggctggccagctgaccgacacacaaataaagagaaatacatttgtaggcacccctttctggatggcccctgaggtcatcaaacaatcagcatacgattttaaagcagacatttggtccttgggtatcacagccattgaattggctaaaggggagcctcccaatagcgatctgcacccaatgcgagtgctgtttcttatcccaaaaaactctcccccaactttggagggccagcactcgaagcctttcaaagagttcgtcgaggcatgcctgaataaggatccccggttcaggccaactgcaaaagagctgctgaagcacaaattcataacgcgttacacgaagaaaactagtttcctgactgagctcattgatcggtataagagatggaagtcagagggccacggcgaggaaagctcctcagaagactcagatatcgatggagaggccgaggatggcgaacagggacctatctggacgttcccccctaccatcagaccatcgccacacagcaaactgcacaaaggcaccgcactccatagctcacagaaacctgctgaaccggtcaagcgccaaccccggtctcagtgtctgtctacactagttcgtccagtgttcggtgagctcaaggagaagcataagcagagtggtgggtctgtgggtgccctggaagaactggagaacgcctttagcctcgctgaagagagctgtcccgggatcagcgataagttgatggtgcacctcgtcgaacgcgtacagcggtttagtcacaatcgcaaccaccttacaagtactcggtag

SEQ ID NO: 96779 - DNA, 1281 bp, Artificial Sequence
  derived and/or modified sequence
atggcccacctgcggggctttgccaaccagcacagccgggtggaccctgaggagctgttcaccaagctggaccgcatcggcaagggcagctttggagaggtgtacaagggcatcgacaaccacaccaaggaggtggtggccatcaagatcatcgacctggaggaggctgaagatgaaattgaggacatccagcaggagatcaccgtgctgagccagtgtgacagcccctacatcacccgctacttcggcagctacctgaagagcaccaagctgtggatcatcatggagtacctgggcggcggcagcgccctggacctgctgaagccaggccccctggaggagacctacatcgccaccatcctgcgggagatcctgaagggcctggactacctgcacagcgagaggaagatccaccgggacatcaaggccgccaacgtgctgctgtctgagcagggagatgtgaagctggccgactttggagtggccggccagctgacagacacccagatcaagaggaacacctttgtgggcacccccttctggatggcccctgaggtgatcaagcagagcgcctatgacttcaaggctgacatctggagcctgggcatcacagccatcgagctggccaagggggagccccccaacagcgacctgcaccccatgagggtgctcttcctgatccccaagaacagcccccccaccctggagggccagcacagcaagcccttcaaggagtttgtggaggcctgcctgaacaaggacccccgcttccggcccacagccaaggagctgctgaagcacaagttcatcacccgctacaccaagaagaccagcttcctgacagagctgattgaccgctacaagcgctggaagtctgagggccatggagaggagagcagcagcgaggacagcgacattgatggagaggctgaagatggagagcagggccccatctggaccttcccccccaccatccggcccagcccccacagcaagctgcacaagggcacagccctgcacagcagccagaagccagctgagcctgtgaagaggcagcccaggagccagtgcctgagcaccctggtgcggcctgtgtttggagagctgaaggagaagcacaagcagagcggcggctctgtgggcgccctggaggagctggagaatgccttcagcctggccgaggagagctgccccggcatcagtgacaagctgatggtgcacctggtggagcgggtgcagcgcttcagccacaacagaaaccacctgaccagcaccaggtag

SEQ ID NO: 96780 - DNA, 1281 bp, Artificial Sequence
  derived and/or modified sequence
atggcccacctgcggggcttcgccaaccagcacagccgggtggaccctgaggaactgtttactaaactagataggataggaaaaggctccttcggcgaggtgtacaaggggatcgataaccatacaaaggaggtggttgctatcaaaatcattgatttggaagaagcagaggacgaaatcgaagacatccaacaagaaatcaccgttttgtcccaatgcgactctccgtatatcacacgttatttcggatcctacctaaaatccacaaagctctggattataatggaatacctcggcggtggctcggcattggacctcttgaagccagggccactcgaggaaacgtatatcgccacaattctgagagagatccttaaggggctggactatttgcactccgaacggaaaatccacagagatataaaggcagccaatgtgcttctgagtgaacagggcgatgtgaaactggcagacttcggggtggcgggacagctcacagatacacaaatcaagagaaacacctttgtgggcactccattctggatggcacctgaagtgattaaacagtcagcctacgatttcaaggccgacatctggtcactcggcatcaccgccattgaactcgctaaaggcgagccacccaattctgacctgcatcccatgcgcgtgctgttcttgataccaaagaacagccctccaactctggaagggcagcacagtaaacccttcaaagagttcgtggaagcttgtctgaacaaagacccgagattccggcctacggctaaagagctcctgaaacacaaattcattacacgatatacgaagaaaacatccttccttaccgagttgattgacaggtataaacggtggaaaagcgaagggcacggtgaagaatcctcgtcagaggactccgacatcgatggcgaggccgaggatggcgagcaaggcccaatatggaccttcccacctacgatcagaccatcacctcattccaagctgcacaaagggactgctctgcacagtagccaaaaaccagcggagccagtcaaacgacaaccccgctcccagtgtttatccacactcgtccgtccagtcttcggcgaattgaaggagaagcacaaacagagcggagggtctgtgggggctctagaagagctggaaaacgcctttagccttgccgaggagagctgtcctggtatttccgacaaactaatggtacacctggttgaacgggtgcagagattcagtcacaaccgaaatcacctcactagtactcgttag

SEQ ID NO: 96781 - DNA, 1281 bp, Artificial Sequence
  derived and/or modified sequence
atggcccacctgcggggcttcgccaaccagcacagccgggtggaccccgaagaactgttcactaagttggaccggatcggcaaagggtcattcggtgaagtttacaagggaattgacaaccatactaaagaggtggtggcaatcaagataattgacttggaagaggcagaagacgagatcgaagacatccagcaagagatcacagtactgagccagtgcgactccccttacatcacccgttactttggttcatacctgaagtccactaagttgtggattatcatggagtatctgggaggcggaagcgccctggacttacttaaaccaggccccctcgaagaaacctatatcgccacaatcttaagagagatcctgaagggactcgattatctccacagtgagcgcaaaatacacagggatattaaggccgcaaacgtgctgctttccgagcagggcgatgtgaagctggctgatttcggggtcgccggccagctcacagacactcaaattaagcgtaacacattcgtcggaacgccattttggatggctccggaagtgataaaacaatctgcctacgacttcaaggccgacatctggtccctgggtatcaccgccatcgaattagcgaagggagagccccccaattccgatcttcaccccatgcgcgtattgtttctgattcctaagaattccccaccaactctggaagggcagcatagtaagccgtttaaggagttcgttgaagcctgtctcaataaggatccaaggttccgtccgacagcgaaggagctgttgaaacataaattcatcacgcggtataccaaaaaaacttcttttcttaccgagcttatcgatagatataaacggtggaagagcgaaggccacggagaggaatcatcctctgaggactcagacattgatggcgaggccgaagacggcgaacaggggcccatctggaccttccctccaaccattaggccgagccctcacagcaagctacataaaggaaccgccctgcattcatctcagaaaccagcagagcccgttaaaaggcagccccggagtcagtgcctttccactttagttcggcccgtctttggggagctgaaagagaagcacaagcagtccgggggaagcgtcggggcactggaggaactggagaacgccttctctctcgctgaagaatcgtgccccgggatttcagacaagctcatggtgcatctggttgaaagggtgcaacgcttttctcacaacaggaatcacctaacatcaaccagatag

SEQ ID NO: 96782 - DNA, 1281 bp, Artificial Sequence
  derived and/or modified sequence
atggcccacctgcggggcttcgccaaccagcacagccgggtggaccctgaagagctgtttacgaagctcgaccgaatcgggaaagggtccttcggggaggtttacaaaggaatcgacaaccacacgaaggaagtagtggcaatcaaaattattgatcttgaggaggccgaagatgagattgaggatattcagcaggagatcacagtgttatcccagtgtgattccccatacatcactaggtatttcggcagttacctgaaatctacaaagttatggataattatggaatatcttgggggtggaagtgccctggatctgctcaagcccggtcccctggaggagacatacatagctacaatcctgcgagagattctgaagggactcgattatctgcactcagagaggaaaatccaccgagatatcaaagccgcaaacgtgctgctgagtgaacagggtgacgtgaaattggcagacttcggagttgccggacagctgactgacacacagattaagcggaatacatttgtcgggaccccattttggatggctcctgaagtgattaaacaaagcgcttacgatttcaaagccgatatctggagccttgggataacagccattgagttggccaagggggagccccctaacagcgatctccatcccatgagagtacttttcttaattcctaagaattcccccccgacccttgaagggcagcactcaaagccttttaaggagtttgtagaagcctgtttaaataaagaccctaggtttaggcctaccgcaaaggaactgctgaagcataaatttatcactcggtacaccaaaaagacatctttcctgactgaactgattgatcgatacaagcgttggaagtctgaaggtcacggcgaggagagctcgagcgaagattccgacatcgacggcgaagcagaggacggtgaacagggccccatctggacattcccacctaccatccgtcctagcccacacagtaagttgcacaaaggtactgccttgcacagcagccagaaacccgccgagccagtgaagcgtcagcccagatctcagtgtctcagtacgctcgtgcgccccgtgttcggcgagctaaaggagaagcacaagcagtcgggcggctcggtgggagcccttgaggagctggaaaatgcgttcagccttgcagaggaaagctgtccaggtataagcgataaattgatggtgcacctggttgaacgcgttcaacgcttttcccacaacaggaaccacctgactagtaccagatag

SEQ ID NO: 96783 - DNA, 2251 bp, Artificial Sequence
  derived and/or modified sequence
gggacaccggggcgggggcaccgggaggaagctgccttggaagaggtgggggcggcgacgggaggggcggcgagcccccgggagcctgggcgttaggcccgggcgtggcggggccccggcggcctggggggtctcctgggcccccccccacccatggagcccgccgccccggaggtcggtctcagatgactgaactgggcaccgagcgcccctggtgtccctcgcagtggactgacgccgcaggggcgagctagccggctccgcgcctctccgcgggatccagacgcctcctggggctgctggcggagggtctgaggcggcgcggccatggctcacctccggggatttgccaaccagcactctcgagtggaccctgaggagctcttcaccaagctcgaccgcattggcaagggctcgtttggggaggtctacaagggcatcgataaccacacaaaggaggtggtggccatcaagatcatcgacctggaggaggccgaggatgagatcgaggacatccagcaggagatcactgtcctcagtcagtgcgacagcccctacatcacccgctactttggctcctacctaaagagcaccaagctatggatcatcatggagtacctgggcggcggctcagcactggacttgcttaaaccaggtcccctggaggagacatacattgccacgatcctgcgggagattctgaagggcctggattatctgcactccgaacgcaagatccaccgagacatcaaagctgccaacgtgctactctcggagcagggtgacgtgaagctggcggactttggggtagcagggcagctcacagacacgcagattaagaggaacacattcgtgggcacccccttctggatggcacctgaggtcatcaagcagtcggcctacgacttcaaggctgacatctggtccctggggatcacagccatcgagctggccaagggggagcctccaaactctgacctccaccccatgcgcgtcctgttcctgattcccaagaacagcccacccacactggagggccagcacagcaagcccttcaaggagttcgtggaggcctgcctcaacaaagacccccgattccggcccacggccaaggagctcctgaagcacaagttcatcacacgctacaccaagaagacctccttcctcacggagctcatcgaccgctataagcgctggaagtcagaggggcatggcgaggagtccagctctgaggactctgacattgatggcgaggcggaggacggggagcagggccccatctggacgttcccccctaccatccggccgagtccacacagcaagcttcacaaggggacggccctgcacagttcacagaagcctgcggagcccgtcaagaggcagccgaggtcccagtgcctgtccacgctggtccggcccgtcttcggagagctcaaagagaagcacaagcagagcggcgggagcgtgggtgcgctggaggagctggagaacgccttcagcctggccgaggagtcctgccccggcatctcagacaagctgatggtgcacctggtggagcgagtgcagaggttttcacacaacagaaaccacctgacatccacccgctgaagcgcactgctgttcagataggggacggaaggtcgtttgtttttgttctgagctccataagaactgtgctgacttggaaggtgccctgtgctatgtcgtgcctgcagggacacgtcggatcccgtgggcctcacatgccaggtcaccaggtcaccgtctccttccacccctgcagtgtgctgttgtgcacgtcagggacgctgttctctatgcccactgccctcctccctctcctggcccagcagtattgctcacgggggctccagccgccggcgtggccctcatgagctacgcctgggtcttctgcagactcatgcagccctatggccgctcagaccaaggcgcagagcaactatcagggcagctctgcctcctcctcccatgaggtggggagaggcaacagggcagcccccagaggagtgtcctggccgctgtcctcccggggcccatgatggccatagatttgccttgtggtgttggatcaggtactgtgtctgctcataagtacttgtgtcatccagaatgttttgttttttaagaaaattgaattacttgtttcctgaaatattctgaggttaatatgttagttttcatagaacattgagaggcccctgccactttcaataaagacctgacttggaga

SEQ ID NO: 96784 - DNA, 2210 bp, Artificial Sequence
  derived and/or modified sequence
aacgccagcaggcttccgggcccggagtgggcggtgggactcggggtcccagagagccgtgcgcgggccgcgacgccgagcaccgccctcgccgtcgcctccgggctttctccggtcgctgccgccaccaccgttgcttcgcgggctgggaggcccggggtccccgggcgaacagaggctgcggtggactgacgccgcaggggcgagctagccggctccgcgcctctccgcgggatccagacgcctcctggggctgctggcggagggtctgaggcggcgcggccatggctcacctccggggatttgccaaccagcactctcgagtggaccctgaggagctcttcaccaagctcgaccgcattggcaagggctcgtttggggaggtctacaagggcatcgataaccacacaaaggaggtggtggccatcaagatcatcgacctggaggaggccgaggatgagatcgaggacatccagcaggagatcactgtcctcagtcagtgcgacagcccctacatcacccgctactttggctcctacctaaagagcaccaagctatggatcatcatggagtacctgggcggcggctcagcactggacttgcttaaaccaggtcccctggaggagacatacattgccacgatcctgcgggagattctgaagggcctggattatctgcactccgaacgcaagatccaccgagacatcaaagctgccaacgtgctactctcggagcagggtgacgtgaagctggcggactttggggtagcagggcagctcacagacacgcagattaagaggaacacattcgtgggcacccccttctggatggcacctgaggtcatcaagcagtcggcctacgacttcaaggctgacatctggtccctggggatcacagccatcgagctggccaagggggagcctccaaactctgacctccaccccatgcgcgtcctgttcctgattcccaagaacagcccacccacactggagggccagcacagcaagcccttcaaggagttcgtggaggcctgcctcaacaaagacccccgattccggcccacggccaaggagctcctgaagcacaagttcatcacacgctacaccaagaagacctccttcctcacggagctcatcgaccgctataagcgctggaagtcagaggggcatggcgaggagtccagctctgaggactctgacattgatggcgaggcggaggacggggagcagggccccatctggacgttcccccctaccatccggccgagtccacacagcaagcttcacaaggggacggccctgcacagttcacagaagcctgcggagcccgtcaagaggcagccgaggtcccagtgcctgtccacgctggtccggcccgtcttcggagagctcaaagagaagcacaagcagagcggcgggagcgtgggtgcgctggaggagctggagaacgccttcagcctggccgaggagtcctgccccggcatctcagacaagctgatggtgcacctggtggagcgagtgcagaggttttcacacaacagaaaccacctgacatccacccgctgaagcgcactgctgttcagataggggacggaaggtcgtttgtttttgttctgagctccataagaactgtgctgacttggaaggtgccctgtgctatgtcgtgcctgcagggacacgtcggatcccgtgggcctcacatgccaggtcaccaggtcaccgtctccttccacccctgcagtgtgctgttgtgcacgtcagggacgctgttctctatgcccactgccctcctccctctcctggcccagcagtattgctcacgggggctccagccgccggcgtggccctcatgagctacgcctgggtcttctgcagactcatgcagccctatggccgctcagaccaaggcgcagagcaactatcagggcagctctgcctcctcctcccatgaggtggggagaggcaacagggcagcccccagaggagtgtcctggccgctgtcctcccggggcccatgatggccatagatttgccttgtggtgttggatcaggtactgtgtctgctcataagtacttgtgtcatccagaatgttttgttttttaagaaaattgaattacttgtttcctgaaatattctgaggttaatatgttagttttcatagaacattgagaggcccctgccactttcaataaagacctgacttggagaca

SEQ ID NO: 96785 - DNA, 1281 bp, Artificial Sequence
  derived and/or modified sequence
atggctcatctgaggggcttcgccaatcaacactcacgcgtcgacccggaggagctgtttaccaagcttgaccgaatcggaaaaggtagcttcggggaagtctataagggcattgataatcacacgaaggaagtcgtcgccattaagatcatcgaccttgaggaggccgaagacgagatcgaggatattcagcaggaaatcaccgtcctctctcagtgcgactccccttacattacccggtattttggaagttacttgaaatcaacaaaactttggataatcatggagtacctcggaggagggtccgcattggatctcctcaaaccaggacccctcgaggagacatatattgctaccatcctgagggaaatcttgaagggtcttgactacctccattctgagcgtaaaatacatagggacatcaaagccgctaatgtgcttctctctgagcagggtgatgttaaattggccgattttggagtcgctggccagctcaccgatacacagatcaaacgaaatacatttgtgggtactccgttctggatggcccctgaggttatcaagcaaagtgcttacgatttcaaagcagacatatggtcgctggggatcacagcaatcgagttggccaagggggaaccgcctaactccgacctgcatccaatgcgcgtgctttttcttattcctaaaaatagcccaccaaccctcgaaggccagcactctaagcccttcaaggaattcgtggaagcatgtcttaacaaggatcccaggttcagacccacagccaaggagctacttaagcacaagtttatcactcgttatactaagaaaacttcattcctgacagaactcatcgaccgatacaaacgatggaaatccgagggtcacggtgaggagtcatcaagtgaggacagcgatattgacggagaggcagaggacggtgagcaggggcctatttggacctttcctccaactatcaggcccagcccccattctaaattgcataagggaacagctctccattcctctcagaaacctgccgagccggtgaaaaggcaacctcgttctcagtgtttgagcacactggtccgtcccgttttcggcgaacttaaagaaaagcacaaacaatcaggtggcagtgtcggggctctagaggaattggagaacgcttttagcttggccgaagaatcttgtccaggtataagcgataagctgatggtgcacctggttgagagagtgcaacgatttagccacaatcgcaaccatctcacttccacccggtag

SEQ ID NO: 96786 - DNA, 1281 bp, Artificial Sequence
  derived and/or modified sequence
atggctcatttgcgaggttttgccaaccagcactcgagggtcgaccctgaggaattgttcaccaagcttgaccgcatcgggaagggctccttcggcgaagtctacaagggtatagacaatcatacaaaggaggtcgtggcaatcaaaattattgacctggaagaagctgaagacgagatcgaagacattcagcaggaaatcacggtattatcccagtgcgattccccatacataaccaggtacttcgggtcatacctgaagtccacaaagctctggatcattatggagtacctgggaggcggaagcgccctggacctgttgaaaccaggtcctcttgaggaaacctacatcgctactattctgcgcgaaatactcaagggcctggattacctccacagtgagaggaaaattcacagagacatcaaggcggctaatgttctgctaagcgagcagggcgatgtcaaactggcggattttggcgtggccggtcagctgacagacacccaaataaagcggaacaccttcgtgggcacccctttctggatggcgccagaagtgatcaaacaaagcgcatacgatttcaaggccgacatatggtcgctggggattacagccattgaactcgccaagggggagccgcctaatagcgatctccatcccatgcgcgtcctctttctcattcccaagaattccccaccgacactcgaaggacagcattctaagcccttcaaggaattcgtcgaggcatgcctaaacaaagatcctagattcaggcccacagccaaggagttgcttaagcacaagttcataactcgctacaccaagaaaaccagcttcctgaccgaactgattgacagatataagaggtggaaatcagaaggacatggcgaggagagttcttctgaggacagtgatatcgacggcgaggccgaggacggtgaacaaggtccgatctggacctttcctcctaccatccggccaagtcctcatagtaagctacacaaggggaccgcattgcattcaagtcagaaacctgcagagcccgtgaaaagacagcccagatctcagtgtctgagcaccctggtgaggcccgttttcggggagctgaaggagaagcataaacagtccggaggctccgttggcgcactggaggagctggagaacgcatttagtctagccgaggagagttgtccaggaatctcagataagctcatggtgcacctcgtggagagggtacagcggttctctcacaaccggaaccaccttaccagtacaagatag

SEQ ID NO: 96787 - DNA, 1281 bp, Artificial Sequence
  derived and/or modified sequence
atggcccacttgcgagggtttgccaatcagcactcacgggtggaccccgaggagctcttcaccaagctggataggatcggtaagggaagttttggagaggtttataaaggcattgataatcacaccaaagaggtggtcgcaattaagatcattgacctggaggaagctgaagacgaaatcgaagatatccaacaggaaatcactgtcctgtctcagtgtgacagcccatatataacacgatatttcggttcctatctgaagtcaacaaagctctggatcatcatggaatatctgggaggtgggagtgcgctcgatttactgaagcctggacctttggaagagacgtatattgcaacaattctccgggaaatacttaagggtctggactatctccactccgaacggaagatacatagggacatcaaagcagctaatgtactgttgtcggaacagggcgacgtgaagctcgccgattttggggttgctggacaattaactgatactcagattaagcgcaatacattcgttggcactcccttctggatggcaccggaggtcataaaacagtctgcttacgatttcaaggcagacatttggagtctaggaataacagctatcgaattggccaagggggaaccgccaaattccgatctccatcccatgcgcgtgctcttccttatacctaagaactcaccccctacattggaggggcaacattccaaacctttcaaagagttcgttgaggcttgtctcaataaggatccgagatttcggccaacggccaaggagttattgaaacataagtttattacacggtacacaaagaaaacctcctttttgaccgagcttatcgaccggtataagcgctggaagtccgaaggccatggggaagagtcgtcctcggaagacagcgacattgacggggaagctgaagacggagaacagggaccgatttggaccttcccgcctacaatcagaccaagcccacactctaagctgcacaagggcaccgcgctccatagtagtcagaagcccgctgaacctgtgaagcgacagcctcggtcacagtgcctgtctaccttggttaggcccgtcttcggcgaactgaaggaaaagcataaacagagcggtgggagcgtcggggctctggaagagctcgaaaacgccttcagtttggcggaagagtcctgtccgggaattagcgataaattaatggtccacctggtcgagagagttcaacggttctctcataatcggaatcacctgacctccacgcggtag

SEQ ID NO: 96788 - DNA, 1536 bp, Artificial Sequence
  derived and/or modified sequence
gtcgcctccgggctttctccggtcgctgccgccaccaccgttgcttcgcgggctgggaggcccggggtccccgggcgaacagaggctgcggcactctcgagtggaccctgaggagctcttcaccaagctcgaccgcattggcaagggctcgtttggggaggtctacaagggcatcgataaccacacaaaggaggtggtggccatcaagatcatcgacctggaggaggccgaggatgagatcgaggacatccagcaggagatcactgtcctcagtcagtgcgacagcccctacatcacccgctactttggctcctacctaaagagcaccaagctatggatcatcatggagtacctgggcggcggctcagcactggacttgcttaaaccaggtcccctggaggagacatacattgccacgatcctgcgggagattctgaagggcctggattatctgcactccgaacgcaagatccaccgagacatcaaagctgccaacgtgctactctcggagcagggtgacgtgaagctggcggactttggggtagcagggcagctcacagacacgcagattaagaggaacacattcgtgggcacccccttctggatggcacctgaggtcatcaagcagtcggcctacgacttcaaggctgacatctggtccctggggatcacagccatcgagctggccaagggggagcctccaaactctgacctccaccccatgcgcgtcctgttcctgattcccaagaacagcccacccacactggagggccagcacagcaagcccttcaaggagttcgtggaggcctgcctcaacaaagacccccgattccggcccacggccaaggagctcctgaagcacaagttcatcacacgctacaccaagaagacctccttcctcacggagctcatcgaccgctataagcgctggaagtcagaggggcatggcgaggagtccagctctgaggactctgacattgatggcgaggcggaggacggggagcagggccccatctggacgttcccccctaccatccggccgagtccacacagcaagcttcacaaggggacggccctgcacagttcacagaagcctgcggagcccgtcaagaggcagccgaggtcccagtgcctgtccacgctggtccggcccgtcttcggagagctcaaagagaagcacaagcagagcggcgggagcgtgggtgcgctggaggagctggagaacgccttcagcctggccgaggagtcctgccccggcatctcagacaagctgatggtgcacctggtggagcgagtgcagaggttttcacacaacagaaaccacctgacatccacccgctgaagcgcactgctgttcagataggggacggaaggtcgtttgtttttgttctgagctccataagaactgtgctgacttggaaggtgccctgtgctatgtcgtgcctgcagggacacgtcggatcccgtgggcctcacatgccaggtcaccaggtcaccgtctccttccacccctgcagtgtgctgttgtgcacgtca

SEQ ID NO: 96789 - DNA, 1976 bp, Artificial Sequence
  derived and/or modified sequence
agtcacctgtgctgagccatcatggagagtgagggcctgtaagggtggacacagtatgcaggagggacaaatcttcctcaccggacaggtggggatccctgcggtgcactaggggaatgcacacagggggcactatgacctggcggcccacggggcacggggacgcaccaggtagccttgggatctgcaagtccctcccggaccctggggagtgccatgacggcttccagcagcagtcactgtcctgggcgcgtcccgcgctctagcccaggtgggtcccacaacggtgtgaccaaggacgtcctatgaccaccccttgacagcactctcgagtggaccctgaggagctcttcaccaagctcgaccgcattggcaagggctcgtttggggaggtctacaagggcatcgataaccacacaaaggaggtggtggccatcaagatcatcgacctggaggaggccgaggatgagatcgaggacatccagcaggagatcactgtcctcagtcagtgcgacagcccctacatcacccgctactttggctcctacctaaagagcaccaagctatggatcatcatggagtacctgggcggcggctcagcactggacttgcttaaaccaggtcccctggaggagacatacattgccacgatcctgcgggagattctgaagggcctggattatctgcactccgaacgcaagatccaccgagacatcaaagctgccaacgtgctactctcggagcagggtgacgtgaagctggcggactttggggtagcagggcagctcacagacacgcagattaagaggaacacattcgtgggcacccccttctggatggcacctgaggtcatcaagcagtcggcctacgacttcaaggctgacatctggtccctggggatcacagccatcgagctggccaagggggagcctccaaactctgacctccaccccatgcgcgtcctgttcctgattcccaagaacagcccacccacactggagggccagcacagcaagcccttcaaggagttcgtggaggcctgcctcaacaaagacccccgattccggcccacggccaaggagctcctgaagcacaagttcatcacacgctacaccaagaagacctccttcctcacggagctcatcgaccgctataagcgctggaagtcagaggggcatggcgaggagtccagctctgaggactctgacattgatggcgaggcggaggacggggagcagggccccatctggacgttcccccctaccatccggccgagtccacacagcaagcttcacaaggggacggccctgcacagttcacagaagcctgcggagcccgtcaagaggcagccgaggtcccagtgcctgtccacgctggtccggcccgtcttcggagagctcaaagagaagcacaagcagagcggcgggagcgtgggtgcgctggaggagctggagaacgccttcagcctggccgaggagtcctgccccggcatctcagacaagctgatggtgcacctggtggagcgagtgcagaggttttcacacaacagaaaccacctgacatccacccgctgaagcgcactgctgttcagataggggacggaaggtcgtttgtttttgttctgagctccataagaactgtgctgacttggaaggtgccctgtgctatgtcgtgcctgcagggacacgtcggatcccgtgggcctcacatgccaggtcaccaggtcaccgtctccttccacccctgcagtgtgctgttgtgcacgtcagggacgctgttctctatgcccactgccctcctccctctcctggcccagcagtattgctcacgggggctccagccgccggcgtggccctcatgagctacgcctgggtcttctgcagactcatgcagccctatggccgctcagaccaaggcgcagagcaactatcagggcagctctgcctcctcctcccatgaggtggggagaggcaaca

SEQ ID NO: 96790 - DNA, 2178 bp, Artificial Sequence
  derived and/or modified sequence
cgggctttctccggtcgctgccgccaccaccgttgcttcgcgggctgggaggcccggggtccccgggcgaacagaggctgcgggtgggagccttcgcgggcgctgcagagcgggccgggggaggccgggatggagccccgcggagtggactgacgccgcaggggcgagctagccggctccgcgcctctccgcgggatccagacgcctcctggggctgctggcggagggtctgaggcggcgcggccatggctcacctccggggatttgccaaccagcactctcgagtggaccctgaggagctcttcaccaagctcgaccgcattggcaagggctcgtttggggaggtctacaagggcatcgataaccacacaaaggaggtggtggccatcaagatcatcgacctggaggaggccgaggatgagatcgaggacatccagcaggagatcactgtcctcagtcagtgcgacagcccctacatcacccgctactttggctcctacctaaagagcaccaagctatggatcatcatggagtacctgggcggcggctcagcactggacttgcttaaaccaggtcccctggaggagacatacattgccacgatcctgcgggagattctgaagggcctggattatctgcactccgaacgcaagatccaccgagacatcaaagctgccaacgtgctactctcggagcagggtgacgtgaagctggcggactttggggtagcagggcagctcacagacacgcagattaagaggaacacattcgtgggcacccccttctggatggcacctgaggtcatcaagcagtcggcctacgacttcaaggctgacatctggtccctggggatcacagccatcgagctggccaagggggagcctccaaactctgacctccaccccatgcgcgtcctgttcctgattcccaagaacagcccacccacactggagggccagcacagcaagcccttcaaggagttcgtggaggcctgcctcaacaaagacccccgattccggcccacggccaaggagctcctgaagcacaagttcatcacacgctacaccaagaagacctccttcctcacggagctcatcgaccgctataagcgctggaagtcagaggggcatggcgaggagtccagctctgaggactctgacattgatggcgaggcggaggacggggagcagggccccatctggacgttcccccctaccatccggccgagtccacacagcaagcttcacaaggggacggccctgcacagttcacagaagcctgcggagcccgtcaagaggcagccgaggtcccagtgcctgtccacgctggtccggcccgtcttcggagaggtcttttcacagctcaaagagaagcacaagcagagcggcgggagcgtgggtgcgctggaggagctggagaacgccttcagcctggccgaggagtcctgccccggcatctcagacaagctgatggtgcacctggtggagcgagtgcagaggttttcacacaacagaaaccacctgacatccacccgctgaagcgcactgctgttcagataggggacggaaggtcgtttgtttttgttctgagctccataagaactgtgctgacttggaaggtgccctgtgctatgtcgtgcctgcagggacacgtcggatcccgtgggcctcacatgccaggtcaccaggtcaccgtctccttccacccctgcagtgtgctgttgtgcacgtcagggacgctgttctctatgcccactgccctcctccctctcctggcccagcagtattgctcacgggggctccagccgccggcgtggccctcatgagctacgcctgggtcttctgcagactcatgcagccctatggccgctcagaccaaggcgcagagcaactatcagggcagctctgcctcctcctcccatgaggtggggagaggcaacagggcagcccccagaggagtgtcctggccgctgtcctcccggggcccatgatggccatagatttgccttgtggtgttggatcaggtactgtgtctgctcataagtacttgtgtcatccagaatgttttgttttttaagaaaattgaattacttgtttcctgaaatattctgaggttaatatgttagttttcatagaacattgagaggcccctgccactttcaataaagacctgacttgg

SEQ ID NO: 96791 - DNA, 4619 bp, Artificial Sequence
  derived and/or modified sequence
gtccaacgccagcaggcttccgggcccggagtgggcggtgggactcggggtcccagagagccgtgcgcgggccgcgacgccgagcaccgccctcgccgtcgcctccgggctttctccggtcgctgccgccaccaccgttgcttcgcgggctgggaggcccggggtccccgggcgaacagaggctgcgggtgggagccttcgcgggcgctgcagagcgggccgggggaggccgggatggagccccgcggagtggactgacgccgcaggggcgagctagccggctccgcgcctctccgcgggatccagacgcctcctggggctgctggcggagggtctgaggcggcgcggccatggctcacctccggggatttgccaaccagcactctcgagtggaccctgaggagctcttcaccaagctcgaccgcattggcaagggctcgtttggggaggtctacaagggcatcgataaccacacaaaggaggtggtggccatcaagatcatcgacctggaggaggccgaggatgagatcgaggacatccagcaggagatcactgtcctcagtcagtgcgacagcccctacatcacccgctactttggctcctacctaaagagcaccaagctatggatcatcatggagtacctgggcggcggctcagcactggacttgcttaaaccaggtcccctggaggagacatacattgccacgatcctgcgggagattctgaagggcctggattatctgcactccgaacgcaagatccaccgagacatcaaagctgccaacgtgctactctcggagcagggtgacgtgaagctggcggactttggggtagcagggcagctcacagacacgcagattaagaggaacacattcgtgggcacccccttctggatggcacctgaggtcatcaagcagtcggcctacgacttcaaggctgacatctggtccctggggatcacagccatcgagctggccaagggggagcctccaaactctgacctccaccccatgcgcgtcctgttcctgattcccaagaacagcccacccacactggagggccagcacagcaagcccttcaaggagttcgtggaggcctgcctcaacaaagacccccgattccggcccacggccaaggagctcctgaagcacaagttcatcacacgctacaccaagaagacctccttcctcacggagctcatcgaccgctataagcgctggaagtcagaggggcatggcgaggagtccagctctgaggactctgacattgatggcgaggcggaggacggggagcagggccccatctggacgttcccccctaccatccggccgagtccacacagcaagcttcacaaggggacggccctgcacagttcacagaagcctgcggagcccgtcaagaggcagccgaggtcccagtgcctgtccacgctggtccggcccgtcttcggagagctcaaagagaagcacaagcagagcggcgggagcgtgggtgcgctggaggagctggagaacgccttcagcctggccgaggagtcctgccccggcatctcagacaagctgatggtgcacctggtggagcgagtgcagaggttttcacacaacagaaaccacctgacatccacccgctgaagcgcactgctgttcagataggggacggaaggtcgtttgtttttgttctgagctccataagaactgtgctgacttggaaggtgccctgtgctatgtcgtgcctgcagggacacgtcggatcccgtgggcctcacatgccaggtcaccaggtcaccgtctccttccacccctgcagtgtgctgttgtgcacgtcagggacgctgttctctatgcccactgccctcctccctctcctggcccagcagtattgctcacgggggctccagccgccggcgtggccctcatgagctacgcctgggtcttctgcagactcatgcagccctatggccgctcagaccaaggcgcagagcaactatcagggcagctctgcctcctcctcccatgaggtggggagaggcaacagggcagcccccagaggagtgtcctggccgctgtcctcccggggcccatgatggccatagatttgccttgtggtgttggatcaggtactgtgtctgctcataagtacttgtgtcatccagaatgttttgttttttaagaaaattgaattacttgtttcctgaaatattctgaggttaatatgttagttttcatagaacattgagaggcccctgccactttcaataaagacctgacttggagacatgcaggtgtgtgtggtggggcccgggccatgcggggctgcagcgtccctggtcccgagtcctcatcacagcacgcagagacggcagcccagccccccttcgaaacttccctgtgacggattcctgggctctgcttggcccaccggaagaacagagcaggcagaggagaatgcaggtggggagatgctgtttgtttatttttaatcaaatgtgtgtgaacaaagcagtcgcccatctacttcccgttggaaggaatgctgggcagtaataaattagacggccccaccctcccagggcacagggggactttggtttctgcttctctagaggtacatggggaacaagcgtggcttctgccagacttgtttagctgtgacctgcagggcaggcccctggggctgccacttggttcaccagatggaaggtcagcatggctgtgccacgcttgtctgagagggtcctggcagtgggtacgcagggtgtatggcagggcctcttttccagtgcttgctctaggccagtcctcggcagggaccctgctctggggagagaggcagggtgtgcccaggctttggtccgatgccgagagcactgctcaggccttgtctgcgtctttgagccaggggcctgggagctgtggcttgagcggctccgcgctcaagactcgcacatttttcccagggccccagatagctgctggcatgcactaggtcctgggtggggggatgaagcccctcccagatgttacatgaggcccacccacactgctggtgccagtggggatccagtgagaccacagccacttcccatctgttgagaagcctcaggacagaggtcacctctgtgtcctgctgttctttgtagttgtgtccaaacctgggcaggttgagcgtcattcctccttccccctgaccatcccctccagccctgaggagggttgggggccatcctgcacgatgcttggggccctcccggctgagctgctggccccctggatcacctccatccacctggaggagagggcggccatcagaccagtgagccatcttgtgctcagacactgtcccaagaacaacccaggatatgggacaagcaggacaaaagaagggttaaaaacctggggccgggtgcggtggctcatgcctataatcccagcactttgggaggctgaggcagatggatcacttgaggtcaggagttcgagaccagcctggccaacatggtgaaaccctgtctctactaaaaatacaaaaattagccaggcggcgtggcgtgcatgcctgtaatctcagttactcaggaggctgaggcagaagaatcgcttgaaccctggaggtgcaggttatagtgagccaagattgtatcactgcactccagcctgagtgacagagggagacgccatctccaaaaaaaaaaaaaacaaagcattgctgttttttggaaatgctggaagcattgctcagcccttcctttccagggcccagaaaacttgcctccaccaccatgagtagaaatgggagctgagcggacatcgaaatgggcagctgaccagggctgcctcctgcaaaattacctttcaaatgtgtacttgctctcagcccggaagaagtagacgtgggatttgaactggagcttgaaaacatagtctttgtgtatgccatcggcctccctggggatgctcacgctgtagcccagcagcgggaggctggccagtgggtagtcatcctgcaagacagcatagggacacgggttccaggggctgggttgccacagggaatgcccattcctctgctacctgcacaacggtggcacgtacaaatgcccacgggccaagggagccagtttccctgttcacacagcacagggtgtgtgggcaaagcatgggagggcagaaccaaaatacaaaagggacacaggtgagcagggttaagtgtctgtctgctagcatcacctgcattgggctccagtgaaactccagtacctgatgagttttgtagaagaacaaacagaagttggtaaagacgacccagagcttctgccagccatgactgtttttgaactttcttagcagatatcctgaaagctggttctgtcaataaaggaaaaatgcaggtgcattaaccagcacccaggaccccttgtgggagtgggtttgctccccaagactaagcctctgcatgctttctccagctgaggccttggttttacctctggactgctatgaacagcagctttatcagtacttaagtccaacagaagcatgttaaaaacctagagtgacattccaggcaccaagtaaagtgagttccctttccctgtgcacaataaagtcagtgttcagtaa

SEQ ID NO: 96792 - DNA, 1281 bp, Artificial Sequence
  derived and/or modified sequence
atggcccacctgagaggcttcgccaaccagcacagcagagtggaccccgaggagctgttcaccaagctggacagaatcggcaagggcagcttcggcgaggtgtacaagggcatcgacaaccacaccaaggaggtggtggccatcaagatcatcgacctggaggaggccgaggacgagatcgaggacatccagcaggagatcaccgtgctgagccagtgcgacagcccctacatcaccagatacttcggcagctacctgaagagcaccaagctgtggatcatcatggagtacctgggcggcggcagcgccctggacctgctgaagcccggccccctggaggagacctacatcgccaccatcctgagagagatcctgaagggcctggactacctgcacagcgagagaaagatccacagagacatcaaggccgccaacgtgctgctgagcgagcagggcgacgtgaagctggccgacttcggcgtggccggccagctgaccgacacccagatcaagagaaacaccttcgtgggcacccccttctggatggcccccgaggtgatcaagcagagcgcctacgacttcaaggccgacatctggagcctgggcatcaccgccatcgagctggccaagggcgagccccccaacagcgacctgcaccccatgagagtgctgttcctgatccccaagaacagcccccccaccctggagggccagcacagcaagcccttcaaggagttcgtggaggcctgcctgaacaaggaccccagattcagacccaccgccaaggagctgctgaagcacaagttcatcaccagatacaccaagaagaccagcttcctgaccgagctgatcgacagatacaagagatggaagagcgagggccacggcgaggagagcagcagcgaggacagcgacatcgacggcgaggccgaggacggcgagcagggccccatctggaccttcccccccaccatcagacccagcccccacagcaagctgcacaagggcaccgccctgcacagcagccagaagcccgccgagcccgtgaagagacagcccagaagccagtgcctgagcaccctggtgagacccgtgttcggcgagctgaaggagaagcacaagcagagcggcggcagcgtgggcgccctggaggagctggagaacgccttcagcctggccgaggagagctgccccggcatcagcgacaagctgatggtgcacctggtggagagagtgcagagattcagccacaacagaaaccacctgaccagcaccagatag

SEQ ID NO: 96793 - protein, 584 aa, Artificial Sequence
  derived and/or modified sequence
MSLPPEKASELKQLIHQQLSKMDVHGRIREILAETIREELAPDQQHLSTEDLIKALRRRGIIDDVMKELNFVTDSVEQELPSSPKQPICFDRQSTLKKSDGTRMADSTTMLSISDPIHMVLIKTDIFGETTLVASYFLEWRSVLGSENGVTSLTVELMGVGTESKVSVGILNIKLEMYPPLNQTLSQEVVNTQLALERQKTAEKERLFLVYAKQWWREYLQIRPSHNSRLVKIFAQDENGINRPVCSYVKPLRAGRLLDTPRQAARFVNVLGYERAPVIGGGGKQEQWCTLLAFLCRNKGDCEDHANLLCSLLLGYGLEAFVCVGTKAKGVPHAWVMTCGTDGAITFWESLTGHRYIHKPTNPDEPPVAEQPKPLYPYRTIGCVFNHQMFLGNCQPSDAVETCVFDLNDESKWKPMSEEAIKSVCAPGATTSLPPFPPLCASTIDASVTSNEIEMQLRLLVSEHRKDLGLTTVWEDQLSYLLSPALASYEFERTTSISAGNEEFQDAIRRAVPDGHTFKGFPIHFVYRNARRAFATCLRSPFCEEIICCRGDQVRLAVRVRVFTYPESACAVWIMFACKYRSVL

SEQ ID NO: 96794 - DNA, 1755 bp, Artificial Sequence
  derived and/or modified sequence
atgagcctgccccccgagaaggccagcgagctgaagcagctgatccaccagcagctgagcaagatggacgtgcacggcagaatcagagagatcctggccgagaccatcagagaggagctggcccccgaccagcagcacctgagcaccgaggacctgatcaaggccctgagaagaagaggcatcatcgacgacgtgatgaaggagctgaacttcgtgaccgacagcgtggagcaggagctgcccagcagccccaagcagcccatctgcttcgacagacagagcaccctgaagaagagcgacggcaccagaatggccgacagcaccaccatgctgagcatcagcgaccccatccacatggtgctgatcaagaccgacatcttcggcgagaccaccctggtggccagctacttcctggagtggagaagcgtgctgggcagcgagaacggcgtgaccagcctgaccgtggagctgatgggcgtgggcaccgagagcaaggtgagcgtgggcatcctgaacatcaagctggagatgtacccccccctgaaccagaccctgagccaggaggtggtgaacacccagctggccctggagagacagaagaccgccgagaaggagagactgttcctggtgtacgccaagcagtggtggagagagtacctgcagatcagacccagccacaacagcagactggtgaagatcttcgcccaggacgagaacggcatcaacagacccgtgtgcagctacgtgaagcccctgagagccggcagactgctggacacccccagacaggccgccagattcgtgaacgtgctgggctacgagagagcccccgtgatcggcggcggcggcaagcaggagcagtggtgcaccctgctggccttcctgtgcagaaacaagggcgactgcgaggaccacgccaacctgctgtgcagcctgctgctgggctacggcctggaggccttcgtgtgcgtgggcaccaaggccaagggcgtgccccacgcctgggtgatgacctgcggcaccgacggcgccatcaccttctgggagagcctgaccggccacagatacatccacaagcccaccaaccccgacgagccccccgtggccgagcagcccaagcccctgtacccctacagaaccatcggctgcgtgttcaaccaccagatgttcctgggcaactgccagcccagcgacgccgtggagacctgcgtgttcgacctgaacgacgagagcaagtggaagcccatgagcgaggaggccatcaagagcgtgtgcgcccccggcgccaccaccagcctgccccccttcccccccctgtgcgccagcaccatcgacgccagcgtgaccagcaacgagatcgagatgcagctgagactgctggtgagcgagcacagaaaggacctgggcctgaccaccgtgtgggaggaccagctgagctacctgctgagccccgccctggccagctacgagttcgagagaaccaccagcatcagcgccggcaacgaggagttccaggacgccatcagaagagccgtgcccgacggccacaccttcaagggcttccccatccacttcgtgtacagaaacgccagaagagccttcgccacctgcctgagaagccccttctgcgaggagatcatctgctgcagaggcgaccaggtgagactggccgtgagagtgagagtgttcacctaccccgagagcgcctgcgccgtgtggatcatgttcgcctgcaagtacagaagcgtgctgtag

SEQ ID NO: 96795 - DNA, 1755 bp, Artificial Sequence
  derived and/or modified sequence
atgtcgctgccaccagaaaaggccagcgagctgaagcaactgattcaccaacaactgtctaaaatggacgtgcacggtcggattcgcgagatcttggcagagactattcgggaggaattagcgcctgatcagcagcatcttagtaccgaggacctgataaaagcccttaggagacgagggatcatcgacgacgtcatgaaagaattaaacttcgtgacagatagcgtagagcaggagctgccctccagccctaaacagccaatctgctttgaccgtcagtctaccctgaaaaagtccgatggaacacgcatggctgactctaccactatgttatctatctctgaccccatccacatggtgctcatcaaaaccgatatatttggcgagacgactctggtggctagctacttcctggagtggagaagcgtgctgggcagcgaaaacggggtcacctccctaaccgtggagctcatgggtgtaggcacagagtcaaaagtgagtgtgggaatattgaatatcaagctagagatgtaccctccgctgaatcagacattgtcccaggaggtggtgaacacacaacttgcactggagaggcagaagaccgcagagaaggaacggctgttcctggtctatgccaaacagtggtggagagagtacctgcaaattagaccttcccacaatagtaggctggtgaagatcttcgcccaggatgagaatgggattaacagaccggtatgcagctatgtcaagcccctacgcgcgggtagactgctagacacacctagacaggccgcccgcttcgttaatgtcttaggatatgagcgggcccccgtaattggaggaggaggcaagcaggaacagtggtgcaccttgctggctttcttgtgtaggaacaaaggagactgcgaggatcatgccaacctattgtgttcactgctcctggggtatgggttggaagcgttcgtctgcgtcggtacaaaagcgaaaggcgtcccccacgcgtgggtcatgacctgcggaaccgatggtgccatcactttctgggaaagcctaaccggccatcgatatatccataaacctactaacccagatgagccccctgtggcagagcagccaaaaccactgtacccgtaccgcacaatcgggtgcgttttcaaccaccaaatgttcctgggcaactgccagccatccgacgctgttgaaacttgcgtgttcgatctaaacgacgagtctaagtggaaacctatgagcgaagaagcaatcaaaagtgtttgcgctccgggagcgaccacatctctacctccttttcctccgctgtgcgcgtcaaccattgacgctagcgtgacatctaatgaaatcgagatgcagctgaggctcctcgtgagtgagcatcggaaggatctgggtctcacgaccgtgtgggaggaccagctgtcataccttctatccccagctttggcttcatatgagtttgaaaggaccacctcgattagcgctggcaatgaggaatttcaagatgctatcagacgggccgtgccggatggacataccttcaagggcttccccatccacttcgtttacaggaacgcccgtagagctttcgcaacttgcttgcgctctccattttgcgaagagataatctgctgtcggggcgaccaagtgcgactggcagttagagtgagggtcttcacctacccagaatccgcctgtgctgtctggattatgtttgcttgtaagtatagaagtgtgttatag

SEQ ID NO: 96796 - DNA, 1755 bp, Artificial Sequence
  derived and/or modified sequence
atgagcctgcccccagagaaggccagcgagctgaagcagctgatccaccagcagctgagcaagatggatgtgcacggccgcatccgggagatcctggccgagaccatccgggaggagctggccccagaccagcagcacctgagcacagaggacctgatcaaggccctgcggcggcggggcatcattgatgatgtgatgaaggagctgaactttgtgacagattctgtggagcaggagctgcccagcagccccaagcagcccatctgctttgaccggcagagcaccctgaagaagagtgatggcaccaggatggctgacagcaccaccatgctgagcatcagtgaccccatccacatggtgctgatcaagacagacatctttggagagaccaccctggtggccagctacttcctggagtggaggtctgtgctgggctctgaaaatggagtgaccagcctgactgtggagctgatgggcgtgggcacagagagcaaggtgtctgtgggcatcctgaacatcaagctggagatgtacccacccctgaaccagaccctgagccaggaggtggtgaacacccagctggccctggagcggcagaagacagctgagaaggagcggctcttcctggtgtatgccaagcagtggtggagggagtacctgcagatccggcccagccacaacagccggctggtgaagatctttgcccaggatgaaaatggcatcaacagacctgtgtgcagctatgtgaagcccctgcgggccggccgcctgctggacaccccccggcaggccgccaggtttgtgaatgtgctgggctatgagcgggcccctgtgattggaggcggcggcaagcaggagcagtggtgcaccctgctggccttcctgtgcagaaataaaggagactgtgaagatcatgccaacctgctgtgcagcctgctgctgggctacggcctggaggcctttgtgtgtgtgggcaccaaggccaagggcgtgccccacgcctgggtgatgacctgtggcacagatggagccatcaccttctgggagagcctgaccggccaccgctacatccacaagcccaccaacccagatgagccccctgtggccgagcagcccaagcccctgtacccctaccgcaccatcggctgtgtgttcaaccaccagatgttcctgggcaactgccagcccagtgatgctgtggagacctgtgtgtttgacctgaatgatgagagcaagtggaagcccatgtctgaggaggccatcaagtctgtgtgtgcccctggggccaccaccagcctgccccccttcccccccctgtgtgccagcaccattgatgcctctgtgaccagcaatgaaattgagatgcagctgcggctgctggtgtctgagcacaggaaggacctgggcctgaccaccgtgtgggaggaccagctgagctacctgctgagccctgccctggccagctatgaatttgagaggaccaccagcatctctgctggaaatgaggagttccaggatgccatcagaagagctgtgcctgatggccacaccttcaagggcttccccatccactttgtgtacagaaatgcccggcgggcctttgccacctgcctgcggagccccttctgtgaggagatcatctgctgccgcggggaccaggtgcggctggccgtgcgggtgcgggtcttcacctacccagagagcgcctgtgctgtgtggatcatgtttgcctgcaagtacagatctgtgctgtag

SEQ ID NO: 96797 - DNA, 1755 bp, Artificial Sequence
  derived and/or modified sequence
atgagcctgccccccgagaaggccagcgagctgaagcagctgatccaccagcagctcagcaaaatggacgtgcacggacgcatccgcgagatcctggccgaaaccataagagaggaactcgccccggaccaacaacacttgtctacggaagatctgatcaaggccctacggcgtagggggattattgacgatgttatgaaggagctgaacttcgtgaccgattcagtcgaacaggagcttccctctagccctaagcagcccatttgttttgaccgacaatctacgctcaagaagagcgatggcactcgtatggctgattctactacaatgctttctatctccgacccgatacatatggtgttgattaaaactgacatttttggcgagaccacactggttgcctcctacttcctggagtggcgctctgtgctcgggtcggagaacggtgtgacctccctgacggttgaactgatgggagtcggcaccgaatctaaagtgtctgtggggattctgaacatcaagctcgagatgtacccacccttgaaccaaacacttagccaagaagtggtgaatacgcagctggccctagagcgtcaaaaaactgccgagaaagaaaggctgtttttagtgtatgccaaacaatggtggagagagtatctccaaattcgaccatcacacaattcaagactggtaaaaatcttcgctcaggacgagaacggaataaaccggcccgtatgcagttatgtgaaacctctgcgcgcagggcggcttctcgatacccctcgacaagctgcaagattcgttaatgtcctcggatacgagcgggcaccagtcatcggcgggggggggaaacaagagcaatggtgtacccttctcgccttcttgtgtaggaacaagggagactgcgaggaccacgccaaccttctctgtagcctgctgctcggatacggactcgaagcattcgtgtgtgtaggaactaaggctaagggcgtaccccacgcttgggtgatgacgtgcggcacagacggggccatcactttttgggagtccctgacaggacacaggtacattcataaaccaacaaatcccgacgaacctcccgtcgccgaacagccaaaaccgctctacccttaccgcactataggatgcgttttcaatcatcagatgttccttggaaactgtcagccaagtgatgctgttgagacatgcgtgtttgatctcaatgacgaatctaagtggaagcccatgtccgaggaagccattaagagtgtctgtgcccctggggccacaacctcactcccaccattcccccctttatgcgccagcacaattgacgcgtctgtgacaagcaatgagatcgaaatgcaactgaggttgctggtgtctgagcataggaaagatttaggactcacaaccgtgtgggaagatcaactgagttaccttttgtctcctgctctggcctcatacgagtttgaacgtaccacctccatcagtgcgggaaacgaggagttccaggacgccatcaggcgagctgtgccagacgggcacacctttaaggggtttcccatacatttcgtgtaccggaatgcgaggcgagcgttcgccacctgcttaagatcacccttctgcgaagagatcatttgctgtcggggagatcaggtgcggttggcagtgagagtgagggtattcacctaccctgaatctgcctgcgccgtctggataatgttcgcctgcaagtatcggtcagtgttgtag

SEQ ID NO: 96798 - DNA, 2643 bp, Artificial Sequence
  derived and/or modified sequence
gcctgacgcggcgttgcgtcccccgggagctgcgctaggcgaacggctgcggcgctttgtgctccagtcgctcctaacgctccctggcccggccggggccgcgcagttagggcatctgaggcggggagaagcggcggggagacgccggctgccagcatgtcgctgcctccggagaaagcctccgagctgaagcagctcatccaccagcagctgagcaagatggatgtccatggtagaataagagaaatccttgctgagactatacgggaagaattggcacctgatcaacagcatttatcaacagaagatttgatcaaagcccttagacgtcgaggaatcattgacgatgtgatgaaagaacttaattttgttactgacagtgttgagcaagaactcccttcctctccaaaacaacctatttgttttgatagacaatcgacattaaaaaaaagtgatggaactagaatggctgattcaacaacaatgttatcaataagtgatccaattcatatggtgctaatcaaaacagacatatttggtgagacgactttagtagcatcatattttctggaatggcgatcggttttgggctcagaaaatggagtgaccagtctgactgtggaacttatgggtgtaggcacagaatcaaaagtttctgtgggaattttaaatataaaacttgaaatgtatccaccactcaatcaaacgttatctcaagaagtagtgaacacacagcttgctttggaacgtcagaaaactgcagagaaagagcgattatttcttgtatatgctaagcagtggtggagagaatatttgcaaattcgaccctcacacaactcacgactggttaagatttttgcacaggatgaaaatgggataaatagaccagtctgttcctatgttaaaccacttcgagctggacggcttcttgatactccaaggcaagcagcaagatttgttaatgtccttggttatgaacgagcccctgttattggaggaggaggtaaacaggagcagtggtgcactctgctggcctttctctgtagaaacaagggtgactgtgaagatcacgctaaccttctgtgcagccttcttcttggatatggattagaagcctttgtttgtgttgggaccaaggcaaaaggagtacctcatgcatgggttatgacttgtggaactgatggggccatcactttttgggagagtttaacaggacacaggtacatccataaacctaccaatcctgatgaacctccagttgctgaacagcccaaaccactgtacccatatcgaacaattggttgtgttttcaaccatcagatgttcctgggaaattgtcaaccctctgatgcagtagaaacctgtgtatttgatttgaacgatgaatccaaatggaaacccatgagtgaggaagcaattaaatctgtgtgtgctcctggagctacaacatcccttcctccctttccacctctgtgtgcatccacaattgacgcgtcagtaacaagtaatgaaattgaaatgcagctgaggctcctggtgtcagaacacaggaaggatcttggcctcactactgtttgggaagaccagctctcctaccttttatcaccagctttggcttcttatgaatttgagcgtacaacaagtatatcagcaggcaatgaagaatttcaagatgccataagaagggctgtacctgatggtcacacatttaaagggttcccaatacattttgtgtatagaaatgcaagacgtgcatttgccacatgtcttcgatctcctttctgtgaagaaataatctgttgccgtggagaccaagtgcgactggcagttcgtgtccgagtatttacttaccctgaatctgcatgtgctgtttggatcatgtttgcttgtaaatatcgctcggtattatagggccaatatttatataagatttatacctgtgtttaattggaattttacacattgtacattacttagctatttagaggtttgttattttaaaatcacaatctggcttgaatggcatacttcaattttgtatatacttgactggtaatgtttaaaaaaaatcatgcattcctttaaaaattaaggctgaaaaacttgtataaatctccctggaatttagtataaattaagtgtatattctattttaataaatgctactttgtttacagttatcagtagtttaaatattaatataaaatgcattcagttttctttacacaaacaggtaatcaaagagatgtttgtctaagggtttgagccctagacaaatcagtatgatcattacttttcacaggttaatggaattattttatacagattaggagaaattaacctcatgacagatttatttattgcattggtgaaaataaatgttaatgaattaccacttttgtggtttattcgtggtccttgggatatttgagactgtccagaaatttatggttggaccttgaagcaagagtaggaaaaaactaataccagaaaagcataaatattaataacctcatatgaaagtacatgaatcatttagaaatatttatcactgtgatttgttgtaaaaatgaattgggtattttagaaaaactttattatacctctttgttatgatactgataaattgtgatcttgcagtcg

SEQ ID NO: 96799 - DNA, 1755 bp, Artificial Sequence
  derived and/or modified sequence
atgagcctgccccctgaaaaggcctccgagctgaaacagttgatccaccagcaactgagtaaaatggacgttcatggtagaatccgcgagatcttggccgagaccattagagaggaactcgcgccagatcagcagcacctcagcaccgaggatttaatcaaagcactccgaagaaggggaatcattgacgacgtgatgaaggagttgaacttcgtgaccgactctgtggagcaggagttaccttcctctcctaagcagcctatctgcttcgaccgacagtccacattgaagaagtcagatgggacccgaatggcggatagcaccaccatgcttagcatatccgatcccatccatatggtgcttatcaagacagacatcttcggtgagaccacgctcgttgcatcttatttcctggagtggcgctcagtcttgggatcagaaaatggggtcaccagtttaaccgtggagctgatgggggtaggcacagaatccaaagtgagcgttggaatcctaaacattaaactcgaaatgtatccccctctgaaccagaccctctcgcaggaggtggttaatacccagctcgctctggagaggcagaagacagccgagaaagaaaggctatttttggtgtatgcaaagcaatggtggcgcgagtatctccagatccggccaagccacaattccagacttgtgaagatttttgcccaggatgagaatgggatcaaccggccagtatgcagctacgtgaagcccctgcgggcaggtcgcctgctggacacgccgcgacaggccgctaggttcgtgaacgttctgggatatgagcgcgctcccgtcatcgggggagggggtaagcaggaacaatggtgcacactgctcgcctttctttgtcgaaataagggcgactgcgaggaccatgccaacctgctgtgtagtctgctgctggggtacggcctggaggcattcgtttgcgtcggaacaaaggctaaaggtgtgccacatgcgtgggtgatgacatgcgggacagatggagcgattactttttgggagtctttaactggccataggtacatccacaagcccaccaaccctgatgaacctcctgttgctgagcagcctaagcccttatacccctacaggacaatcggctgtgtcttcaaccaccagatgtttctgggcaattgtcaaccaagtgacgccgtggagacttgcgtgttcgacctgaacgatgagagtaaatggaagcctatgtcagaagaggcaataaagtcggtgtgcgcacctggggctacaaccagcctgccccctttccccccactatgcgcctcaacaattgacgcttctgtaaccagcaacgaaattgagatgcaactccggctgctcgtgtctgaacacaggaaagatctggggttgaccacagtctgggaggatcagctcagctatctgctttcaccagcgctggcatcttatgagttcgaaaggactacaagcatctctgccggtaatgaagagttccaggacgcaattaggagggccgtccccgacggtcacacctttaaaggattcccaatccatttcgtatatagaaacgcaagacgggcattcgccacttgtctcagaagcccattttgtgaggaaattatctgctgtcggggagatcaggtacgcctcgcggtgcgagtcagagtcttcacttatccagaaagtgcctgtgccgtttggattatgttcgcttgcaagtacagaagcgtgctctag

SEQ ID NO: 96800 - protein, 299 aa, Artificial Sequence
  derived and/or modified sequence
MASAACSMDPIDSFELLDLLFDRQDGILRHVELGEGWGHVKDQVLPNPDSDDFLSSILGSGDSLPSSPLWSPEGSDSGISEDLPSDPQDTPPRSGPATSPAGCHPAQPGKGPCLSYHPGNSCSTTTPGPVIQQQHHLGASYLLRPGAGHCQELVLTEDEKKLLAKEGITLPTQLPLTKYEERVLKKIRRKIRNKQSAQESRKKKKEYIDGLETRSCCCPLPSSSSPPSALLAPTKPRALGTLRLYECSPELCTTMLPPAWLLMLCQAPRPQDPDPRLTQPEKSLQEAPGQTGASRTPRT

SEQ ID NO: 96801 - DNA, 900 bp, Artificial Sequence
  derived and/or modified sequence
atggcgtctgcagcgtgcagtatggatcccatcgatagcttcgagctgttagatttgctgtttgatagacaagatgggattttgcgacatgtcgagcttggtgagggatggggccatgtgaaggaccaggtccttcccaacccagactccgacgactttctgtcttcaattctgggctctggggatagccttccctcttctcctctatggtcacccgaaggatctgacagcgggatttcagaggatctgcctagtgatccccaagatacccctccgcggagtggtccagcgacttcaccagctggctgtcacccagcccagccaggtaagggaccctgtttaagttatcatcccggaaattcctgtagcacaactacacccggccctgtaattcagcagcagcaccacctcggcgcaagttatctcctgagacccggtgcaggccactgccaggaactggtcctgacagaagacgaaaaaaaacttctggcaaaagaaggcattacactcccaacgcagcttccactgacaaaatacgaagaacgtgtgctgaaaaaaatacgacggaagatcaggaacaaacagagtgcccaggagtctcggaaaaagaaaaaagagtacatcgatggactggagactcgctcttgttgttgccctctcccctcttcttcaagtccaccctcagccctgttagcccctacaaaacctcgagcactcggaaccctccgactgtacgagtgcagccccgagctgtgtacaacaatgcttccaccagcctggttgctgatgttgtgccaggccccccgaccgcaggatccagacccccgtctgacccagcctgaaaagagcctgcaggaagcgcccggtcagaccggcgcaagtcggactccccgtacctag

SEQ ID NO: 96802 - DNA, 900 bp, Artificial Sequence
  derived and/or modified sequence
atggccagcgctgcctgcagcatggaccccatcgacagctttgagctgctggacctgctgtttgaccggcaggacggcatcctgcggcacgtggagctgggggagggctggggccacgtgaaggaccaggtgctgcccaacccagacagtgatgacttcctgagcagcatcctgggcagcggggacagcctgcccagcagccccctgtggagccctgagggcagtgacagcggcatcagcgaggacctgcccagcgacccccaggacaccccacccaggagcggccctgccaccagccctgctggctgccacccagcccagcccgggaagggcccctgcctgagctaccaccctggcaacagctgcagcaccaccaccccaggccctgtgatccagcagcagcaccacctgggcgccagctacctgctgcggcctggagctggccactgccaggagctggtgctgacagaagatgagaagaagctgctggccaaggagggcatcaccctgcccacccagctgcccctgaccaagtatgaggagcgggtgctgaagaagatccggaggaagatccggaacaagcagagcgcccaggagagcaggaagaagaagaaggagtacattgatggcctggagaccaggagctgctgctgccccctgcccagcagcagcagcccccccagcgccctgctggcccccaccaagccccgggccctgggcaccctgcggctgtatgagtgcagccctgagctgtgcaccaccatgctgcccccagcctggctgctgatgctgtgccaggccccccggccccaggaccctgacccccggctgacccagcctgagaagagcctgcaggaggcccctggccagacaggagccagcaggacccccaggacatag

SEQ ID NO: 96803 - DNA, 900 bp, Artificial Sequence
  derived and/or modified sequence
atggccagcgccgcctgcagcatggaccccatcgacagcttcgagttactcgacctgctgttcgacaggcaggatgggatcctgcgccacgtggaacttggagagggctgggggcacgtgaaggatcaggtgctgcccaaccccgacagtgacgacttcttgagtagcattctggggagtggcgattctctgccaagtagtccgctgtggagccccgagggaagtgattcaggtatatctgaggacctgccttccgatcctcaggacaccccaccgcggagtggccccgctacatcccccgcgggttgtcacccagcccagccagggaaagggccatgtctgtcataccaccctggcaactcctgctccacgacaacgcccggtcccgtcatccagcagcagcaccatcttggagcatcgtacctccttaggcctggcgctgggcactgccaggaattggttctgactgaagatgaaaagaagttactggcgaaagaaggaatcactctgccgacacagctgcctctgacgaagtacgaagaaagggtcctgaagaaaatccgtcgcaaaattaggaacaagcagagcgcccaggagagccggaaaaagaaaaaagagtatattgatggcttggaaacgcggagttgttgttgtcccctcccaagttcttctagccctccttcagcccttctcgcccctacaaaacctagggcactcggcacccttagactgtacgaatgcagtccggagctctgcactacaatgctgccacctgcatggctcctgatgctttgtcaggccccacgaccacaggatcccgaccctaggctcacccagcccgagaagtctcttcaggaggctcctggtcagaccggggcctcgcgaacaccaagaacttag

SEQ ID NO: 96804 - DNA, 900 bp, Artificial Sequence
  derived and/or modified sequence
atggcgagcgccgcatgttcaatggaccccatagacagcttcgagctgctggatctgctctttgatagacaggacggaattctccggcacgtggagctgggtgagggatggggccacgtgaaagatcaggtcctccccaatcctgatagcgatgattttctctcgtcgatcctggggtccggtgactcccttcccagctccccattatggtcccccgaagggtcagacagcgggatctccgaagacttacctagcgatccccaggatacaccacccaggtcagggcctgcaaccagcccagccggatgccatcctgcccagccaggcaaagggccatgcctttcttatcacccaggaaacagctgttcaaccacgacccccggacccgtaattcaacagcagcaccacctgggcgcaagctacctgcttagacccggtgcaggacactgtcaggaactcgtactgacagaggacgagaagaagttgctagccaaggaaggcataacgttaccaacccaattgcctttgacgaagtatgaggagagggtgcttaagaagattaggcgaaagattcgcaacaagcagtctgcccaggaatctcgcaagaagaaaaaggagtatatcgatggtttggagacacgaagttgctgttgtccactgcccagctctagctcaccaccctctgctctgctggcgccaacgaagcctagggcactggggaccttgaggctatacgaatgttcacctgaattgtgcaccactatgttgccacccgcatggctgctgatgctgtgtcaggctcccagaccccaggatccagatcctcgtctaacgcaaccagagaagtctttgcaagaagccccagggcaaacaggcgcaagcaggaccccgaggacatag

SEQ ID NO: 96805 - DNA, 2279 bp, Artificial Sequence
  derived and/or modified sequence
acagagccacagagggctgtgagcttgcccggccccaggtaacgctggcggtgggtgggcctccagcttggagcagagaccccccgaggcatctgcagacagaactggatggacccatgaatacggatttagctgctggaaagatggcttctgctgcctgctccatggaccccatcgacagctttgagctcctggatctcctgtttgaccggcaggacggcatcctgagacacgtggagctgggcgagggctggggtcacgtcaaggaccaggtcctgccaaaccccgactctgacgacttcctcagctccatcctgggctctggagactcactgcccagctccccactctggtcccccgaaggcagtgatagtggcatctccgaagacctcccctccgacccccaggacacccctccacgcagcggaccagccacctcccccgccggctgccatcctgcccagcctggcaaggggccctgcctctcctatcatcctggcaactcttgctccaccacaaccccagggccagtgatccaacaacagcatcacctgggggcctcctacctcctgcgacctggggctgggcactgtcaggagctggtgctcaccgaggatgagaagaagctgctggctaaagaaggcatcaccctgcccactcagctgcccctcactaagtacgaggagcgagtgctgaaaaaaatccgccggaaaatccggaacaagcagtcggcgcaagaaagcaggaagaagaagaaggaatatatcgatggcctggagactcggtcctgttgctgtcctttgccctcatcatcctcccctccatcagcccttttggccccaacaaaaccgagagccctggggactttgcgcctgtacgagtgttctccagaactttgcacaacgatgctgcctcccgcgtggctgctgatgctgtgccaggctccgaggccccaggaccccgacccgaggctgacacaacccgagaagagtctccaggaagccccggggcagactggggcttccaggacaccgcgaacctgaccaattcgacggaggagctggacaacgccaccctggtcctgaggaatgcaacagaggggctgggccaggtcgccctgctggactgggtggcgcctgggccgagcactggctcaggacgtgcagggctggaggcggcgggagacgagctgtgagccccgccaggactatgctcccaggcccctctgcccaggggtgccttggggatgctgcactgggcagctacccacctggggatgggacgtgaggccaagaccccagcagagatgccagaatgggggaggcacagctcatagccacacacccagggcctgactgaggcccacgcaggaaccgacactcagacacaaggcaaagagggccacaggacccgggaaatacacacagagccaggagcagaagcaaagagcagacacacatacagcctgaaacagacctggacagacagacacagcctgaaacagacccggacagacagacacagcctgaaacagacccagacaaacagacagacagacacagcctgaaacagacccagacagacagacagacagcctgaaacagacccagacacagcctgaaacagatccggacagacagacagaaacagcctgaaacagacccagacagacagacagacacagcctgaaacagacccggacagacagacagacacagcctgaaacagacccggacagacagacagacacagcctgaaacagacccggacagacagacagacacagcctgaaacagacctagacagacagacacagattgaaacagacccagacaaacagacagacacagcctgaaacagacccagacacagcctgaaacagacccggacagacagacagacacagcctgaaacagacccagacagacagacagacacagcctgaaacagacccagacagacagaccgacgcagcctgaaagagacccagacagagagacaggcagacacagcctaaaacagacctggacagacaggcagacgtagtctgaaacagacctgaacagacagacagacgcacacacacaacagatgcgcagcaactccccgcccagggacccctcccggcctccctcgcacactgggaggaggaagccgccgagactgcagggagcctggccccggagccccgggtgcgccctggtctttggagcagccacggcccacaatcaccccccttttctaagactgcctgatccgaaataaagtattttgacaga

SEQ ID NO: 96806 - DNA, 900 bp, Artificial Sequence
  derived and/or modified sequence
atggccagcgccgcctgcagcatggaccccatcgacagcttcgagctgctggacctgctgttcgacagacaggacggcatcctgagacacgtggagctgggcgagggctggggccacgtgaaggaccaggtgctgcccaaccccgacagcgacgacttcctgagcagcatcctgggcagcggcgacagcctgcccagcagccccctgtggagccccgagggcagcgacagcggcatcagcgaggacctgcccagcgacccccaggacaccccccccagaagcggccccgccaccagccccgccggctgccaccccgcccagcccggcaagggcccctgcctgagctaccaccccggcaacagctgcagcaccaccacccccggccccgtgatccagcagcagcaccacctgggcgccagctacctgctgagacccggcgccggccactgccaggagctggtgctgaccgaggacgagaagaagctgctggccaaggagggcatcaccctgcccacccagctgcccctgaccaagtacgaggagagagtgctgaagaagatcagaagaaagatcagaaacaagcagagcgcccaggagagcagaaagaagaagaaggagtacatcgacggcctggagaccagaagctgctgctgccccctgcccagcagcagcagcccccccagcgccctgctggcccccaccaagcccagagccctgggcaccctgagactgtacgagtgcagccccgagctgtgcaccaccatgctgccccccgcctggctgctgatgctgtgccaggcccccagaccccaggaccccgaccccagactgacccagcccgagaagagcctgcaggaggcccccggccagaccggcgccagcagaacccccagaacctag

SEQ ID NO: 96807 - protein, 813 aa, Artificial Sequence
  derived and/or modified sequence
MSKLSFRARALDASKPLPVFRCEDLPDLHEYASINRAVPQMPTGMEKEEESEHHLQRAISAQQVYGEKRDNMVIPVPEAESNIAYYESIYPGEFKMPKQLIHIQPFSLDAEQPDYDLDSEDEVFVNKLKKKMDICPLQFEEMIDRLEKGSGQQPVSLQEAKLLLKEDDELIREVYEYWIKKRKNCRGPSLIPSVKQEKRDGSSTNDPYVAFRRRTEKMQTRKNRKNDEASYEKMLKLRRDLSRAVTILEMIKRREKSKRELLHLTLEIMEKRYNLGDYNGEIMSEVMAQRQPMKPTYAIPIIPITNSSQFKHQEAMDVKEFKVNKQDKADLIRPKRKYEKKPKVLPSSAAATPQQTSPAALPVFNAKDLNQYDFPSSDEEPLSQVLSGSSEAEEDNDPDGPFAFRRKAGCQYYAPHLDQTGNWPWTSPKDGGLGDVRYRYCLTTLTVPQRCIGFARRRVGRGGRVLLDRAHSDYDSVFHHLDLEMLSSPQHSPVNQFANTSETNTSDKSFSKDLSQILVNIKSCRWRHFRPRTPSLHDSDNDELSCRKLYRSINRTGTAQPGTQTCSTSTQSKSSSGSAHFAFTAEQYQQHQQQLALMQKQQLAQIQQQQANSNSSTNTSQGFVSKTLDSASAQFAASALVTSEQLMGFKMKDDVVLGIGVNGVLPASGVYKGLHLSSTTPTALVHTSPSTAGSALLQPSNITQTSSSHSALSHQVTAANSATTQVLIGNNIRLTVPSSVATVNSIAPINARHIPRTLSAVPSSALKLAAAANCQVSKVPSSSSVDSVPRENHESEKPALNNIADNTVAMEVT

SEQ ID NO: 96808 - DNA, 2442 bp, Artificial Sequence
  derived and/or modified sequence
atgtccaaactgtcttttagagcaagggccctcgacgcctccaaacccctgccggtgtttagatgtgaggaccttcccgacctgcatgagtacgcatctatcaatagagcagtcccacagatgcccaccggcatggagaaggaagaggagagtgagcatcatttgcaaagagcaatctcggcccagcaagtgtatggcgagaagagggataatatggttattcccgtgccggaggctgaaagtaacatagcctactatgaaagcatctatcctggagaatttaaaatgcccaaacagctcatacatattcaaccattctccctggatgccgaacaacccgactacgacctggacagcgaggatgaagttttcgttaacaaactgaagaaaaagatggatatttgtcctctccagtttgaagaaatgatcgaccgcctggagaaggggtctggccaacagcccgtgagccttcaagaggccaagctattgctgaaagaagatgacgagctcattagagaggtgtacgagtactggataaagaagcgaaagaattgtagggggccaagcctaataccgagcgtgaagcaggaaaagagagatggctcaagtactaatgatccttatgtcgctttccgtcgcaggactgagaagatgcagacacgcaagaatcggaaaaatgacgaggcttcatacgagaagatgttgaaattgaggcgtgacctttcacgtgctgttacaatcctggagatgatcaaaagacgtgagaagagcaagagggaactgctgcacctcacgttagagatcatggagaaacgctataacctcggagattataatggagaaattatgagcgaagtgatggcccaacgccagccaatgaagccgacatatgctatccctatcatccccatcacaaactcttctcagttcaagcaccaggaggccatggacgtgaaggaattcaaggtcaacaaacaggacaaggccgacctcattcgccccaaacgtaagtacgaaaaaaaacccaaggtgctccccagctcagcggccgccacaccccagcaaacttcgccagcggcactgcctgtattcaatgccaaagacctgaatcagtacgacttcccttcctccgacgaagaaccactgtcccaggtgctttctggaagcagcgaagctgaggaagataacgatccagatggacctttcgcattcagaaggaaagccggctgccaatactacgccccgcaccttgatcaaacggggaattggccctggacgtcaccgaaggacggaggactaggcgatgtgcggtacagatactgcttgaccacattaacggtgcctcagcgctgcatcgggttcgcaagacgccgtgtgggccgaggcggccgggtgctgcttgatcgggcccacagcgactatgactctgtgtttcaccacttggatctggaaatgctgtcttctccccagcattcaccagttaaccagttcgccaacacatcggaaactaacacatcagataagtcattcagcaaggatttaagccagatcctggtgaatatcaaaagttgccgatggcggcacttccgcccaagaaccccctctttacacgattcagataatgacgagctgagctgtagaaagctctatcggtctattaaccgcacaggtacagcccaaccaggcactcaaacctgcagcacttccactcagtccaaaagctcctccgggtcggctcattttgccttcactgccgagcagtaccagcagcaccagcagcagcttgccctcatgcagaagcagcagctagctcagattcagcagcagcaagctaactccaattccagcacaaacacctctcagggcttcgtcagtaagaccctcgacagtgccagtgcacagttcgcagccagtgcattagtgaccagcgagcagctgatggggtttaagatgaaggacgatgtcgtcctaggtatcggcgtcaatggcgtcctgcccgccagcggcgtgtacaaggggctccacctcagttcaactacacctactgcactggtgcacacttcgccctcaactgcagggagcgctctgctgcagccatcgaacattactcagacatctagttcccacagcgctctgagccatcaagtgacggccgccaatagtgcaactacgcaggtactgattgggaacaacatccgtctcaccgttccctcaagtgtggcaaccgtgaatagcattgcaccaattaacgctcgccacatccctagaaccctgtcggcggtgccaagtagcgccttaaagcttgctgctgccgctaactgtcaagtcagcaaagttccctcttcttcatcagtcgatagcgttcctagagaaaatcacgaaagcgaaaagccggctctgaacaacattgcagacaacactgtggccatggaggtgacttag

SEQ ID NO: 96809 - DNA, 2442 bp, Artificial Sequence
  derived and/or modified sequence
atgagcaagctgtccttccgggcccgggccctggatgccagcaagcccctgcccgtcttccgctgtgaggacctgcctgacctgcatgaatatgccagcatcaacagagctgtgccccagatgcccaccggcatggagaaggaggaggagagcgagcaccacctgcagagggccatcagcgcccagcaggtgtatggagagaagagggacaacatggtgattcctgtgcctgaggccgagagcaacatcgcctactatgagagcatctacccaggagagttcaagatgcccaagcagctgatccacatccagcccttcagcctggatgctgagcagcctgactatgacctggacagtgaagatgaggtgtttgtgaacaagctgaagaagaagatggacatctgccccctgcagtttgaggagatgattgaccggctggagaagggcagcggccagcagcctgtgtccctgcaggaggccaagctgctgctgaaggaggatgatgagctgatccgggaggtgtatgagtactggatcaagaagaggaagaactgccggggccccagcctcatccccagcgtgaagcaggagaagagagatggcagcagcaccaatgacccctacgtggccttcagaagaagaacagagaagatgcagaccaggaagaacaggaagaatgatgaggccagctatgagaagatgctgaagctgcggcgggacctgagcagagctgtgaccatcctggagatgatcaagagaagagagaagagcaagcgggagctgctgcacctgaccctggagatcatggagaagcgctacaacctgggggactacaatggagagatcatgtctgaggtgatggcccagaggcagcccatgaagcccacctacgccatccccatcatccccatcaccaacagcagccagttcaagcaccaggaggccatggatgtgaaggagttcaaggtgaacaagcaggacaaggctgacctgatccggcccaagaggaaatatgagaagaagcccaaggtgctgcccagcagcgctgctgccaccccccagcagaccagccctgctgccctgcccgtcttcaatgccaaggacctgaaccagtatgacttccccagcagtgatgaggagcccctgagccaggtgctgagcggcagcagcgaggccgaggaggacaatgaccctgatggcccctttgccttccggaggaaggccggctgccagtactatgccccccacctggaccagacaggcaactggccctggaccagccccaaggatggcggcctgggagatgtgcgctaccgctactgcctgaccaccctgactgtgccccagcgctgcatcggctttgccaggagaagagtgggccggggcggccgggtgctgctggaccgggcccacagcgactatgacagcgtcttccaccacctggacctggagatgctgagcagcccccagcacagccctgtgaaccagtttgccaacaccagcgagaccaacaccagtgacaagagcttcagcaaggacctgagccagatcctggtgaacatcaagagctgccgctggaggcacttccggcccaggacccccagcctgcatgacagcgacaatgatgagctgagctgcaggaagctgtaccgcagcatcaacagaactggaacagcccagcccggcacccagacctgcagcaccagcacccagagcaagagcagcagcggcagcgcccactttgccttcaccgctgagcagtaccagcagcaccagcagcagctggccctgatgcagaagcagcagctggcccagatccagcagcagcaggccaacagcaacagcagcaccaacaccagccagggctttgtgtccaagaccctggacagcgccagcgcccagtttgctgccagcgccctggtgaccagcgagcagctgatgggcttcaagatgaaggatgatgtggtgctgggcattggagtgaatggagtgctgcctgccagcggcgtgtacaagggcctgcacctgagcagcaccacccccacagccctggtgcacaccagccccagcacagctggcagcgccctgctgcagcccagcaacatcacccagaccagcagcagccacagcgccctgagccaccaggtgacagctgccaacagcgccaccacccaggtgctgattggcaacaacatccggctgactgtgcccagctctgtggccaccgtgaacagcatcgcccccatcaatgcccggcacatccccaggaccctgtctgctgtgcccagcagcgccctgaagctggccgctgctgccaactgccaggtgtccaaggtgcccagcagcagctctgtggacagcgtgcccagagaaaatcatgaaagtgagaagccagccctgaacaacattgctgacaacacagtggccatggaggtgacctag

SEQ ID NO: 96810 - DNA, 2442 bp, Artificial Sequence
  derived and/or modified sequence
atgagcaagctgagcttccgggcccgggccctggacgccagcaagccacttcccgtcttccggtgcgaagatcttccagatctccacgaatacgcctccattaaccgcgctgtccctcaaatgcctacaggcatggaaaaggaggaggaaagtgagcaccacctccagagggcgatatcagctcaacaggtgtatggtgaaaagcgggacaacatggttattccggtgcccgaggcggagtctaacattgcttactacgaatcaatttatcctggcgaatttaaaatgcccaagcaactcatccacattcagcccttcagcctcgacgccgaacaaccagactacgacctcgacagtgaggacgaggtgttcgtgaacaaactaaagaagaaaatggatatttgtcctttgcagtttgaagaaatgattgatcgactcgagaagggaagtgggcagcaacccgtctccctgcaagaggccaaactcctactgaaggaagacgacgagctgattcgtgaagtttatgagtattggatcaagaagcgaaaaaactgcagagggccttccttaattccttccgtcaaacaggagaagcgcgacgggagctctactaatgacccgtatgtagccttcaggcgtcgaacagaaaagatgcaaaccaggaaaaatcgtaaaaacgatgaggcttcatatgagaaaatgctaaaactaagacgcgatttgtcccgggccgtcactatcctggagatgattaagcgacgggaaaagagcaaaagagagttgcttcatctgacgttggagatcatggaaaaaaggtacaatctgggagactacaatggggaaataatgtccgaggtcatggcacagaggcaaccaatgaaacccacctacgcaatccccataataccgatcaccaattccagccagtttaaacaccaggaggccatggatgttaaagagttcaaagtgaacaaacaggataaagccgatctaatcaggccaaaacgcaagtacgagaagaaacccaaagtgctgccgtcctccgctgcagccacgccacagcagacgagtccagctgcactcccggtgtttaatgccaaagacctgaaccagtatgacttcccatctagtgacgaagaaccactatctcaggtgctttcaggaagttctgaggcggaggaagataatgatcccgacggcccgttcgccttcaggcggaaggcagggtgccagtactacgctccgcatctggaccaaactggcaattggccttggacatcccctaaggatggcggtctgggtgatgttcggtacagatattgtctgactactctgacggtacctcagcggtgcattggctttgcacgcagacgcgtgggacgcgggggtagagttctccttgatagagcccatagcgattatgactcagtgtttcaccacttagatctggagatgctgagttccccccagcactccccagtgaaccaattcgcaaatacttccgagaccaataccagcgacaaatctttctccaaggacctcagccagatcttagtgaatatcaagtcttgccgttggagacacttccgcccccggacaccttcccttcacgattccgataacgatgaactctcctgcagaaagttgtatcgatctattaacaggacaggcactgcccaacccggtacacagacttgttctaccagcacacagtcaaagtcttccagcgggtcagcccacttcgcctttacagcggagcagtatcagcagcatcaacagcaattggccctgatgcagaaacagcaactcgcccaaattcagcagcagcaggccaattccaattcatcaacgaatacaagtcagggttttgtgagcaaaaccctggactccgcttcagcccagtttgccgccagtgccttagtcacttccgaacagttgatgggattcaagatgaaagacgacgtggtccttggtattggcgtgaatggcgtcctacccgcctccggggtgtacaagggcctgcatttatctagcacaacgccaacagctctggtccacacctcccctagtaccgccggcagcgccctgctgcagccttctaacatcacccagaccagttcaagccatagcgccttaagccatcaggttacggcagctaactcagcgaccacgcaggtcctgatcggaaataatatccgcctaactgtgcccagttctgtagccaccgtcaactccattgccccaattaacgcgcggcatatacctagaacattaagtgccgtaccgagttcggcgctgaagctggcagccgctgccaactgtcaggtttccaaggttccttcttcctcctccgtggactcggtcccccgtgagaaccatgagtctgaaaaacccgctctgaacaatatcgctgataacactgtcgctatggaagtgacatag

SEQ ID NO: 96811 - DNA, 2442 bp, Artificial Sequence
  derived and/or modified sequence
atgtcaaaactcagttttcgggctcgcgctctcgatgcctctaagccacttcccgtgttccgatgcgaggatctgccagacctccacgaatatgcctcaatcaatcgagccgtaccccaaatgcccactgggatggaaaaggaggaagagtctgagcatcacctgcagagagctatctctgcacagcaagtgtacggagagaaacgcgacaacatggtgattccggtgcctgaggctgagtcaaatatcgcctactatgagagtatatatccaggagagtttaagatgccaaaacagctaatccacattcagcccttctctcttgacgcggagcagccagactatgatctggacagcgaagatgaggtgtttgtgaataagctaaaaaagaagatggacatctgtcccctccagtttgaggagatgatcgatcgcctcgaaaagggcagtgggcaacaaccagtcagtctgcaggaggccaaattgctgttaaaagaggacgacgaactcattcgtgaggtttacgaatactggatcaaaaaacgcaaaaactgccggggtcccagcctaataccttccgtgaagcaagagaagagggacggttcctctaccaatgatccatacgtggccttccgacgacgcaccgagaaaatgcagacaaggaagaatcggaagaacgatgaggcctcttatgaaaaaatgcttaaactgcgtcgcgacctgagcagggcagtgaccattttggagatgattaagaggagggagaagtccaaacgtgaattgttgcacctcaccctggagatcatggaaaaacgatacaatctcggggattacaatggtgaaataatgtcagaggttatggcgcagaggcagcccatgaagccaacatatgcaatccctataatccccatcacaaactccagtcagtttaaacaccaggaagccatggacgtcaaggagtttaaagttaataaacaggacaaagcggatctaataaggcccaaacgcaaatacgagaagaaaccaaaagtgctgccttcgtcggcagccgcaacaccgcagcagacgtcccctgcggcactccctgtgtttaacgctaaagatctgaaccaatatgatttcccctcctctgatgaggagccactgagtcaggttctcagcggtagtagtgaagcggaagaagacaatgatcctgacggcccatttgcctttcggagaaaagccggttgtcaatactacgcccctcatctggaccagacgggtaactggccctggaccagccctaaggatggaggtctgggagacgtgcgatatcgctactgtctgacaaccctcaccgtacctcagcggtgcataggcttcgctcgaagaagggtcggacgcggtggacgcgtgctgttagatcgcgctcacagtgattatgatagcgtgtttcaccatctggacctagagatgttgagcagcccacagcactcccctgtgaaccagttcgcgaacacgtctgagaccaacacctccgacaaatcctttagcaaggacttatcccaaatcttggtgaacataaagagctgccggtggaggcacttccgtccccgaacaccaagtctccacgattccgataatgatgagctatcttgccgcaaactctaccggtcaatcaatagaaccggcaccgctcaaccaggcacccagacctgcagtacatccactcagtctaagagcagttccgggagcgctcatttcgctttcaccgctgagcagtaccagcaacaccagcaacagttggctcttatgcaaaagcagcagttagcacaaatccagcagcagcaggctaactccaatagcagcacaaatacaagccagggcttcgtcagtaaaacgttagactcagcctccgcgcagttcgccgcttccgctcttgtgacatcagagcagctcatgggatttaaaatgaaggacgacgtggtgctgggcataggggtgaatggagtgcttccagcatccggcgtgtataagggtcttcatctgtccagcactacacctacagctttggttcacacgtccccctccacagcgggttcagccttgcttcagcctagcaatatcacgcagacaagctcttctcactctgcgttaagtcaccaggtaactgcagctaactcggctacaacccaggtgctgataggcaacaatatcagactcaccgtgccgagctccgtggcaacagttaatagtatagcaccaatcaacgccaggcacataccacggacactgagcgctgtgcccagctccgccctcaaacttgcagcggcagctaactgtcaggtctccaaggtgccttcttcctcatctgtcgatagcgttcctcgtgaaaatcatgaatcggaaaaaccagcattgaacaatattgccgataacactgtggcaatggaggtgacttag

SEQ ID NO: 96812 - DNA, 2442 bp, Artificial Sequence
  derived and/or modified sequence
atgagcaagctgagcttcagagccagagccctggacgccagcaagcccctgcccgtgttcagatgcgaggacctgcccgacctgcacgagtacgccagcatcaacagagccgtgccccagatgcccaccggcatggagaaggaggaggagagcgagcaccacctgcagagagccatcagcgcccagcaggtgtacggcgagaagagagacaacatggtgatccccgtgcccgaggccgagagcaacatcgcctactacgagagcatctaccccggcgagttcaagatgcccaagcagctgatccacatccagcccttcagcctggacgccgagcagcccgactacgacctggacagcgaggacgaggtgttcgtgaacaagctgaagaagaagatggacatctgccccctgcagttcgaggagatgatcgacagactggagaagggcagcggccagcagcccgtgagcctgcaggaggccaagctgctgctgaaggaggacgacgagctgatcagagaggtgtacgagtactggatcaagaagagaaagaactgcagaggccccagcctgatccccagcgtgaagcaggagaagagagacggcagcagcaccaacgacccctacgtggccttcagaagaagaaccgagaagatgcagaccagaaagaacagaaagaacgacgaggccagctacgagaagatgctgaagctgagaagagacctgagcagagccgtgaccatcctggagatgatcaagagaagagagaagagcaagagagagctgctgcacctgaccctggagatcatggagaagagatacaacctgggcgactacaacggcgagatcatgagcgaggtgatggcccagagacagcccatgaagcccacctacgccatccccatcatccccatcaccaacagcagccagttcaagcaccaggaggccatggacgtgaaggagttcaaggtgaacaagcaggacaaggccgacctgatcagacccaagagaaagtacgagaagaagcccaaggtgctgcccagcagcgccgccgccaccccccagcagaccagccccgccgccctgcccgtgttcaacgccaaggacctgaaccagtacgacttccccagcagcgacgaggagcccctgagccaggtgctgagcggcagcagcgaggccgaggaggacaacgaccccgacggccccttcgccttcagaagaaaggccggctgccagtactacgccccccacctggaccagaccggcaactggccctggaccagccccaaggacggcggcctgggcgacgtgagatacagatactgcctgaccaccctgaccgtgccccagagatgcatcggcttcgccagaagaagagtgggcagaggcggcagagtgctgctggacagagcccacagcgactacgacagcgtgttccaccacctggacctggagatgctgagcagcccccagcacagccccgtgaaccagttcgccaacaccagcgagaccaacaccagcgacaagagcttcagcaaggacctgagccagatcctggtgaacatcaagagctgcagatggagacacttcagacccagaacccccagcctgcacgacagcgacaacgacgagctgagctgcagaaagctgtacagaagcatcaacagaaccggcaccgcccagcccggcacccagacctgcagcaccagcacccagagcaagagcagcagcggcagcgcccacttcgccttcaccgccgagcagtaccagcagcaccagcagcagctggccctgatgcagaagcagcagctggcccagatccagcagcagcaggccaacagcaacagcagcaccaacaccagccagggcttcgtgagcaagaccctggacagcgccagcgcccagttcgccgccagcgccctggtgaccagcgagcagctgatgggcttcaagatgaaggacgacgtggtgctgggcatcggcgtgaacggcgtgctgcccgccagcggcgtgtacaagggcctgcacctgagcagcaccacccccaccgccctggtgcacaccagccccagcaccgccggcagcgccctgctgcagcccagcaacatcacccagaccagcagcagccacagcgccctgagccaccaggtgaccgccgccaacagcgccaccacccaggtgctgatcggcaacaacatcagactgaccgtgcccagcagcgtggccaccgtgaacagcatcgcccccatcaacgccagacacatccccagaaccctgagcgccgtgcccagcagcgccctgaagctggccgccgccgccaactgccaggtgagcaaggtgcccagcagcagcagcgtggacagcgtgcccagagagaaccacgagagcgagaagcccgccctgaacaacatcgccgacaacaccgtggccatggaggtgacctag

SEQ ID NO: 96813 - DNA, 4057 bp, Artificial Sequence
  derived and/or modified sequence
gcgtgcccgcgccgctgcgcgatgcagtgtggggaatggctggggttggctgaagagcgcacagtggagttttaatgtccgccatgttggccatggcgtattgaagagagcgagcgagagaggagcggagcggcacagcctcccaccctcccggctggtgttagtgcccggacggcgggctctgcgctccgcccctcaagtccccggcagcggttggcgagtggggaccgaacccccggttctccatgatcccgctggccggggccgtttccccagagcggagaggtatctgctgcgcctgagatgagtaaactgtcgtttcgggcgcgggcgctagacgcctcgaagccgctgccggttttccgctgtgaggatctgcccgacctgcacgaatacgcctcgataaacagggccgtgccgcagatgcccaccggaatggagaaggaagaggagtcggaacatcatcttcagcgggctatttcagcacagcaggtgtatggcgagaagagggataatatggttataccggtcccagaggcagaaagtaatattgcttactatgagtctatatatcctggggaatttaagatgccaaagcagctcattcacatacagccttttagtttggatgctgaacagcctgattatgatttggattctgaagatgaagtatttgtgaataaactgaaaaagaaaatggacatctgcccattgcaatttgaggagatgattgaccgcctagaaaaaggcagtggtcagcagccagtcagtctgcaggaagccaaactactgctaaaagaagatgatgaactaattagagaagtttatgaatattggattaaaaagagaaaaaactgtcgagggccatctcttattccatcagtaaaacaagagaagcgagatggttccagcacaaatgatccttatgtggcttttagaaggcgtactgaaaaaatgcagactcgaaaaaatcgcaaaaatgatgaagcctcttacgaaaaaatgcttaagctgcgacgagatctaagtcgagctgttactattctagagatgataaaaagaagagaaaaaagtaaaagagagctattgcacttaacactggaaattatggaaaagaggtataatttgggcgactacaatggagagatcatgtctgaggttatggcacagagacagccaatgaaacctacttatgccatccccatcatccctattactaatagcagtcaatttaaacaccaggaagcaatggatgtgaaggagttcaaagttaataagcaagataaagccgatcttatccgaccgaaacggaaatatgaaaagaagcccaaagtcttaccatcgtctgccgctgctactccccaacagacgagtcctgctgcactgccagtcttcaatgctaaagatctgaatcagtatgactttcccagctcagacgaagaacctctctcccaggttttgtctggctcttcggaagctgaggaagacaatgatcctgatggtccttttgctttccgtaggaaagcaggctgtcagtactatgctcctcacttagaccaaactggcaactggccttggactagtcctaaagatggaggattaggggatgtgcgatatagatactgcttaactactctcaccgtaccccaaaggtgtattggatttgcacgaagacgggttgggcgcggtggaagggtcttactggacagagctcattcagactatgacagtgtgtttcaccatctggatttggaaatgctttcctcaccacaacattctccagtcaatcagtttgccaatacctcagaaacaaatacctcggacaaatctttctctaaagacctcagtcagatactagtcaatatcaaatcatgtagatggcggcattttaggcctcggacaccatccctacatgacagtgacaatgatgaactctcctgtagaaaattatataggagtataaaccgaacaggaacagcacaacctgggacccagacatgcagtacctctacgcaaagtaaaagtagcagtggttcagcacactttgcatttacagccgaacaataccagcaacatcaacagcaactggcactcatgcagaaacagcagcttgcacaaattcagcaacagcaagcaaatagtaattcctccaccaacacatcacagggttttgtttctaagactttggattctgctagtgcacagtttgctgcttctgctttggtgacatcagaacaactgatgggattcaagatgaaggatgatgtggtgcttggaatcggggtgaatggcgtccttccagcctcaggagtatacaagggcttacacctcagtagtactacaccaacagcacttgtacatacaagtccatcaacggcaggttcagctttgttacagccttcaaatattacacagacttcaagttcccacagtgcactgagtcatcaagtaactgctgccaattctgcaacaactcaggttctgattgggaacaacattcgattaactgtaccttcatcagttgccactgtaaactctattgccccaataaatgcacgacatatacctaggactttaagtgctgttccatcatctgccttaaagctggccgctgcagcaaactgtcaagtttccaaggtcccatcttcatcctctgtagattcagttccaagggaaaatcatgaatcagaaaagccagcactgaacaacatagcagacaacacagtagcgatggaggtgacgtagcttcctccgagtggaactgcagcctggggacttgattaggtgctatgcatcagtagcattttgaatgcaagggatgatggaaagcagcacatgcgtttctgtggcagctgtggggacttgacagcaatgctcatctctcatgcttcaatttttcttttcttactgttaataggaaaaaaatcaacatctgtaaattaagaatacagcaattatctgtacagtactgcatatttgtaatacccttgtatatatgttacttgaatacagaaatgttcatttgtgatgctttgcacttgggggtggggggtgggagggaaatcaattgcaacaaagagtgtgagatgtgagattgtatagagatgaagtgtcatcacatcatgtgcatggtgcggaacctgctgttttatctatttattgtgccgtgtttacagttttttgtacactgtaccttcattggttcctgtgctgtagtaaatgtgttaggtagctgtggactccttggtattttgtaaatggtataacataacttggttcccctctgggtccttgagttttctgtgtatcatgtgaaaaaaaatggtgacatacatacagaattttacaaaaaaaaaaaaaaaaaaaaaggcatcagtttttttaaaaatggggaatgtactattaaatggggatcttcctggtctactatcattaggacaagtaacaagctaaaaatgaagtctcttgaatctttccatccccaacttgcccacaaagctgtgggtggtttctggtacttaaagcactaatattatgttgctgctctgcgaacagcccagtagtcccatttccttccacaccaaaaagtgttaaatcaagtatgcaaatggagtccttacaactggagtttatgttgtcttgccctttttttagcacaaaaaaaattgtacttttttattgtcgaattgtttaaaagacttcattctttacttgttcttacgaaaaggatataagggagaagaatgcagtaattgctgtacgtgtatcatcattccagtttctaaaaacagccagccagcttttttccttttaagattctccagaaggctgcaaggccagaaccacaaatatcgggtgccttcctttggaaatatttgacctctcttctgtgaagagaatggtacttaacagactactactagtgctttgtcagtaccgaagtctgaatgcccagtccaatggcatacattatccttaaggtttttaatcccacctggaaaaattgtgatagaattctcacaaaataaacccagggcattacatgttgacaaactaa

SEQ ID NO: 96814 - protein, 637 aa, Artificial Sequence
  derived and/or modified sequence
MHLRIHARRSPPRRPAWTLGIWFLFWGCIVSSVWSSSNVASSSSTSSSPGSHSQHEHHFHGSKHHSVPISIYRSPVSLRGGHAGATYIFGKSGGLILYTWPANDRPSTRSDRLAVGFSTTVKDGILVRIDSAPGLGDFLQLHIEQGKIGVVFNIGTVDISIKEERTPVNDGKYHVVRFTRNGGNATLQVDNWPVNEHYPTGRQLTIFNTQAQIAIGGKDKGRLFQGQLSGLYYDGLKVLNMAAENNPNIKINGSVRLVGEVPSILGTTQTTSMPPEMSTTVMETTTTMATTTTRKNRSTASIQPTSDDLVSSAECSSDDEDFVECEPSTGGELVIPLLVEDPLATPPIATRAPSITLPPTFRPLLTIIETTKDSLSMTSEAGLPCLSDQGSDGCDDDGLVISGYGSGETFDSNLPPTDDEDFYTTFSLVTDKSLSTSIFEGGYKAHAPKWESKDFRPNKVSETSRTTTTSLSPELIRFTASSSSGMVPKLPAGKMNNRDLKPQPDIVLLPLPTAYELDSTKLKSPLITSPMFRNVPTANPTEPGIRRVPGASEVIRESSSTTGMVVGIVAAAALCILILLYAMYKYRNRDEGSYQVDETRNYISNSAQSNGTLMKEKQQSSKSGHKKQKNKDREYYV

SEQ ID NO: 96815 - DNA, 1914 bp, Artificial Sequence
  derived and/or modified sequence
atgcacctgagaattcacgccagaaggagtcctccccggcgacccgcttggaccttggggatatggtttctgttttggggttgcatagtctcctccgtgtggagttcctctaatgtggcgtccagcagcagcacaagctctagtcctgggtcgcattcccagcacgaacaccacttccacggctcgaagcaccattccgtgcccatttcaatctatagaagtcctgtctccctgaggggtggccatgccggggcaacatacattttcggaaaaagcgggggcctcattctatatacttggcccgcaaacgatcgaccctctacacgatcagatcgcctggctgtcggctttagtacaaccgtcaaggacggaattctggtccgaatcgactcagcccccggactcggcgattttctgcaacttcatattgagcagggcaagatcggcgtggttttcaacattggaactgtcgatatctcaatcaaggaggaacgaacacctgtcaatgatggcaaataccatgtggtcagattcaccaggaatgggggcaacgcgacccttcaggtcgataattggccagtcaatgagcactatccaacagggcggcaactaacaatcttcaatacacaggcacagattgccatcggtgggaaggacaagggacggctattccaaggccagctgagtggcttgtattatgacggtctgaaggtgttgaacatggctgctgagaacaacccaaacatcaagatcaacggctcggtgcggctcgtcggagaggtgccctctatacttggcactacccaaaccacaagtatgccccctgaaatgtctactactgtgatggaaacgaccacaacaatggctactactaccacccgtaagaacagatctacagcaagcatccagcccacctctgacgacctcgttagcagtgctgagtgcagctcagatgacgaagatttcgtggaatgcgagccttccactgggggcgagctggtgatccccctgctagttgaagaccctctggccactcctccaatcgccacgcgggccccgagtatcactctaccacccactttccgaccactgctgactataatcgagaccaccaaggattccttgtccatgaccagtgaagccggcctgccatgcctgtctgaccaaggttctgacggctgcgatgacgatggattggtgatcagcggctacggatccggcgagacctttgactccaatctgccacccacggacgatgaagacttttacaccaccttctccctggtcaccgataagtcgctgagtaccagcatctttgagggaggctataaagcccacgctcccaaatgggaatccaaggactttagaccaaacaaagtgtctgaaacttctcgaacaactacgacaagcctatcgccagaactcatacggtttacagcatcatcatcgtctggcatggtccccaagttacctgccgggaaaatgaataatagagatctgaagccacagccggatatcgtcctcctcccactccccaccgcatacgagctggactctaccaaactgaagagccccctaataacctcaccaatgttcagaaacgtgcctaccgctaacccaaccgagcctgggattaggagagtgcccggcgcctctgaggtgatccgggaaagtagctctacaacagggatggtggtgggcatcgtcgctgcagcagccctctgcattctcatcctgctatacgcaatgtataaatataggaaccgggacgaagggagctaccaagtggatgaaacccggaattacatctcaaactccgcacaaagcaacggaacgctgatgaaagaaaaacaacagagtagcaagagtggtcataagaagcagaaaaataaggatcgcgaatattacgtctag

SEQ ID NO: 96816 - DNA, 1914 bp, Artificial Sequence
  derived and/or modified sequence
atgcacctgcgcatccacgcccggcgcagccccccaagaagacctgcctggaccctgggcatctggttcctgttctggggctgcatcgtgtcctctgtgtggagcagcagcaatgtggccagcagcagcagcaccagcagcagccctggcagccacagccagcacgagcaccacttccacggcagcaagcaccacagcgtgcccatcagcatctaccgcagccctgtgtccctgcggggcggccatgctggggccacctacatctttgggaagagcggcggcctcatcctgtacacctggccagccaatgaccggcccagcaccaggagtgaccggctggccgtgggcttcagcaccaccgtgaaggatggcatcctggtgagaattgattctgcccctggcctgggggacttcctgcagctgcacatcgagcagggcaagattggagtggtgttcaacatcggcaccgtggacatcagcatcaaggaggagaggacccctgtgaatgatggcaagtaccacgtggtgcgcttcaccagaaatggaggaaatgccaccctgcaggtggacaactggcctgtgaatgagcactaccccaccggccggcagctgaccatcttcaacacccaggcccagatcgccatcggcggcaaggacaagggccgcctcttccagggccagctgagcggcctgtactatgatggcctgaaggtgctgaacatggctgctgagaacaaccccaacatcaagatcaatggatctgtgcggctggtgggggaggtgcccagcatcctgggcaccacccagaccacctccatgcctcctgagatgagcaccaccgtgatggagaccaccaccaccatggccaccaccaccaccaggaagaacagaagcacagccagcatccagcccaccagtgatgacctggtgagcagcgctgagtgcagcagtgatgatgaggactttgtggagtgtgagcccagcactggaggagagctggtgatccccctgctggtggaggaccccctggccaccccacccatcgccacccgggcccccagcatcaccctgccccccaccttccggcccctgctgaccatcatcgagaccaccaaggacagcctgtccatgaccagcgaggccggcctgccctgcctgagtgaccagggcagtgatggctgtgatgatgatggcctggtgatcagcggctacggcagcggggagacctttgacagcaacctgcccccaacagatgatgaggacttctacaccaccttcagcctggtgacagacaagagcctgagcaccagcatctttgaaggaggctacaaggcccacgcccccaagtgggagagcaaggacttccggcccaacaaggtgtctgagaccagcaggaccaccaccaccagcctgagccctgagctgatccgcttcaccgccagcagcagcagcggcatggtgcccaagctgcctgctgggaagatgaacaacagagacctgaagccccagcctgacatcgtgctgctgcccctgcccacagcctatgagctggacagcaccaagctgaagagccccctcatcaccagccccatgttcagaaatgtgcccacagccaaccccacagagcccggcatccggcgggtgcctggggccagcgaggtgatccgggagagcagcagcaccaccggcatggtggtgggcatcgtggccgccgccgccctgtgcatcctgatcctgctgtatgccatgtacaagtacagaaacagagatgagggcagctaccaggtggatgagaccaggaactacatcagcaacagcgcccagagcaatggcaccctgatgaaggagaagcagcagagcagcaagagcggccacaagaagcagaagaacaaggaccgggagtactacgtgtag

SEQ ID NO: 96817 - DNA, 1914 bp, Artificial Sequence
  derived and/or modified sequence
atgcacctgcggatccacgcccggcggagccccccccggcggcccgcgtggacgctcggcatctggttccttttctggggctgcatagtaagttctgtttggagtagcagtaatgtggcgtcatcaagcagcacatcatctagtcctgggtctcactcccagcatgagcatcactttcacggctccaagcatcacagcgtacctatctcaatttacaggtcacccgtctcactacggggagggcatgctggcgcaacatatatcttcgggaaaagcggaggtttgatcttgtacacttggccagcaaatgatcgccctagtacccgcagcgataggctagccgtgggattctccacgactgtgaaggatggtatcttggtaagaatagacagtgcccccgggctgggcgattttttgcagctccacatcgaacagggcaaaataggcgtggtatttaacatcggcacagtcgatatcagcatcaaagaagaacggacacccgtgaatgatggaaagtaccacgttgtgcggtttactcgtaacggggggaacgccacattacaggttgacaattggcccgttaacgaacactacccaacgggtaggcagcttaccatcttcaacacacaggcccaaatagctatcggcggaaaagacaaaggaaggctcttccaaggacagctgtccggtctctactacgacggactcaaagtattgaacatggcagccgagaacaatccaaatatcaagatcaacggctctgtgcggctggtgggagaggtcccctccattctaggtaccacccagactacatccatgccacctgaaatgtcgacaacggtgatggagacaactaccacaatggctacaacgacaacacgcaaaaaccggtccaccgcatctatccagcctactagcgatgatctggtgagctctgctgaatgcagttctgacgacgaagactttgtcgagtgcgaaccttccactggaggcgaattggttattcccttgctggtcgaagatccgctggcaaccccaccaatcgcaactagagccccttcaatcactctgcccccaactttcaggcccctcctcactataatagagaccacaaaagacagcctcagcatgacatccgaggctgggctgccatgcctaagtgaccaaggtagcgatggctgtgatgacgacgggcttgttatctctgggtatgggagcggggagacctttgactcaaatttaccacctacagatgacgaggacttctacacgacattcagcttggtgacggataaatcactgtcaactagcatttttgaggggggctataaagcccatgcaccaaagtgggagagcaaggactttcgtcccaacaaagtgtccgagacaagcagaactacaaccacaagcctatcacccgagctgatccgcttcacagcctcctctagctcagggatggtcccaaaactacctgcaggtaaaatgaataatcgtgatctcaagcctcaacccgacatagttctgttgcccctgccaacagcctacgagctggattccacaaaactcaaaagcccgctgattaccagtcctatgttccggaacgtccctactgcgaaccctaccgagcctgggatccggagagtcccaggtgcctcggaggtgataagagagagcagctccaccactggaatggtggttggcattgtggccgctgcagctctgtgtatacttatactcctgtacgccatgtacaagtaccgcaaccgtgatgaaggctcttaccaggtagacgagacccgcaactatattagtaactcagctcagagcaatggtaccctgatgaaagagaaacagcagagctcaaaaagcggacataaaaaacagaaaaataaagaccgagaatattatgtgtag

SEQ ID NO: 96818 - DNA, 3381 bp, Artificial Sequence
  derived and/or modified sequence
atatgacttgcccatttgtgaatttggctccccaactcctcgcttcacttcacctgtgcctccctggtccgcgcacttcgcaggcgcccgcccgcctctcggccacctctgcagcctgccaggcacctcctcttgcgctctcgctgatttcgcccacccacctccctccaccccgtgccacgttggtttgggtggctgctccgcaccgggttcctcctcctctcctctttccctccagtccttcttattctcttcctctggctgcggtggctgctgctgctgctggttttcatccagttgggaaacccaggaagccggcggctgctccgtggcgctagtccagcacgcccagggttaaaagcctcgcgcccttccgcggagactcccaggaacacccgaagaactcttccacctgcagcccccttttgcctggcagttctgcattgcatctcatggaagtggaaacaggaaaataaaaatgttcaaactccttggatgttgggataaactcacctgaacccacttgggttcgggctgcctccttctcttccttcattgccacctttcctctgtgtggctcccgggagtgtgcggttaagtcatcagactcgaagtgcctagagatccggaggaagccgcgccggtcttcccctgacatgcgtggcatgccggggctccgtaggaggtttgctatacctgggaggaccctggcattctaaatttcagctccgggaaagagaaggggctttttgccttttatcttttttttttctttctttaagtagtaattttttaactgattcattgtttggaaagcgcatattgcttccctcttccccgaattctggcaactcttcctcctgctatgatgggcccttgggcatcatgaacttcattactcctcactggctggaattcaaactgcccatctgtagtggtcccgtgcgttgaccatgcacctgagaatccacgcgagacggagccctcctcgccggccggcctggacgcttgggatctggttcctgttctggggatgtatcgtcagctctgtatggagttcttctaatgtagcttcctcctcctccacctcttcctcgccggggtctcactctcagcacgagcaccatttccatggcagcaagcatcactcagtgcctatttctatctatcgttcccctgtttcccttcgaggaggacacgctggcgctacgtacatctttgggaaaagtggtgggcttatcctctacacctggccagccaatgacaggcccagcacgcggtctgaccgccttgccgtgggcttcagcaccactgtgaaggatggcatcttggtccgcatcgacagtgctccaggacttggtgacttcctccagcttcacatagaacaggggaaaattggagttgtcttcaacattggcacagttgacatctccatcaaagaggagagaacccctgtaaatgacggcaaataccatgtggtacgcttcaccaggaacggcggcaacgccaccctgcaggtggacaactggccagtgaatgaacattatcctacaggccggcagttaaccatcttcaacactcaggcgcaaatagccattggtggaaaggacaaaggacgcctcttccaaggccaactctctgggctctattatgatggtttgaaagtactgaacatggcggctgagaacaaccccaatattaaaatcaatggaagtgttcggctggttggagaagtcccatcaattttgggaacaacacagacgacctccatgccaccagaaatgtctactactgtcatggaaaccactactacaatggcgactaccacaacccgtaagaatcgctctacagccagcattcagccaacatcagatgatcttgtttcatctgctgaatgttcaagtgatgatgaagactttgttgaatgtgagccgagtacaggaggtgaattagttatccctcttcttgtagaagaccctttagctacccctcctattgctactcgtgcaccttccattacactcccccctacctttcgccccctcctcaccattattgagaccaccaaagattccctgtccatgacctctgaggcggggttaccttgcttgtcggaccaaggcagcgatggttgtgatgatgatggcttggtgatatctgggtatggctcaggggaaacctttgactctaacctgccccctactgatgatgaagatttttacaccaccttctccttggtaacagataagagtctttccacttcaatcttcgaaggtggctacaaagcacatgcgcccaagtgggaatccaaggactttagacctaacaaagtctccgaaactagtaggactactaccacatctttatcccctgagctgatccgcttcacagcttcctcctcgtctgggatggtgcccaaattgccagctggcaaaatgaataaccgtgatctcaaaccccagcctgatatagtcttgcttccgttgcccactgcctatgagctagacagcaccaaactgaagagcccactaattacttcccccatgttccgtaatgtgcccacagcaaaccccacggagccgggaatcagacgggttccgggggcctcagaggtgatccgggagtcgagcagcacaacagggatggtcgtcggcattgtggctgctgccgccctctgcatcttgatcctcctgtacgccatgtacaagtacaggaacagggacgaggggtcctatcaagtggacgagacgcggaactacatcagcaactccgcccagagcaacggcacgctcatgaaggagaagcagcagagctcgaagagcggccacaagaaacagaaaaacaaggacagggagtattacgtgtaaacatgcgaacactgctcacacgcgagttttcacagttatttctatccacgcctatgaatctttggacggtgagatctcacagatgtcagaactgctggaactatgaaatggggtatataaccacgactctggtggggaaaaccgttttttaaaggacacacacacacacagcgatgcatctctctctaaagctcagccacggctgcggcaaggtcccagcggtcgctgggagacagaaggttttgtgccctgctgtatcataaagcacacacttagcgctctggagccggacggtggctccaccacttccgcaggcctggaaacttccttctccggaggaccttttactaaaaggtagaagacttcatggcttacttgttccataactccaagtgagtctgtaatgtttgtgaagcttgactgtaaccatgttttttctgtttaattatgtaaaaaacaaaactacaacaacaaaaaaagaaaaaagttaaaaaagaaaaaaacaccaaaaaac

SEQ ID NO: 96819 - DNA, 1914 bp, Artificial Sequence
  derived and/or modified sequence
atgcacctgcggattcatgctcgcagaagtccgccaagaaggcccgcttggacacttggaatatggttcctcttctggggctgcatagtgagcagcgtctggtcttcatccaacgttgcctcatccagctctacatcatcctcccccggatctcactcacagcacgaacatcacttccatggtagtaaacaccactcagttcccattagcatctaccgctctccagtcagtctgcgagggggacatgctggtgccacgtacattttcgggaagagcggcggactgatcctatatacctggccagcgaatgatcgcccatctacgagaagtgataggctcgctgttggtttttcaaccacagtgaaggacgggattttagtgcggatagactccgcacccggattgggtgatttcctccagttacatattgaacaaggaaaaataggcgtcgtcttcaacatagggactgtggacatttctataaaggaagaaaggacacccgtcaacgatgggaagtatcacgttgtgcgttttactaggaatggcggaaacgcaacgttacaggtcgacaattggccggtcaatgaacattatcccactgggagacagctgactatcttcaacacccaggcgcagatcgccataggcggaaaagacaagggcagactgttccaagggcagcttagcgggctgtactatgacggcctgaaagtgctcaacatggcagcagagaacaatcccaatataaaaatcaacggctccgttcgtctggtgggcgaggttcctagcatccttggaactacgcaaacaaccagcatgccacccgaaatgagcactaccgtgatggagacaacaactaccatggcaacgaccaccacaagaaagaaccgcagtacagcctctatccaaccaacctccgacgacctggttagctcggctgagtgtagctccgacgacgaagattttgttgagtgtgagccctcaaccggtggggaactggtgattcctctgctggtggaggatcctttggctaccccgccaattgccacacgtgcacctagtataactctacctcctacatttaggcccttactcacaattattgagactacgaaagactcgttatcgatgacaagcgaggccggactgccctgtctgagtgaccaaggctctgacggatgtgatgacgacgggctcgtgatttctggctacggatccggggaaacattcgattccaacctgccaccaacagatgatgaagacttctatacaacttttagtttagtcactgacaaatctctgagcacctcaattttcgagggtggctataaggctcatgctccaaaatgggaatctaaggacttcaggcccaataaggtgtcagaaacaagcaggacgacaactaccagtctgagccctgagctgattcgattcaccgccagctcttctagtggaatggtgcctaagcttccggctggtaaaatgaataatcgtgacctgaagcctcaaccggacatcgtgctgctgcctctgcctactgcctatgaactcgactctacgaagctcaaatcaccgctgattacatctcccatgttccgaaatgtgcccactgctaaccctacagagcctggaatacgtagggtccccggtgcgtccgaggtaatccgagaaagttcgtctacgaccgggatggtggtggggatagtggctgcagccgcactgtgtattctgattcttctgtacgcaatgtacaagtatcgtaatagagacgagggctcctatcaagtcgatgaaacccgtaattacatcagtaacagtgcccagtcaaacggtactctgatgaaggagaagcagcaatcaagcaagagtgggcataagaaacaaaagaacaaggacagggagtattacgtgtag

SEQ ID NO: 96820 - DNA, 1914 bp, Artificial Sequence
  derived and/or modified sequence
atgcacctgagaatccacgccagaagaagcccccccagaagacccgcctggaccctgggcatctggttcctgttctggggctgcatcgtgagcagcgtgtggagcagcagcaacgtggccagcagcagcagcaccagcagcagccccggcagccacagccagcacgagcaccacttccacggcagcaagcaccacagcgtgcccatcagcatctacagaagccccgtgagcctgagaggcggccacgccggcgccacctacatcttcggcaagagcggcggcctgatcctgtacacctggcccgccaacgacagacccagcaccagaagcgacagactggccgtgggcttcagcaccaccgtgaaggacggcatcctggtgagaatcgacagcgcccccggcctgggcgacttcctgcagctgcacatcgagcagggcaagatcggcgtggtgttcaacatcggcaccgtggacatcagcatcaaggaggagagaacccccgtgaacgacggcaagtaccacgtggtgagattcaccagaaacggcggcaacgccaccctgcaggtggacaactggcccgtgaacgagcactaccccaccggcagacagctgaccatcttcaacacccaggcccagatcgccatcggcggcaaggacaagggcagactgttccagggccagctgagcggcctgtactacgacggcctgaaggtgctgaacatggccgccgagaacaaccccaacatcaagatcaacggcagcgtgagactggtgggcgaggtgcccagcatcctgggcaccacccagaccaccagcatgccccccgagatgagcaccaccgtgatggagaccaccaccaccatggccaccaccaccaccagaaagaacagaagcaccgccagcatccagcccaccagcgacgacctggtgagcagcgccgagtgcagcagcgacgacgaggacttcgtggagtgcgagcccagcaccggcggcgagctggtgatccccctgctggtggaggaccccctggccaccccccccatcgccaccagagcccccagcatcaccctgccccccaccttcagacccctgctgaccatcatcgagaccaccaaggacagcctgagcatgaccagcgaggccggcctgccctgcctgagcgaccagggcagcgacggctgcgacgacgacggcctggtgatcagcggctacggcagcggcgagaccttcgacagcaacctgccccccaccgacgacgaggacttctacaccaccttcagcctggtgaccgacaagagcctgagcaccagcatcttcgagggcggctacaaggcccacgcccccaagtgggagagcaaggacttcagacccaacaaggtgagcgagaccagcagaaccaccaccaccagcctgagccccgagctgatcagattcaccgccagcagcagcagcggcatggtgcccaagctgcccgccggcaagatgaacaacagagacctgaagccccagcccgacatcgtgctgctgcccctgcccaccgcctacgagctggacagcaccaagctgaagagccccctgatcaccagccccatgttcagaaacgtgcccaccgccaaccccaccgagcccggcatcagaagagtgcccggcgccagcgaggtgatcagagagagcagcagcaccaccggcatggtggtgggcatcgtggccgccgccgccctgtgcatcctgatcctgctgtacgccatgtacaagtacagaaacagagacgagggcagctaccaggtggacgagaccagaaactacatcagcaacagcgcccagagcaacggcaccctgatgaaggagaagcagcagagcagcaagagcggccacaagaagcagaagaacaaggacagagagtactacgtgtag

SEQ ID NO: 96821 - protein, 398 aa, Artificial Sequence
  derived and/or modified sequence
MCIRVHVSMCMCMCVHVCVHLCMHVCAVCMCVYVCVCVHVHVCASVCAFVCMCVCVCVCGSVCAFVSVHVCMRVYVCVCICVHLYVCVCVCLCACVYACVCMCLRLCVRLCVSVCACVYACICMCICVHVSMYVCASVCACVCVCVCVCVCMRVCAHQCLHVCICVYVCARICVCACVYVCVCISVCACVYVCVHLCVCACVHACVCVCACVHLCVCACAHVGATLVCICTYTCPRPSMFAHGGRWGVAGRPRQPMSLGVQAQAQRVIHLPQSVQALIKDFQGTPTFTYKAAHIFFTDTCPEPLFSELGRSRLAKVVKTLKEIHLAFLPYEAQVRPGLILGRGWGFVTKCPLFPQKQTLRLGAVAHTCNPSAVGGQGRRITWGQEFETSLGTEQDPVS

SEQ ID NO: 96822 - protein, 604 aa, Artificial Sequence
  derived and/or modified sequence
MAPSGLKAVVGEKILSGVIRSVKKDGEWKVLIMDHPSMRILSSCCKMSDILAEGITIVEDINKRREPIPSLEAIYLLSPTEKAQAQRVIHLPQSVQALIKDFQGTPTFTYKAAHIFFTDTCPEPLFSELGRSRLAKVVKTLKEIHLAFLPYEAQVFSLDAPHSTYNLYCPFRAEERTRQLEVLAQQIATLCATLQEYPAIRYRKGPEDTAQLAHAVLAKLNAFKADTPSLGEGPEKTRSQLLIMDRAADPVSPLLHELTFQAMAYDLLDIEQDTYRYETTGLSEAREKAVLLDEDDDLWVELRHMHIADVSKKVTELLRTFCESKRLTTDKANIKDLSQILKKMPQYQKELNKYSTHLHLADDCMKHFKGSVEKLCSVEQDLAMGSDAEGEKIKDSMKLIVPVLLDAAVPAYDKIRVLLLYILLRNGVSEENLAKLIQHANVQAHSSLIRNLEQLGGTVTNPGGSGTSSRLEPRERMEPTYQLSRWTPVIKDVMEDAVEDRLDRNLWPFVSDPAPTASSQAAVSARFGHWHKNKAGIEARAGPRLIVYVMGGVAMSEMRAAYEVTRATEGKWEVLIGSSHILTPTRFLDDLKALDKKLEDIALP

SEQ ID NO: 96823 - DNA, 1197 bp, Artificial Sequence
  derived and/or modified sequence
atgtgcatcagagtgcacgtgagcatgtgcatgtgcatgtgcgtgcacgtgtgcgtgcacctgtgcatgcacgtgtgcgccgtgtgcatgtgcgtgtacgtgtgcgtgtgcgtgcacgtgcacgtgtgcgccagcgtgtgcgccttcgtgtgcatgtgcgtgtgcgtgtgcgtgtgcggcagcgtgtgcgccttcgtgagcgtgcacgtgtgcatgagagtgtacgtgtgcgtgtgcatctgcgtgcacctgtacgtgtgcgtgtgcgtgtgcctgtgcgcctgcgtgtacgcctgcgtgtgcatgtgcctgagactgtgcgtgagactgtgcgtgagcgtgtgcgcctgcgtgtacgcctgcatctgcatgtgcatctgcgtgcacgtgagcatgtacgtgtgcgccagcgtgtgcgcctgcgtgtgcgtgtgcgtgtgcgtgtgcgtgtgcatgagagtgtgcgcccaccagtgcctgcacgtgtgcatctgcgtgtacgtgtgcgccagaatctgcgtgtgcgcctgcgtgtacgtgtgcgtgtgcatcagcgtgtgcgcctgcgtgtacgtgtgcgtgcacctgtgcgtgtgcgcctgcgtgcacgcctgcgtgtgcgtgtgcgcctgcgtgcacctgtgcgtgtgcgcctgcgcccacgtgggcgccaccctggtgtgcatctgcacctacacctgccccagacccagcatgttcgcccacggcggcagatggggcgtggccggcagacccagacagcccatgagcctgggcgtgcaggcccaggcccagagagtgatccacctgccccagagcgtgcaggccctgatcaaggacttccagggcacccccaccttcacctacaaggccgcccacatcttcttcaccgacacctgccccgagcccctgttcagcgagctgggcagaagcagactggccaaggtggtgaagaccctgaaggagatccacctggccttcctgccctacgaggcccaggtgagacccggcctgatcctgggcagaggctggggcttcgtgaccaagtgccccctgttcccccagaagcagaccctgagactgggcgccgtggcccacacctgcaaccccagcgccgtgggcggccagggcagaagaatcacctggggccaggagttcgagaccagcctgggcaccgagcaggaccccgtgagctag

SEQ ID NO: 96824 - DNA, 1815 bp, Artificial Sequence
  derived and/or modified sequence
atggcccccagcggcctgaaggccgtggtgggcgagaagatcctgagcggcgtgatcagaagcgtgaagaaggacggcgagtggaaggtgctgatcatggaccaccccagcatgagaatcctgagcagctgctgcaagatgagcgacatcctggccgagggcatcaccatcgtggaggacatcaacaagagaagagagcccatccccagcctggaggccatctacctgctgagccccaccgagaaggcccaggcccagagagtgatccacctgccccagagcgtgcaggccctgatcaaggacttccagggcacccccaccttcacctacaaggccgcccacatcttcttcaccgacacctgccccgagcccctgttcagcgagctgggcagaagcagactggccaaggtggtgaagaccctgaaggagatccacctggccttcctgccctacgaggcccaggtgttcagcctggacgccccccacagcacctacaacctgtactgccccttcagagccgaggagagaaccagacagctggaggtgctggcccagcagatcgccaccctgtgcgccaccctgcaggagtaccccgccatcagatacagaaagggccccgaggacaccgcccagctggcccacgccgtgctggccaagctgaacgccttcaaggccgacacccccagcctgggcgagggccccgagaagaccagaagccagctgctgatcatggacagagccgccgaccccgtgagccccctgctgcacgagctgaccttccaggccatggcctacgacctgctggacatcgagcaggacacctacagatacgagaccaccggcctgagcgaggccagagagaaggccgtgctgctggacgaggacgacgacctgtgggtggagctgagacacatgcacatcgccgacgtgagcaagaaggtgaccgagctgctgagaaccttctgcgagagcaagagactgaccaccgacaaggccaacatcaaggacctgagccagatcctgaagaagatgccccagtaccagaaggagctgaacaagtacagcacccacctgcacctggccgacgactgcatgaagcacttcaagggcagcgtggagaagctgtgcagcgtggagcaggacctggccatgggcagcgacgccgagggcgagaagatcaaggacagcatgaagctgatcgtgcccgtgctgctggacgccgccgtgcccgcctacgacaagatcagagtgctgctgctgtacatcctgctgagaaacggcgtgagcgaggagaacctggccaagctgatccagcacgccaacgtgcaggcccacagcagcctgatcagaaacctggagcagctgggcggcaccgtgaccaaccccggcggcagcggcaccagcagcagactggagcccagagagagaatggagcccacctaccagctgagcagatggacccccgtgatcaaggacgtgatggaggacgccgtggaggacagactggacagaaacctgtggcccttcgtgagcgaccccgcccccaccgccagcagccaggccgccgtgagcgccagattcggccactggcacaagaacaaggccggcatcgaggccagagccggccccagactgatcgtgtacgtgatgggcggcgtggccatgagcgagatgagagccgcctacgaggtgaccagagccaccgagggcaagtgggaggtgctgatcggcagcagccacatcctgacccccaccagattcctggacgacctgaaggccctggacaagaagctggaggacatcgccctgccctag

SEQ ID NO: 96825 - DNA, 1197 bp, Artificial Sequence
  derived and/or modified sequence
atgtgcatacgagtccacgtgtccatgtgtatgtgcatgtgtgttcacgtgtgcgtgcacctctgcatgcacgtctgcgccgtgtgcatgtgtgtttatgtgtgtgtgtgtgtgcacgtccacgtgtgcgcttctgtctgtgcctttgtatgtatgtgcgtctgcgtgtgtgtgtgtggttctgtgtgcgcattcgtgagcgtgcatgtctgcatgagggtgtacgtttgtgtttgtatctgcgtgcatctctacgtgtgcgtgtgcgtctgcttgtgtgcttgtgtatacgcctgcgtatgcatgtgtctgcgattgtgcgtgcggctgtgtgtgagtgtgtgtgcttgtgtgtacgcatgtatatgcatgtgcatatgtgtgcatgtgtcaatgtatgtctgtgcgagcgtctgcgcctgtgtgtgtgtctgcgtctgtgtgtgtgtatgtatgagagtgtgcgcccatcagtgcctccatgtgtgtatctgcgtgtacgtctgtgctagaatttgcgtttgtgcttgtgtctacgtttgtgtatgcatatctgtgtgtgcatgcgtctatgtatgtgtccacttatgcgtatgcgcgtgtgtgcatgcgtgcgtttgcgtttgcgcttgtgttcacctctgtgtgtgtgcctgcgcacacgttggggccactctggtatgtatttgtacctacacctgccctcgcccttcaatgttcgcccatggggggcgatggggagtagccgggaggcctcgccagcctatgtcccttggcgtccaggctcaggcccagcgggttattcacctgccccagagtgtgcaggccctgatcaaggattttcagggaaccccgacgttcacctacaaagctgcacatattttctttacagacacatgcccggaacctctcttctccgagctgggccggagcaggctggctaaggtggtaaagacgctgaaagaaatccatcttgcattcttgccctatgaagcacaagtgaggcctgggcttatactgggacgtggttggggttttgttactaaatgtccacttttcccgcagaaacagacactcagactgggtgccgtcgcccacacatgcaacccctctgccgtagggggccagggccgcaggatcacgtgggggcaggaattcgagactagcttaggcaccgaacaagatccggtgtcatag

SEQ ID NO: 96826 - DNA, 1815 bp, Artificial Sequence
  derived and/or modified sequence
atggcacctagtggactgaaagctgtcgtgggggaaaagattctgagcggtgtgatccggagcgtgaagaaagacggggaatggaaggtcctgattatggatcacccttctatgcgcatcctgtctagctgttgcaagatgtcagacattcttgcggagggtatcacaatagtggaggatataaacaaaaggagagagccaatcccatccttggaggccatttacctgctttccccaaccgaaaaggcccaggcacagagagtgatccatttgccccagtcagtccaagccctgatcaaagactttcaaggtacccccacatttacctataaggcagcacacattttcttcaccgacacgtgccccgagccactgtttagcgagctcggacgctcccgccttgcaaaggttgttaagaccctgaaagagatccaccttgcattcctcccttacgaggctcaggtcttttctttggatgcgccgcactcaacctataacctgtattgtcccttcagggccgaagagagaactaggcagctggaagttttggcccaacagatagccaccctttgcgcaaccctacaggagtatccagcaatccgatacaggaagggtcccgaggacacagcccagctggcacatgctgtactggccaagctgaacgcatttaaagcagacactccgtcactcggagagggtcctgagaagactcggtcacagctgctcatcatggacagagctgcagacccagtgagtcctttgctgcatgagctgaccttccaggccatggcctatgatcttttggacatcgagcaggatacttacagatacgagactactggtctgtccgaagcgagggaaaaagctgtgttacttgacgaagacgatgacctgtgggtggagctgcggcatatgcatattgcagacgtttcgaagaaagtaaccgagctgcttcgcactttttgtgaaagtaagagactgacaacagacaaggcaaacattaaagacctaagccagatcctaaaaaaaatgccgcagtatcaaaaagagttgaacaaatattctacacatttgcacctggcagacgactgcatgaaacacttcaaggggtcagtggaaaaactttgcagtgtcgaacaggacctcgcaatgggatcggatgcagagggggaaaaaataaaggattccatgaagctgatagtgcccgttttgttggatgcggccgttccagcctacgataaaatacgggtgcttttgctatacatcctcctgagaaatggcgtttccgaggagaaccttgcaaaactgatccagcacgccaatgttcaggctcatagctccctgatacgaaatctggaacagctgggtggaacagtcacgaatccgggcggatccgggacatcctcaagactggaaccccgggagcgaatggagccaacctaccaattaagtaggtggaccccggttatcaaggacgtgatggaagatgccgtcgaagaccggctggaccgaaacctctggcccttcgtgtcagatcccgcccctacggccagttcacaggcggccgtcagtgcccgatttggtcactggcacaagaacaaggcaggtatcgaagcaagagcaggccctagactaatagtctatgtgatggggggcgtagccatgtcagagatgagagctgcctacgaggtgactcgcgccaccgaaggcaagtgggaggtgctcataggcagtagccatattctgactcccacgcggttcctggatgatctaaaagcccttgacaagaaactggaggacattgctcttccctag

SEQ ID NO: 96827 - DNA, 1197 bp, Artificial Sequence
  derived and/or modified sequence
atgtgcatccgggtgcacgtgtccatgtgcatgtgcatgtgtgtgcacgtgtgtgtgcacctgtgcatgcacgtgtgtgctgtgtgcatgtgtgtgtatgtgtgtgtgtgtgtgcacgtgcacgtgtgtgcctctgtgtgtgcctttgtgtgcatgtgtgtgtgtgtgtgtgtgtgtggctctgtgtgtgcctttgtgtctgtgcacgtgtgcatgagggtgtatgtgtgtgtgtgcatctgtgtgcacctgtatgtgtgtgtgtgtgtgtgcctgtgtgcctgtgtgtatgcctgtgtgtgcatgtgcctgcggctgtgtgtgcggctgtgtgtgtctgtgtgtgcctgtgtgtatgcctgcatctgcatgtgcatctgtgtgcacgtgtccatgtatgtgtgtgcctctgtgtgtgcctgtgtgtgtgtgtgtgtgtgtgtgtgtgtgtgcatgagggtgtgtgcccaccagtgcctgcacgtgtgcatctgtgtgtatgtgtgtgcccgcatctgtgtgtgtgcctgtgtgtatgtgtgtgtgtgcatctctgtgtgtgcctgtgtgtatgtgtgtgtgcacctgtgtgtgtgtgcctgtgtgcacgcctgtgtgtgtgtgtgtgcctgtgtgcacctgtgtgtgtgtgcctgtgcccacgtgggcgccaccctggtgtgcatctgcacctacacctgcccccggcccagcatgtttgcccacggcggccgctggggcgtggccggccggccccggcagcccatgagcctgggcgtgcaggcccaggcccagagggtcatccacctgccccagagcgtgcaggccctgatcaaggacttccagggcacccccaccttcacctacaaggccgcccacatcttcttcacagacacctgcccagagcccctcttcagcgagctgggccgcagccggctggccaaggtggtgaagaccctgaaggagatccacctggccttcctgccctatgaggcccaggtgcggcccggcctcatcctgggccggggctggggctttgtgaccaagtgccccctcttcccccagaagcagaccctgcggctgggcgctgtggcccacacctgcaaccccagcgctgtgggcggccagggccgccgcatcacctggggccaggagtttgagaccagcctgggcacagagcaggaccctgtgtcctag

SEQ ID NO: 96828 - DNA, 1815 bp, Artificial Sequence
  derived and/or modified sequence
atggcccccagcggcctgaaggctgtggtgggggagaagatcctgagcggggtcatccgctctgtgaagaaggatggagagtggaaggtgctgatcatggaccaccccagcatgaggatcctgagcagctgctgcaagatgtctgacatcctggccgagggcatcaccatcgtggaggacatcaacaagaggcgggagcccatccccagcctggaggccatctacctgctgagccccacagagaaggcccaggcccagagggtcatccacctgccccagagcgtgcaggccctgatcaaggacttccagggcacccccaccttcacctacaaggccgcccacatcttcttcacagacacctgcccagagcccctcttcagcgagctgggccgcagccggctggccaaggtggtgaagaccctgaaggagatccacctggccttcctgccctatgaggcccaggtgttcagcctggatgccccccacagcacctacaacctgtactgccccttccgggcagaggagaggacccggcagctggaggtgctggcccagcagatcgccaccctgtgtgccaccctgcaggagtacccagccatccgctacaggaagggccctgaggacacagcccagctggcccatgctgtgctggccaagctgaatgccttcaaggctgacacccccagcctgggggagggccctgagaagaccaggagccagctgctgatcatggacagagctgctgaccctgtgagccccctgctgcacgagctgaccttccaggccatggcctatgacctgctggacatcgagcaggacacctaccgctatgagaccaccggcctgtctgaggcccgggagaaggctgtgctgctggatgaagatgatgacctgtgggtggagctgcggcacatgcacatcgcagatgtgtccaagaaggtgacagagctgctgcggaccttctgtgagagcaagaggctgaccacagacaaggccaacatcaaggacctgagccagatcctgaagaagatgccccagtaccagaaggagctgaacaagtacagcacccacctgcacctggctgatgactgcatgaagcacttcaagggctctgtggagaagctgtgcagcgtggagcaggacctggccatgggcagtgatgctgagggggagaagatcaaggacagcatgaagctgattgtgcctgtgctgctggatgctgctgtgcctgcctatgacaagatccgggtgctgctgctgtacatcctgctgagaaatggagtgtctgaggagaacctggccaagctgatccagcacgccaacgtgcaggcccacagcagcctcatccggaacctggagcagctgggcggcaccgtgaccaaccctgggggcagcggcaccagcagccggctggagccccgggagaggatggagcccacctaccagctgagccgctggacccctgtgatcaaggatgtgatggaggatgctgtggaggaccggctggacaggaacctgtggccctttgtgtctgaccctgcccccacagccagcagccaggccgctgtgtctgccaggtttggccactggcacaagaacaaggccggcatcgaggcccgggccggccccaggctcatcgtgtatgtgatgggcggcgtggccatgtctgagatgagagctgcctatgaggtgacccgggccacagagggcaagtgggaggtgctgattggcagcagccacatcctgacccccacccgcttcctggatgacctgaaggccctggacaagaagctggaggacatcgccctgccctag

SEQ ID NO: 96829 - DNA, 1197 bp, Artificial Sequence
  derived and/or modified sequence
atgtgcatccgggtgcacgtgagcatgtgcatgtgcatgtgcgtgcatgtgtgtgtgcatctctgcatgcacgtgtgcgccgtgtgcatgtgcgtttacgtttgcgtgtgtgtgcatgtgcacgtttgtgcgagcgtctgcgctttcgtgtgcatgtgcgtgtgcgtgtgcgtgtgtgggagcgtgtgcgcctttgtttccgtgcacgtgtgcatgcgggtgtacgtctgcgtgtgcatctgtgtccatttgtacgtctgtgtctgcgtgtgtctatgcgcctgcgtttatgcatgtgtctgcatgtgcctgcgactatgcgtcaggttgtgcgtgagcgtttgcgcatgcgtgtatgcttgcatctgtatgtgtatatgcgtgcacgtttccatgtatgtgtgtgcttcagtgtgcgcatgcgtctgcgtctgcgtctgcgtgtgtgtgtgcatgcgtgtttgtgcccaccaatgcctccacgtatgcatttgtgtttatgtgtgcgcacgaatctgtgtgtgtgcttgtgtgtatgtgtgcgtctgtatctctgtgtgcgcttgcgtgtatgtctgcgtccacctgtgcgtgtgtgcatgtgtacatgcctgtgtctgcgtgtgtgcttgtgtgcatctgtgtgtgtgcgcctgcgcacatgtgggagccaccctggtttgcatatgtacatatacatgccctagacctagcatgtttgcccacggcggcaggtggggggtggcgggaaggcctcggcagcccatgagtcttggggtgcaggcgcaggctcagagagtgattcacttgccccagtccgtgcaggcactgattaaggatttccagggcactcccaccttcacctataaagccgcacatattttctttactgacacatgtcccgaaccacttttttcggagctaggccggtcacggctggcgaaagtggtgaagaccctcaaagaaatacacttagcctttctaccgtacgaagcccaggtgcgcccggggttaattctggggagaggatggggcttcgtgaccaagtgccccctgtttcctcagaaacagactctgagactgggtgcagtcgcccatacatgcaacccgtctgctgttgggggtcagggacgcagaataacctggggtcaggaattcgaaacatcattgggtaccgagcaggacccagtgtcatag

SEQ ID NO: 96830 - DNA, 1815 bp, Artificial Sequence
  derived and/or modified sequence
atggcccccagcggcctgaaggccgtggtgggcgagaagatcctgtcgggcgtgatccgttctgtaaagaaggacggggaatggaaggtcctcataatggaccaccccagcatgcggatactgtccagctgttgtaagatgagcgatatcctggcagaaggaattacaatcgtcgaggatatcaacaagaggcgggaaccaatccctagtctcgaggccatctacctgctatcacccaccgaaaaggcccaggcgcagcgcgtaattcatctgcctcagagcgtgcaggccctcatcaaggatttccaaggtacaccaacctttacctataaagcagctcacatcttcttcaccgatacatgtccggagccgctcttctctgagttgggcaggagtcgacttgctaaagtcgtgaaaactttaaaagaaatccatctcgcctttctgccctatgaggctcaagtatttagtctggacgccccacactccacgtacaacctgtattgtcctttccgcgcagaggaacgaacccgacagctggaggtcctggcccagcaaatcgccacattatgcgcaacgcttcaggagtaccccgccatccggtatcggaagggacccgaggacaccgctcagctcgcgcacgcagtgcttgccaaacttaacgcttttaaggccgatacaccgagtctgggcgagggccctgagaagacccgcagccaacttctcatcatggaccgagccgcggatccagtgtcccctctgctccacgaactcactttccaggccatggcatatgacctgttggacatcgagcaggacacttatcgctacgaaacgacagggttatccgaagcgcgtgagaaggctgtactgcttgacgaggatgacgacctatgggttgagctgcggcatatgcatatcgcggatgtatcaaagaaagtgacagagttgcttaggaccttctgcgaatccaagaggctgacaaccgataaggctaatatcaaagacctgtctcaaattcttaagaaaatgcctcaataccaaaaggagctgaataagtactccacacatctgcatcttgcagacgactgcatgaaacactttaaaggatccgtggaaaagctctgctccgtggagcaggatctggctatgggttcagatgccgagggggaaaagattaaggacagcatgaagctaattgtgcccgttctcctggatgctgcggtgcccgcctacgataaaatcagagtcctgctgctctacatcctgctacggaacggcgttagtgaagaaaacctcgctaagctcatccagcacgctaatgtgcaagctcacagcagtctaatccgcaacctggagcagttgggtggaactgtgacgaatcccggcggatctggtacgtccagcagactcgagcctagagaacgtatggaacccacctaccagctgtcccgttggactccggtcataaaagatgttatggaggacgccgttgaagacagactggaccgcaatttatggcccttcgtcagcgacccagccccaaccgccagctcacaggccgcagtgagcgccagatttggacactggcataagaataaggctgggattgaagcgcgggcggggccacgtctaatagtatacgttatgggaggggtggccatgtccgagatgagagcagcgtacgaggtgaccagagctaccgagggcaagtgggaagtcctcattggttcctctcacatactaacacctactagattcctggatgacctgaaggccctcgacaaaaagttagaggacatcgcactgccatag

SEQ ID NO: 96831 - DNA, 1197 bp, Artificial Sequence
  derived and/or modified sequence
atgtgcattcgcgtgcatgtctcaatgtgtatgtgcatgtgtgttcacgtgtgcgtccacctctgtatgcatgtctgtgccgtctgtatgtgtgtgtatgtgtgcgtgtgcgtccacgttcacgtgtgcgcatctgtgtgtgcctttgtctgcatgtgcgtatgcgtatgtgtttgcggtagtgtgtgcgcctttgtgtcagtacacgtatgcatgagggtgtacgtgtgcgtgtgtatttgtgttcacttgtacgtttgcgtgtgtgtctgtctctgtgcttgtgtatatgcttgcgtttgcatgtgtctgagactgtgtgtgcggctctgtgtttccgtgtgtgcgtgcgtttacgcctgcatctgcatgtgcatctgcgtgcatgtgtccatgtatgtatgcgcgagcgtgtgtgcctgcgtgtgcgtgtgtgtttgcgtctgtgtatgcatgcgggtatgtgcccaccagtgtctgcacgtatgtatctgtgtctatgtgtgtgcacgcatctgcgtgtgcgcctgtgtgtatgtctgtgtttgtatttccgtctgcgcatgcgtatacgtctgcgtgcatctgtgcgtgtgtgcctgtgtgcatgcatgtgtttgtgtgtgcgcatgcgtacatctgtgcgtgtgcgcgtgtgcgcacgtgggagccacccttgtgtgcatatgtacatacacttgtccacgtccatccatgttcgcacatggcggtcgctggggtgtagctgggcgtcccagacagccgatgagcctaggagttcaggctcaggcacagcgagtgattcatctgccccagtctgtccaagccctgataaaggactttcaagggacacctaccttcacctacaaagccgctcatatttttttcaccgacacatgccccgagccactgttctccgaattagggcgttctaggttagcgaaggtggtcaagacacttaaagaaatccacctcgcctttctcccgtatgaggcgcaggtgcgacccggactcatccttggtcgcggatgggggtttgttacaaaatgccccttgtttccccagaagcaaacactgagactcggggctgtggcacatacctgtaacccctccgccgttggcggacaaggacgcaggattacgtgggggcaggaatttgaaacttctctgggaaccgaacaggacccagtgagctag

SEQ ID NO: 96832 - DNA, 1815 bp, Artificial Sequence
  derived and/or modified sequence
atggccccttccggcctcaaagccgttgtgggggagaaaattctgagtggggtgattcgcagtgtcaaaaaggacggagagtggaaggtactcatcatggatcacccatcgatgagaatccttagctcctgttgtaagatgtcagatatactcgctgaaggtatcactatcgtggaggatatcaataagagacgcgaaccaatcccttccctggaggccatttacctgctttctcctactgagaaggctcaagcacaacgggttatccatctcccacaaagcgtgcaagccctgattaaggattttcagggcacacccacattcacatataaagccgctcatatcttctttacggacacctgccctgaaccattgttttccgaactggggcgtagtagacttgctaaagtggtgaagaccctaaaagagatccacctggcctttctgccatacgaagctcaggtcttttctctggacgcaccacacagcacatataatctctattgccccttccgagctgaggaaaggacacgtcagcttgaagttcttgcccaacaaatcgcaacgctctgtgcaacactgcaggaatatcctgctattagatataggaaggggcctgaggacaccgcccagttagctcacgctgtgctggccaagttgaacgcgttcaaggctgatactccatcccttggagagggcccagagaagactaggtcgcagcttttgattatggaccgggcagccgaccctgtcagccccctcctgcacgagttgacatttcaggctatggcatacgatcttctggatatcgaacaggatacctatcggtacgagacaaccgggctgtctgaggcgagggaaaaagccgtattgctcgatgaggatgatgatctgtgggtggagctccgacatatgcatatcgctgatgtgagcaaaaaagtgaccgagcttctgaggaccttctgtgagtctaagcgattgacaactgataaggcgaacatcaaggatctatcccagattctaaaaaaaatgcctcagtatcagaaagagctgaacaagtatagcacccacctgcatctggcggatgactgcatgaaacacttcaagggaagcgttgaaaagctatgcagcgttgagcaggacttagccatgggaagtgatgctgaaggggagaagattaaggatagcatgaagcttattgtacctgttctgcttgacgcggctgtgcccgcatacgataaaatccgcgtactgctgctgtacatactgctgcgcaatggcgtttcagaggaaaatttggccaagctgatacagcacgctaatgttcaggcacattcgtctctgatccggaaccttgaacagctggggggaactgtgaccaaccctgggggtagcgggaccagctcacgcctggaacctcgcgaaaggatggaacccacctaccaattgagccggtggacaccagtgattaaagacgtcatggaagacgctgtggaggatcggctagatagaaacctatggcctttcgtaagcgaccctgctcccaccgctagtagtcaggccgcagtgtcagctagattcggccactggcataagaataaggctggcatagaagctcgcgcagggcctaggcttatcgtgtacgtcatgggcggtgttgcaatgtccgagatgagagccgcttatgaggtgacacgggctacggaaggcaaatgggaagtcctgattgggagtagtcatatactgacacctactcgcttcctggatgacctgaaggcactggacaagaaacttgaggacatcgcattaccctag

SEQ ID NO: 96833 - DNA, 1840 bp, Artificial Sequence
  derived and/or modified sequence
caaatccattcttaaaccttgcaagctgactgcgggagcccatggattgcaggcctcccctgcagcactccctggctgcagccccttcctgaccgtgcagctccctcgtggagccctgtgtgggactcccagggtggactctggatgtggggtcccaagaatgcagagccttctatgggtgaccccaggtggtgtcccagtcactttgccattgagggataggtgctgagggagcctgtcctctcagaacctcagtctccctgtctgtaaatttggggaacccagttggctgcacaacccctgcagaaccctgtcgtgtggctcttagctggtggtccctaagtgggtttctcctgcagtccctcctaagcatccacccctcctccccaagcctccaaccccccacacctgagactccccacgtggccctgcctggatgccacccacctgtgtcccttcctctgttcctactagttgttgaagacatcaacaaacggcgggaacccattcccagtctggaggccatttatttgctgagccccacggagaaggtgcctacatgagtgagcgtgtgtgtatgcgcgtgcatgcgtgtacatgtgcatgtgtgtgtatgtctgcatgcatgtgattgcatgtgtgcatgtgtatacgtgtgcatgtgtccatgtgtatgtgtatgtgtgtgcatgtgtgtgtgcatctgtgtatgcatgtgtgtgcggtttgcatgtgtgtctatgtatgtgtctgtgtgcatgtgcatgtgtgtgcgtctgtgtgtgcatttgtgtgtatgtgtgtatgcgtgtgtgtctgtgggtctgtgtgtgcatttgtgtctgtgcatgtgtgtatgcgtgtgtatgtatgtgtgtgcatctgtgtgcatctgtatgtgtgtgtgtgcgtctgtctgtgtgcatgtgtgtatgcgtgtgtatgtatgtgtctgcgtctgtgtgtgcgtctgtgtgtatctgtgtgtgcatgtgtgtatgcgtgtatatgtatgtgcatctgtgtgcatgtgtctatgtatgtgtgtgcatctgtgtgtgcgtgtgtatgcgtgtgtgtatgcgtctgtgtgtgtatgcgtgtgtgtgcgcatcagtgtctgcatgtgtgtatatgtgtgtatgtgtgcgcgcgcatctgtgtgtgtgcatgtgtgtatgtatgtgtgtgcatctctgtgtgtgcatgtgtgtatgtgtgtgtgcatctgtgtgtgtgtgcatgtgtgcatgcgtgtgtatgtgtgtgtgcgtgcgtgcatctgtgtgtgtgcgcgtgtgcccatgtgggtgcgacactagtgtgcatttgcacatatacatgtccccgtccgtccatgtttgcacatggtggcagatggggggtggctgggaggcctaggcagccaatgagcctaggtgtgcaggctcaggcccagagagtgatccaccttccccagtcggttcaggccctgatcaaagacttccaggggaccccgactttcacctacaaagcggcccatatcttcttcaccgacacctgccccgagcccctgttcagtgagctaggccgctctcgtctggcaaaggtggtgaagacgttgaaggagattcaccttgccttcctcccctacgaggcccaggtacggcccgggctcatcctgggcagggggtgggggtttgtgaccaaatgtcccctgttccctcagaaacagacactgaggctgggcgcagtggctcatacctgtaatcccagcgctgtgggaggccagggcaggaggatcacttggggccaggagtttgagaccagcctgggtacagagcaagaccccgtctcttaa

SEQ ID NO: 96834 - DNA, 1914 bp, Artificial Sequence
  derived and/or modified sequence
acacacccggaagcggcggcggcgcccctcggggaagatggcgccctcggggctgaaggcggtggtgggggaaaaaattctgagcggagttattcggagtgtcaagaaggatggggagtggaaggtgcttatcatggatcacccaagcatgcgcatcttgtcttcctgctgcaaaatgtcagatatcctggctgagggcatcaccattgttgaagacatcaacaaacggcgggaacccattcccagtctggaggccatttatttgctgagccccacggagaaggctcaggcccagagagtgatccaccttccccagtcggttcaggccctgatcaaagacttccaggggaccccgactttcacctacaaagcggcccatatcttcttcaccgacacctgccccgagcccctgttcagtgagctaggccgctctcgtctggcaaaggtggtgaagacgttgaaggagattcaccttgccttcctcccctacgaggcccaggtgttctccctcgatgctccccacagcacctacaacctctactgccccttccgggcagaggagcgcacgcggcagctcgaggtgctggcccagcagattgccacgctgtgcgccaccctgcaggagtacccggccatccgctaccgcaagggcccagaggacacagcccagttggcccacgccgtcctggccaagctgaacgccttcaaggcagacactcccagtctgggcgagggcccagagaaaacccgctcccagctgctgataatggaccgggcagctgaccccgtgtccccactactgcatgagctcacgttccaggccatggcgtatgatctgctggacatagagcaggacacatacaggtatgagaccaccgggctgagcgaggcgcgggagaaggccgtcttgctggacgaggacgatgacttgtgggtggagcttcgccacatgcatatcgcagatgtgtccaagaaggtcacggagctcctgaggaccttctgtgagagcaagaggctgaccacggacaaggcgaacatcaaagacctatcccagatcctgaaaaagatgccgcagtaccagaaggagctgaataagtattctacgcacctgcatctagcagatgattgtatgaagcacttcaagggctcggtggagaagctgtgtagtgtggagcaggacctggccatgggctccgacgcagagggggagaagatcaaggactccatgaagctgatcgttccggtgctgctggacgcggcggtgcccgcctacgacaagatccgggtcctgctgctctacatcctccttcggaatggtgtgagtgaggagaacctggccaagctgatccagcatgccaatgtacaggcgcacagcagcctcatccgtaacctggagcagctgggaggcactgtcaccaaccccgggggctcggggacctccagccggctggagccgagagaacgcatggagcccacctatcagctgtcccgctggaccccggtcatcaaggatgtaatggaggacgccgtggaggaccggctggacaggaacctgtggcccttcgtatccgaccccgcccccacggccagctcccaggccgctgtcagtgcccgcttcggtcactggcacaagaacaaggctggcatagaagcccgggcgggcccccggctcatcgtgtatgtcatgggcggtgtggccatgtcagagatgagggccgcctacgaggtgaccagggccaccgagggcaagtgggaggtgctcattggctcctcacacatcctcaccccgacccgcttcctggatgacctgaaggcactggacaagaagctggaggacattgccctgccctgacccctggccccgccccctacccctccctttccagagaaataaactcttcccgtcgctctgcc

SEQ ID NO: 96835 - DNA, 1569 bp, Artificial Sequence
  derived and/or modified sequence
atgagcgccctgctgagcctgtgcttcgtgctgcccctggccgcccccggccacggcacccagggctgggagccctgcaccgacctgagacccctggacatcctggccgaggtggtgcccagcgacggcgccaccagcggcatcagaatcgtgcaggtgcacggcgccagaggcctgcagctgagcgtggccgcccccagaaccatgagcttccccgccagcagaatcttcagccagtgcgacctgttccccgaggagttcagcatcgtggtgaccctgagagtgcccaacctgccccccaagagaaacgagtacctgctgaccgtggtggccgaggagagcgacctgctgctgctgggcctgagactgagccccgcccagcccccctgcaccgaggtggaggacgcccagttctggttcgacgccagcagaaagggcctgtacctgtgcgtgggcaacgagtgggtgagcgtgctggccgccaaggagagactggactacgtggaggagcaccagaacctgagcaccaacagcgagaccctgggcatcgaggtgttcagaatcccccaggtgggcctgttcgtggccaccgccaacagaaaggccaccagcgccgtgtacaagtggaccgaggagaagttcgtgagctaccagaacatccccacccaccaggcccaggcctggagacacttcaccatcggcaagaagatcttcctggccgtggccaacttcgagcccgacgagaagggccaggagttcagcgtgatctacaagtggagccacagaaagctgaagttcaccccctaccagagcatcgccacccacagcgccagagactgggaggccttcgaggtggacggcgagcacttcctggccgtggccaaccacagagagggcgacaaccacaacatcgacagcgtgatctacaagtggaaccccgccaccagactgttcgaggccaaccagaccatcgccaccagcggcgcctacgactgggagttcttcagcgtgggcccctacagcttcctggtggtggccaacaccttcaacggcaccagcaccaaggtgcacagccacctgtacatcagactgctgggcagcttccagctgttccagagcttccccaccttcggcgccgccgactgggaggtgttccagatcggcgagagaatcttcctggccgtggccaacagccacagctacgacgtggagatgcaggtgcagaacgacagctacgtgatcaacagcgtgatctacgagctgaacgtgaccgcccaggccttcgtgaagttccaggacatcctgacctgcagcgccctggactgggagttcttcagcgtgggcgaggactacttcctggtggtggccaacagcttcgacggcagaaccttcagcgtgaacagcatcatctacagatggcagggctacgagggcttcgtggccgtgcacagcctgcccaccgtgggctgcagagactgggaggccttcagcaccaccgccggcgcctacctgatctacagcagcgccaaggagcccctgagcagagtgctgagactgagaaccagatag

SEQ ID NO: 96836 - DNA, 1569 bp, Artificial Sequence
  derived and/or modified sequence
atgagtgctcttctgtccttgtgcttcgtgttgccactggccgcgcccggacacgggacccagggatgggagccctgtaccgacctgcgaccactggacatactggcggaagtcgtgccttcagacggcgcaacctccggaattaggatcgtccaagtacacggggctagggggttacagctgtcagtggcggcccctaggactatgagtttcccagccagccggattttctcccagtgtgacctgttccctgaggagttttcaatcgttgtgacactacgggtaccaaatctgccacctaagaggaatgagtatttgttgactgtcgttgctgaggagtctgatctgttactgctaggcctacgcctgagccccgcccagcctccttgtacagaggtggaagatgcccaattttggttcgatgcatcaagaaaaggcttatacctatgtgtgggaaacgaatgggtgagcgttctggccgccaaagagcgactggattacgtggaagaacaccagaatcttagtacaaattccgaaaccctcggaatagaggtctttagaataccgcaagtgggcttgtttgtcgccacggccaatcgcaaggccacctctgctgtttataagtggaccgaagaaaagttcgtgagctaccagaatattcccactcaccaggctcaagcttggcgccacttcactatcggcaagaagatctttttggcggtggctaatttcgaacccgatgagaaaggccaggagttctcggtaatctataaatggagccaccgcaagctgaaattcactccctatcagtctattgcgacccatagcgcacgcgactgggaagcttttgaagtagacggcgagcatttcctcgccgttgctaaccaccgcgagggcgataaccataatatagactcagtgatctacaaatggaacccagcaacccgcctattcgaagcgaaccaaactattgccaccagcggcgcatatgattgggagttcttctcagtaggaccatatagcttcttggtggtggcaaatactttcaacggtacctcaacgaaagtccacagtcacctgtatatccggttgctcggatcgtttcagcttttccaatcattccccacgttcggggccgctgactgggaagtttttcagattggggagaggatctttctggccgtggcgaattcccacagttacgatgtggagatgcaggtgcagaatgactcctacgtgatcaatagcgtcatatacgagctcaatgtcactgcccaggcctttgttaagtttcaagacattctgacttgtagcgcactggattgggagtttttttcagtgggggaggattactttctggtggttgcgaattcatttgatggaagaactttctcagttaatagtataatttatcggtggcagggctatgagggattcgtcgccgtccactctctccctacagtcgggtgtcgtgattgggaggcctttagtacgaccgcaggcgcctatttgatttactcatctgctaaagaacccttatcccgtgttttacgtctcagaacacgttag

SEQ ID NO: 96837 - DNA, 1569 bp, Artificial Sequence
  derived and/or modified sequence
atgtctgccctgctgagcctgtgctttgtgctgcccctggccgcccctggccacggcacccagggctgggagccctgcacagacctgcggcccctggacatcctggccgaggtggtgcccagtgatggagccaccagcggcatccgcatcgtgcaggtgcacggggcccggggcctgcagctgtctgtggccgcccccaggaccatgtccttccctgccagccgcatcttcagccagtgtgacctcttccctgaggagttcagcatcgtggtgaccctgcgggtgcccaacctgccccccaagagaaatgagtacctgctgactgtggtggccgaggagagtgacctgctgctgctgggcctgcggctgagccctgcccagcccccctgcacagaggtggaggatgcccagttctggtttgatgccagcaggaagggcctgtacctgtgtgtgggcaatgagtgggtgtctgtgctggccgccaaggagcggctggactatgtggaggagcaccagaacctgagcaccaacagcgagaccctgggcatcgaggtgttccgcatcccccaggtgggcctgtttgtggccacagccaacaggaaggccaccagcgctgtgtacaagtggacagaggagaagtttgtgtcctaccagaacatccccacccaccaggcccaggcctggaggcacttcaccatcggcaagaagatcttcctggccgtggccaactttgagccagatgagaagggccaggagttcagcgtcatctacaagtggagccacaggaagctgaagttcaccccctaccagagcatcgccacccacagcgcccgggactgggaggcctttgaggtggatggagagcacttcctggccgtggccaaccaccgggagggggacaaccacaacatcgacagcgtcatctacaagtggaacccagccacccggctgtttgaggccaaccagaccatcgccaccagcggggcctatgactgggagttcttctctgtgggcccctacagcttcctggtggtggccaacaccttcaacggcaccagcaccaaggtgcacagccacctgtacatccggctgctgggcagcttccagctgttccagagcttccccacctttggagctgctgactgggaggtgttccagattggagagcgcatcttcctggccgtggccaacagccacagctatgatgtggagatgcaggtgcagaatgacagctatgtgatcaacagcgtcatctatgagctgaatgtgacagcccaggcctttgtgaagttccaggacatcctgacctgcagcgccctggactgggagttcttctctgtgggggaggactacttcctggtggtggccaacagctttgatggccgcaccttctctgtgaacagcatcatctaccgctggcagggctatgagggctttgtggccgtgcacagcctgcccaccgtgggctgccgggactgggaggccttcagcaccacagctggggcctacctgatctacagcagcgccaaggagcccctgagccgggtgctgcggctgcggaccaggtag

SEQ ID NO: 96838 - DNA, 1569 bp, Artificial Sequence
  derived and/or modified sequence
atgagcgccctgctgagcctgtgcttcgtgctgcccctggccgcccctggtcacggaacccagggatgggaaccctgcacagacctgagacctctggacattttagctgaagtagttccgtctgacggggcgaccagcgggattaggatcgtgcaggtgcatggcgctagaggcttgcagctatccgtcgccgccccccggaccatgtcgttcccagcaagcagaattttcagtcagtgtgacctgtttccagaggagtttagtattgtggtgaccctcagagtgcctaacctgcctcccaagaggaatgagtacctcctgacagttgtcgccgaggaatccgatttgctgcttttaggcctccggctctctcctgcccagcctccatgcaccgaggtcgaagacgcccagttctggtttgacgcttccaggaaggggctgtacctgtgcgtgggcaatgagtgggtgtctgtgctggctgctaaagaaaggctcgattatgtggaggagcaccagaatctgtcaactaacagcgagacactgggcatagaagtgttcagaataccccaggttggcctgtttgtggctaccgcaaatcggaaggctacgtcggccgtatataagtggactgaggagaagtttgtgtcatatcaaaatatacctacccaccaggcccaagcctggcggcactttaccatcggtaaaaagatttttcttgccgttgctaactttgagcctgacgaaaaggggcaagaattctccgtgatctataagtggtctcaccgcaagttgaagtttacaccttatcagagcatcgccacacatagcgctcgcgattgggaagctttcgaagtggacggtgaacacttcctggccgttgctaaccatcgggaaggggacaatcacaatattgattccgttatatacaagtggaaccccgccacccgcctatttgaagctaatcagactatagcgacaagcggagcttacgactgggaatttttcagcgtaggtccttacagtttcctggttgtggcgaacacatttaacgggacttctactaaggttcactcccatctatacatccggcttctcggttcctttcagctattccagtcattccccacatttggagcagcggattgggaagtgtttcaaatcggggagcgcatattcctggccgtcgccaacagccattcctatgatgttgagatgcaggtgcagaatgactcgtacgtgattaattctgtgatatacgagttgaacgtaacggcacaagcatttgtcaagtttcaggatatactgacttgctcagctctggattgggagtttttttcagtgggcgaggattattttctggttgtggctaattcattcgacggtagaacattttctgtcaactcaattatctatcgctggcaggggtatgaaggattcgtggcggtgcactctctgcctactgtggggtgtcgcgactgggaggcgttctccactactgcaggcgcctatctgatttatagtagtgcaaaagaacctctcagtagggtgctccgactgagaactagatag

SEQ ID NO: 96839 - DNA, 1569 bp, Artificial Sequence
  derived and/or modified sequence
atgtctgcactgcttagtctgtgctttgtgctccccctagcagccccaggccatggcacgcagggctgggagccatgcactgatctgcgccctttggatatactggccgaggtcgtgccaagcgatggcgcaacctctgggatcagaattgttcaggttcacggcgctcgcggattgcagctctccgtcgccgcaccaaggacaatgagcttccccgctagtcggatcttttctcagtgtgatctgtttccagaagaattttctattgtggttactctgcgtgtccctaacttaccaccaaagaggaatgagtacttacttaccgtggtcgccgaagaaagtgacttactgctgctcgggctaagattgtctcccgcacagccgccttgtacggaagtcgaagacgcgcaattctggtttgacgccagtaggaagggtctgtatttatgtgtagggaacgagtgggtgagcgtgctggcagccaaggagcggcttgattatgtggaggaacatcagaacctgtccaccaattcagagaccctgggcatcgaggtcttcaggattccccaggtcggcctcttcgtggctactgccaataggaaagcgacttcagcggtgtataagtggactgaagaaaagttcgtgtcctatcagaacatccccacccaccaagcacaggcatggcgccacttcactattggcaaaaagatattcctggcggttgctaatttcgaacccgacgagaagggtcaagaattcagtgttatttacaaatggtctcaccggaagttgaaattcactccctatcagtcaattgcgacgcactcggctcgagactgggaggcattcgaagtggatggggagcactttctcgccgttgccaaccatcgggaaggagataaccataacattgattctgttatatacaaatggaacccggctaccaggctgttcgaggctaaccaaacaatcgcaacatccggtgcttatgattgggaatttttttcagtgggcccttactctttccttgtggttgctaacacatttaacggaactagcaccaaggtgcactctcacctctacattcgcctgctagggtctttccagttgtttcaaagttttcctacttttggcgcagcagactgggaggtattccagattggcgagagaatctttttagccgtggccaactcacactcgtacgacgtggagatgcaagtgcagaatgatagttatgttatcaattcggtgatttacgaactgaatgtaaccgctcaggctttcgtcaaattccaggatatcctgacctgttctgccctggattgggagttcttctccgtgggagaagactactttttggtcgtcgcaaattcttttgatggccgtactttctctgtcaattccattatatataggtggcaagggtacgaaggattcgttgcggtgcacagcctacccaccgttggctgtcgcgactgggaagcgttttccactactgcaggagcatacctaatctactcgagcgccaaggagccattgagcagggtgctgcgactgaggaccaggtag

SEQ ID NO: 96840 - DNA, 2287 bp, Artificial Sequence
  derived and/or modified sequence
agccctggatggagcttggcacccaagcccctcatgtctgccctgctgagtctgtgttttgtgctgcccctggcggcccccggccacggcacgcagggttgggagccctgcacagacctgcgccccctggacatcctggcggaagtggtcccttctgatggcgccacaagcgggatcaggatagttcaggttcacggtgcacggggactccagctctcagtagccgccccccgcaccatgagcttcccagcatccaggattttctcccagtgtgacctcttccctgaagaattttccatcgtcgtaactttgagagttcccaatcttccacccaagaggaacgagtacctgctgacggtggtggcagaggagagcgacctgctgctgctcggcctgcggttgtcacctgcccagccaccgtgtaccgaggtggaagacgcccagttctggtttgatgccagccggaagggcctgtatctgtgtgttggcaacgagtgggtctccgtgttagcagccaaagaaagactggactacgtggaggagcatcagaacttgtccaccaactcagagaccctgggcattgaggtgttccgcatccctcaggtggggctctttgtggccacagccaatcgcaaagccacatccgccgtctacaagtggaccgaagagaagttcgtctcatatcagaacatccccacgcaccaagcacaggcctggaggcatttcaccatcgggaaaaagatcttcctggcagtggctaattttgaaccagatgagaagggtcaggagttctctgtcatttacaaatggagccacagaaagctgaagtttaccccatatcagagcattgccacacacagcgcccgagactgggaggccttcgaggtggatggggagcacttcctggcggtggccaaccaccgggaaggcgacaaccacaacatcgacagtgtcatctacaagtggaacccggcaacccggctcttcgaggccaaccagaccatcgccacctccggcgcctacgactgggagttcttcagtgtggggccctactcgttcctggtggtggccaacaccttcaacggcacctccaccaaggtgcactcgcacctctacatccgactcctgggctccttccagctcttccagtccttcccgacgttcggtgctgcagactgggaggtcttccagatcggggagaggatcttcctcgctgtggcaaacagtcacagctacgatgtggagatgcaagtccagaatgattcctatgtcatcaactccgtcatctacgagctgaacgtgaccgcgcaggcctttgtcaagttccaggacattctcacctgcagtgctctggactgggagtttttctcggtgggagaagattatttcctggtggtggccaactccttcgatgggcgtaccttctcggtgaacagtattatttacaggtggcagggctacgagggcttcgtggcggtgcacagcctccccaccgtcggctgcagggactgggaggccttcagcaccacggctggtgcctacctcatctactccagcgccaaggagcccctctccagggtcctgcggctgaggacacgctgaggccgcggctgcccggcagcaactggggtggccaggtggggcgggaccccagcacctcccccaactgaccctggacgtccaggtgggcccagcctagggcatcccgggcctgggcatcaggcagggtgcaggtggggccatctgcggccctggttcgggcagggacatccatccacctctgagtccttctgagccacagccccagtgacggtctggtcttgcaggcagaggcccagagcccctgccagtgctcgcccatctgagtgtcaagcggggatttcgctgtcaaggaaccgtttctatacatttttacctcaaacaacaggacctcggttcatgtccctgcggctggcctctcgccagccactcctgcagtgtgcgtccggccgcctgagcaggtgtggtgccgtcccgccattgccgccacctatttattgtgttttatctgaacggaagtgtatttatactgctctttacaaaagcaccggtgctcctctctaggcagcgggtgggcacagcccctcaccacggacacggacagaggaccacctccccatacagagagaggcttccctcccagcctcagtttacccgtaaatgcactagcgcgaggtcagaaatcacaagcctgggcatggcctgggtcgcaccccctccccacggccccacccacagggacctcaac

SEQ ID NO: 96841 - protein, 1607 aa, Artificial Sequence
  derived and/or modified sequence
MMDLVLEEDVTVPGTLSGCSGLVPSVPDDLDGINPNAGLGNGLLPNVSEETVSPTRARNMKDFENQITELKKENFNLKLRIYFLEERMQQEFHGPTEHIYKTNIELKVEVESLKRELQEREQLLIKASKAVESLAEAGGSEIQRVKEDARKKVQQVEDLLTKRILLLEKAKDVTAAQAELEKAFAGTETEKALRLRLESKLSEMKKMHEGDLAMALVLDEKDRLIEELKLSLKSKEALIQCLKEEKSQMACPDENVSSGELRGLCAAPREEKERETEAAQMEHQKERNSFEERIQALEEDLREKEREIATEKKNSLKRDKAIQGLTMALKSKEKKVEELNSEIEKLSAAFAKAREALQKAQTQEFQGSEDYETALSGKEALSAALRSQNLTKSTENHRLRRSIKKITQELSDLQQERERLEKDLEEAHREKSKGDCTIRDLRNEVEKLRNEVNEREKAMENRYKSLLSESNKKLHNQEQVIKHLTESTNQKDVLLQKFNEKDLEVIQQNCYLMAAEDLELRSEGLITEKCSSQQPPGSKTIFSKEKKQSSDYEELIQVLKKEQDIYTHLVKSLQESDSINNLQAELNKIFALRKQLEQDVLSYQNLRKTLEEQISEIRRREESFSLYSDQTSYLSICLEENNRFQVEHFSQEELKKKVSDLIQLVKELYTDNQHLKKTIFDLSCMGFQGNGFPDRLASTEQTEEAKKSRLPILIKPSRSLGNMYRLPATQEVVTQLQSQILELQGELKEFKTCNKQLHQKLILAEAVMEGRPTPDKTLLNAQPPVGAAYQDSPGEQKGIKTTSSVWRDKEMDSDQQRSYEIDSEICPPDDLASLPSCKENPEDVLSPTSVATYLSSKSQPSAKVSVMGTDQSESINTSNETEYLKQKIHDLETELEGYQNFIFQLQKHSQCSEAIITVLCGTEGAQDGLSKPKNGSDGEEMTFSSLHQVRYVKHVKILGPLAPEMIDSRVLENLKQQLEEQEYKLQKEQNLNMQLFSEIHNLQNKFRDLSPPRYDSLVQSQARELSLQRQQIKDGHGICVISRQHMNTMIKAFEELLQASDVDYCVAEGFQEQLNQCAELLEKLEKLFLNGKSVGVEMNTQNELMERIEEDNLTYQHLLPESPEPSASHALSDYETSEKSFFSRDQKQDNETEKTSVMVNSFSQDLLMEHIQEIRTLRKRLEESIKTNEKLRKQLERQGSEFVQGSTSIFASGSELHSSLTSEIHFLRKQNQALNAMLIKGSRDKQKENDKLRESLSRKTVSLEHLQREYASVKEENERLQKEGSEKERHNQQLIQEVRCSGQELSRVQEEVKLRQQLLSQNDKLLQSLRVELKAYEKLDEEHRRLREASGEGWKGQDPFRDLHSLLMEIQALRLQLERSIETSSTLQSRLKEQLARGAEKAQEGALTLAVQAVSIPEVPLQPDKHDGDKYPMESDNSFDLFDSSQAVTPKSVSETPPLSGNDTDSLSCDSGSSATSTPCVSRLVTGHHLWASKNGRHVLGLIEDYEALLKQISQGQRLLAEMDIQTQEAPSSTSQELGTKGPHPAPLSKFVSSVSTAKLTLEEAYRRLKLLWRVSLPEDGQCPLHCEQIGEMKAEVTKLHKKLKKS

SEQ ID NO: 96842 - DNA, 4824 bp, Artificial Sequence
  derived and/or modified sequence
atgatggacttagtcctggaggaggatgttacagtgcccggaactctgtcaggatgtagtggtctggttccctccgtacccgatgacctcgacggtattaatcctaacgcaggtcttggtaacgggctgctccctaacgtttccgaagagacggtgagccccacgcgtgctcggaacatgaaagacttcgagaatcaaatcaccgagttaaaaaaggaaaatttcaatctcaaactgcgaatctattttttggaagaaagaatgcagcaggagtttcatggtccaaccgagcatatttacaagacaaacatcgagttaaaggtggaagtggagagtctgaagcgtgaactgcaggaacgggaacaactcctaataaaggcctctaaggcggtcgaatcacttgccgaagctggaggttcagagatccagagagttaaagaagacgcaagaaagaaggtgcagcaggtcgaggacctgctgactaaacgtatcctattgttagaaaaggcaaaggatgttaccgccgcacaggccgaattggaaaaagccttcgcgggtactgaaactgaaaaggcattaagacttcgcttagagagcaagctgtctgagatgaagaagatgcatgagggtgatctggctatggctctggtgctggatgaaaaagatcggttgatcgaagagctcaagctcagcttaaaatctaaagaggcactcattcagtgtctgaaagaagagaagagtcaaatggcctgccctgacgaaaatgtctcctctggagagctgaggggtctctgtgccgccccaagagaggagaaagagcgagagacagaggctgcgcagatggaacatcaaaaggagcgcaattcttttgaagaaagaatccaggcactcgaggaggatcttcgagagaaggagcgggaaattgccaccgagaagaaaaattccctcaaaagagacaaagctatacaaggcttgacaatggccttaaaaagtaaagagaagaaggtggaggaactaaactctgagattgaaaaattaagcgccgcgtttgccaaagcaagggaagccctgcaaaaggcacagacacaggaattccagggctccgaagactatgaaacagccctgagcgggaaagaagcactgtcggcggcgcttcgatctcagaaccttactaagtcaacagagaatcacagactcaggaggtccataaaaaaaattactcaggaattgtccgacttgcagcaggagcgtgagcggcttgaaaaagatcttgaagaagcacaccgagaaaagtccaagggagactgcaccatacgcgatctgaggaacgaagttgaaaagctgcggaacgaagtaaacgaacgtgaaaaagccatggagaacaggtacaaaagccttcttagtgagagtaataagaagcttcacaaccaagaacaggtgattaaacatttgactgaaagtacaaaccaaaaggatgttctgctccagaaatttaacgagaaggacctggaagtgattcagcagaattgttacctcatggcagcagaagatctggagctccggtccgaggggttaatcaccgagaagtgctcgtctcagcaaccacccggctccaagacaatctttagtaaagagaagaaacaatccagcgactatgaggaactgatccaggtgctcaagaaggaacaagatatttacacccatctggttaagagtctgcaggagagcgattcaataaataacctgcaggcagagctcaataagattttcgcattaagaaaacagctggaacaggatgtgttgagctaccagaacctcagaaagacgctcgaagagcagatctccgaaattagaagacgagaggagagcttctctctgtactcggatcaaaccagctatctgtcaatctgtctcgaagagaacaataggttccaggtagagcactttagtcaggaagagcttaagaagaaggtctccgacctgattcagctcgtgaaagagttgtacaccgataatcaacatctcaaaaaaacaatatttgatttgtcttgtatggggtttcagggtaacggctttcctgaccggctggcatcgactgaacaaacagaggaagctaagaagtctaggctgcccatcctcattaaacctagcaggagccttggcaacatgtatcggctgccggctacccaggaggtcgtcactcagctccagagccagattcttgagctccagggagagctcaaggaattcaagacttgtaataaacagctgcatcagaaactgatcctggcagaagcagtcatggaagggcggcctaccccggacaaaacccttctgaatgcccagcctcccgtgggcgcggcctatcaagattcccctggcgaacagaagggaattaagactaccagttctgtctggagggacaaggagatggactcagaccagcagcgtagttacgaaatcgacagcgaaatctgcccgcccgatgatctcgcatctcttccaagctgtaaagaaaatcccgaggatgtgctttccccaacatctgtagccacttaccttagcagtaagagccagccctcggccaaggtgagcgtgatggggactgatcagagtgagtccattaacacatcaaacgaaacggagtacctcaagcagaaaatacatgacttggagacagagctcgagggctatcaaaactttatatttcagttacaaaagcacagccagtgcagtgaagccatcataacagttctttgcgggaccgagggggcacaggacggtttgagcaaacccaaaaatggaagcgatggggaagagatgacgttttcatcactccaccaggtgaggtacgtcaagcatgttaaaattttgggaccgcttgcgccggagatgatcgattcacgagtactggagaacctcaagcagcaattggaggagcaggagtataagctgcaaaaggaacagaatcttaacatgcagttgttctccgagattcacaacctccagaataaattccgagatctgtccccaccaagatatgacagcttagtgcaaagtcaagccagggagttatctctgcagagacagcaaatcaaggacggccacggcatctgtgtgatctccaggcaacacatgaacaccatgataaaggcattcgaggagctgctacaggctagcgatgtggattactgcgttgccgaggggtttcaagagcagctcaatcagtgtgccgagctcctcgagaagctggagaagctgtttctgaatggcaaatcagtgggggtcgagatgaacacgcaaaacgagctgatggagcgcatcgaagaggacaacctaacatatcagcatctcctgcctgagagcccagagccatctgcctctcacgctctgtctgactacgagacctcagagaagtcctttttctcccgggaccagaagcaggacaatgagacagaaaaaaccagcgtcatggtgaacagcttttcccaggatttgctcatggagcacatacaagagatacggacactacggaaacgactcgaagaatctatcaagactaacgaaaagctgcgaaaacaattagaaaggcaagggtctgaattcgttcagggttccactagtatcttcgcttctggcagtgaactgcatagctcacttaccagcgaaattcacttcctgcggaagcagaatcaggcactcaatgctatgctgataaaaggctctagggataagcagaaggaaaacgataagctgcgcgagagcctgtctaggaagactgtcagtctcgagcacttacagcgggagtatgcttcggtgaaggaagaaaacgaacgactgcaaaaagagggttctgagaaggagcgccacaaccagcagctaattcaagaagtccgttgcagtggtcaggagctctccagggttcaagaagaagtgaagttgcgacagcagttactctctcagaatgacaagttactccagtccctccgcgtggaactgaaggcttacgagaagctggacgaagagcaccgaaggctcagggaggcctcaggtgagggctggaagggacaggatccctttagagatctgcactccttgctgatggagatccaggcattgagattgcaacttgagaggtctatcgaaacttccagcactttacagtcacgactgaaagagcagctggcaagaggcgctgagaaggctcaggagggcgccttgacactggccgtgcaagctgtgtctatccctgaggtccccctccagcccgataagcatgacggagacaagtatccaatggaaagtgataacagcttcgatctcttcgacagttctcaggcagtcacacctaagtccgtttctgaaaccccacctctgtccggcaatgacacagatagcctcagctgtgactcagggtcaagtgcgacgagtaccccatgtgtctcgagactggttaccgggcaccatctgtgggcctctaaaaatggacggcatgtccttggcctgatcgaggattacgaggcactgctgaaacaaatcagccagggccagcgcctcctcgcggagatggacattcagacccaggaggcaccttccagcacatcccaggagcttggcaccaagggcccccatcctgccccactgtccaaatttgtgagttctgtatccacagcaaagctgacgttggaggaagcctatcgacgattaaaactcctgtggcgggtctcactgcctgaggatggacagtgccctcttcactgcgaacagattggcgagatgaaggcggaggttacaaagctgcacaagaagctcaaaaagtcatag

SEQ ID NO: 96843 - DNA, 4824 bp, Artificial Sequence
  derived and/or modified sequence
atgatggacctggtgctggaggaggatgtgacagtgcccggcaccctgagcggctgcagcggcctggtgcccagcgtgcctgatgacctggatggcatcaaccccaatgccggcctgggcaatggcctgctgcccaacgtgtctgaggagaccgtgagccccacccgggccaggaacatgaaggactttgagaaccagatcacagagctgaagaaggagaacttcaacctgaagctgcgcatctacttcctggaggagaggatgcagcaggagttccacggccccacagagcacatctacaagaccaacatcgagctgaaggtggaggtggagagcctgaagcgggagctgcaggagcgggagcagctgctgatcaaggccagcaaggctgtggagagcctggccgaggccggcggcagcgagatccagagggtgaaggaggatgccaggaagaaggtgcagcaggtggaggacctgctgaccaagaggatcctgctgctggagaaggccaaggatgtgacagctgcccaggccgagctggagaaggcctttgctggaacagaaacagagaaggccctgcggctgcggctggagagcaagctgtctgagatgaagaagatgcatgaaggagacctggccatggccctggtgctggatgagaaggaccggctgattgaggagctgaagctgagcctgaagagcaaggaggccctgatccagtgcctgaaggaggagaagagccagatggcctgcccagatgaaaatgtgagcagcggggagctgcggggcctgtgtgccgccccccgggaggagaaggagcgggagacagaggccgcccagatggagcaccagaaggagagaaattcctttgaggagcgcatccaggccctggaggaggacctgcgggagaaggagcgggagatcgccacagagaagaagaacagcctgaagagggacaaggccatccagggcctgaccatggccctgaagagcaaggagaagaaggtggaggagctgaacagcgagattgagaagctgtctgctgcctttgccaaggcccgggaggccctgcagaaggcccagacccaggagttccagggctctgaagattatgaaacagccctgagcggcaaggaggccctgtctgctgccctgcggagccagaacctgaccaagagcacagagaaccaccggctgcggcgcagcatcaagaagatcacccaggagctgagtgacctgcagcaggagcgggagcggctggagaaggacctggaggaggcccaccgggagaagagcaaaggagactgcaccatccgggacctgagaaatgaggtggagaagctgagaaatgaggtgaatgaaagagagaaggccatggagaaccgctacaagagcctgctgtctgagagcaacaagaagctgcacaaccaggagcaggtgatcaagcacctgacagagagcaccaaccagaaggatgtgctgctgcagaagttcaatgagaaggacctggaggtgatccagcagaactgctacctgatggctgctgaggacctggagctgcggtctgagggcctcatcacagagaagtgcagcagccagcagcccccaggcagcaagaccatcttcagcaaggagaagaagcagagcagtgactatgaggagctgatccaggtgctgaagaaggagcaggacatctacacccacctggtgaagagcctgcaggagagtgacagcatcaacaacctgcaggccgagctgaacaagatctttgccctgaggaagcagctggagcaggatgtgctgagctaccagaacctgaggaagaccctggaggagcagatcagcgagatcagaagaagagaggagagcttcagcctgtacagcgaccagaccagctacctgagcatctgcctggaggagaacaaccgcttccaggtggagcacttcagccaggaggagctgaagaagaaggtgtctgacctgatccagctggtgaaggagctgtacacagacaaccagcacctgaagaagaccatctttgacctgagctgcatgggcttccagggcaatggcttcccagaccggctggccagcacagagcagacagaggaggccaagaagagccggctgcccatcctgatcaagcccagccgcagcctgggcaacatgtaccgcctgcctgccacccaggaggtggtgacccagctgcagagccagatcctggagctgcagggcgagctgaaggagttcaagacctgcaacaagcagctgcaccagaagctgatcctggccgaggccgtgatggagggccggcccaccccagacaagaccctgctgaatgcccagccccctgtgggcgccgcctaccaggacagccctggagagcagaagggcatcaagaccaccagctctgtgtggagggacaaggagatggacagcgaccagcagaggagctatgaaattgattctgagatctgccccccagatgacctggccagcctgcccagctgcaaggaaaatccagaagatgtgctgagccccacctctgtggccacctacctgagcagcaagagccagcccagcgccaaggtgtctgtgatgggcacagaccagagcgagagcatcaacaccagcaatgaaacagagtacctgaagcagaagatccatgacctggagacagagctggagggctaccagaacttcatcttccagctgcagaagcacagccagtgcagcgaggccatcatcaccgtgctgtgtggcacagagggcgcccaggacggcctgagcaagcccaagaatggaagtgatggagaggagatgaccttcagcagcctgcaccaggtgcgctacgtgaagcacgtgaagatcctgggccccctggcccctgagatgattgacagccgggtgctggagaacctgaagcagcagctggaggagcaggagtacaagctgcagaaggagcagaacctgaacatgcagctgttcagcgagatccacaacctgcagaacaagttccgggacctgagccccccaagatatgacagcctggtgcagagccaggcccgggagctgagcctgcagaggcagcagatcaaggatggccacggcatctgtgtgatcagccggcagcacatgaacaccatgatcaaggcctttgaggagctgctgcaggccagtgatgtggactactgtgtggccgagggcttccaggagcagctgaaccagtgtgccgagctgctggagaagctggagaagctgttcctgaatggcaagtctgtgggcgtggagatgaacacccagaatgagctgatggagcgcatcgaggaggacaacctgacctaccagcacctgctgcctgagagccctgagcccagcgccagccacgccctgagtgactatgagaccagcgagaagagcttcttcagccgggaccagaagcaggacaatgaaacagagaagacctctgtgatggtgaacagcttcagccaggacctgctgatggagcacatccaggagatccgcaccctgaggaagaggctggaggagagcatcaagaccaatgagaagctgaggaagcagctggagcggcagggcagcgagtttgtgcagggcagcaccagcatctttgccagcggcagcgagctgcacagcagcctgaccagcgagatccacttcctgaggaagcagaaccaggccctgaatgccatgctgatcaagggcagccgggacaagcagaaggaaaatgacaagctgcgggagagcctgagcaggaagacagtgtccctggagcacctgcagcgggagtatgcctctgtgaaggaggagaatgaaaggctgcagaaggagggcagcgagaaggagcggcacaaccagcagctgatccaggaggtgcgctgcagcggccaggagctgagccgggtgcaggaggaggtgaagctgcggcagcagctgctgagccagaatgacaagctgctgcagagcctgcgggtggagctgaaggcctatgagaagctggatgaggagcaccggcggctgcgggaggccagcggggagggctggaagggccaggaccccttccgggacctgcacagcctgctgatggagatccaggccctgcggctgcagctggagaggagcattgagaccagcagcaccctgcagagccggctgaaggagcagctggcccggggagctgagaaggcccaggagggcgccctgaccctggccgtgcaggccgtgtccatccctgaggtgcccctgcagcctgacaagcatgatggagacaagtaccccatggagagtgacaacagctttgacctgtttgacagcagccaggccgtgacccccaagtctgtgtctgagaccccacccctgtctggaaatgacacagacagcctgagctgtgacagcggcagcagcgccaccagcaccccctgtgtgtcccggctggtgacaggccaccacctgtgggccagcaagaatggccgccacgtgctgggcctgattgaggactatgaggccctgctgaagcagatcagccagggccagaggctgctggccgagatggacatccagacccaggaggcccccagcagcaccagccaggagctgggcaccaagggcccccacccagcccccctgagcaagtttgtgtcctctgtgtccacagccaagctgaccctggaggaggcctacagaaggctgaagctgctgtggagggtgtccctgcctgaagatggccagtgccccctgcactgtgagcagatcggggagatgaaggccgaggtgaccaagctgcacaagaagctgaagaagagctag

SEQ ID NO: 96844 - DNA, 4824 bp, Artificial Sequence
  derived and/or modified sequence
atgatggacctggtgctggaggaggacgtgaccgtgcccggcaccctcagcggctgcagtggtctagttcctagtgtaccagacgatctggacggaattaacccaaacgccggcctgggcaatgggcttctccccaacgtgtccgaggagaccgtgagccccacgagggccaggaatatgaaggactttgagaaccagataacagagctgaagaaggagaatttcaacctaaagttgaggatctattttctggaggaaaggatgcaacaagagtttcacggtccaacagaacatatatacaagaccaacattgaactgaaagtcgaggtggagagccttaagcgggagctacaggagagagagcagctgttgataaaggcatccaaggccgttgaatctctcgccgaggccgggggctctgagatacagagagtcaaggaggacgcgaggaagaaagtgcaacaagtggaggatctactcacaaaacggattctcctgctcgaaaaagccaaggacgtgacagctgcgcaggctgaacttgagaaggccttcgccggcacagaaactgagaaggccttacgactgagactcgaaagtaagctgagtgaaatgaagaaaatgcatgagggagacctggcaatggcattagtgctagacgaaaaagataggttgatcgaagagctgaagctgagtcttaagagtaaagaagccctcattcagtgtcttaaggaagaaaagagccagatggcatgtcctgatgaaaatgtgtcttccggtgagctgcgcgggctgtgtgcagcccctagggaagagaaagaacgagaaacagaagccgcacagatggagcatcagaaagagcgcaattccttcgaggagcgcatccaggcacttgaagaggatctgagagaaaaagagagagagatagctacagagaagaaaaacagtttgaagagggacaaagccatccagggcctgacgatggccctgaagtctaaggagaagaaggtggaggaattgaattcagaaattgagaagctctccgctgcctttgctaaagcacgcgaggcccttcagaaggcccagacacaggagtttcagggctcagaagactatgagaccgccctgtcaggcaaggaggccttatccgcagctctgcggagccagaacctgacaaagtcaactgagaaccaccgcctgcgccgatccatcaagaaaataacccaggagttgagcgatttgcagcaggagagagaacgcctggagaaagatctggaggaggcgcaccgggagaaatccaaaggagactgtaccatccgcgacctgaggaatgaggtggagaagctccgtaacgaagtgaacgaaagagaaaaagccatggaaaacagatataagagtcttctcagtgaatctaacaaaaaactgcacaatcaggagcaagttatcaagcacctcactgaaagtacaaaccagaaagatgtgctgcttcagaagtttaacgagaaagacctcgaggttatccagcagaactgttaccttatggcagccgaggacctcgagctcagatccgagggcctcattactgaaaaatgttccagccaacagccccccggctcaaagaccatcttttcaaaggaaaagaagcaaagttcagattacgaggagctgatccaggtgttgaaaaaggagcaggatatctatacccatctggtgaagagtctgcaggaatcagacagtatcaacaatctgcaagcagagctgaacaagatctttgcactgagaaaacaacttgagcaagatgtgttaagctaccagaacttgaggaagaccctcgaagagcagattagcgaaatccggagaagggaggagtctttcagcctgtattccgatcagacttcttacctgagtatctgcttggaagagaacaatcggttccaggtagaacacttctcccaagaggaactcaagaagaaggtctccgacctaattcagttggtgaaggagctgtatacagacaaccagcatctcaagaagacgatcttcgacctttcatgcatgggatttcagggcaatggcttcccagacaggttggcctcgaccgaacaaactgaggaggccaagaagtcccgacttcccattctgattaagcctagtcgaagcctcggcaacatgtacagactgccagcgactcaggaggtggtgacgcagttgcagtcgcagattctagaactgcagggcgaactcaaagagtttaagacctgtaacaagcagctccatcagaagctcatactagcagaagccgtcatggaaggcaggccgactcccgacaagactctgctcaacgctcaacccccagtgggagctgcctatcaggacagccccggggagcagaagggtattaaaaccacatccagcgtgtggcgggacaaagagatggattctgatcagcaacgctcctacgagatcgatagtgagatctgtcccccagatgacttggctagccttccgtcttgtaaggagaaccctgaggacgtgttgagcccaactagcgtggcgacttatttgtcatcaaagtctcagccatctgccaaggtgagcgtcatgggcacagaccagagcgagtccatcaatacctcaaacgaaaccgaatatctgaagcagaaaattcatgacttagaaacggaactcgaggggtaccaaaacttcattttccagctgcagaaacactcccagtgcagtgaggctataatcacggttctctgcggcacagagggagcccaagacggactgtcgaagccaaagaatggaagtgatggggaggaaatgaccttctccagcctacaccaggtccggtacgtgaagcatgtcaagattcttggacccctcgccccagaaatgatagatagcagagtattagaaaatctcaaacagcagctggaggagcaggagtacaagctccagaaggagcagaatttgaatatgcagctcttttcagagatccacaatctgcagaataaatttcgggatctttcaccaccaagatatgactcgctggtgcaaagccaagccagggagctgagcttacagagacagcagatcaaagatggacacggcatctgcgttattagcagacagcacatgaacaccatgatcaaagcttttgaggagctactgcaggccagtgatgtggactactgcgtggccgaaggatttcaggaacaactgaaccagtgcgctgagttgctggagaagcttgagaagctcttcctcaacggtaagagcgtcggcgtggagatgaacactcagaacgaattgatggaaagaatagaggaggacaacctgacctatcaacatctgctcccagaatctccagaacctagtgcgtcccatgctttgagtgactatgagaccagcgagaaatcatttttctcacgcgaccaaaagcaggataatgaaactgagaagaccagcgtcatggttaattcattctctcaggatttactgatggagcatatccaggaaattcggacacttcgtaagaggcttgaggaaagcataaagacgaatgaaaaattaaggaaacagctcgagcgccagggatctgaattcgtacagggatctaccagcatctttgcctccggctccgaactgcactcgtcccttacgtctgaaatccattttctgcggaaacagaatcaggccttgaatgccatgctgattaaaggctcacgcgataagcaaaaagaaaacgataagctgcgggaaagtcttagccgcaagacagtaagtctagaacacctgcaacgggagtacgcctccgtgaaagaggagaatgaaaggttgcaaaaagagggatcagaaaaggagagacacaatcaacaactgatccaggaggtgagatgctccgggcaagagctgagcagagttcaagaggaagtgaaactgagacagcagctactgtcccagaacgataaactcctgcagagcctccgggtggaacttaaagcctatgaaaaactggacgaggaacatcggcgcctaagagaggcttccggcgaaggatggaaagggcaggatcctttccgggatctgcattctttattgatggagatccaggccttgagactacagctcgaaaggtcaattgaaacatcttccaccctgcagtcaagattgaaggaacagctcgcacgcggtgcagagaaagcccaggagggggccctgactctggccgtgcaggcggtcagcatccctgaagtgccactgcagcccgataaacacgatggagataaatatccaatggaatcagataacagctttgatctttttgactcaagtcaggctgtgacccccaaaagtgtcagcgaaacaccgcccctgagcggcaatgatacagattcactatcttgcgacagcggtagcagtgcgacatcaacaccctgtgtgagcagactggtaactggtcatcatttgtgggcatcaaaaaatggccgtcatgtccttggactgatcgaagactatgaggcactcctgaagcaaattagtcagggacagcgcttgcttgccgaaatggacatccagacccaggaagcaccaagcagcacttctcaggaacttggcactaaagggcctcatcctgctcccctcagtaagtttgtgagctctgtgagcaccgctaagctgacgctggaggaagcttaccggcgcctgaaactcctctggagagtctcattgcccgaagatggacagtgtccccttcactgtgaacaaatcggcgaaatgaaggcagaggtgaccaagctacacaaaaagttgaaaaagtcctag

SEQ ID NO: 96845 - DNA, 4824 bp, Artificial Sequence
  derived and/or modified sequence
atgatggatctcgtcctggaggaagatgtcaccgtgcctggcaccctaagcggatgctccggtttggtaccttccgtgccagacgacctagacggtatcaatccaaatgctgggcttggtaacgggctcctgccaaacgtgagcgaagagacagtgtcgcccacacgtgcccgaaatatgaaagacttcgaaaaccagattacggagctgaagaaggagaactttaatctcaaactgagaatctactttctggaagagagaatgcagcaagagtttcatggcccaactgagcacatttacaaaaccaatatcgagctcaaggtggaagtagagtcgctcaaaagagagctacaagaacgggagcagctgcttatcaaagcaagcaaggccgtcgaatccctagcggaggccggagggtccgagattcagagagtgaaagaggatgctagaaaaaaggtgcaacaggttgaggatctcctgaccaagcggattctgctcctggagaaggctaaggacgttaccgcagcacaagcagaactggagaaagcgttcgccggaactgagactgagaaggcccttcggctgagactggagagcaagctgtctgagatgaagaagatgcacgaaggagatttagctatggccctggtcctggacgaaaaggatagactaatcgaagaacttaaactctccctcaagtccaaggaggccctgattcaatgtctgaaggaagagaagagccagatggcatgccccgacgagaacgtgagttctggcgagcttaggggcctttgcgccgctcccagagaagagaaagagagggagaccgaagctgcccagatggagcaccagaaggagagaaactccttcgaggagcgcatccaggcattggaagaggacctccgcgagaaagaaagggaaatagccaccgagaagaaaaatagtctgaagagagacaaggctatccaaggccttacaatggcacttaagtccaaagagaagaaagtggaagagctcaatagtgaaatcgagaagctgtctgccgcttttgccaaggccagagaggctctgcaaaaggcccagacacaggaattccaaggcagcgaagactatgagactgctcttagcggcaaggaagcgctcagtgccgctctgcggtctcagaatctaaccaagtccactgagaatcacaggctgcggagatccatcaagaaaatcacgcaggagctatccgatttgcagcaagagcgagaacgtctggaaaaggatcttgaggaggcacatcgcgagaagtctaaaggagattgtaccatcagggacctccgtaatgaggtcgaaaagctacggaatgaagtaaacgagcgggagaaagccatggagaaccggtataagtcgctcctgtcggagtctaataagaagctccacaatcaggagcaagtcataaagcacctgaccgagagcactaatcagaaggacgtgcttctgcagaaatttaatgaaaaagatctggaggtgattcagcagaactgctatttgatggctgctgaggacctggaactgagaagcgaggggctcattaccgaaaagtgctcttcccagcagccccctgggtctaagaccattttttcaaaggagaaaaagcagagtagcgattacgaagagctaattcaggtgctgaaaaaggaacaggacatctatacccatttggtgaaaagccttcaggaaagtgacagcatcaacaatttgcaagccgaattgaataagatcttcgcacttaggaaacaactcgaacaggacgtcctcagctaccagaacctgcgtaaaaccctcgaagaacagattagtgagatccgccgaagggaggagtcgttttccctgtacagtgatcagacaagctacttatcgatctgcctcgaggagaataatagatttcaggtggaacatttcagccaggaggagttgaaaaagaaggtttcagacctaattcagttggtgaaggagctctataccgataaccagcatctgaaaaagaccatttttgatctgtcgtgcatgggcttccaaggaaacggtttccctgacagattagcctctactgaacagacagaggaggctaagaagagtcgcctgccgatcctgatcaaacccagccgatcattggggaatatgtacaggctgccagcaacccaggaggtcgtcacacagctgcagtcgcagattctggagctgcagggggagttaaaggagttcaaaacttgtaataagcagttacaccagaaactcatcctggcagaagctgtaatggaggggcgacctacacctgataagacgctgctgaacgcacagccacccgtgggtgcagcctatcaggattcacctggcgaacagaagggcatcaagactacgtcctccgtgtggcgcgacaaagagatggacagtgaccagcagcggagttacgaaatcgactcagaaatttgcccacctgacgatctcgccagtcttcccagttgcaaggaaaatcctgaggatgtgctcagcccaacttccgtcgccacttacctcagctctaaatcccagccaagcgccaaggtgtctgtgatgggcacagatcagtctgagagcataaatacgagtaacgaaaccgaatacctcaagcaaaaaatccacgacctcgaaactgaactagaagggtaccagaacttcatatttcagctgcaaaaacacagtcaatgttccgaggccatcatcacagttctgtgtgggaccgaaggcgcacaggacggcctaagcaagcctaagaacggctcggatggcgaggagatgacattctcatccttacaccaggtgcgttatgtaaagcacgtgaaaatcctgggtcctctggcgccagagatgattgatagtcgagtgctcgagaacctcaagcagcaactggaagagcaggaatacaagctgcagaaggaacagaacttgaacatgcagttattctcagaaatccacaatctccagaataaatttagggatctgtcgcctcccaggtatgattcgctcgtgcagtcacaggcccgtgagctgtctctccagcggcaacagataaaagatgggcatggtatctgcgtcatcagccggcagcatatgaacacaatgatcaaggcctttgaagagctcctgcaggcatctgacgtcgactactgcgtggcagaagggtttcaggaacagctgaaccagtgtgccgagttgttagaaaagcttgagaagttgttcctgaacgggaagtcagtgggcgttgagatgaacacccagaatgagcttatggaacgtattgaagaagataacctcacgtatcagcacctactgcccgaatccccagagccatctgctagccacgctctttccgattatgagacctctgaaaagagctttttctccagagaccagaagcaagacaacgagactgagaagacaagcgttatggtgaatagctttagtcaggacctccttatggagcacatccaagagattcgtaccctgcggaagagattggaagaatcgatcaaaacgaatgaaaagctgaggaagcagctcgagaggcaaggttctgaattcgtgcagggctctacttctatctttgctagtggctccgagttgcattctagcctcacctcagaaatccattttctccggaaacagaaccaagccctcaacgccatgcttattaagggctctagggataagcagaaagaaaatgataaactgagggaatctctctctagaaagaccgtatcactggaacatttgcagagggagtacgccagtgtgaaggaagaaaacgaaagattgcagaaagagggatcagagaaggaaagacacaatcaacagttgatccaggaagtgaggtgcagcgggcaggagctctcacgtgtacaggaagaggtgaagctgcggcagcaactactatcccaaaatgacaaactcctccaaagtctgagagtcgaactgaaagcctacgagaaattggacgaagagcacaggagattgcgagaagcttccggggagggatggaaaggtcaggatcccttccgtgatctgcatagcctactcatggagatccaggccctgcggctacagctcgaacgctcaatagaaacaagtagtaccctgcagtcaaggctcaaagagcagctcgcgagaggagcagagaaggcccaggaaggcgcactaactctggcagtgcaggccgtgagcatccccgaggtgcccctccagcctgataagcacgatggggataagtacccaatggaatcagacaatagcttcgacctctttgactcgtctcaggccgtcacgcctaaatcagtgtcagagaccccacccctgtcagggaatgatactgattccctgtcttgcgactccggatcctcagctactagtacaccttgtgtgagccgcctagttacaggccaccacctgtgggctagcaagaacggtaggcacgtgttagggctcattgaagactatgaagctctgctgaagcagatcagtcagggccaacgcctgcttgccgagatggatattcaaactcaagaggctccgagtagtacctctcaggagctgggaactaagggaccccaccctgctccattatcaaaattcgtgagttccgtctctacggcaaaactgacactcgaggaggcctatcggcgactaaagctcctgtggagggtgtccctgccagaggatggccagtgccccctgcattgcgaacagattggagaaatgaaggctgaggttactaagctccataaaaaattgaagaagtcctag

SEQ ID NO: 96846 - DNA, 5002 bp, Artificial Sequence
  derived and/or modified sequence
aggaagaagcgccgggaaagatggcggcgtctgtggtttgaattccagcggcgccgccagagtctgaacaagagctggggtggagggggcggggacctggggagcccggcgggtcgctatcgcggggggtactagtggcgccgccgccacagacaccaacgctgtcgccacctctgtagccatgatggacttggtgttggaagaggacgtcaccgtccctgggacgctcagcggctgcagtggccttgttcccagtgtaccagatgacctggatggcatcaaccccaatgctgggttgggaaatggtctgctcccaaatgtgtcagaagaaacagtgtctcccaccagagcacggaacatgaaggactttgaaaatcaaatcactgaattgaagaaagaaaactttaacctaaagctccgcatctatttccttgaggaaagaatgcaacaggaatttcatggccccactgaacatatctacaaaactaacattgagctcaaggtggaagtagaaagtctgaagcgggaactccaggagagagagcagctgctcatcaaagcctccaaagcagttgagagcttagctgaagcaggtggctctgaaatccagcgggtgaaagaagatgctcgaaagaaggtgcagcaggtggaagatctcctaactaaaagaatactccttttggaaaaggcaaaagatgtgacagccgcccaggcagaactggaaaaggcctttgcagggacagagacggagaaggctcttcggttgcgtttggaaagcaagctttcagagatgaagaagatgcacgagggggacttggcgatggctctggtcctggatgagaaagacagactgattgaggagttgaagctgtctttgaagagcaaagaagctttaattcagtgccttaaagaggagaaatctcagatggcatgtcctgatgagaatgtgtcatctggagagctccgaggactttgtgctgctccaagggaagaaaaggagagagaaactgaggctgcacaaatggagcatcagaaggagagaaacagctttgaagagaggatccaggcacttgaagaggacctgagagagaaggaaagagaaattgctacagagaagaaaaatagtctaaagagggataaagccattcagggtttaaccatggcattaaaatcaaaggaaaaaaaggttgaagaacttaactctgaaattgaaaagctcagtgctgcctttgctaaagccagagaggccctacagaaagcacagacccaggaatttcaggggtctgaagactatgagactgctctatcaggaaaggaagccctttcggctgcgctgcgctcacaaaacctcaccaagagtacagagaaccacagactgcgtagaagcattaagaagatcacccaggagctgagtgacttgcagcaggagagggagagactggagaaggacctggaggaagcccatcgagagaagagcaaaggagactgcaccatccgtgatcttagaaatgaagttgaaaaattacgcaatgaagtgaatgaaagagagaaagcaatggaaaatcgttacaagagtcttctgagtgaaagcaataaaaaattgcacaatcaagagcaagtgatcaaacatctaacagaaagtaccaatcagaaggacgtgttgcttcagaaattcaatgaaaaagatttggaagtaatacagcagaactgctatttaatggctgcagaggatcttgagctcaggagtgaaggcttaataacagaaaagtgctcttctcaacagccaccaggcagcaaaaccatcttctctaaggaaaagaaacaatcatcagactatgaagagctgattcaggtcttaaagaaagagcaggacatctatacccatctggtcaaatctctgcaggaatcagacagtatcaacaacctgcaggctgagttaaacaagatttttgccctgcggaagcaactggagcaggatgtgctttcatatcagaatttgcggaagaccttggaggagcagatcagcgaaattcggaggcgggaagaatcattttcactttatagtgatcaaacatcttatctaagtatttgccttgaagaaaacaatcggtttcaagtggaacatttttctcaagaagaacttaagaaaaaggtcagtgaccttatacagctagtgaaggagctgtatacagacaaccagcacctgaagaaaaccatttttgatctctcctgcatgggtttccagggaaatgggtttccagatagacttgcgtctacagaacaaacagaggaggctaagaagtcccgcttgccaatcctaataaaaccatcccggtcattaggaaatatgtatcgtctccctgccacccaggaggtggtgacgcagctgcagagccagatcttggagctgcagggggagctgaaggagtttaaaacttgtaataagcaacttcaccaaaagttaattctggctgaagcagtgatggaggggaggccaacgcccgacaaaacgttgctgaatgctcagccccctgtgggagcagcctaccaggacagcccaggagagcagaaaggaattaaaaccacatcttctgtctggagagacaaggaaatggacagtgatcagcaaagaagctacgagattgactctgagatttgcccacctgatgaccttgccagcttgccatcatgcaaagaaaatcctgaagatgttctgagcccaacttcagtagctacttacctgagttccaagagtcagccttctgctaaagtcagtgtgatggggactgatcagtcagagagcattaatacctcaaatgagacagaatacttaaaacagaaaatccatgacttggaaactgagctggaaggctaccagaatttcatatttcagcttcaaaagcactcccagtgcagtgaggccataattacagttttgtgtgggacagaaggggcccaggatggcttgagcaagcccaagaatggttctgatggggaagaaatgaccttttcaagtttgcaccaagtgcgatacgtgaaacacgtgaaaatcctcggtccgctggccccagagatgattgacagcagggtgctggagaacctcaaacagcagctggaggaacaggaatacaagctgcagaaggagcagaatttgaacatgcaacttttcagtgagatccataatctgcagaataagttcagagatctctcacctcccagatacgattcattagttcagtcccaagccagggagctctcccttcaacggcagcagattaaggatggccatggcatctgtgtcatctcccgtcaacacatgaacaccatgattaaggcatttgaggagttgctgcaggccagtgatgtggattactgtgtggccgagggtttccaggaacagctgaatcaatgtgctgagctgctggagaaattggaaaagctatttctcaacggaaaatcagttggagtggaaatgaacacccagaatgaactgatggagaggattgaggaagacaacttaacctaccaacatcttctgcctgaatctcctgagccttcagcctctcatgcgctctctgattatgaaacatctgaaaagtccttcttctcacgagaccagaagcaagataatgagacagagaagacttcagttatggtgaacagtttttctcaagacttactaatggaacacatacaggaaattcgaactttgagaaagcgtttagaagaatctattaaaacaaatgagaagctacggaaacagttggaacggcaaggatctgaatttgttcaaggttctacaagcatttttgcttctggttcagagcttcatagttctctaacatcagaaattcatttcttgaggaagcagaaccaggccctcaatgcaatgctcattaaaggatccagagataaacagaaggagaatgacaaattacgagagtccctctccaggaagaccgtgagcctggagcaccttcagcgggagtatgccagcgtgaaggaagaaaatgaaaggctgcagaaagaaggcagcgagaaggagagacacaaccagcagctgatccaggaggtccgctgcagcggccaggagctgagcagggtgcaggaggaggtgaagttgaggcagcagctgctctcacagaatgacaagctattgcagtctctccgagtggagctgaaggcgtatgagaagctggatgaagagcacaggagactgagagaggcgtcgggagaaggctggaaggggcaggatcctttcagggacctgcacagcctcctgatggagatccaggctctgcgcttgcaactagaaaggagcatcgaaaccagcagcactctgcagagcaggctcaaggaacagctggcaaggggggcagagaaggcacaggaaggagccctcactctggctgtccaagccgtgtccatccctgaggtgccccttcagcctgacaaacacgatggtgacaaatatcccatggaaagtgataattcatttgatctgtttgattcctcccaggcagtgacaccaaaatcagtttcagagactcctccactctctgggaatgacacggactccctctcctgcgacagtggcagttcggcaactagcactccgtgtgtgtcccgcctggtcactggccaccacctgtgggccagcaagaatggccgccatgtcctgggcctgattgaggactatgaggccctgctcaaacagatcagccagggacagaggctccttgctgaaatggacattcaaacccaagaggctcccagctccacaagtcaagagctgggaacaaagggtccacacccagcaccactgagcaagtttgtgagcagtgtgagcacggccaagctgaccctggaagaggcctacaggcggctgaagcttctctggagagtctcactccccgaggatggccagtgcccccttcactgtgagcagattggagaaatgaaggcagaggtcaccaaactacataaaaaattgaaaaagtca

SEQ ID NO: 96847 - DNA, 4824 bp, Artificial Sequence
  derived and/or modified sequence
atgatggacctggtgctggaggaggacgtgaccgtgcccggcaccctgagcggctgcagcggcctggtgcccagcgtgcccgacgacctggacggcatcaaccccaacgccggcctgggcaacggcctgctgcccaacgtgagcgaggagaccgtgagccccaccagagccagaaacatgaaggacttcgagaaccagatcaccgagctgaagaaggagaacttcaacctgaagctgagaatctacttcctggaggagagaatgcagcaggagttccacggccccaccgagcacatctacaagaccaacatcgagctgaaggtggaggtggagagcctgaagagagagctgcaggagagagagcagctgctgatcaaggccagcaaggccgtggagagcctggccgaggccggcggcagcgagatccagagagtgaaggaggacgccagaaagaaggtgcagcaggtggaggacctgctgaccaagagaatcctgctgctggagaaggccaaggacgtgaccgccgcccaggccgagctggagaaggccttcgccggcaccgagaccgagaaggccctgagactgagactggagagcaagctgagcgagatgaagaagatgcacgagggcgacctggccatggccctggtgctggacgagaaggacagactgatcgaggagctgaagctgagcctgaagagcaaggaggccctgatccagtgcctgaaggaggagaagagccagatggcctgccccgacgagaacgtgagcagcggcgagctgagaggcctgtgcgccgcccccagagaggagaaggagagagagaccgaggccgcccagatggagcaccagaaggagagaaacagcttcgaggagagaatccaggccctggaggaggacctgagagagaaggagagagagatcgccaccgagaagaagaacagcctgaagagagacaaggccatccagggcctgaccatggccctgaagagcaaggagaagaaggtggaggagctgaacagcgagatcgagaagctgagcgccgccttcgccaaggccagagaggccctgcagaaggcccagacccaggagttccagggcagcgaggactacgagaccgccctgagcggcaaggaggccctgagcgccgccctgagaagccagaacctgaccaagagcaccgagaaccacagactgagaagaagcatcaagaagatcacccaggagctgagcgacctgcagcaggagagagagagactggagaaggacctggaggaggcccacagagagaagagcaagggcgactgcaccatcagagacctgagaaacgaggtggagaagctgagaaacgaggtgaacgagagagagaaggccatggagaacagatacaagagcctgctgagcgagagcaacaagaagctgcacaaccaggagcaggtgatcaagcacctgaccgagagcaccaaccagaaggacgtgctgctgcagaagttcaacgagaaggacctggaggtgatccagcagaactgctacctgatggccgccgaggacctggagctgagaagcgagggcctgatcaccgagaagtgcagcagccagcagccccccggcagcaagaccatcttcagcaaggagaagaagcagagcagcgactacgaggagctgatccaggtgctgaagaaggagcaggacatctacacccacctggtgaagagcctgcaggagagcgacagcatcaacaacctgcaggccgagctgaacaagatcttcgccctgagaaagcagctggagcaggacgtgctgagctaccagaacctgagaaagaccctggaggagcagatcagcgagatcagaagaagagaggagagcttcagcctgtacagcgaccagaccagctacctgagcatctgcctggaggagaacaacagattccaggtggagcacttcagccaggaggagctgaagaagaaggtgagcgacctgatccagctggtgaaggagctgtacaccgacaaccagcacctgaagaagaccatcttcgacctgagctgcatgggcttccagggcaacggcttccccgacagactggccagcaccgagcagaccgaggaggccaagaagagcagactgcccatcctgatcaagcccagcagaagcctgggcaacatgtacagactgcccgccacccaggaggtggtgacccagctgcagagccagatcctggagctgcagggcgagctgaaggagttcaagacctgcaacaagcagctgcaccagaagctgatcctggccgaggccgtgatggagggcagacccacccccgacaagaccctgctgaacgcccagccccccgtgggcgccgcctaccaggacagccccggcgagcagaagggcatcaagaccaccagcagcgtgtggagagacaaggagatggacagcgaccagcagagaagctacgagatcgacagcgagatctgcccccccgacgacctggccagcctgcccagctgcaaggagaaccccgaggacgtgctgagccccaccagcgtggccacctacctgagcagcaagagccagcccagcgccaaggtgagcgtgatgggcaccgaccagagcgagagcatcaacaccagcaacgagaccgagtacctgaagcagaagatccacgacctggagaccgagctggagggctaccagaacttcatcttccagctgcagaagcacagccagtgcagcgaggccatcatcaccgtgctgtgcggcaccgagggcgcccaggacggcctgagcaagcccaagaacggcagcgacggcgaggagatgaccttcagcagcctgcaccaggtgagatacgtgaagcacgtgaagatcctgggccccctggcccccgagatgatcgacagcagagtgctggagaacctgaagcagcagctggaggagcaggagtacaagctgcagaaggagcagaacctgaacatgcagctgttcagcgagatccacaacctgcagaacaagttcagagacctgagcccccccagatacgacagcctggtgcagagccaggccagagagctgagcctgcagagacagcagatcaaggacggccacggcatctgcgtgatcagcagacagcacatgaacaccatgatcaaggccttcgaggagctgctgcaggccagcgacgtggactactgcgtggccgagggcttccaggagcagctgaaccagtgcgccgagctgctggagaagctggagaagctgttcctgaacggcaagagcgtgggcgtggagatgaacacccagaacgagctgatggagagaatcgaggaggacaacctgacctaccagcacctgctgcccgagagccccgagcccagcgccagccacgccctgagcgactacgagaccagcgagaagagcttcttcagcagagaccagaagcaggacaacgagaccgagaagaccagcgtgatggtgaacagcttcagccaggacctgctgatggagcacatccaggagatcagaaccctgagaaagagactggaggagagcatcaagaccaacgagaagctgagaaagcagctggagagacagggcagcgagttcgtgcagggcagcaccagcatcttcgccagcggcagcgagctgcacagcagcctgaccagcgagatccacttcctgagaaagcagaaccaggccctgaacgccatgctgatcaagggcagcagagacaagcagaaggagaacgacaagctgagagagagcctgagcagaaagaccgtgagcctggagcacctgcagagagagtacgccagcgtgaaggaggagaacgagagactgcagaaggagggcagcgagaaggagagacacaaccagcagctgatccaggaggtgagatgcagcggccaggagctgagcagagtgcaggaggaggtgaagctgagacagcagctgctgagccagaacgacaagctgctgcagagcctgagagtggagctgaaggcctacgagaagctggacgaggagcacagaagactgagagaggccagcggcgagggctggaagggccaggaccccttcagagacctgcacagcctgctgatggagatccaggccctgagactgcagctggagagaagcatcgagaccagcagcaccctgcagagcagactgaaggagcagctggccagaggcgccgagaaggcccaggagggcgccctgaccctggccgtgcaggccgtgagcatccccgaggtgcccctgcagcccgacaagcacgacggcgacaagtaccccatggagagcgacaacagcttcgacctgttcgacagcagccaggccgtgacccccaagagcgtgagcgagaccccccccctgagcggcaacgacaccgacagcctgagctgcgacagcggcagcagcgccaccagcaccccctgcgtgagcagactggtgaccggccaccacctgtgggccagcaagaacggcagacacgtgctgggcctgatcgaggactacgaggccctgctgaagcagatcagccagggccagagactgctggccgagatggacatccagacccaggaggcccccagcagcaccagccaggagctgggcaccaagggcccccaccccgcccccctgagcaagttcgtgagcagcgtgagcaccgccaagctgaccctggaggaggcctacagaagactgaagctgctgtggagagtgagcctgcccgaggacggccagtgccccctgcactgcgagcagatcggcgagatgaaggccgaggtgaccaagctgcacaagaagctgaagaagagctag

SEQ ID NO: 96848 - protein, 502 aa, Artificial Sequence
  derived and/or modified sequence
MRRRRRRDGFYPAPDFRDREAEDMAGVFDIDLDQPEDAGSEDELEEGGQLNESMDHGGVGPYELGMEHCEKFEISETSVNRGPEKIRPECFELLRVLGKGGYGKAMIVRNAKDTAHTKAERNILEEVKHPFIVDLIYAFQTGGKLYLILEYLSGGELFMQLEREGIFMEDTACFYLAEISMALGHLHQKGIIYRDLKPENIMLNHQGHVKLTDFGLCKESIHDGTVTHTFCGTIEYMAPEILMRSGHNRAVDWWSLGALMYDMLTGAPPFTGENRKKTIDKILKCKLNLPPYLTQEARDLLKKLLKRNAASRLGAGPGDAGEVQAHPFFRHINWEELLARKVEPPFKPLLQSEEDVSQFDSKFTRQTPVDSPDDSTLSESANQVFLGFTYVAPSVLESVKEKFSFEPKIRSPRRFIGSPRTPVSPVKFSPGDFWGRGASASTANPQTPVEYPMETSGIEQMDVTMSGEASAPLPIRQPNSGPYKKQAFPMISKRPEHLRMNL

SEQ ID NO: 96849 - DNA, 1509 bp, Artificial Sequence
  derived and/or modified sequence
atgagaagaagaagaagaagagacggcttctaccccgcccccgacttcagagacagagaggccgaggacatggccggcgtgttcgacatcgacctggaccagcccgaggacgccggcagcgaggacgagctggaggagggcggccagctgaacgagagcatggaccacggcggcgtgggcccctacgagctgggcatggagcactgcgagaagttcgagatcagcgagaccagcgtgaacagaggccccgagaagatcagacccgagtgcttcgagctgctgagagtgctgggcaagggcggctacggcaaggccatgatcgtgagaaacgccaaggacaccgcccacaccaaggccgagagaaacatcctggaggaggtgaagcaccccttcatcgtggacctgatctacgccttccagaccggcggcaagctgtacctgatcctggagtacctgagcggcggcgagctgttcatgcagctggagagagagggcatcttcatggaggacaccgcctgcttctacctggccgagatcagcatggccctgggccacctgcaccagaagggcatcatctacagagacctgaagcccgagaacatcatgctgaaccaccagggccacgtgaagctgaccgacttcggcctgtgcaaggagagcatccacgacggcaccgtgacccacaccttctgcggcaccatcgagtacatggcccccgagatcctgatgagaagcggccacaacagagccgtggactggtggagcctgggcgccctgatgtacgacatgctgaccggcgccccccccttcaccggcgagaacagaaagaagaccatcgacaagatcctgaagtgcaagctgaacctgcccccctacctgacccaggaggccagagacctgctgaagaagctgctgaagagaaacgccgccagcagactgggcgccggccccggcgacgccggcgaggtgcaggcccaccccttcttcagacacatcaactgggaggagctgctggccagaaaggtggagccccccttcaagcccctgctgcagagcgaggaggacgtgagccagttcgacagcaagttcaccagacagacccccgtggacagccccgacgacagcaccctgagcgagagcgccaaccaggtgttcctgggcttcacctacgtggcccccagcgtgctggagagcgtgaaggagaagttcagcttcgagcccaagatcagaagccccagaagattcatcggcagccccagaacccccgtgagccccgtgaagttcagccccggcgacttctggggcagaggcgccagcgccagcaccgccaacccccagacccccgtggagtaccccatggagaccagcggcatcgagcagatggacgtgaccatgagcggcgaggccagcgcccccctgcccatcagacagcccaacagcggcccctacaagaagcaggccttccccatgatcagcaagagacccgagcacctgagaatgaacctgtag

SEQ ID NO: 96850 - DNA, 1509 bp, Artificial Sequence
  derived and/or modified sequence
atgcgaaggaggagaaggagagacggcttttaccccgcccccgactttcgcgatagagaagccgaggatatggctggcgtgtttgacattgatcttgaccagcctgaagacgctgggtcagaggatgagcttgaggagggaggtcaacttaacgaaagcatggatcacggaggcgtcggcccttatgaactcggcatggagcattgcgagaaatttgagatttctgagacgtcagttaaccgcgggccagaaaagattcgtcccgaatgtttcgagctcctcagggtgctcggaaaggggggatacgggaaggctatgattgttaggaatgctaaggacactgctcacactaaagctgaaaggaatattttggaggaggttaaacacccatttattgttgatttaatatacgcgtttcagactggcggcaaactctacctgatcctggagtatctctctggcggcgaattgtttatgcagttggagcgcgaggggatatttatggaggatacagcttgtttctacttagccgagatcagtatggctctagggcatctccaccagaagggcatcatctatcgcgacctgaaacctgagaacatcatgctgaaccaccagggacatgtgaagctgacagactttggtctctgcaaagagtctattcatgatggcacggtgactcacactttttgtggaactatcgagtacatggctcccgagatactcatgcgctccggccacaacagagcggtggattggtggtctctgggggccctcatgtatgatatgctcactggagcgcctccctttacaggagaaaacagaaaaaaaactatagacaaaatccttaagtgcaaactgaacttgcccccttatctgacacaggaagcacgtgacttgctgaagaagcttctgaaacgaaacgccgcatcacggctgggcgctgggcctggagacgccggagaggtgcaggcccaccctttcttccggcatatcaattgggaggagctcctggctcgaaaggtcgagcctccatttaaaccacttctccagtccgaggaggacgtgagccagtttgatagcaaatttactcggcagacccccgtagactcacccgatgactccaccctgtctgaaagcgctaatcaggttttcttggggtttacatatgtggcaccttctgtgctggagtcagttaaagaaaagttcagctttgaacccaagattaggtctccacgacgattcatcgggtcacctcgcacccccgtatcccctgttaaatttagtcctggtgacttttgggggcgtggcgcatcagcgagtacagctaatcctcagacacccgtggagtacccaatggagacttccggcatcgaacagatggatgtgactatgagcggggaggctagtgctccactgcctatccgtcagccaaactccggcccatacaagaagcaggcgtttcccatgatctccaagcgcccggagcacctgcggatgaacctgtag

SEQ ID NO: 96851 - DNA, 1509 bp, Artificial Sequence
  derived and/or modified sequence
atgagaagaagaagaagaagagatggcttctacccagccccagacttccgggaccgggaggccgaggacatggccggcgtgtttgacatcgacctggaccagccagaagatgctggctctgaagatgagctggaggagggcggccagctgaatgaatccatggaccacggcggcgtgggcccctatgagctgggcatggagcactgtgagaagtttgagatcagcgagacctctgtgaacagaggccctgagaagatccggccagaatgttttgagctgctgcgggtgctgggcaaaggaggctacggcaaggccatgattgtgagaaatgccaaggacacagcccacaccaaggccgagaggaacatcctggaggaggtgaagcaccccttcatcgtggacctgatctatgccttccagacaggaggcaagctgtacctgatcctggagtacctgtctggaggagagctgttcatgcagctggagcgggagggcatcttcatggaggacacagcctgcttctacctggccgagatctccatggccctgggccacctgcaccagaagggcatcatctacagagacctgaagccagagaacatcatgctgaaccaccagggccacgtgaagctgacagactttggcctgtgcaaggagagcatccatgatggcaccgtgacccacaccttctgtggcaccatcgagtacatggcccctgagatcctgatgaggagcggccacaacagagctgtggactggtggagcctgggcgccctgatgtatgacatgctgactggagccccacccttcaccggagaaaataggaagaagaccatcgacaagatcctgaagtgcaagctgaacctgcccccctacctgacccaggaggcccgggacctgctgaagaagctgctgaagagaaatgctgccagccggctgggcgccggccctggagatgctggggaggtgcaggcccaccccttcttccgccacatcaactgggaggagctgctggccaggaaggtggagccccccttcaagcccctgctgcagagcgaggaggatgtgtcccagtttgacagcaagttcacccggcagacccctgtggacagcccagatgacagcaccctgtctgagagcgccaaccaggtgttcctgggcttcacctacgtggcccccagcgtgctggagagcgtgaaggagaagttctcctttgagcccaagatccgcagcccccggcgcttcatcggcagccccaggacccctgtgtcccctgtgaagttcagccctggggacttctggggccgcggggccagcgccagcacagccaacccccagacccctgtggagtaccccatggagaccagcggcatcgagcagatggatgtgaccatgtctggagaggccagcgcccccctgcccatccggcagcccaacagcggcccctacaagaagcaggccttccccatgatcagcaagaggcctgagcacctgaggatgaacctgtag

SEQ ID NO: 96852 - DNA, 1509 bp, Artificial Sequence
  derived and/or modified sequence
atgcggcggcggcggcggcgggacggcttctaccccgcccccgactttcgagacagagaggctgaggacatggccggggtgtttgacatagaccttgaccagcccgaggatgctggcagcgaggatgaacttgaggagggagggcaactgaatgaatctatggaccacggcggagtgggtccttatgaactgggcatggaacactgtgaaaaatttgaaatttctgagacttcggtgaacagagggcctgagaagatccggcccgagtgtttcgaattgctgagggtcctcggaaagggcgggtacggcaaggcaatgatcgttagaaacgccaaggataccgcccataccaaagcggaacggaatatccttgaggaggtcaagcacccatttattgtagacttgatctacgcctttcagactggaggaaagttatatctgatcctagaatacctgtcagggggagagctgttcatgcagctggagcgggagggaatttttatggaagatacagcatgcttttatctggctgagatctctatggcattagggcacttgcaccagaaaggaattatctacagagaccttaagccagagaacatcatgctcaatcatcagggacatgtaaagctgaccgatttcggtctgtgtaaagagtccattcacgatgggaccgttactcataccttctgcggaactatagagtatatggcacctgagatactgatgcgttcaggccacaaccgagccgtggactggtggagcctgggagcactgatgtacgacatgctgactggcgcgcccccttttaccggagagaatagaaaaaagacgatcgacaagattcttaagtgcaaactaaacctgccaccttatctgactcaggaggcgcgagacctgctgaaaaagctgttgaaacgaaacgctgcttcgaggctaggcgcaggtcccggagatgctggggaagtccaagctcacccgttcttcaggcacattaactgggaggaactgcttgcccgtaaggttgaaccacccttcaaaccactcctgcagtcagaggaggacgtgtcccagtttgacagcaagttcacacgccagacacccgtggattctcctgatgacagcacgctcagcgagtctgcaaatcaggtctttctcggcttcacatatgtcgcgccctcagtgctggagtctgtgaaggagaagttctcttttgaacccaagattcgatctcctagacggttcattggctctcctagaactcctgtgtctcccgttaagttttcccccggagacttctggggacgcggagccagcgcgagtactgctaacccccagacaccagtagaatatcccatggaaacctccggaatcgaacagatggacgtgactatgtccggtgaagcttccgcacccctgcctattagacaaccgaacagcggtccttacaaaaaacaggccttccctatgatatcaaaaaggccagagcacttacggatgaacctgtag

SEQ ID NO: 96853 - DNA, 1509 bp, Artificial Sequence
  derived and/or modified sequence
atgaggagacgacgaagacgggatggattctaccccgcacccgattttagggaccgagaggcagaggatatggctggcgtcttcgacatcgatcttgaccagcctgaagatgctggctccgaggatgagctcgaggaaggaggacagctgaatgaaagcatggatcacgggggagtggggccttacgaactggggatggagcattgcgagaagttcgagatttctgaaacctcggtcaataggggccctgagaagattaggcccgaatgttttgagctcctgcgagtgttgggcaagggtggctatggtaaggccatgatcgttcgaaacgcaaaggatacagcccacacaaaggccgaaagaaacatccttgaagaggttaagcatcctttcatagttgacctcatttatgcttttcagaccgggggaaagttgtatctgatcctagagtacctgtctggcggagagctattcatgcagctagagagagaaggaatctttatggaggataccgcatgcttctacttggccgagatatcgatggcacttggccatctgcaccagaagggtatcatctatagggacctcaagcctgagaatatcatgttgaaccaccagggtcacgtgaaactgacagatttcggtctgtgtaaagaatcaattcacgacgggaccgtgacacacaccttttgcggcacaatcgagtatatggctccggaaatcctgatgcgctcagggcataatagggctgtggactggtggtcattgggcgctctgatgtatgacatgcttacgggagcccctccattcaccggagaaaaccgcaagaaaactattgataagattttgaagtgtaagttaaatctgccaccgtacctgacgcaagaggctcgggaccttctgaagaaactcctgaagcggaacgccgcttcccgtttgggcgcagggcctggagacgctggcgaggtccaagcccacccgtttttcaggcacattaattgggaggaactgcttgccaggaaagtggagcctcccttcaagcccttgcttcagtcagaggaagacgtgtctcagttcgactctaaatttacacgtcaaaccccagtagactccccagatgattccacgctttccgaatcggcaaaccaagtatttctcggctttacctacgtagccccatccgttttagagtctgtgaaagagaagttcagcttcgagccgaaaattaggagccctaggcggttcattggaagccccagaacacccgtgagccccgtcaaattttcaccaggagatttttggggtcggggagcaagcgcctccacagccaaccctcagacacccgtcgaataccccatggaaacctccggcatcgagcagatggacgtgacaatgagcggagaggcttctgctcccttgcccatccggcagccaaattcaggcccttacaaaaagcaagcttttcccatgatctcaaaacggcctgaacacctacgaatgaatctgtag

SEQ ID NO: 96854 - DNA, 1913 bp, Artificial Sequence
  derived and/or modified sequence
ctaagcagccggtgatggcggcagcggctgtggtggctgcggcgggtccgggcccatgaggcgacgaaggaggcgggacggcttttacccagccccggacttccgagacagggaagctgaggacatggcaggagtgtttgacatagacctggaccagccagaggacgcgggctctgaggatgagctggaggaggggggtcagttaaatgaaagcatggaccatgggggagttggaccatatgaacttggcatggaacattgtgagaaatttgaaatctcagaaactagtgtgaacagagggccagaaaaaatcagaccagaatgttttgagctacttcgggtacttggtaaagggggctatggaaaggcaatgatagtaagaaatgctaaagatacagctcatacaaaagcagaacggaatattctggaggaagtaaagcatcccttcatcgtggatttaatttatgcctttcagactggtggaaaactctacctcatccttgagtatctcagtggaggagaactatttatgcagttagaaagagagggaatatttatggaagacactgcctgcttttacttggcagaaatctccatggctttggggcatttacatcaaaaggggatcatctacagagacctgaagccggagaatatcatgcttaatcaccaaggtcatgtgaaactaacagactttggactatgcaaagaatctattcatgatggaacagtcacacacacattttgtggaacaatagaatacatggcccctgaaatcttgatgagaagtggccacaatcgtgctgtggattggtggagtttgggagcattaatgtatgacatgctgactggagcacccccattcactggggagaatagaaagaaaacaattgacaaaatcctcaaatgtaaactcaatttgcctccctacctcacacaagaagccagagatctgcttaaaaagctgctgaaaagaaatgctgcttctcgtctgggagctggtcctggggacgctggagaagttcaagctcatccattctttagacacattaactgggaagaacttctggctcgaaaggtggagcccccctttaaacctctgttgcaatctgaagaggatgtaagtcagtttgattccaagtttacacgtcagacacctgtcgacagcccagatgactcaactctcagtgaaagtgccaatcaggtctttctgggttttacatatgtggctccatctgtacttgaaagtgtgaaagaaaagttttcctttgaaccaaaaatccgatcacctcgaagatttattggcagcccacgaacacctgtcagcccagtcaaattttctcctggggatttctggggaagaggtgcttcggccagcacagcaaatcctcagacacctgtggaatacccaatggaaacaagtggcatagagcagatggatgtgacaatgagtggggaagcatcggcaccacttccaatacgacagccgaactctgggccatacaaaaaacaagcttttcccatgatctccaaacggccagagcacctgcgtatgaatctatgacagagcaatgcttttaatgaatttaaggcaaaaaaggtggagagggagatgtgtgagcatcctgcaaggtgaaacgactcaaaatgacagtttcagagagtcaatgtcattacatagaacacttcagacacaggaaaaataaacgtggattttaaaaaatcaatcaatggtgcaaaaaaaaacttaaagcaaaatagtattgctgaactcttaggcacatcaattaattgattcctcgcgacatcttctcaaccttatcaaggattttcatgttgatgactcgaaactgacagtattaagggtaggatgttgcttctgaatcactgttgagttctgattgtgttgaaga

SEQ ID NO: 96855 - protein, 451 aa, Artificial Sequence
  derived and/or modified sequence
MRRRRRRDGFYPAPDFRDREAEDMAGVFDIDLDQPEDAGSEDELEEGGQLNESMDHGGVGPYELGMEHCEKFEISETSVNRGPEKIRPECFELLRVLGKGGYGKVFQVRKVTGANTGKIFAMKVLKKAMIVRNAKDTAHTKAERNILEEVKHPFIVDLIYAFQTGGKLYLILEYLSGGELFMQLEREGIFMEDTACFYLAEISMALGHLHQKGIIYRDLKPENIMLNHQGHVKLTDFGLCKESIHDGTVTHTFCGTIEYMAPEILMRSGHNRAVDWWSLGALMYDMLTGAPPFTGENRKKTIDKILKCKLNLPPYLTQEARDLLKKLLKRNAASRLGAGPGDAGEVQAHPFFRHINWEELLARKVEPPFKPLLQSEEDVSQFDSKFTRQTPVDSPDDSTLSESANQVFLGFTYVAPSVLESVKEKFSFEPKIRSPRRFIGSPRTPVSTAMC

SEQ ID NO: 96856 - DNA, 1356 bp, Artificial Sequence
  derived and/or modified sequence
atgagaagaagaagaagaagagacggcttctaccccgcccccgacttcagagacagagaggccgaggacatggccggcgtgttcgacatcgacctggaccagcccgaggacgccggcagcgaggacgagctggaggagggcggccagctgaacgagagcatggaccacggcggcgtgggcccctacgagctgggcatggagcactgcgagaagttcgagatcagcgagaccagcgtgaacagaggccccgagaagatcagacccgagtgcttcgagctgctgagagtgctgggcaagggcggctacggcaaggtgttccaggtgagaaaggtgaccggcgccaacaccggcaagatcttcgccatgaaggtgctgaagaaggccatgatcgtgagaaacgccaaggacaccgcccacaccaaggccgagagaaacatcctggaggaggtgaagcaccccttcatcgtggacctgatctacgccttccagaccggcggcaagctgtacctgatcctggagtacctgagcggcggcgagctgttcatgcagctggagagagagggcatcttcatggaggacaccgcctgcttctacctggccgagatcagcatggccctgggccacctgcaccagaagggcatcatctacagagacctgaagcccgagaacatcatgctgaaccaccagggccacgtgaagctgaccgacttcggcctgtgcaaggagagcatccacgacggcaccgtgacccacaccttctgcggcaccatcgagtacatggcccccgagatcctgatgagaagcggccacaacagagccgtggactggtggagcctgggcgccctgatgtacgacatgctgaccggcgccccccccttcaccggcgagaacagaaagaagaccatcgacaagatcctgaagtgcaagctgaacctgcccccctacctgacccaggaggccagagacctgctgaagaagctgctgaagagaaacgccgccagcagactgggcgccggccccggcgacgccggcgaggtgcaggcccaccccttcttcagacacatcaactgggaggagctgctggccagaaaggtggagccccccttcaagcccctgctgcagagcgaggaggacgtgagccagttcgacagcaagttcaccagacagacccccgtggacagccccgacgacagcaccctgagcgagagcgccaaccaggtgttcctgggcttcacctacgtggcccccagcgtgctggagagcgtgaaggagaagttcagcttcgagcccaagatcagaagccccagaagattcatcggcagccccagaacccccgtgagcaccgccatgtgctag

SEQ ID NO: 96857 - DNA, 1356 bp, Artificial Sequence
  derived and/or modified sequence
atgcgcaggcggaggcgtagagacggtttctacccggctccggatttccgcgaccgcgaggcggaggatatggctggagtgtttgatattgatcttgaccagccagaagacgccggaagcgaggacgagctggaagagggaggtcaactgaacgagtctatggaccatgggggcgttggaccttatgagctgggcatggagcattgcgaaaagttcgagataagtgagacgagcgtaaacagagggcctgagaagatccggcccgaatgcttcgaactccttcgtgtgctgggaaaggggggttatgggaaggtcttccaggtccgcaaggtcaccggcgctaatactggcaagatctttgcaatgaaggttctcaagaaggcaatgattgtccgaaatgctaaagatacagctcacactaaagccgaacggaacattctggaagaggtcaagcacccattcattgttgatctgatctacgccttccagaccggaggaaaattgtaccttatacttgagtatctaagtggaggcgaactgttcatgcagcttgaaagggagggaatcttcatggaagatacagcctgcttttatctggctgagatttctatggctcttggacacctgcaccagaagggaattatctaccgcgatctcaagccagaaaatatcatgctgaaccaccaagggcacgtgaagttaaccgactttggtctctgcaaggagtccatccacgatgggactgtgacccataccttctgtgggactatcgaatacatggctccggagatactaatgagatccggacataatagggccgtggactggtggtccctgggtgccctgatgtatgatatgcttaccggcgctccgccattcactggcgaaaacaggaagaagacaatcgacaaaattctcaaatgcaaacttaatctgcctccatatctgactcaggaagccagggatctgctgaaaaagctgctcaagagaaatgcggcatcacggctgggtgcaggccccggtgatgctggtgaggtgcaagctcatccctttttccggcatatcaactgggaggaacttctggcccggaaggtagagccccctttcaagcctctgttacagagcgaagaagacgtgagccagtttgacagcaagtttacccggcagaccccggtggacagccccgatgactccactctctccgaaagtgccaatcaagtcttcctcgggttcacatacgtggcgcctagcgtactcgaatcggtcaaagagaaattctcttttgaacctaaaatccgctcacccaggcggttcattggatcacccaggacccccgtgtctacagccatgtgctag

SEQ ID NO: 96858 - DNA, 1356 bp, Artificial Sequence
  derived and/or modified sequence
atgagaagaagaagaagaagagatggcttctacccagccccagacttccgggaccgggaggccgaggacatggccggcgtgtttgacatcgacctggaccagccagaagatgctggctctgaagatgagctggaggagggcggccagctgaatgaatccatggaccacggcggcgtgggcccctatgagctgggcatggagcactgtgagaagtttgagatcagcgagacctctgtgaacagaggccctgagaagatccggccagaatgttttgagctgctgcgggtgctgggcaaaggaggctacggcaaggtgttccaggtgaggaaggtgactggagccaacacaggcaagatctttgccatgaaggtgctgaagaaggccatgattgtgagaaatgccaaggacacagcccacaccaaggccgagaggaacatcctggaggaggtgaagcaccccttcatcgtggacctgatctatgccttccagacaggaggcaagctgtacctgatcctggagtacctgagcggcggggagctgttcatgcagctggagcgggagggcatcttcatggaggacacagcctgcttctacctggccgagatctccatggccctgggccacctgcaccagaagggcatcatctacagagacctgaagccagagaacatcatgctgaaccaccagggccacgtgaagctgacagactttggcctgtgcaaggagagcatccatgatggcaccgtgacccacaccttctgtggcaccatcgagtacatggcccctgagatcctgatgaggagcggccacaacagagctgtggactggtggagcctgggcgccctgatgtatgacatgctgaccggggccccacccttcaccggggagaacaggaagaagaccatcgacaagatcctgaagtgcaagctgaacctgcccccctacctgacccaggaggcccgggacctgctgaagaagctgctgaagagaaatgctgccagccggctgggcgccggccctggagatgctggggaggtgcaggcccaccccttcttccgccacatcaactgggaggagctgctggccaggaaggtggagccccccttcaagcccctgctgcagagtgaagaagatgtgtcccagtttgacagcaagttcacccggcagacccctgtggacagcccagatgacagcaccctgtctgagagcgccaaccaggtgttcctgggcttcacctacgtggcccccagcgtgctggagagcgtgaaggagaagttctcctttgagcccaagatccgcagcccccggcgcttcatcggcagccccaggacccctgtgtccacagccatgtgctag

SEQ ID NO: 96859 - DNA, 1356 bp, Artificial Sequence
  derived and/or modified sequence
atgcggcggcggcggcggcgggacggcttctaccccgcccccgactttagagaccgcgaagcagaggacatggctggggtcttcgacatcgatttagaccagccggaagatgccggcagcgaagatgagctggaagagggaggccaattgaatgaatcgatggaccatggaggcgtcggcccctatgaactcgggatggagcactgcgaaaagtttgaaatcagcgagacatcagtaaaccggggcccagagaagataaggcccgaatgcttcgagcttctacgggttctcggtaagggagggtacgggaaggtattccaggtgcgcaaggtaacaggagctaatacaggcaaaatattcgccatgaaagtgttgaaaaaggccatgatagtgaggaatgccaaggatactgctcacaccaaggctgagaggaacattctggaagaggtgaaacacccattcattgtcgacctcatctacgcgttccagaccggcggaaaactgtaccttatcctcgaatacctgtcagggggtgagctatttatgcagctagagagagaggggattttcatggaagacacagcatgcttttacctggccgagatcagtatggcactgggacacctacatcaaaagggtattatctaccgcgatttaaagcccgagaatatcatgttgaaccaccagggccacgtgaaattgactgacttcggactctgtaaggaatccatccacgacggcactgtcacacatactttctgcggaactattgagtacatggcccctgagattctaatgcgcagtggacacaaccgcgccgttgactggtggagtctgggagcactgatgtatgatatgcttactggcgcaccgcccttcaccggcgaaaatcgaaagaaaaccatcgacaaaattctgaaatgtaagctgaatcttccaccttatctgacgcaggaagcccgcgatttgttaaaaaaattactgaagagaaatgcagcctcaaggcttggtgccggaccgggtgacgccggtgaggtacaggctcaccctttttttcgccatatcaattgggaagagctgctggctagaaaggtggagcctccatttaaacctctgttacagtcagaagaggatgtaagccagttcgacagcaaattcacaaggcagacccctgtggattcccccgatgacagcaccctgtccgaatcagccaatcaggtgttcctcgggtttacctacgtggcccctagcgtgctggagtccgttaaagaaaagttcagttttgaacccaaaatcaggtccccaaggaggttcattggatcaccccgcacccccgtgagtacagccatgtgttag

SEQ ID NO: 96860 - DNA, 1356 bp, Artificial Sequence
  derived and/or modified sequence
atgcgtcggagaaggcgccgagatgggttttatccggctccggactttagagacagggaggccgaagatatggctggcgtattcgacatcgatctagaccagccagaggacgccggatccgaggacgagctggaggaaggaggccagctgaatgagtcaatggaccacggtggcgttggaccctacgagctgggcatggagcactgcgaaaagtttgaaatctcggagacaagcgtgaaccgcggaccagagaaaattaggcccgagtgctttgaactcctaagggtgctgggcaagggaggctatggcaaggtttttcaggtgaggaaagtaactggggctaacactgggaagatcttcgccatgaaggtgctgaaaaaagcaatgattgtgcggaatgcaaaggacacagctcacactaaagctgagcgcaatattcttgaggaagtgaagcatcctttcatcgtcgacctgatatacgccttccagactggcggtaaattgtatctaatcctcgaatatctgtccggcggagaactgtttatgcaacttgaacgcgaagggatcttcatggaggacactgcatgcttttacctggctgagatctctatggccctcggccaccttcaccagaagggaatcatttatagagaccttaagccagagaacattatgctgaatcaccaaggccatgtcaagttgacggacttcggactgtgcaaggagagtatccatgatggcacggtgacccacacgttttgcggcaccattgagtacatggccccagagattctgatgagaagcgggcataacagggctgtggattggtggtctctgggcgctctgatgtacgacatgttgaccggagcaccccctttcacaggcgaaaatcgcaaaaagacaatagataaaatcctgaagtgtaaactcaaccttccaccatacctgacacaggaggccagagacttgttaaaaaaactgctgaaacggaacgccgcttctcgactcggcgctgggccaggcgatgcaggcgaggtgcaggcacaccctttctttagacacatcaattgggaagagctcttggcgaggaaggttgagcctcccttcaaacctctgctgcagtcagaggaggacgtttctcagtttgacagtaagtttacacgtcagacccccgtggattcacctgacgacagtactctgtccgagagtgccaatcaggtgtttttgggttttacgtacgtggcaccgtctgtgctggaaagcgtcaaagaaaagttttctttcgaaccaaaaatccgcagcccacgccgtttcatcggatccccgagaaccccagtgtcaacagccatgtgctag

SEQ ID NO: 96861 - DNA, 1982 bp, Artificial Sequence
  derived and/or modified sequence
tggcggcagcggctgtggtggctgcggcgggtccgggcccatgaggcgacgaaggaggcgggacggcttttacccagccccggacttccgagacagggaagctgaggacatggcaggagtgtttgacatagacctggaccagccagaggacgcgggctctgaggatgagctggaggaggggggtcagttaaatgaaagcatggaccatgggggagttggaccatatgaacttggcatggaacattgtgagaaatttgaaatctcagaaactagtgtgaacagagggccagaaaaaatcagaccagaatgttttgagctacttcgggtacttggtaaagggggctatggaaaggtttttcaagtacgaaaagtaacaggagcaaatactgggaaaatatttgccatgaaggtgcttaaaaaggcaatgatagtaagaaatgctaaagatacagctcatacaaaagcagaacggaatattctggaggaagtaaagcatcccttcatcgtggatttaatttatgcctttcagactggtggaaaactctacctcatccttgagtatctcagtggaggagaactatttatgcagttagaaagagagggaatatttatggaagacactgcctgcttttacttggcagaaatctccatggctttggggcatttacatcaaaaggggatcatctacagagacctgaagccggagaatatcatgcttaatcaccaaggtcatgtgaaactaacagactttggactatgcaaagaatctattcatgatggaacagtcacacacacattttgtggaacaatagaatacatggcccctgaaatcttgatgagaagtggccacaatcgtgctgtggattggtggagtttgggagcattaatgtatgacatgctgactggagcacccccattcactggggagaatagaaagaaaacaattgacaaaatcctcaaatgtaaactcaatttgcctccctacctcacacaagaagccagagatctgcttaaaaagctgctgaaaagaaatgctgcttctcgtctgggagctggtcctggggacgctggagaagttcaagctcatccattctttagacacattaactgggaagaacttctggctcgaaaggtggagcccccctttaaacctctgttgcaatctgaagaggatgtaagtcagtttgattccaagtttacacgtcagacacctgtcgacagcccagatgactcaactctcagtgaaagtgccaatcaggtctttctgggttttacatatgtggctccatctgtacttgaaagtgtgaaagaaaagttttcctttgaaccaaaaatccgatcacctcgaagatttattggcagcccacgaacacctgtcagtactgctatgtgctaagcttaactggaagccttggaatgggcataagttgtatgtcctacatttcatcattgtcccgggcctgcattgcactggaaaaaaaaatcgccacctgttcttacaccagtatttggttcaagacaccaaatgtcttcagcccatggctgaagaacaacagaagagagtcaggataaaaaatacatactgtggtcggcaaggtgagggagatagggatatccaggggaagagggtgttgctgtggcccactctctgtctaatctctttacagcaaattggtaagattttcagttttacttctttctactgtttctgctgtctaccttccttatatttttttcctcaacagttttaaaaagaaaaaaaggtctatttttttttctcctatacttgggctacattttttgattgtaaaaatatttgatggccttttgatgaatgtcttccacagtaaagaaaacttagtggcttaatttaggaaacatgttaacaggacactatgtttttgaaattgtaacaaaatctacataaatgatttacaggttaaaagaataaaaataaaggtaactttacctttcttaaatat

SEQ ID NO: 96862 - DNA, 1419 bp, Artificial Sequence
  derived and/or modified sequence
atggaccacggcggcgtgggcccctacgagctgggcatggagcactgcgagaagttcgagatcagcgagaccagcgtgaacagaggccccgagaagatcagacccgagtgcttcgagctgctgagagtgctgggcaagggcggctacggcaaggtgttccaggtgagaaaggtgaccggcgccaacaccggcaagatcttcgccatgaaggtgctgaagaaggccatgatcgtgagaaacgccaaggacaccgcccacaccaaggccgagagaaacatcctggaggaggtgaagcaccccttcatcgtggacctgatctacgccttccagaccggcggcaagctgtacctgatcctggagtacctgagcggcggcgagctgttcatgcagctggagagagagggcatcttcatggaggacaccgcctgcttctacctggccgagatcagcatggccctgggccacctgcaccagaagggcatcatctacagagacctgaagcccgagaacatcatgctgaaccaccagggccacgtgaagctgaccgacttcggcctgtgcaaggagagcatccacgacggcaccgtgacccacaccttctgcggcaccatcgagtacatggcccccgagatcctgatgagaagcggccacaacagagccgtggactggtggagcctgggcgccctgatgtacgacatgctgaccggcgccccccccttcaccggcgagaacagaaagaagaccatcgacaagatcctgaagtgcaagctgaacctgcccccctacctgacccaggaggccagagacctgctgaagaagctgctgaagagaaacgccgccagcagactgggcgccggccccggcgacgccggcgaggtgcaggcccaccccttcttcagacacatcaactgggaggagctgctggccagaaaggtggagccccccttcaagcccctgctgcagagcgaggaggacgtgagccagttcgacagcaagttcaccagacagacccccgtggacagccccgacgacagcaccctgagcgagagcgccaaccaggtgttcctgggcttcacctacgtggcccccagcgtgctggagagcgtgaaggagaagttcagcttcgagcccaagatcagaagccccagaagattcatcggcagccccagaacccccgtgagccccgtgaagttcagccccggcgacttctggggcagaggcgccagcgccagcaccgccaacccccagacccccgtggagtaccccatggagaccagcggcatcgagcagatggacgtgaccatgagcggcgaggccagcgcccccctgcccatcagacagcccaacagcggcccctacaagaagcaggccttccccatgatcagcaagagacccgagcacctgagaatgaacctgtag

SEQ ID NO: 96863 - DNA, 1419 bp, Artificial Sequence
  derived and/or modified sequence
atggatcatgggggggtgggtccgtatgagctgggaatggagcattgtgaaaagttcgaaatctcggagacgtccgtcaaccgggggcccgaaaagattcggccagagtgcttcgagcttctgcgtgtgttgggtaaggggggatatgggaaagtctttcaggtccggaaagtgacaggcgcaaacactggcaagatcttcgcaatgaaggtcctcaagaaagcaatgatagttagaaacgctaaagacacggcacacacaaaagccgagagaaacatccttgaggaagtgaagcatcctttcatcgtggacctgatctatgcattccagactgggggcaaactgtacctgatcctggagtatctgtccggcggagaactttttatgcagctggagagggaggggatttttatggaggacacagcctgtttctacctggccgaaatctctatggctttggggcatctgcaccagaaagggatcatttatagggacctcaaacctgagaatatcatgttgaatcaccagggacatgtcaagctcactgacttcggcttatgtaaagaatcaattcacgacggcacagtcactcacactttttgtggtacgatagagtatatggccccagaaattctcatgcggagcggccacaatcgggccgtggattggtggagtttaggagctcttatgtatgacatgttgaccggcgcccccccctttacaggtgagaatagaaagaagaccattgacaagatcttgaaatgcaagctgaacctccccccatatctgactcaggaggccagggacctactgaagaaactgctgaaacggaacgcagcttcgcggctcggggctggaccaggtgacgccggcgaggttcaagctcacccctttttccggcacataaattgggaggaactgctggctcgaaaggtggagcccccattcaagcctctcctgcagagtgaagaggatgttagccaatttgattctaagtttactagacaaactccagtggacagccccgacgacagtacactgtccgaaagtgccaaccaggtcttccttgggttcacctatgttgccccgagtgtcctagagtcagtgaaggaaaagttcagctttgagcctaagataagatcacccagacggttcattggtagccctaggaccccagtctcacctgttaagtttagtcccggggacttttggggccgcggtgcaagtgctagcaccgccaatccccagactcctgtcgaataccccatggagactagcggcattgagcaaatggatgtaactatgtcaggagaggcatctgcccctttgcccatccggcaaccaaactcagggccttataaaaagcaggcgttccccatgatttccaagaggcccgagcatctacgcatgaatctctag

SEQ ID NO: 96864 - DNA, 1419 bp, Artificial Sequence
  derived and/or modified sequence
atggaccatggaggagtgggcccctatgagctgggcatggagcactgtgagaagtttgagatcagcgagacctctgtgaacagaggccctgagaagatccggcctgagtgctttgagctgctgcgggtgctgggcaagggcggctacggcaaggtgttccaggtgaggaaggtgactggagccaacacaggcaagatctttgccatgaaggtgctgaagaaggccatgattgtgagaaatgccaaggacacagcccacaccaaggccgagaggaacatcctggaggaggtgaagcaccccttcatcgtggacctgatctatgccttccagacaggaggcaagctgtacctgatcctggagtacctgtctggaggagagctgttcatgcagctggagcgggagggcatcttcatggaggacacagcctgcttctacctggccgagatctccatggccctgggccacctgcaccagaagggcatcatctacagagacctgaagccagagaacatcatgctgaaccaccagggccacgtgaagctgacagactttggcctgtgcaaggagagcatccatgatggcaccgtgacccacaccttctgtggcaccatcgagtacatggcccctgagatcctgatgaggagcggccacaacagagctgtggactggtggagcctgggcgccctgatgtatgacatgctgactggagccccacccttcaccggagaaaataggaagaagaccatcgacaagatcctgaagtgcaagctgaacctgcccccctacctgacccaggaggcccgggacctgctgaagaagctgctgaagagaaatgctgccagccggctgggcgccggccctggagatgctggggaggtgcaggcccaccccttcttccgccacatcaactgggaggagctgctggccaggaaggtggagccccccttcaagcccctgctgcagagcgaggaggatgtgtcccagtttgacagcaagttcacccggcagacccctgtggacagcccagatgacagcaccctgtctgagagcgccaaccaggtgttcctgggcttcacctacgtggcccccagcgtgctggagagcgtgaaggagaagttctcctttgagcccaagatccgcagcccccggcgcttcatcggcagccccaggacccctgtgtcccctgtgaagttcagccctggggacttctggggccgcggggccagcgccagcacagccaacccccagacccctgtggagtaccccatggagaccagcggcatcgagcagatggatgtgaccatgtctggagaggccagcgcccccctgcccatccggcagcccaacagcggcccctacaagaagcaggccttccccatgatcagcaagaggcctgagcacctgaggatgaacctgtag

SEQ ID NO: 96865 - DNA, 1419 bp, Artificial Sequence
  derived and/or modified sequence
atggaccacggcggcgtgggcccctacgagctgggcatggagcactgcgagaagtttgaaatcagcgagacgtcagtgaatagggggcccgagaaaatcagaccagagtgttttgaactcctacgggtcttaggtaaggggggttatggcaaagtcttccaggtgaggaaggtcacgggcgccaacactgggaaaatttttgcaatgaaggtactgaagaaagctatgatcgttagaaatgcaaaagatacggcgcacacgaaagcagaacgcaatatactggaggaggtcaaacatccctttattgtagaccttatttatgcttttcagactggtggtaagctgtacttaattcttgaatatctgtctggcggtgagctgttcatgcagttggagagggagggaatcttcatggaagacactgcatgcttttacttggcagaaattagcatggcactcggtcacctgcaccagaaaggcatcatatacagagacctaaaacctgaaaacataatgctgaaccaccagggtcatgtcaaattgaccgactttgggctatgtaaagaatcaattcatgacgggacagtgacccacaccttctgtggcacaattgagtacatggctccggagatcctcatgaggtcagggcacaatagggccgtggattggtggtctctgggagccctgatgtacgacatgcttactggagcaccaccatttaccggtgagaacaggaagaaaaccattgacaaaatattgaaatgcaaattgaacctccctccctacctgacccaagaggcaagggatctgctgaaaaagttgctcaagagaaacgccgccagtcggttaggggccgggcctggggacgccggtgaagttcaagcccatccgttttttagacatatcaattgggaggagctgcttgccagaaaggtggaacctccatttaaaccactgcttcaatctgaggaggacgtcagtcaatttgattcgaaatttactaggcaaactcctgtggattctcccgacgactctactcttagcgagtccgccaatcaggtgttcctcgggtttacctatgttgcccctagtgttttagagtccgttaaggagaaattcagttttgagcctaaaattaggagccccaggcggttcattggttcaccacgtacccctgtaagccccgtaaaattctcccctggcgatttctgggggcggggagcttcggcctctaccgcgaatccccagacgccggtggagtatcctatggagacgtccggtattgagcaaatggatgtaacgatgtccggtgaggctagcgcccctctgccaatccggcaacccaactccggtccctacaagaaacaggcgtttccgatgatctcgaaacgtccagagcacttgagaatgaatctctag

SEQ ID NO: 96866 - DNA, 1419 bp, Artificial Sequence
  derived and/or modified sequence
atggaccacggcggagtgggcccttacgagctaggtatggagcactgtgagaaatttgagatttcagaaacatctgtaaacagagggccagagaaaatccggcctgaatgcttcgagctgctccgggtgctgggcaagggaggctatggcaaagtcttccaggtccgcaaggttacaggggctaatacggggaaaatctttgccatgaaagtgctgaagaaagccatgattgtgcgcaatgccaaggatactgcacataccaaggctgagcggaacattctggaggaggtcaaacatcctttcatagtggacctgatttatgcgtttcagaccggcggaaaactttatctaatcctcgagtatctatctggcggtgagctcttcatgcagctggagagagaaggtatatttatggaagacaccgcctgtttctacctcgccgaaatttctatggccttaggacatctgcaccagaagggcatcatttatcgggatttgaagcctgagaatataatgctcaatcatcaggggcacgttaagctgacagactttggactgtgcaaggagtccatccatgatggaacagtgacacacacattttgcgggaccatcgagtacatggcccctgagattttgatgcggtcaggccataatagagctgtcgactggtggagtctgggcgcactcatgtatgacatgctcactggcgctcctccctttaccggcgagaataggaaaaaaaccattgacaaaattctgaaatgcaagttaaacctgcctccctatctcacacaagaggcgagagatttgcttaagaagcttttgaagcgtaatgccgctagccgactcggtgctgggcctggcgatgcaggagaggtccaagctcaccctttcttccggcatatcaactgggaggaactcttggcccgtaaagtcgagccaccttttaaaccgctgctccagtccgaagaagatgtgtcccaattcgactccaagtttaccaggcagacaccagtggattccccagacgactcgactctctcagagagcgctaatcaggtttttctgggtttcacctacgtcgcaccctccgtcttagaatccgtgaaggagaagttctcatttgagcctaaaattcggtctcccaggcggtttattggctcacccagaacgcccgtgtctcctgtaaagttctctccgggagacttttggggccgaggagccagtgctagtacggccaatccacagacccctgtggagtatccgatggaaaccagcggcattgagcagatggacgtgacaatgagcggtgaagcaagtgccccattgccaatacgccagcctaattctggaccttacaagaagcaggcctttcctatgatatcaaagagaccagaacatctgcgcatgaacttatag

SEQ ID NO: 96867 - protein, 755 aa, Artificial Sequence
  derived and/or modified sequence
MPPFLLLEAVCVFLFSRVPPSLPLQEVHVSKETIGKISAASKMMWCSAAVDIMFLLDGSNSVGKGSFERSKHFAITVCDGLDISPERVRVGAFQFSSTPHLEFPLDSFSTQQEVKARIKRMVFKGGRTETELALKYLLHRGLPGGRNASVPQILIIVTDGKSQGDVALPSKQLKERGVTVFAVGVRFPRWEELHALASEPRGQHVLLAEQVEDATNGLFSTLSSSAICSSATPDCRVEAHPCEHRTLEMVREFAGNAPCWRGSRRTLAVLAAHCPFYSWKRVFLTHPATCYRTTCPGPCDSQPCQNGGTCVPEGLDGYQCLCPLAFGGEANCALKLSLECRVDLLFLLDSSAGTTLDGFLRAKVFVKRFVRAVLSEDSRARVGVATYSRELLVAVPVGEYQDVPDLVWSLDGIPFRGGPTLTGSALRQAAERGFGSATRTGQDRPRRVVVLLTESHSEDEVAGPARHARARELLLLGVGSEAVRAELEEITGSPKHVMVYSDPQDLFNQIPELQGKLCSRQRPGCRTQALDLVFMLDTSASVGPENFAQMQSFVRSCALQFEVNPDVTQVGLVVYGSQVQTAFGLDTKPTRAAMLRAISQAPYLGGVGSAGTALLHIYDKVMTVQRGARPGVPKAVVVLTGGRGAEDAAVPAQKLRNNGISVLVVGVGPVLSEGLRRLAGPRDSLIHVAAYADLRYHQDVLIEWLCGEAKQPVNLCKPSPCMNEGSCVLQNGSYRCKCRDGWEGPHCENRFLRRP

SEQ ID NO: 96868 - protein, 725 aa, Artificial Sequence
  derived and/or modified sequence
MPPFLLLEAVCVFLFSRVPPSLPLQEVHVSKETIGKISAASKMMWCSAAVDIMFLLDGSNSVGKGSFERSKHFAITVCDGLDISPERVRVGAFQFSSTPHLEFPLDSFSTQQEVKARIKRMVFKGGRTETELALKYLLHRGLPGGRNASVPQILIIVTDGKSQGDVALPSKQLKERGVTVFAVGVRFPRWEELHALASEPRGQHVLLAEQVEDATNGLFSTLSSSAICSSATPDCRVEAHPCEHRTLEMVREFAGNAPCWRGSRRTLAVLAAHCPFYSWKRVFLTHPATCYRTTCPGPCDSQPCQNGGTCVPEGLDGYQCLCPLAFGGEANCALKLSLECRVDLLFLLDSSAGTTLDGFLRAKVFVKRFVRAVLSEDSRARVGVATYSRELLVAVPVGEYQDVPDLVWSLDGIPFRGGPTLTGSALRQAAERGFGSATRTGQDRPRRVVVLLTESHSEDEVAGPARHARARELLLLGVGSEAVRAELEEITGSPKHVMVYSDPQDLFNQIPELQGKLCSRQRPGCRTQALDLVFMLDTSASVGPENFAQMQSFVRSCALQFEVNPDVTQVGLVVYGSQVQTAFGLDTKPTRAAMLRAISQAPYLGGVGSAGTALLHIYDKVMTVQRGARPGVPKAVVVLTGGRGAEDAAVPAQKLRNNGISVLVVGVGPVLSEGLRRLAGPRDSLIHVAAYADLRYHQDVLIEWLCGGEWGNPHPQGCPHGRPSA

SEQ ID NO: 96869 - DNA, 2268 bp, Artificial Sequence
  derived and/or modified sequence
atgcccccattcctcctcctggaggctgtgtgcgtctttttgtttagcagggtgcccccttctctgcccctccaagaagtgcacgtttccaaggagactatcgggaaaattagcgctgcttctaaaatgatgtggtgttctgctgcagtagacatcatgtttttgctagacggcagtaactcggttgggaaggggtctttcgaaagaagcaaacatttcgccattacggtatgtgacgggctggatattagcccggagcgagttcgggtcggcgcttttcagttcagctcaaccccccacctggaattccctctcgatagcttctccacccagcaagaggtgaaagccagaattaagagaatggttttcaaaggtggtaggactgagactgagctggccctgaaatacctgctgcatcggggtctacccggaggcagaaatgcaagtgtgcctcagatcttgatcatcgtaacggatgggaagtcacagggcgacgtcgccctcccttcaaagcaactcaaggagcgtggggtcacggtgttcgcagtcggggttaggtttccgaggtgggaggagttgcacgccctagccagcgaacccaggggtcagcacgtcctgctagccgaacaggtagaggacgccactaatggcctatttagtactttgtcctcaagcgcaatttgctcatcagctacccctgactgcagagtggaggcccatccttgtgagcataggacgctggagatggtgcgggaatttgcaggaaatgcaccatgttggaggggcagtcgcaggacactggcagtccttgccgctcactgcccattctactcctggaaaagagtgtttctgacgcacccagcaacatgttatcggaccacttgccctggaccctgtgatagccagccctgccaaaacgggggaacatgcgtcccggaaggactggacgggtatcagtgtctgtgcccgctggcatttgggggtgaagccaattgtgctctaaagctctctctggagtgtagggtcgatctgttgttcctgcttgactccagcgcagggacaacccttgacggatttctgcgcgcaaaagtgtttgtaaagcggttcgtgcgtgctgtattgagtgaagactccagagctagagtgggtgtggcaacgtacagccgcgagctgctggtggctgtgcccgtgggcgagtatcaagacgttcctgatcttgtctggtcgcttgatggcatcccttttcgtggagggccaaccctgactggttctgctctccggcaggccgctgaacgtggcttcggcagtgccaccagaacaggccaggaccgcccacggagggttgtggtgctgctaaccgagagtcacagcgaagatgaggtagcgggtcctgcccgtcatgccagggctagagagctcctgctgctgggagtgggttcagaagccgtgagagcagagctggaagagatcacagggagccctaaacacgttatggtttactccgatcctcaggacctgttcaaccagataccggagctgcagggtaagctgtgctccagacagcgacccggttgtaggacgcaagccctggatttggtctttatgctcgacacttccgcctccgttggccctgagaactttgctcagatgcagtcttttgttcgctcttgcgctttgcagttcgaggtcaatcccgacgtgacgcaagtggggctcgtggtgtacgggtcacaggtacaaacggctttcggactggatacaaaaccaaccagagcagcgatgctccgtgctatatcccaggctccctacctgggcggtgtgggatctgcaggtaccgctcttctgcacatttatgacaaggtgatgacagttcagcggggtgctaggcctggagtcccaaaagccgtggtggttctgactgggggacgcggtgctgaggacgctgcagtcccggctcagaagcttcgaaacaacgggataagcgttctggtggtcggtgttggccctgtcttatctgagggcctgcgtcgactggctggcccacgggactccctgatccacgttgccgcatacgctgacctccgttatcaccaggacgtgcttatcgagtggttgtgtggagaggccaaacagccagtaaacttgtgtaaaccaagcccttgtatgaatgagggcagctgtgtactgcagaatgggtcatacagatgcaaatgccgcgatgggtgggaaggtcctcattgcgagaatagattcctccgcaggccttag

SEQ ID NO: 96870 - DNA, 2268 bp, Artificial Sequence
  derived and/or modified sequence
atgcccccatttctcttgctggaggctgtatgcgttttcctgttttccagggtccccccctctctccccctgcaggaggttcacgtatccaaggagaccattggaaagatcagcgctgcttcaaaaatgatgtggtgcagcgccgcagttgatattatgttcctgttggacggcagtaactctgtgggaaaaggctcatttgaacgcagcaaacactttgccattactgtttgcgacggcctggatatctctcccgagagagtgagggtgggcgccttccaattcagcagtaccccccacctagaatttcccctcgattcatttagcacacagcaggaagttaaagccaggattaagaggatggttttcaaaggcggacggacagaaaccgaactagctctgaagtatctgctgcacagaggcttgccgggcggaagaaacgcctcagtcccacagatcctgataatagtgaccgatggaaaatctcagggcgatgtagcactgccttccaagcaacttaaggagcgaggggtgacagtctttgcggtaggagtccggttcccccggtgggaggagctgcatgcactcgcttccgagccaagggggcagcacgttctgctggccgagcaggtggaggatgctacaaacggactcttctccacactaagctcatccgccatctgttcaagcgcaacacctgactgcagggtggaagctcatccatgcgaacaccgcaccctcgagatggttagggagttcgctggcaacgcaccctgttggcgcgggtctcggaggacactcgccgttctagccgcccattgtccgttttattcctggaaaagggtgttcctgacccatccagcgacctgctaccggactacctgcccaggcccatgcgacagccaaccgtgccagaatggaggcacatgtgttccagaaggtcttgacggttaccagtgtctttgccctctggcttttggaggtgaagccaattgcgccctcaagctgtctctggagtgcagggtggacctcctgtttctactggacagttcggcagggaccactttagacggcttcctgcgtgctaaagtcttcgtgaagaggttcgtgagagcagtgctttccgaggactctcgcgcacgagtcggggtcgcgacgtattctcgggaactcttggtggcggtgcctgtgggagagtaccaggacgtgcctgacctcgtgtggtcactcgatggcataccgtttcgcggcgggccaacccttaccggctcagctttacgtcaggctgctgaacgcggatttggtagtgctacaagaactggccaggaccggcctaggcgcgtggtggtcttgttaacagagtctcactccgaggacgaggtggccgggcctgcgcggcacgccagggctcgcgagcttctgttattaggggtgggttccgaggcggtacgagcggagctcgaggagatcactgggtcacctaagcatgtgatggtgtactctgatccccaggatctgtttaatcagataccagaactgcaaggaaagttgtgtagccggcagcggcctggctgtcgaacccaggctcttgatctggtttttatgctcgacacctcggcatcagtgggaccagagaacttcgcacagatgcagtcctttgtgaggtcatgtgccctacagtttgaagtgaacccagatgtcacccaagtcggactggtcgtctacgggtcacaggtgcagactgccttcggcttggatacaaaacccactagggccgctatgttgcgggccatcagccaggctccctacctcggaggcgttggtagcgccggaactgccctgctgcacatatatgataaggtgatgaccgtacagaggggcgccagacctggagtgcctaaggccgtcgtagtcctcaccggcggacggggcgccgaggacgcagccgtcccagcacagaagttaagaaacaacggaatatcggttctggtcgtgggcgtagggcccgtgctctccgagggtttacgtaggctcgcaggcccccgggactcactgattcacgtcgctgcttacgccgatttgagatatcatcaggatgttctcatcgaatggctctgcggcgaagcaaagcagcccgtcaacctgtgtaaacccagcccatgcatgaatgaaggcagttgtgttctgcagaatggctcatatagatgcaagtgtcgcgacggttgggaagggccccactgtgaaaacagattcctgcgccggccttag

SEQ ID NO: 96871 - DNA, 2268 bp, Artificial Sequence
  derived and/or modified sequence
atgcctccatttctgctgcttgaagccgtttgtgtattcttgttctcccgggtcccaccttcccttcccctccaggaggttcatgtgtctaaagaaactatcggaaagatttctgctgcctcaaagatgatgtggtgtagtgccgccgtagacattatgtttcttttggacgggtctaatagcgttggcaaagggagtttcgaacgctcaaaacattttgcaataaccgtctgcgacggcctcgacatatctcccgaacgtgtacgtgttggcgccttccagttcagttccactcctcacctagaatttcccctcgattcatttagcacacagcaggaagttaaagccaggattaagaggatggttttcaaaggcggacggacagaaaccgaactagctctgaagtatctgctgcacagaggcttgccgggcggaagaaacgcctcagtcccacagatcctgataatagtgaccgatggaaaatctcagggcgatgtagcactgccttccaagcaacttaaggagcgaggggtgacagtctttgcggtaggagtccggttcccccggtgggaggagctgcatgcactcgcttccgagccacgcggacaacatgtgctgcttgctgagcaagtagaggatgcgacaaacggactcttttctacactgagctcaagtgccatctgttctagtgcaacccctgattgccgggtagaagcccatccttgtgagcatcgcacgcttgaaatggtccgcgaatttgctggtaacgccccatgctggcgcggttcgagaagaacactggccgtgttagcagcccactgcccgttctactcctggaagcgcgtatttcttacacacccggctacttgctataggactacatgcccaggtccttgtgactcccagccttgtcaaaatgggggcacctgcgtgccagaaggcctcgatggttaccagtgtctttgtcccttggcttttggcggggaggctaactgcgctctgaagctgtctctcgaatgccgcgttgatcttctgtttctcttggattcttccgccggaactaccttagacggttttctgagggcaaaagtgtttgtaaaaagattcgttagagcggtacttagtgaagattctagagctagggttggtgttgcaacttattcaagagagcttcttgtagccgtgccggtgggcgagtatcaagacgtacccgacctggtgtggagcctggacggaattccattcagaggagggccaacactgacgggtagcgcactccggcaggctgcagagagggggttcgggtccgccactcggactggccaggatcggcctcggagagttgtagttctcctcaccgagtctcactccgaggacgaggtagccggccccgcaagacatgctagagctcgggagctgcttctgttaggagttgggagcgaggccgtgagggctgagttggaagagattacaggttcacccaagcacgttatggtgtattcagacccgcaggatttgttcaaccagatcccagaactccaaggtaagctctgttcaagacagagacccggctgtagaactcaagccctggacttggtttttatgctggatacttctgcctccgtgggcccagaaaacttcgctcagatgcaatcctttgtgagatcttgtgccctgcagttcgaagtcaaccccgacgtaacacaggtgggacttgtagtctacggctcacaggtgcagactgcttttggtctcgataccaaaccgacacgcgctgctatgcttcgcgcgatttctcaagctccctacctgggcggtgtcggatctgctggcacagccttgctgcatatttatgacaaagtgatgactgttcagagaggggcccgaccaggcgtgcccaaagctgttgtcgtcctcacgggcggccgtggcgcggaggacgcagctgtgccagcgcagaaactgaggaacaatggaattagtgtcctggttgtgggagttgggcctgtcctttcagaaggcctgagaagattggcgggacccagagacagtctgatacatgtggcggcctatgccgatttgagatatcaccaagacgtactgatcgaatggctatgtggtgaagctaaacaacccgtgaatctgtgcaagccatcaccatgtatgaacgaggggagctgtgtgctgcagaatgggtcctatagatgcaaatgtcgagatggttgggaggggccacattgtgaaaatcggtttcttagaagaccttag

SEQ ID NO: 96872 - DNA, 2268 bp, Artificial Sequence
  derived and/or modified sequence
atgccccccttcctgctgctggaggccgtgtgcgtgttcctgttcagcagagtgccccccagcctgcccctgcaggaggtgcacgtgagcaaggagaccatcggcaagatcagcgccgccagcaagatgatgtggtgcagcgccgccgtggacatcatgttcctgctggacggcagcaacagcgtgggcaagggcagcttcgagagaagcaagcacttcgccatcaccgtgtgcgacggcctggacatcagccccgagagagtgagagtgggcgccttccagttcagcagcaccccccacctggagttccccctggacagcttcagcacccagcaggaggtgaaggccagaatcaagagaatggtgttcaagggcggcagaaccgagaccgagctggccctgaagtacctgctgcacagaggcctgcccggcggcagaaacgccagcgtgccccagatcctgatcatcgtgaccgacggcaagagccagggcgacgtggccctgcccagcaagcagctgaaggagagaggcgtgaccgtgttcgccgtgggcgtgagattccccagatgggaggagctgcacgccctggccagcgagcccagaggccagcacgtgctgctggccgagcaggtggaggacgccaccaacggcctgttcagcaccctgagcagcagcgccatctgcagcagcgccacccccgactgcagagtggaggcccacccctgcgagcacagaaccctggagatggtgagagagttcgccggcaacgccccctgctggagaggcagcagaagaaccctggccgtgctggccgcccactgccccttctacagctggaagagagtgttcctgacccaccccgccacctgctacagaaccacctgccccggcccctgcgacagccagccctgccagaacggcggcacctgcgtgcccgagggcctggacggctaccagtgcctgtgccccctggccttcggcggcgaggccaactgcgccctgaagctgagcctggagtgcagagtggacctgctgttcctgctggacagcagcgccggcaccaccctggacggcttcctgagagccaaggtgttcgtgaagagattcgtgagagccgtgctgagcgaggacagcagagccagagtgggcgtggccacctacagcagagagctgctggtggccgtgcccgtgggcgagtaccaggacgtgcccgacctggtgtggagcctggacggcatccccttcagaggcggccccaccctgaccggcagcgccctgagacaggccgccgagagaggcttcggcagcgccaccagaaccggccaggacagacccagaagagtggtggtgctgctgaccgagagccacagcgaggacgaggtggccggccccgccagacacgccagagccagagagctgctgctgctgggcgtgggcagcgaggccgtgagagccgagctggaggagatcaccggcagccccaagcacgtgatggtgtacagcgacccccaggacctgttcaaccagatccccgagctgcagggcaagctgtgcagcagacagagacccggctgcagaacccaggccctggacctggtgttcatgctggacaccagcgccagcgtgggccccgagaacttcgcccagatgcagagcttcgtgagaagctgcgccctgcagttcgaggtgaaccccgacgtgacccaggtgggcctggtggtgtacggcagccaggtgcagaccgccttcggcctggacaccaagcccaccagagccgccatgctgagagccatcagccaggccccctacctgggcggcgtgggcagcgccggcaccgccctgctgcacatctacgacaaggtgatgaccgtgcagagaggcgccagacccggcgtgcccaaggccgtggtggtgctgaccggcggcagaggcgccgaggacgccgccgtgcccgcccagaagctgagaaacaacggcatcagcgtgctggtggtgggcgtgggccccgtgctgagcgagggcctgagaagactggccggccccagagacagcctgatccacgtggccgcctacgccgacctgagataccaccaggacgtgctgatcgagtggctgtgcggcgaggccaagcagcccgtgaacctgtgcaagcccagcccctgcatgaacgagggcagctgcgtgctgcagaacggcagctacagatgcaagtgcagagacggctgggagggcccccactgcgagaacagattcctgagaagaccctag

SEQ ID NO: 96873 - DNA, 2268 bp, Artificial Sequence
  derived and/or modified sequence
atgcccccctttctgctgctggaagcggtttgcgtgttcctgttctcccgggtccccccctcgttgccccttcaggaggtgcacgtgtctaaggaaacgatcgggaaaatctctgcagccagcaaaatgatgtggtgttctgcagctgtcgacatcatgttcctgctcgatgggagcaacagcgttgggaaaggaagtttcgaacggtccaagcatttcgcaattactgtctgcgatggactggacatttctcccgagagagttcgggttggggccttccagttttcatctactccgcacctagaatttcccctggactcctttagcactcagcaagaggtgaaagctcggataaagcgcatggtgttcaaggggggacggacagagactgagttagccctgaagtatctgctgcaccggggcctacccggagggaggaatgctagcgtcccacagatcctgattatcgtgacggacggaaaaagtcaaggagacgtggctcttccctccaagcagctcaaggagcgaggagtaactgtgtttgccgtgggagtacgctttccgcggtgggaggagcttcacgccctggcaagcgagcctcggggccaacatgtcctgctggccgagcaagtcgaggacgcaaccaacggactgttctccacattatcctccagcgctatctgtagctccgctactcctgactgtagagtcgaagcgcatccttgcgagcacaggaccctggaaatggtcagagaatttgcgggcaacgctccctgttggagggggtcgcgccgtaccctggcagttctcgccgcccactgccctttctactcctggaaacgggtttttcttacacaccctgccacttgttacaggacaacatgccccgggccttgtgatagccagccttgtcagaatggcggcacatgcgtgcctgagggtttggatggataccagtgcctgtgtcctctggccttcgggggggaggccaactgcgccctgaagctgagccttgaatgtagggttgatctgttattcctgcttgactctagtgctggcactaccctagacggtttcctgcgggccaaagtattcgtgaagagattcgtgcgcgccgtgctcagcgaggattcgcgcgcccgcgtcggcgtggccacttattcacgggaactcctggtcgctgtgcccgtgggcgaataccaggatgtgccagacctggtctggtccctggacggcataccctttagaggcggaccaactttaacaggttccgcattgagacaagccgcagagcgcggatttggttcagcaacaagaacagggcaggacaggcccaggcgggtagtggtattgctgaccgagtctcactccgaggacgaagttgctggtcctgctcgccatgccagagcccgtgagctcctgctgttgggggtagggtccgaagctgttcgtgcagagcttgaagagataaccggctctccgaaacacgtgatggtgtattccgaccctcaagatctgtttaaccaaatccctgaactgcagggaaaactgtgttccaggcagaggcctggctgtagaacacaggccttggatctcgtcttcatgctcgacaccagcgcctcagtggggcctgagaattttgcacagatgcagagcttcgtacgatcttgtgccctgcagttcgaggtaaatcccgatgtaacccaggtgggccttgtagtatacggatctcaagtgcagacagcattcggtttggatactaaacccacccgggcggcgatgctgcgggcgatcagccaggctccttacttaggcggcgtggggtccgccgggacagccttgttacacatctatgataaagttatgaccgttcagaggggtgcccgacctggtgtgcccaaggcagtggtggtgctaaccggcggacgcggagcagaggacgccgcggtccctgctcagaaactaaggaacaatggcatcagcgttttggtggttggagttggtccggtgctgtctgagggacttcggaggcttgccggtcccagagacagtctgatccacgttgctgcctatgctgatctgaggtaccaccaagacgtactgatagaatggctgtgcggcgaagcgaaacagcctgtgaacctgtgcaaaccatctccatgcatgaacgaaggaagttgtgtcttacagaatggaagttacaggtgcaagtgtcgggatggatgggaggggccacattgtgaaaaccgattcctgcggcgtccgtag

SEQ ID NO: 96874 - DNA, 2268 bp, Artificial Sequence
  derived and/or modified sequence
atgccacccttcctgctgctggaggccgtgtgtgtgttcctgttcagccgggtgccccccagcctgcccctgcaggaggtgcacgtgtccaaggagaccatcggcaagatctctgctgccagcaagatgatgtggtgcagcgctgctgtggacatcatgttcctgctggatggcagcaacagcgtgggcaagggcagctttgagaggagcaagcactttgccatcaccgtgtgtgatggcctggacatcagccctgagcgggtgcgggtgggcgccttccagttcagcagcaccccccacctggagttccccctggacagcttcagcacccagcaggaggtgaaggcccgcatcaagaggatggtgttcaagggcggccgcacagaaacagagctggccctgaagtacctgctgcaccggggcctgcccggcggcagaaatgcctctgtgccccagatcctgatcatcgtgacagatggcaagagccagggagatgtggccctgcccagcaagcagctgaaggagcggggcgtgacagtgtttgctgtgggcgtgcgcttcccccgctgggaggagctgcacgccctggccagcgagccccggggccagcacgtgctgctggccgagcaggtggaggatgccaccaacggcctcttcagcaccctgagcagcagcgccatctgcagcagcgccaccccagactgccgggtggaggcccacccctgtgagcacaggaccctggagatggtgcgggagtttgctggaaatgccccctgctggaggggcagcaggaggaccctggccgtgctggccgcccactgccccttctacagctggaagagggtcttcctgacccacccagccacctgctaccgcaccacctgccccggcccctgtgacagccagccctgccagaatggaggcacctgtgtgcctgagggcctggatggctaccagtgcctgtgccccctggccttcggcggggaggccaactgtgccctgaagctgagcctggagtgccgggtggacctgctcttcctgctggacagcagcgctggcaccaccctggatggcttcctgcgggccaaggtgtttgtgaagagatttgtgcgggctgtgctgtctgaggacagccgggcccgggtgggcgtggccacctacagccgggagctgctggtggccgtgcctgtgggggagtaccaggatgtgcctgacctggtgtggagcctggatggcatccccttccggggcggccccaccctgaccggcagcgccctgcggcaggccgctgagcggggcttcggcagcgccaccaggacaggccaggaccggccccggcgggtggtggtgctgctgacagagagccacagtgaagatgaggtggccggccctgcccggcatgcccgggcccgggagctgctgctgctgggcgtgggcagcgaggccgtgcgggcagagctggaggagatcaccggcagccccaagcacgtgatggtgtacagcgacccccaggacctcttcaaccagatccctgagctgcagggcaagctgtgcagccggcagaggcctggctgcaggacccaggccctggacctggtgttcatgctggacaccagcgcctctgtgggcccagaaaattttgcccagatgcagagctttgtgcgcagctgtgccctgcagtttgaggtgaacccagatgtgacccaggtgggcctggtggtgtatggcagccaggtgcagacagccttcggcctggacaccaagcccacccgggccgccatgctgcgggccatcagccaggccccctacctgggcggcgtgggcagcgctggaacagccctgctgcacatctatgacaaggtgatgacagtgcagagaggagcccggcctggggtgcccaaggctgtggtggtgctgaccggcggcagaggagcagaagatgctgctgtgcctgcccagaagctgaggaacaacggcatctctgtgctggtggtgggcgtgggccctgtgctgtctgagggcctgcggcggctggccggcccccgggacagcctcatccacgtggccgcctatgctgacctgcgctaccaccaggatgtgctgattgagtggctgtgtggggaggccaagcagcctgtgaacctgtgcaagcccagcccctgcatgaatgaaggcagctgtgtgctgcagaatggcagctaccgctgcaagtgcagagatggctgggagggcccccactgtgagaaccgcttcctgcggcggccctag

SEQ ID NO: 96875 - DNA, 2268 bp, Artificial Sequence
  derived and/or modified sequence
atgccccccttcctgctgctggaggccgtgtgcgtgttcctgttctctagagtgccaccttcactgcccctccaggaagttcacgtgagtaaagagactattggcaagataagtgctgcctctaagatgatgtggtgcagcgccgctgtggacattatgttcctgcttgatggctcaaattccgtcggtaaaggttcatttgaaaggagcaaacactttgcaataacagtgtgtgacggactagacatctcgcccgaaagagttagggtcggggccttccagttttcctccactcctcacctggaatttcctctggacagcttcagcacacaacaggaggtcaaggcccgtattaagcggatggtgtttaagggcggacgaactgaaaccgagctcgccctgaagtacctgttacacaggggcctgcccggtggaaggaatgcttctgtgccccagattctgatcatcgtgaccgacggaaagtcccagggagacgtcgctttaccctccaagcagctgaaagaacgcggcgtcaccgtgttcgcagttggggtgcgctttcccaggtgggaggagctgcacgccttggcgagcgaaccccggggacagcacgttctgctggctgaacaggtggaggacgcaaccaacggccttttcagtaccctgagcagttccgccatatgctcctccgccacacctgactgcagagtagaggcacatccatgtgaacatcgcacccttgagatggtgcgcgagtttgccggaaatgccccgtgctggcgagggtcccgtaggaccctcgcagtcttagccgctcactgcccattttactcttggaagcgtgtgtttttgactcaccctgcaacatgttacagaaccacgtgcccaggcccttgtgatagccagccctgccagaacggaggcacctgtgtgccggagggcctggacggctaccaatgcttatgccccctggctttcggaggggaagcgaattgcgcccttaaactgtccctcgagtgcagagtggacctactcttcctcctagattcttcggccggcacaacattagatgggtttctgagagccaaagtatttgtgaaacggttcgtgcgcgctgtcctgtcagaagactccagagccagagtgggggtagccacgtatagccgcgaactcctggtggcagtgcccgtgggcgagtaccaggatgtgccagatcttgtgtggtctctggacggcatcccattccggggtgggccgactctgactggctccgcgttgcgccaggcagccgagaggggattcggctccgccactagaactgggcaagataggccccgcagggtagtcgttctgctaactgagagtcatagtgaggatgaagtggcagggccggcacgccatgccagggccagggagctcttgcttctgggtgtcgggtctgaggccgtgcgggccgaactcgaggagatcaccggttcgcctaagcatgtcatggtgtatagtgacccccaagacctttttaatcagatacccgagctgcaaggtaaactatgcagcagacagcgaccgggatgtagaacgcaggcccttgatctagtgttcatgctcgacacatctgcttccgtgggaccggagaacttcgcccagatgcagtcttttgttcgcagctgcgccctgcaattcgaagtcaaccctgacgtcacacaagtaggactagttgtctacggctcacaggttcagaccgcattcggcctcgatactaaaccaactcgggccgcgatgttgagggccatcagccaggcaccgtacctgggaggggtgggctccgcagggaccgccctgctacacatctacgacaaagtgatgaccgtacagcggggggctcgcccaggcgtgcctaaggccgtcgtcgtgctgacaggagggcgaggggccgaagacgcagcagtccccgcgcagaagctccggaataatggtatctcggtgctggttgtgggagtgggccctgtgctgtccgagggcttgagacgcttagcaggccctagggattccctgattcacgtggctgcgtatgccgatcttcgataccatcaggatgtactcatcgaatggctctgcggtgaggctaagcagccagttaatctttgtaagccctctccttgtatgaatgaagggagttgtgtattgcagaacggcagctaccgatgtaaatgccgtgacggctgggaaggcccccactgcgaaaatcgctttctccggcggccgtag

SEQ ID NO: 96876 - DNA, 2794 bp, Artificial Sequence
  derived and/or modified sequence
ggccgatgccgctttaaaaaacgcgaggggctctatgcacctccctggcggtagttcctccgacctcagccgggtcgggtcgtgccgccctctcccaggagagacaaacaggtgtcccacgtggcagccgcgccccgggcgcccctcctgtgatcccgtagcgccccctggcccgagccgcgcccgggtctgtgagtagagccgcccgggcaccgagcgctggtcgccgctctccttccgttatatcaacatgccccctttcctgttgctggaagccgtctgtgttttcctgttttccagagtgcccccatctctccctctccaggaagtccatgtaagcaaagaaaccatcgggaagatttcagctgccagcaaaatgatgtggtgctcggctgcagtggacatcatgtttctgttagatgggtctaacagcgtcgggaaagggagctttgaaaggtccaagcactttgccatcacagtctgtgacggtctggacatcagccccgagagggtcagagtgggagcattccagttcagttccactcctcatctggaattccccttggattcattttcaacccaacaggaagtgaaggcaagaatcaagaggatggttttcaaaggagggcgcacggagacggaacttgctctgaaataccttctgcacagagggttgcctggaggcagaaatgcttctgtgccccagatcctcatcatcgtcactgatgggaagtcccagggggatgtggcactgccatccaagcagctgaaggaaaggggtgtcactgtgtttgctgtgggggtcaggtttcccaggtgggaggagctgcatgcactggccagcgagcctagagggcagcacgtgctgttggctgagcaggtggaggatgccaccaacggcctcttcagcaccctcagcagctcggccatctgctccagcgccacgccagactgcagggtcgaggctcacccctgtgagcacaggacgctggagatggtccgggagttcgctggcaatgccccatgctggagaggatcgcggcggacccttgcggtgctggctgcacactgtcccttctacagctggaagagagtgttcctaacccaccctgccacctgctacaggaccacctgcccaggcccctgtgactcgcagccctgccagaatggaggcacatgtgttccagaaggactggacggctaccagtgcctctgcccgctggcctttggaggggaggctaactgtgccctgaagctgagcctggaatgcagggtcgacctcctcttcctgctggacagctctgcgggcaccactctggacggcttcctgcgggccaaagtcttcgtgaagcggtttgtgcgggccgtgctgagcgaggactctcgggcccgagtgggtgtggccacatacagcagggagctgctggtggcggtgcctgtgggggagtaccaggatgtgcctgacctggtctggagcctcgatggcattcccttccgtggtggccccaccctgacgggcagtgccttgcggcaggcggcagagcgtggcttcgggagcgccaccaggacaggccaggaccggccacgtagagtggtggttttgctcactgagtcacactccgaggatgaggttgcgggcccagcgcgtcacgcaagggcgcgagagctgctcctgctgggtgtaggcagtgaggccgtgcgggcagagctggaggagatcacaggcagcccaaagcatgtgatggtctactcggatcctcaggatctgttcaaccaaatccctgagctgcaggggaagctgtgcagccggcagcggccagggtgccggacacaagccctggacctcgtcttcatgttggacacctctgcctcagtagggcccgagaattttgctcagatgcagagctttgtgagaagctgtgccctccagtttgaggtgaaccctgacgtgacacaggtcggcctggtggtgtatggcagccaggtgcagactgccttcgggctggacaccaaacccacccgggctgcgatgctgcgggccattagccaggccccctacctaggtggggtgggctcagccggcaccgccctgctgcacatctatgacaaagtgatgaccgtccagaggggtgcccggcctggtgtccccaaagctgtggtggtgctcacaggcgggagaggcgcagaggatgcagccgttcctgcccagaagctgaggaacaatggcatctctgtcttggtcgtgggcgtggggcctgtcctaagtgagggtctgcggaggcttgcaggtccccgggattccctgatccacgtggcagcttacgccgacctgcggtaccaccaggacgtgctcattgagtggctgtgtggagaagccaagcagccagtcaacctctgcaaacccagcccgtgcatgaatgagggcagctgcgtcctgcagaatgggagctaccgctgcaagtgtcgggatggctgggagggcccccactgcgagaaccgattcttgagacgcccctgaggcacatggctcccgtgcaggagggcagcagccgtacccctcccagcaactacagagaaggcctgggcactgaaatggtgcctaccttctggaatgtctgtgccccaggtccttagaatgtctgcttcccgccgtggccaggaccactattctcactgagggaggaggatgtcccaactgcagccatgctgcttagagacaagaaagcagctgatgtcacccacaaacgatgttgttgaaaagttttgatgtgtaagtaaatacccactttctgta

SEQ ID NO: 96877 - DNA, 2178 bp, Artificial Sequence
  derived and/or modified sequence
atgccccccttcctgctgctggaggccgtgtgcgtgttcctgttcagcagagtgccccccagcctgcccctgcaggaggtgcacgtgagcaaggagaccatcggcaagatcagcgccgccagcaagatgatgtggtgcagcgccgccgtggacatcatgttcctgctggacggcagcaacagcgtgggcaagggcagcttcgagagaagcaagcacttcgccatcaccgtgtgcgacggcctggacatcagccccgagagagtgagagtgggcgccttccagttcagcagcaccccccacctggagttccccctggacagcttcagcacccagcaggaggtgaaggccagaatcaagagaatggtgttcaagggcggcagaaccgagaccgagctggccctgaagtacctgctgcacagaggcctgcccggcggcagaaacgccagcgtgccccagatcctgatcatcgtgaccgacggcaagagccagggcgacgtggccctgcccagcaagcagctgaaggagagaggcgtgaccgtgttcgccgtgggcgtgagattccccagatgggaggagctgcacgccctggccagcgagcccagaggccagcacgtgctgctggccgagcaggtggaggacgccaccaacggcctgttcagcaccctgagcagcagcgccatctgcagcagcgccacccccgactgcagagtggaggcccacccctgcgagcacagaaccctggagatggtgagagagttcgccggcaacgccccctgctggagaggcagcagaagaaccctggccgtgctggccgcccactgccccttctacagctggaagagagtgttcctgacccaccccgccacctgctacagaaccacctgccccggcccctgcgacagccagccctgccagaacggcggcacctgcgtgcccgagggcctggacggctaccagtgcctgtgccccctggccttcggcggcgaggccaactgcgccctgaagctgagcctggagtgcagagtggacctgctgttcctgctggacagcagcgccggcaccaccctggacggcttcctgagagccaaggtgttcgtgaagagattcgtgagagccgtgctgagcgaggacagcagagccagagtgggcgtggccacctacagcagagagctgctggtggccgtgcccgtgggcgagtaccaggacgtgcccgacctggtgtggagcctggacggcatccccttcagaggcggccccaccctgaccggcagcgccctgagacaggccgccgagagaggcttcggcagcgccaccagaaccggccaggacagacccagaagagtggtggtgctgctgaccgagagccacagcgaggacgaggtggccggccccgccagacacgccagagccagagagctgctgctgctgggcgtgggcagcgaggccgtgagagccgagctggaggagatcaccggcagccccaagcacgtgatggtgtacagcgacccccaggacctgttcaaccagatccccgagctgcagggcaagctgtgcagcagacagagacccggctgcagaacccaggccctggacctggtgttcatgctggacaccagcgccagcgtgggccccgagaacttcgcccagatgcagagcttcgtgagaagctgcgccctgcagttcgaggtgaaccccgacgtgacccaggtgggcctggtggtgtacggcagccaggtgcagaccgccttcggcctggacaccaagcccaccagagccgccatgctgagagccatcagccaggccccctacctgggcggcgtgggcagcgccggcaccgccctgctgcacatctacgacaaggtgatgaccgtgcagagaggcgccagacccggcgtgcccaaggccgtggtggtgctgaccggcggcagaggcgccgaggacgccgccgtgcccgcccagaagctgagaaacaacggcatcagcgtgctggtggtgggcgtgggccccgtgctgagcgagggcctgagaagactggccggccccagagacagcctgatccacgtggccgcctacgccgacctgagataccaccaggacgtgctgatcgagtggctgtgcggcggcgagtggggcaacccccacccccagggctgcccccacggcagacccagcgcctag

SEQ ID NO: 96878 - DNA, 2178 bp, Artificial Sequence
  derived and/or modified sequence
atgccaccttttctgcttctcgaggctgtgtgtgtatttctgtttagccgggttccaccttcattgcccctgcaggaagtgcatgtctcgaaagaaaccattggcaagatctctgcggcatccaagatgatgtggtgcagcgcggctgtcgatatcatgtttctactggatgggtcaaactctgttgggaagggaagcttcgaaaggtctaaacactttgctatcacggtgtgtgatggcctagacatctcaccggagagagtgagggtcggcgctttccagtttagctcgaccccccacctggaattccccctagattccttctctacccagcaggaggtgaaagccaggataaagaggatggttttcaaagggggacgcacggagacagaacttgcccttaagtacctgcttcaccgcgggttgcctggcggacggaatgctagcgtcccgcaaatccttattatcgttaccgatggcaagtctcagggggatgtggctctgccctccaaacaactcaaggaaagaggtgtgacggtgttcgccgtgggggtacgctttccacggtgggaggagttgcatgccttggcgtccgagccacgtggtcagcacgtactgctcgccgaacaggttgaggatgccactaacggactgttttccacactctccagctctgcaatttgcagcagcgccactcccgattgtcgggtggaagcccacccatgtgagcacaggaccctggaaatggtgcgcgaatttgctggaaacgccccttgctggcggggttctcgtcgtacactcgccgtgctggctgctcattgcccattctacagctggaaacgcgtgttcttaactcaccccgccacgtgctatagaaccacttgcccaggtccctgcgactctcagccctgtcaaaacggcgggacgtgtgtgccagagggcctcgacgggtatcaatgtctttgtccgcttgccttcggcggagaagcaaactgtgcactgaagctgagcctggaatgtcgagtagatttactcttccttctggacagctcagctggcactaccctcgatggcttcttgcgagccaaggtattcgtaaaacgcttcgtaagggccgttctctcggaggacagcagggccagagtgggcgtggcaacctattctcgggagctgctggtggccgtcccggtcggagagtaccaagatgttcccgatctcgtttggtccctcgatgggatcccctttaggggtggccctactttgactgggtcagctttacggcaggcagctgaacggggattcggttccgcaactcgtactgggcaggacaggcctaggagggttgtggtactcttaaccgagtcccactcggaagatgaagtcgccgggcctgctcgacatgctcgagctcgggagctcttgctactcggagtaggtagtgaggcagtacgggccgagctcgaggagattactggaagtcccaagcacgtcatggtgtacagtgacccacaggatctttttaatcagatcccggaactgcagggaaagttatgctcccggcagcgcccaggttgtaggacccaggccctggacttagtgtttatgctggacacatctgcaagcgtgggtccagaaaacttcgcccaaatgcagagctttgttaggtcctgtgcgctgcagtttgaggtcaatcccgacgttacccaggtcgggttagtcgtgtacgggagccaggtgcagaccgcttttggcctggatacaaagcctacacgggcagccatgttgagagccatcagccaagccccttatctgggcggggtgggctccgccgggacagctctgctgcacatttatgataaggtaatgaccgtccagcggggagcaagaccgggggttcctaaagccgtcgtggtgttaacaggggggcgcggtgctgaggacgcagctgtccccgcccagaaactgaggaacaatgggatctcagtcttggttgttggcgtggggccagtgctttcagaagggctgagacgcttagcagggcccagagattcactgatccatgtcgcagcttacgccgatctacgctatcatcaggacgtgctgatcgagtggctctgcggcggagagtggggcaacccacacccacagggctgtcctcacggacgtccctcagcatag

SEQ ID NO: 96879 - DNA, 2178 bp, Artificial Sequence
  derived and/or modified sequence
atgccacccttcctgctgctggaggccgtgtgtgtgttcctgttcagccgggtgccccccagcctgcccctgcaggaggtgcacgtgtccaaggagaccatcggcaagatctctgctgccagcaagatgatgtggtgcagcgctgctgtggacatcatgttcctgctggatggcagcaacagcgtgggcaagggcagctttgagaggagcaagcactttgccatcaccgtgtgtgatggcctggacatcagccctgagcgggtgcgggtgggcgccttccagttcagcagcaccccccacctggagttccccctggacagcttcagcacccagcaggaggtgaaggcccgcatcaagaggatggtgttcaagggcggccgcacagaaacagagctggccctgaagtacctgctgcaccggggcctgcccggcggcagaaatgcctctgtgccccagatcctgatcatcgtgacagatggcaagagccagggagatgtggccctgcccagcaagcagctgaaggagcggggcgtgacagtgtttgctgtgggcgtgcgcttcccccgctgggaggagctgcacgccctggccagcgagccccggggccagcacgtgctgctggccgagcaggtggaggatgccaccaacggcctcttcagcaccctgagcagcagcgccatctgcagcagcgccaccccagactgccgggtggaggcccacccctgtgagcacaggaccctggagatggtgcgggagtttgctggaaatgccccctgctggaggggcagcaggaggaccctggccgtgctggccgcccactgccccttctacagctggaagagggtcttcctgacccacccagccacctgctaccgcaccacctgccccggcccctgtgacagccagccctgccagaatggaggcacctgtgtgcctgagggcctggatggctaccagtgcctgtgccccctggccttcggcggggaggccaactgtgccctgaagctgagcctggagtgccgggtggacctgctcttcctgctggacagcagcgctggcaccaccctggatggcttcctgcgggccaaggtgtttgtgaagagatttgtgcgggctgtgctgtctgaggacagccgggcccgggtgggcgtggccacctacagccgggagctgctggtggccgtgcctgtgggggagtaccaggatgtgcctgacctggtgtggagcctggatggcatccccttccggggcggccccaccctgaccggcagcgccctgcggcaggccgctgagcggggcttcggcagcgccaccaggacaggccaggaccggccccggcgggtggtggtgctgctgacagagagccacagtgaagatgaggtggccggccctgcccggcatgcccgggcccgggagctgctgctgctgggcgtgggcagcgaggccgtgcgggcagagctggaggagatcaccggcagccccaagcacgtgatggtgtacagcgacccccaggacctcttcaaccagatccctgagctgcagggcaagctgtgcagccggcagaggcctggctgcaggacccaggccctggacctggtgttcatgctggacaccagcgcctctgtgggcccagaaaattttgcccagatgcagagctttgtgcgcagctgtgccctgcagtttgaggtgaacccagatgtgacccaggtgggcctggtggtgtatggcagccaggtgcagacagccttcggcctggacaccaagcccacccgggccgccatgctgcgggccatcagccaggccccctacctgggcggcgtgggcagcgctggaacagccctgctgcacatctatgacaaggtgatgacagtgcagagaggagcccggcctggggtgcccaaggctgtggtggtgctgaccggcggcagaggagcagaagatgctgctgtgcctgcccagaagctgaggaacaacggcatctctgtgctggtggtgggcgtgggccctgtgctgtctgagggcctgcggcggctggccggcccccgggacagcctcatccacgtggccgcctatgctgacctgcgctaccaccaggatgtgctgattgagtggctgtgtggcggggagtggggcaacccccacccccagggctgcccccacggccggcccagcgcctag

SEQ ID NO: 96880 - DNA, 2178 bp, Artificial Sequence
  derived and/or modified sequence
atgccccccttcctgctgctggaggccgtgtgcgtgttcctgttctcgcgagtgccgccttctctgcccctgcaggaagtccacgttagtaaggaaaccatcgggaaaatcagcgcggccagtaagatgatgtggtgctccgccgccgttgatattatgtttctgctggacggctccaactccgtaggtaagggctcttttgagaggagtaaacactttgctatcacggtttgcgatggtttagacataagccccgagcgcgtgcgagtgggcgccttccagttctctagcactccccatctcgaatttccgcttgatagcttttctacccaacaagaggttaaagctcgtataaaacgcatggtgttcaagggtggcagaaccgaaaccgagttagccctgaaataccttctccatcgtggactgcccggcggtagaaatgcttcagttcctcagattcttataatcgtgacggacggaaaatcccagggagatgttgcgctcccaagcaaacagctgaaggaacgcggcgtgactgtgtttgcggtgggcgtgcggttccctcgctgggaagagctacatgccttagcttccgagcccagagggcagcacgtgctcctcgcagaacaagtcgaagacgccaccaatggtctgttcagcacactgagttcctctgcaatatgttccagtgctacacctgactgtagggtggaagctcatccgtgcgagcacagaacactggaaatggtgcgggaattcgccggtaatgctccttgttggcggggctcccggaggacactcgcggtgctcgctgcgcattgtccgttttatagttggaaaagggtctttctcacacatccggctacttgctataggacaacatgcccaggaccatgtgattcacagccatgccaaaacggtggaacatgcgtccctgaggggctcgatggctatcagtgcctgtgtccactcgcctttggcggggaggccaactgtgctctgaagctctccttagaatgcagggtggacctgttattcttgctggactcctctgcggggacaaccctggatggctttttaagggccaaggtgtttgtgaagaggttcgttcgcgctgtgctttccgaggacagcagggctcgtgtaggtgtggccacttacagtagagagctgcttgttgccgtgcctgtgggagagtatcaggacgtgcccgatctggtgtggtccctggacgggattccatttaggggaggccccactctcaccgggtctgcccttaggcaggccgctgagcgggggtttggatccgccacccgaactggtcaggataggccgcgacgagtcgtcgtactgctaacagagtcacattctgaggatgaagttgcaggaccagccaggcatgcccgtgctcgcgagcttctattactcggcgtggggagcgaagccgtccgtgccgagctggaggagatcactggatccccgaaacatgtaatggtatattctgatccgcaggatctctttaatcagatccctgagctgcagggaaagctgtgcagccgtcaacggcctggctgcaggacacaggccctcgacctggtgtttatgctagacacctcagcgtcggtggggccggagaacttcgctcagatgcagagtttcgtaagatcttgcgctctccaattcgaggttaacccagacgtgacacaagtcggtctggttgtttatgggtcccaagtgcagacagcttttggcttggatacaaaacccactcgagcagccatgctgagggcaatcagtcaggccccatacttgggcggagttgggagtgcaggtaccgcgcttctgcatatttacgacaaggtcatgaccgtgcaaaggggcgcgcgacccggcgtgcctaaagccgtggtggtcctcaccggtggccgcggcgccgaagacgctgctgtacctgcccaaaaattacggaacaatgggataagcgtactcgttgtgggagtgggacccgtcttgtctgaaggtctgcgtcggctggccgggcccagggacagccttattcatgttgcggcttacgcagacctgaggtatcaccaagatgtgcttatcgaatggttgtgtggcggggagtggggcaatccacatccgcagggatgcccccacggaagaccatcggcctag

SEQ ID NO: 96881 - DNA, 2178 bp, Artificial Sequence
  derived and/or modified sequence
atgccgccttttctactgttggaagctgtttgcgtgttcttatttagccgcgtcccacccagcctacccctgcaggaggttcatgttagcaaagaaaccatcggcaagatctccgctgcgagcaagatgatgtggtgtagcgctgctgtggacataatgttcctgctggacggctctaactctgttggtaaaggctccttcgaaaggagtaagcacttcgcgatcacggtgtgcgatggtctggacatttctcccgaaagagtgcgagttggcgcattccagttctcgtctacacctcatctcgaatttccactggattccttcagcacacagcaggaggtgaaggccagaataaagcgcatggtttttaagggcggaagaaccgaaacagagcttgccttaaagtatcttttgcaccgtggcctgccaggcggacgtaacgcaagcgtcccgcaaattttgatcatagtgactgatggaaagagtcaaggagacgtggcgttgccctcgaagcagctgaaggaaaggggcgtgaccgtgttcgctgtcggcgtgagattcccgcgatgggaagaactgcacgccttggcctccgaacccaggggccagcatgtcctgttggcagaacaggtcgaggatgccactaatggactcttcagcacactgtcatcgagtgccatttgcagttctgctacacctgactgtcgagtggaagcgcatccgtgtgaacacagaaccttagaaatggtgcgagagttcgcagggaatgcaccatgttggcgtggatccaggagaacgcttgccgttcttgcagcgcattgtcccttttatagttggaagagagtgtttctgactcaccccgcaacctgctatagaacaacttgtcctggcccttgcgattcacagccgtgccaaaacgggggaacttgtgtgcctgaggggctcgacggctaccagtgtctatgcccgttggcctttggtggcgaagccaactgcgcactgaagttaagcctggagtgtagagtggatctactgtttttactggattcaagcgcaggaactacactggacggtttcctgcgggctaaggtcttcgtgaaacgattcgtgagggctgttctgagcgaagactctcgcgctagggttggcgtagcaacttactcccgagagctcctggtcgcagtccccgtgggtgagtaccaggatgtcccagatctcgtatggagtctggacgggattcccttcagggggggtccgacgctcactggctccgctttgagacaggctgccgagcggggattcgggagcgccactcgcaccggacaggatcgcccacggagggtcgtggttctcctgactgagtcacattcagaggacgaggtggccggacccgctaggcacgccagagcacgcgagctgcttttacttggcgtggggagcgaagccgtgcgcgcagagctggaagaaatcaccggcagcccgaagcacgttatggtgtattccgatccacaagatctttttaatcagatccccgagttgcagggcaaactgtgctcaagacagcggccaggctgtcgcacacaggccctagacctcgtcttcatgctagacactagtgctagtgtgggacccgaaaattttgcccaaatgcaatccttcgtcaggtcttgcgcactgcaatttgaggtgaacccagatgtcacacaggtgggcttggtggtgtacggttcccaggtccaaactgcatttggcctagacacaaagccgacccgggctgcgatgctgagggccatctcgcaagccccatacctggggggagtgggttcggcaggcactgccctgttgcatatctatgataaagtcatgacagttcagcgcggagcgaggcctggtgtgcccaaggccgtagtcgtgctcacgggcggaaggggcgctgaagatgcagctgtcccggcacagaaactgaggaacaatggcattagtgtgctggtggttggcgtaggaccagtgttgagcgaggggctgaggagattggcaggcccacgagacagcctgatacatgtagctgcctacgccgacctccggtaccaccaggacgtactcatcgaatggctgtgtggaggtgagtggggtaatcctcacccacagggatgcccccacggtagaccctctgcctag

SEQ ID NO: 96882 - DNA, 2875 bp, Artificial Sequence
  derived and/or modified sequence
ggccgatgccgctttaaaaaacgcgaggggctctatgcacctccctggcggtagttcctccgacctcagccgggtcgggtcgtgccgccctctcccaggagagacaaacaggtgtcccacgtggcagccgcgccccgggcgcccctcctgtgatcccgtagcgccccctggcccgagccgcgcccgggtctgtgagtagagccgcccgggcaccgagcgctggtcgccgctctccttccgttatatcaacatgccccctttcctgttgctggaagccgtctgtgttttcctgttttccagagtgcccccatctctccctctccaggaagtccatgtaagcaaagaaaccatcgggaagatttcagctgccagcaaaatgatgtggtgctcggctgcagtggacatcatgtttctgttagatgggtctaacagcgtcgggaaagggagctttgaaaggtccaagcactttgccatcacagtctgtgacggtctggacatcagccccgagagggtcagagtgggagcattccagttcagttccactcctcatctggaattccccttggattcattttcaacccaacaggaagtgaaggcaagaatcaagaggatggttttcaaaggagggcgcacggagacggaacttgctctgaaataccttctgcacagagggttgcctggaggcagaaatgcttctgtgccccagatcctcatcatcgtcactgatgggaagtcccagggggatgtggcactgccatccaagcagctgaaggaaaggggtgtcactgtgtttgctgtgggggtcaggtttcccaggtgggaggagctgcatgcactggccagcgagcctagagggcagcacgtgctgttggctgagcaggtggaggatgccaccaacggcctcttcagcaccctcagcagctcggccatctgctccagcgccacgccagactgcagggtcgaggctcacccctgtgagcacaggacgctggagatggtccgggagttcgctggcaatgccccatgctggagaggatcgcggcggacccttgcggtgctggctgcacactgtcccttctacagctggaagagagtgttcctaacccaccctgccacctgctacaggaccacctgcccaggcccctgtgactcgcagccctgccagaatggaggcacatgtgttccagaaggactggacggctaccagtgcctctgcccgctggcctttggaggggaggctaactgtgccctgaagctgagcctggaatgcagggtcgacctcctcttcctgctggacagctctgcgggcaccactctggacggcttcctgcgggccaaagtcttcgtgaagcggtttgtgcgggccgtgctgagcgaggactctcgggcccgagtgggtgtggccacatacagcagggagctgctggtggcggtgcctgtgggggagtaccaggatgtgcctgacctggtctggagcctcgatggcattcccttccgtggtggccccaccctgacgggcagtgccttgcggcaggcggcagagcgtggcttcgggagcgccaccaggacaggccaggaccggccacgtagagtggtggttttgctcactgagtcacactccgaggatgaggttgcgggcccagcgcgtcacgcaagggcgcgagagctgctcctgctgggtgtaggcagtgaggccgtgcgggcagagctggaggagatcacaggcagcccaaagcatgtgatggtctactcggatcctcaggatctgttcaaccaaatccctgagctgcaggggaagctgtgcagccggcagcggccagggtgccggacacaagccctggacctcgtcttcatgttggacacctctgcctcagtagggcccgagaattttgctcagatgcagagctttgtgagaagctgtgccctccagtttgaggtgaaccctgacgtgacacaggtcggcctggtggtgtatggcagccaggtgcagactgccttcgggctggacaccaaacccacccgggctgcgatgctgcgggccattagccaggccccctacctaggtggggtgggctcagccggcaccgccctgctgcacatctatgacaaagtgatgaccgtccagaggggtgcccggcctggtgtccccaaagctgtggtggtgctcacaggcgggagaggcgcagaggatgcagccgttcctgcccagaagctgaggaacaatggcatctctgtcttggtcgtgggcgtggggcctgtcctaagtgagggtctgcggaggcttgcaggtccccgggattccctgatccacgtggcagcttacgccgacctgcggtaccaccaggacgtgctcattgagtggctgtgtggaggtgagtgggggaatccacaccctcagggctgcccccatggcaggccctcagcctgagccttcacatacatcatgacgaggatggcagctcttcccagctactgagcacttgcttcccaagtgccaggttctgtgctaaaccccatgctcacataaaatcctacagtaggcataaccatcctatttgacatttaaggtacagaaagtttaactaacatagataactccccccaaacttgagaatttatgcattccctttaaacagaacacacttttagaatatccacaagcttcctaagggtctaaagatcccacattcacactgacttgggcagtgacagagcccagagcaaacagggccaggccagcccaaatccagtgacctcctcttcaccttcttaaaagagacaggagaatcacttgaacccgggaggtggaggttgtggtgagccaagatcgcgccattgtactccagcctgggcaacaagagcaagattctgcctc

SEQ ID NO: 96883 - RNA, 2268 nt, Artificial Sequence
  derived and/or modified sequence
augcccccauuucucuugcuggaggcuguaugcguuuuccuguuuuccagggucccccccucucucccccugcaggagguucacguauccaaggagaccauuggaaagaucagcgcugcuucaaaaaugauguggugcagcgccgcaguugauauuauguuccuguuggacggcaguaacucugugggaaaaggcucauuugaacgcagcaaacacuuugccauuacuguuugcgacggccuggauaucucucccgagagagugagggugggcgccuuccaauucagcaguaccccccaccuagaauuuccccucgauucauuuagcacacagcaggaaguuaaagccaggauuaagaggaugguuuucaaaggcggacggacagaaaccgaacuagcucugaaguaucugcugcacagaggcuugccgggcggaagaaacgccucagucccacagauccugauaauagugaccgauggaaaaucucagggcgauguagcacugccuuccaagcaacuuaaggagcgaggggugacagucuuugcgguaggaguccgguucccccggugggaggagcugcaugcacucgcuuccgagccaagggggcagcacguucugcuggccgagcagguggaggaugcuacaaacggacucuucuccacacuaagcucauccgccaucuguucaagcgcaacaccugacugcaggguggaagcucauccaugcgaacaccgcacccucgagaugguuagggaguucgcuggcaacgcacccuguuggcgcgggucucggaggacacucgccguucuagccgcccauuguccguuuuauuccuggaaaaggguguuccugacccauccagcgaccugcuaccggacuaccugcccaggcccaugcgacagccaaccgugccagaauggaggcacauguguuccagaaggucuugacgguuaccagugucuuugcccucuggcuuuuggaggugaagccaauugcgcccucaagcugucucuggagugcaggguggaccuccuguuucuacuggacaguucggcagggaccacuuuagacggcuuccugcgugcuaaagucuucgugaagagguucgugagagcagugcuuuccgaggacucucgcgcacgagucggggucgcgacguauucucgggaacucuugguggcggugccugugggagaguaccaggacgugccugaccucguguggucacucgauggcauaccguuucgcggcgggccaacccuuaccggcucagcuuuacgucaggcugcugaacgcggauuugguagugcuacaagaacuggccaggaccggccuaggcgcgugguggucuuguuaacagagucucacuccgaggacgagguggccgggccugcgcggcacgccagggcucgcgagcuucuguuauuagggguggguuccgaggcgguacgagcggagcucgaggagaucacugggucaccuaagcaugugaugguguacucugauccccaggaucuguuuaaucagauaccagaacugcaaggaaaguuguguagccggcagcggccuggcugucgaacccaggcucuugaucugguuuuuaugcucgacaccucggcaucagugggaccagagaacuucgcacagaugcaguccuuugugaggucaugugcccuacaguuugaagugaacccagaugucacccaagucggacuggucgucuacgggucacaggugcagacugccuucggcuuggauacaaaacccacuagggccgcuauguugcgggccaucagccaggcucccuaccucggaggcguugguagcgccggaacugcccugcugcacauauaugauaaggugaugaccguacagaggggcgccagaccuggagugccuaaggccgucguaguccucaccggcggacggggcgccgaggacgcagccgucccagcacagaaguuaagaaacaacggaauaucgguucuggucgugggcguagggcccgugcucuccgaggguuuacguaggcucgcaggcccccgggacucacugauucacgucgcugcuuacgccgauuugagauaucaucaggauguucucaucgaauggcucugcggcgaagcaaagcagcccgucaaccuguguaaacccagcccaugcaugaaugaaggcaguuguguucugcagaauggcucauauagaugcaagugucgcgacgguugggaagggccccacugugaaaacagauuccugcgccggccuuag

SEQ ID NO: 96884 - RNA, 2268 nt, Artificial Sequence
  derived and/or modified sequence
augccuccauuucugcugcuugaagccguuuguguauucuuguucucccgggucccaccuucccuuccccuccaggagguucaugugucuaaagaaacuaucggaaagauuucugcugccucaaagaugaugugguguagugccgccguagacauuauguuucuuuuggacgggucuaauagcguuggcaaagggaguuucgaacgcucaaaacauuuugcaauaaccgucugcgacggccucgacauaucucccgaacguguacguguuggcgccuuccaguucaguuccacuccucaccuagaauuuccccucgauucauuuagcacacagcaggaaguuaaagccaggauuaagaggaugguuuucaaaggcggacggacagaaaccgaacuagcucugaaguaucugcugcacagaggcuugccgggcggaagaaacgccucagucccacagauccugauaauagugaccgauggaaaaucucagggcgauguagcacugccuuccaagcaacuuaaggagcgaggggugacagucuuugcgguaggaguccgguucccccggugggaggagcugcaugcacucgcuuccgagccacgcggacaacaugugcugcuugcugagcaaguagaggaugcgacaaacggacucuuuucuacacugagcucaagugccaucuguucuagugcaaccccugauugccggguagaagcccauccuugugagcaucgcacgcuugaaaugguccgcgaauuugcugguaacgccccaugcuggcgcgguucgagaagaacacuggccguguuagcagcccacugcccguucuacuccuggaagcgcguauuucuuacacacccggcuacuugcuauaggacuacaugcccagguccuugugacucccagccuugucaaaaugggggcaccugcgugccagaaggccucgaugguuaccagugucuuugucccuuggcuuuuggcggggaggcuaacugcgcucugaagcugucucucgaaugccgcguugaucuucuguuucucuuggauucuuccgccggaacuaccuuagacgguuuucugagggcaaaaguguuuguaaaaagauucguuagagcgguacuuagugaagauucuagagcuaggguugguguugcaacuuauucaagagagcuucuuguagccgugccggugggcgaguaucaagacguacccgaccugguguggagccuggacggaauuccauucagaggagggccaacacugacggguagcgcacuccggcaggcugcagagaggggguucggguccgccacucggacuggccaggaucggccucggagaguuguaguucuccucaccgagucucacuccgaggacgagguagccggccccgcaagacaugcuagagcucgggagcugcuucuguuaggaguugggagcgaggccgugagggcugaguuggaagagauuacagguucacccaagcacguuaugguguauucagacccgcaggauuuguucaaccagaucccagaacuccaagguaagcucuguucaagacagagacccggcuguagaacucaagcccuggacuugguuuuuaugcuggauacuucugccuccgugggcccagaaaacuucgcucagaugcaauccuuugugagaucuugugcccugcaguucgaagucaaccccgacguaacacaggugggacuuguagucuacggcucacaggugcagacugcuuuuggucucgauaccaaaccgacacgcgcugcuaugcuucgcgcgauuucucaagcucccuaccugggcggugucggaucugcuggcacagccuugcugcauauuuaugacaaagugaugacuguucagagaggggcccgaccaggcgugcccaaagcuguugucguccucacgggcggccguggcgcggaggacgcagcugugccagcgcagaaacugaggaacaauggaauuaguguccugguugugggaguugggccuguccuuucagaaggccugagaagauuggcgggacccagagacagucugauacauguggcggccuaugccgauuugagauaucaccaagacguacugaucgaauggcuauguggugaagcuaaacaacccgugaaucugugcaagccaucaccauguaugaacgaggggagcugugugcugcagaauggguccuauagaugcaaaugucgagaugguugggaggggccacauugugaaaaucgguuucuuagaagaccuuag

SEQ ID NO: 96885 - protein, 651 aa, Artificial Sequence
  derived and/or modified sequence
MARELRALLLWGRRLRPLLRAPALAAVPGGSTSKHEFQAETKKLLDIVARSLYSEKEVFIRELISNASDALEKLRHKLVSDGQALPEMEIHLQTNAEKGTITIQDTGIGMTQEELVSNLGTIARSGSKAFLDALQNQAEASSKIIGQFGVGFYSAFMVADRVEVYSRSAAPGSLGYQWLSDGSGVFEIAEASGVRTGTKIIIHLKSDCKEFSSEARVRDVVTKYSNFVSFPLYLNGRRMNTLQAIWMMDPKDVREWQHEEFYRYVAQAHDKPRYTLHYKTDAPLNIRSIFYVPDMKPSMFDVSRELGSSVALYSRKVLIQTKATDILPKWLRFIRGVVDSEDIPLNLSRELLQESALIRKLRDVLQQRLIKFFIDQSKKDAEKYAKFFEDYGLFMREGIVTATEQEVKEDIAKLLRYESSALPSGQLTSLSEYASRMRAGTRNIYYLCAPNRHLAEHSPYYEAMKKKDTEVLFCFEQFDELTLLHLREFDKKKLISVETDIVVDHYKEEKFEDRSPAAECLSEKETEELMAWMRNVLGSRVTNVKVTLRLDTHPAMVTVLEMGAARHFLRMQQLAKTQEERAQLLQPTLEINPRHALIKKLNQLRASEPGLAQLLVDQIYENAMIAAGLVDDPRAMVGRLNELLVKALERH

SEQ ID NO: 96886 - DNA, 1956 bp, Artificial Sequence
  derived and/or modified sequence
atggccagagagctgagagccctgctgctgtggggcagaagactgagacccctgctgagagcccccgccctggccgccgtgcccggcggcagcaccagcaagcacgagttccaggccgagaccaagaagctgctggacatcgtggccagaagcctgtacagcgagaaggaggtgttcatcagagagctgatcagcaacgccagcgacgccctggagaagctgagacacaagctggtgagcgacggccaggccctgcccgagatggagatccacctgcagaccaacgccgagaagggcaccatcaccatccaggacaccggcatcggcatgacccaggaggagctggtgagcaacctgggcaccatcgccagaagcggcagcaaggccttcctggacgccctgcagaaccaggccgaggccagcagcaagatcatcggccagttcggcgtgggcttctacagcgccttcatggtggccgacagagtggaggtgtacagcagaagcgccgcccccggcagcctgggctaccagtggctgagcgacggcagcggcgtgttcgagatcgccgaggccagcggcgtgagaaccggcaccaagatcatcatccacctgaagagcgactgcaaggagttcagcagcgaggccagagtgagagacgtggtgaccaagtacagcaacttcgtgagcttccccctgtacctgaacggcagaagaatgaacaccctgcaggccatctggatgatggaccccaaggacgtgagagagtggcagcacgaggagttctacagatacgtggcccaggcccacgacaagcccagatacaccctgcactacaagaccgacgcccccctgaacatcagaagcatcttctacgtgcccgacatgaagcccagcatgttcgacgtgagcagagagctgggcagcagcgtggccctgtacagcagaaaggtgctgatccagaccaaggccaccgacatcctgcccaagtggctgagattcatcagaggcgtggtggacagcgaggacatccccctgaacctgagcagagagctgctgcaggagagcgccctgatcagaaagctgagagacgtgctgcagcagagactgatcaagttcttcatcgaccagagcaagaaggacgccgagaagtacgccaagttcttcgaggactacggcctgttcatgagagagggcatcgtgaccgccaccgagcaggaggtgaaggaggacatcgccaagctgctgagatacgagagcagcgccctgcccagcggccagctgaccagcctgagcgagtacgccagcagaatgagagccggcaccagaaacatctactacctgtgcgcccccaacagacacctggccgagcacagcccctactacgaggccatgaagaagaaggacaccgaggtgctgttctgcttcgagcagttcgacgagctgaccctgctgcacctgagagagttcgacaagaagaagctgatcagcgtggagaccgacatcgtggtggaccactacaaggaggagaagttcgaggacagaagccccgccgccgagtgcctgagcgagaaggagaccgaggagctgatggcctggatgagaaacgtgctgggcagcagagtgaccaacgtgaaggtgaccctgagactggacacccaccccgccatggtgaccgtgctggagatgggcgccgccagacacttcctgagaatgcagcagctggccaagacccaggaggagagagcccagctgctgcagcccaccctggagatcaaccccagacacgccctgatcaagaagctgaaccagctgagagccagcgagcccggcctggcccagctgctggtggaccagatctacgagaacgccatgatcgccgccggcctggtggacgaccccagagccatggtgggcagactgaacgagctgctggtgaaggccctggagagacactag

SEQ ID NO: 96887 - DNA, 1956 bp, Artificial Sequence
  derived and/or modified sequence
atggccagggagctccgcgccctacttctgtggggacgacgcctgcgccctttgctgagagcgccagcccttgccgcagtgccaggcggctctacaagtaagcacgagtttcaggcggaaacaaagaagctgctcgacatcgttgcgcggtccttgtactcagaaaaggaagtgttcataagagagctcatctctaacgcaagcgacgccctggaaaaactgcgacataagttggtgagcgacggtcaggccttaccagaaatggaaattcacttacagacaaatgcagagaaaggcactatcaccatccaggatactggtatcggcatgacccaggaggagctggtaagtaacctgggaaccattgcacggtctggctctaaggctttcttggacgctttacagaatcaggctgaggcaagttcaaagattattggccaatttggagtagggttttacagcgctttcatggtcgccgaccgagtcgaggtttacagccggtctgcggcccccgggtctctgggataccagtggcttagtgacggatctggtgtttttgaaatagcagaggcatctggggtgagaaccggaaccaagatcattatacaccttaaaagtgactgtaaggaattcagcagcgaggctagagtgcgcgacgttgtgaccaagtactccaattttgtctcctttccgctgtatctgaatggtcgccgcatgaacacactgcaggcaatctggatgatggacccaaaggacgtgcgggagtggcaacacgaggaattttaccggtatgttgcacaggcccacgacaaacctcggtacacactacactacaaaacagatgctccactgaatatccggagtatcttctacgtccccgacatgaaaccctcaatgttcgacgttagccgggaacttggatcaagcgtcgccctgtattctaggaaagtgcttatacagaccaaggctacagacatcctgcccaaatggctcaggtttatccggggcgttgtggatagcgaggacataccactcaacctctctagggaactgctccaggagtccgccttgattagaaaacttagggacgtgctgcaacagaggctcattaaattctttatcgatcagtcgaagaaggacgccgagaagtatgccaaattcttcgaggactatggactgttcatgagggagggcatcgttactgctacagagcaggaggtcaaagaggacatcgccaagctcttgagatacgagtcctctgctctgccgtccggccagctcacaagtttatcagagtacgcatctcgcatgagggcaggcaccaggaacatctattatctttgtgcccctaacaggcatctcgcagagcactccccttactacgaagcaatgaagaaaaaagacacggaggttctgttctgcttcgaacagtttgacgagttaactctgttgcatttgagagagtttgacaaaaaaaaactaatatctgtggaaacagatatagtcgtggaccactacaaagaagagaaattcgaggatcggtcaccagcagcagaatgtttgagcgaaaaggagacagaggaactgatggcctggatgcgcaacgttctggggagccgcgtcaccaatgtaaaggtcaccctgagactggacacacatcctgctatggtcaccgtgctcgagatgggggccgcccgacacttccttcgaatgcagcagctggcaaagacccaggaagaacgcgcgcagttattacaaccaactctggaaattaacccacgccatgcccttatcaagaagctaaaccaactgagggcaagcgagccgggcctggctcagttactggttgaccagatatacgagaacgccatgattgccgcgggtttggttgatgatcctcgcgccatggtgggacgtctgaatgaactcctggtgaaagctctcgagcggcattag

SEQ ID NO: 96888 - DNA, 1956 bp, Artificial Sequence
  derived and/or modified sequence
atggcccgggagctgcgggccctgctgctgtggggccgccgcctgcggcccctgctgcgggccccagccctggccgctgtgcctgggggcagcaccagcaagcatgagttccaggccgagaccaagaagctgctggacatcgtggcccggagcctgtacagcgagaaggaggtgttcatccgggagctgatcagcaatgccagtgatgccctggagaagctgcggcacaagctggtgtctgatggccaggccctgcctgagatggagatccacctgcagaccaatgctgagaagggcaccatcaccatccaggacaccggcatcggcatgacccaggaggagctggtgagcaacctgggcaccatcgcccggagcggcagcaaggccttcctggatgccctgcagaaccaggccgaggccagcagcaagatcatcggccagtttggagtgggcttctacagcgccttcatggtggccgacagagtggaggtgtacagccgctctgctgcccctggcagcctgggctaccagtggctgagtgatggcagcggcgtgtttgaaattgctgaggccagcggcgtgaggacaggcaccaagatcatcatccacctgaagagtgactgcaaggagttcagcagcgaggcccgggtgagagatgtggtgaccaagtacagcaactttgtgtccttccccctgtacctgaatggaagaaggatgaacaccctgcaggccatctggatgatggaccccaaggatgtgcgggagtggcagcacgaggagttctaccgctacgtggcccaggcccatgacaagccccgctacaccctgcactacaagacagatgcccccctgaacatccgcagcatcttctacgtgcctgacatgaagcccagcatgtttgatgtgtcccgggagctgggcagctctgtggccctgtacagcaggaaggtgctgatccagaccaaggccacagacatcctgcccaagtggctgcgcttcatccggggcgtggtggacagcgaggacatccccctgaacctgagccgggagctgctgcaggagagcgccctgatcaggaagctgagagatgtgctgcagcagaggctcatcaagttcttcatcgaccagagcaagaaggatgctgagaagtatgccaagttctttgaagattatggcctcttcatgagggagggcatcgtgacagccacagagcaggaggtgaaggaggacatcgccaagctgctgcgctatgagagcagcgccctgcccagcggccagctgaccagcctgtctgaatatgccagcaggatgagagctggcaccaggaacatctactacctgtgtgcccccaacagacacctggccgagcacagcccctactatgaggccatgaagaagaaggacacagaggtgctcttctgctttgagcagtttgatgagctgaccctgctgcacctgcgggagtttgacaagaagaagctgatctctgtggagacagacatcgtggtggaccactacaaggaggagaagtttgaggacaggagccctgctgctgaatgtctgtctgagaaggagacagaggagctgatggcctggatgagaaatgtgctgggcagccgggtgaccaacgtgaaggtgaccctgcggctggacacccacccagccatggtgacagtgctggagatgggcgccgcccggcacttcctgaggatgcagcagctggccaagacccaggaggagcgggcccagctgctgcagcccaccctggagatcaaccccaggcatgccctgatcaagaagctgaaccagctgcgggccagcgagcccggcctggcccagctgctggtggaccagatctatgaaaatgccatgattgctgctggcctggtggatgacccccgggccatggtgggccgcctgaatgagctgctggtgaaggccctggagcggcactag

SEQ ID NO: 96889 - DNA, 1956 bp, Artificial Sequence
  derived and/or modified sequence
atggcccgggagctgcgggccctgctgctgtggggccggcggctgcgccctcttctccgcgcccctgcgctggcagctgtccctgggggaagcacctcgaagcatgagttccaagccgagaccaaaaagcttttggatattgtagcccgaagcttgtattctgagaaggaggtgtttattcgtgagctgatttccaatgccagtgatgccctggagaagctacgccataaactcgtgagtgacggacaggccttgcccgagatggaaattcacctgcaaactaacgctgaaaagggcacaatcactatccaggacaccggaattgggatgactcaagaagaactggtgagcaacctgggaacaattgcacggtctgggtccaaagcgtttcttgatgccctacagaatcaggccgaagcctcaagtaaaatcataggccaattcggcgtgggcttttacagtgcctttatggtcgcagatcgggttgaagtctacagccgctcagcggcccctgggtcgctcggctatcagtggctgagcgacggcagtggggtattcgagattgctgaggcaagtggagttagaactggcacaaagatcataattcatctgaaatccgactgtaaagaatttagtagtgaggccagagtgagggatgtggtcacaaagtatagtaatttcgtgagcttcccactttatctcaacggccgacggatgaatactttgcaggcgatatggatgatggatccaaaggacgtaagggagtggcagcacgaggagttttatagatacgtggcccaggctcacgacaagccacgctatactctgcattataagacagatgcgcccttaaatatccgctccatcttctatgtgcccgacatgaaaccctccatgttcgacgtgagtcgcgagctggggtccagcgtcgctctttacagccggaaggtactgatacagacaaaggccaccgatattctaccgaagtggctgcgatttattcggggagttgttgactctgaagatataccacttaatctttcccgagaattgttacaggaaagcgcattgatcaggaagctgcgggacgtgcttcagcagcggttgattaaatttttcatcgatcagtccaaaaaggatgcggagaaatatgcgaagttctttgaagactacggtctgtttatgagggaaggtattgtgacagcgaccgagcaggaggttaaagaagacatcgccaagctgctccgctatgagagcagtgcattgccctctgggcagctgaccagcctgtccgagtacgctagccgaatgcgcgctggtactcgcaatatctattacctctgcgccccgaaccgccatctggccgagcacagtccatattacgaagcaatgaaaaagaaagataccgaagtgctgttttgcttcgagcagtttgacgaacttaccctgcttcatctgcgagagtttgacaagaagaagctgatcagcgtggaaacagatattgtcgtcgatcactataaggaagagaaatttgaagatcgttcccccgccgctgagtgcctgtctgagaaggagactgaagaactgatggcctggatgaggaacgtactaggaagtagagtcacgaacgtgaaggtcacgctacgtctggatactcaccctgcgatggtcaccgttctcgaaatgggtgccgcaaggcatttcctgcgaatgcaacagcttgccaagactcaagaggagcgcgcacagctgctgcagcccaccctcgaaatcaaccctagacacgcactcatcaagaagctgaaccagctgagggcctcggagcctggcctggcacagcttctcgttgatcagatttacgagaacgcaatgatcgcagctggccttgtagatgacccacgagccatggtgggacgtctgaacgagttgttggttaaagcactggagcgccactag

SEQ ID NO: 96890 - DNA, 1956 bp, Artificial Sequence
  derived and/or modified sequence
atggcccgagagctgcgggctctcctattgtggggacggaggctgcggcctttgttacgcgcaccggcactagcagcggtgccgggaggttctacttctaaacatgagttccaagcggagacaaagaagttgctcgatattgtggctcgcagtctgtattccgaaaaggaggtcttcattagagagcttatctctaatgctagtgacgctctggagaagctgcgtcataaactggtcagcgatggtcaggcactgcccgagatggagattcacctacaaaccaacgctgaaaaaggaacaatcaccatccaagatactgggatcgggatgacacaggaggaacttgtgtccaacctcggcactattgcacgttcaggctccaaggccttccttgatgccctccagaaccaggccgaggcgtcatctaagatcatcggacaatttggcgtgggcttctactcagcttttatggtggccgatcgcgtggaagtttatagcagaagcgcagccccagggtcactgggataccagtggttatctgatggatcaggggtgtttgagatagcggaggcctcaggtgtgagaacgggaacgaagatcatcatacacctgaagtcagactgtaaagagttttccagtgaggccagagtgcgggatgtggtgaccaaatattctaatttcgtgagttttcccttatatctgaacggcaggcgaatgaatacactgcaggccatctggatgatggatcctaaggacgtcagagaatggcaacacgaggagttctaccggtatgtggcgcaagctcatgataagcctagatacactttgcattacaagaccgacgctcctctgaatattcggtccatcttttacgtgcccgatatgaaaccttcaatgtttgatgtcagccgagagctgggctcctccgtggctctgtactccaggaaagttctcatccagacgaaagctactgatattctgcctaaatggctccgattcatcagaggcgtcgtagactccgaggatattcccctgaacctctctcgtgagctcctgcaagagtcggccctgatacggaagctccgagatgttttgcagcagaggcttatcaagttctttatagatcagtccaagaaagacgcagagaaatacgccaaattctttgaggactatggactctttatgcgtgaaggtatcgttactgccacagaacaggaagtgaaagaggacatagccaagctactgaggtacgagtcatctgcacttccctctggccagctgaccagcctgagtgagtacgctagtcgcatgagagccggaacaaggaatatttactatctgtgcgctccaaaccgacatttggctgaacactctccgtattacgaggccatgaaaaaaaaggataccgaggtgctgttctgctttgagcagtttgacgaactaaccctgctccatctgagggagttcgataaaaagaaactcatttctgtcgaaactgacatcgttgtggatcactacaaggaggagaaatttgaggacagaagcccagccgcagaatgcttgagtgagaaagaaaccgaagagctaatggcttggatgaggaacgtattggggtcacgggttaccaatgtaaaggtgaccctcagactcgatacccatccagccatggtaacagtccttgagatgggcgcagctaggcactttctcagaatgcagcaacttgcaaaaacacaggaagaacgggcacagctactgcagcccaccctggaaataaatcctaggcatgcgctgatcaaaaagctgaatcagctgagagcgtctgagcccggactggcccaactcctggtggatcaaatctacgagaacgcaatgattgcagcagggctggttgatgatccgcgtgccatggttgggagactcaacgaactgcttgtgaaggccttggagcgccattag

SEQ ID NO: 96891 - DNA, 2052 bp, Artificial Sequence
  derived and/or modified sequence
acgacatggcgcgcgagctgcgggcgctgctgctgtggggccgccgcctgcggcctttgctgcgggcgccggcgctggcggccgtgccgggaggttccacttccaaacatgagttccaggccgagacaaagaagcttttggacattgttgcccggtccctgtactcagaaaaagaggtgtttatacgggagctgatctccaatgccagcgatgccttggaaaaactgcgtcacaaactggtgtctgacggccaagcactgccagaaatggagattcacttgcagaccaatgccgagaaaggcaccatcaccatccaggatactggtatcgggatgacacaggaagagctggtgtccaacctggggacgattgccagatcggggtcaaaggccttcctggatgctctgcagaaccaggctgaggccagcagcaagatcatcggccagtttggagtgggtttctactcagctttcatggtggctgacagagtggaggtctattcccgctcggcagccccggggagcctgggttaccagtggctttcagatggttctggagtgtttgaaatcgccgaagcttcgggagttagaaccgggacaaaaatcatcatccacctgaaatccgactgcaaggagttttccagcgaggcccgggtgcgagatgtggtaacgaagtacagcaacttcgtcagcttccccttgtacttgaatggaaggcggatgaacaccttgcaggccatctggatgatggaccccaaggatgtccgtgagtggcaacatgaggagttctaccgctacgtcgcgcaggctcacgacaagccccgctacaccctgcactataagacggacgcaccgctcaacatccgcagcatcttctacgtgcccgacatgaaaccgtccatgtttgatgtgagccgggagctgggctccagcgttgcactgtacagccgcaaagtcctcatccagaccaaggccacggacatcctgcccaagtggctgcgcttcatccgaggtgtggtggacagtgaggacattcccctgaacctcagccgggagctgctgcaggagagcgcactcatcaggaaactccgggacgttttacagcagaggctgatcaaattcttcattgaccagagtaaaaaagatgctgagaagtatgcaaagttttttgaagattacggcctgttcatgcgggagggcattgtgaccgccaccgagcaggaggtcaaggaggacatagcaaagctgctgcgctacgagtcctcggcgctgccctccgggcagctaaccagcctctcagaatacgccagccgcatgcgggccggcacccgcaacatctactacctgtgcgcccccaaccgtcacctggcagagcactcaccctactatgaggccatgaagaagaaagacacagaggttctcttctgctttgagcagtttgatgagctcaccctgctgcaccttcgtgagtttgacaagaagaagctgatctctgtggagacggacatagtcgtggatcactacaaggaggagaagtttgaggacaggtccccagccgccgagtgcctatcagagaaggagacggaggagctcatggcctggatgagaaatgtgctggggtcgcgtgtcaccaacgtgaaggtgaccctccgactggacacccaccctgccatggtcaccgtgctggagatgggggctgcccgccacttcctgcgcatgcagcagctggccaagacccaggaggagcgcgcacagctcctgcagcccacgctggagatcaaccccaggcacgcgctcatcaagaagctgaatcagctgcgcgcaagcgagcctggcctggctcagctgctggtggatcagatatacgagaacgccatgattgctgctggacttgttgacgaccctagggccatggtgggccgcttgaatgagctgcttgtcaaggccctggagcgacactgacagccagggggccagaaggactgacaccacagatgacagccccacctccttgagctttatttacctaaatttaaaggtatttcttaacccg

SEQ ID NO: 96892 - DNA, 507 bp, Artificial Sequence
  derived and/or modified sequence
atgtaccacgacgccagcagatggggcctgaccctgcagacctacgtgcagctgaccatgctggacagacacaccagaccccaggtgagcagcgtgagactgatggagagaagcatccacagcgccagatacatcttcgtggagaacctgtacagaagcggcaagatgcccgaggtggactacgtggtgctgagcgagtggttcgactggatcctgagaaacatggacgtgagcgtggacctgatcgtgtacctgagaaccaaccccgagacctgctaccagagactgaagaagagatgcagagaggaggagaaggtgatccccctggagtacctggaggccatccaccacctgcacgaggagtggctgatcaagggcagcctgttccccatggccgcccccgtgctggtgatcgaggccgaccaccacatggagagaatgctggagctgttcgagcagaacagagacagaatcctgacccccgagaacagaaagcactgcccctag

SEQ ID NO: 96893 - DNA, 507 bp, Artificial Sequence
  derived and/or modified sequence
atgtatcacgacgcaagtcgttggggccttaccttgcagacctatgtgcagctcacaatgctggacagacacacccgcccacaagtcagcagcgtgcggttaatggagaggtccatccattctgctcgatatatcttcgtcgaaaatctgtatcgcagtggtaagatgccggaagtggactacgttgtattgtctgagtggttcgactggattctgcgaaacatggatgttagcgttgatttgatagtgtacctgcgtacaaaccctgagacctgctaccagcggctgaagaagcggtgccgcgaggaagaaaaagtaatccctttggagtacttagaggcaatccaccatctccatgaggagtggcttattaagggttccctctttcccatggcggccccggttctggttatcgaagccgaccatcatatggaacgtatgctagagctatttgaacaaaatcgagataggatccttactcccgaaaaccggaaacattgtccttag

SEQ ID NO: 96894 - DNA, 507 bp, Artificial Sequence
  derived and/or modified sequence
atgtaccacgacgcttcccggtgggggcttaccctgcagacatatgtccagttaactatgcttgacagacacactcgaccgcaggtctcttccgtgagacttatggagaggtcaattcattccgccaggtacattttcgtggagaacctgtatcgcagcggcaagatgccagaggttgattacgtcgtactttcagagtggttcgattggatcttacgaaacatggatgtgtctgttgacctaatcgtttacctaagaaccaatccggaaacttgctatcaaagactgaagaagagatgtagagaagaagaaaaagtcatccccctcgaatacctcgaagcaattcatcatctccatgaagaatggctcatcaagggaagcttattccccatggctgcccccgttctggtaattgaagctgaccatcacatggaacgcatgctggaactgttcgaacaaaaccgtgacaggattttgacacccgagaaccggaagcactgtccatag

SEQ ID NO: 96895 - DNA, 507 bp, Artificial Sequence
  derived and/or modified sequence
atgtaccatgatgccagccgctggggcctgaccctgcagacctacgtgcagctgaccatgctggacagacacacccggccccaggtgtcctctgtgcggctgatggagaggagcatccacagcgcccgctacatctttgtggagaacctgtacagaagtggcaagatgcctgaggtggactatgtggtgctgtctgagtggtttgactggatcctgaggaacatggatgtgtctgtggacctgattgtgtacctgcggaccaaccctgagacctgctaccagaggctgaagaagcgctgccgggaggaggagaaggtgatccccctggagtacctggaggccatccaccacctgcacgaggagtggctgatcaagggcagcctcttccccatggccgcccctgtgctggtgattgaggccgaccaccacatggagaggatgctggagctgtttgagcagaacagagaccgcatcctgaccccagagaacaggaagcactgcccctag

SEQ ID NO: 96896 - DNA, 507 bp, Artificial Sequence
  derived and/or modified sequence
atgtaccacgacgccagccggtggggcctgaccctgcagacctacgtccaactgactatgttggaccgtcacacccgtccccaggtgtcctccgtaaggctgatggaacgaagcatccattctgctaggtacatctttgtagaaaacctgtacaggtccggaaagatgccagaggtggattatgtggtgctgagcgagtggttcgactggatccttcgaaatatggacgttagcgttgacctgattgtgtatctcagaactaaccccgagacctgctaccagcggttgaagaaacgctgcagggaggaagaaaaggttatccctctggagtacttggaagcgattcaccatctccacgaggagtggctcataaaaggctcgctctttccgatggctgcacctgtcttggtcatcgaagctgaccaccatatggagaggatgctcgagctcttcgagcagaaccgcgaccgcatcctgactccagagaatcggaagcactgcccttag

SEQ ID NO: 96897 - DNA, 507 bp, Artificial Sequence
  derived and/or modified sequence
atgtaccacgacgccagccggtggggcctgaccctgcagacctacgtgcagctgacaatgttggatcggcacaccagaccgcaggtgtcctcagtgcggttgatggagcgttcgatccactctgccaggtacatcttcgtagagaatttgtacaggagcggcaagatgcccgaggtggactatgtggtgctgtccgaatggtttgactggatcctgcggaacatggatgtgagtgtggacctgatcgtttatctgaggactaatcccgagacctgttatcagaggctgaagaagagatgtcgtgaagaggaaaaagtaatcccccttgaatatctggaggcaattcaccatctgcacgaagaatggctgattaaagggtccctatttcctatggctgcaccggttttagtgatcgaggcggaccaccacatggaaagaatgttggaactgtttgagcaaaacagggacagaatcctaacccctgaaaatagaaaacactgtccatag

SEQ ID NO: 96898 - DNA, 507 bp, Artificial Sequence
  derived and/or modified sequence
atgtatcacgacgcatccagatgggggctgacactgcaaacatacgttcagctgacgatgctcgacagacatacccggcctcaagtttccagtgtcaggctcatggagcgcagcattcacagtgcccgatatattttcgtcgagaatctatatagaagtggcaagatgcccgaggtggattacgtagtgctctcagaatggtttgactggatcctccggaacatggatgtttccgtggatctcatcgtgtacctgagaactaacccagaaacttgctaccaacgtctgaaaaagcggtgccgggaagaggagaaggtgattcctctggagtatctggaggccatccaccacttgcatgaggaatggttgattaaaggcagtctgtttcccatggccgcacccgtcctggttatagaggccgatcaccacatggaacgaatgttagagctgtttgagcagaaccgcgaccgcattctcactccggaaaacaggaagcactgcccatag

SEQ ID NO: 96899 - DNA, 507 bp, Artificial Sequence
  derived and/or modified sequence
atgtaccacgatgcctcacggtggggcctgaccctccagacttatgtgcagctcacgatgttggatagacacacaaggcctcaggtgagttccgtcagactgatggaaaggagtatacatagtgctaggtacattttcgtggagaacttatatcggtctggtaaaatgccagaggtggattacgtggtgctcagcgagtggttcgattggatcttgagaaacatggacgtgtccgtggatcttattgtgtacctgcgcacgaatcccgaaacatgctaccagagactgaagaaacgttgccgcgaggaggagaaagtcatccctctcgaataccttgaagccatccaccacttgcacgaagaatggttaataaaaggcagcttgttccccatggcagcacctgtgctcgtcatcgaagcggaccatcatatggaaagaatgctggagctgttcgaacagaatagggatcgaattctgaccccggagaatcggaaacactgcccatag

SEQ ID NO: 96900 - protein, 472 aa, Artificial Sequence
  derived and/or modified sequence
MDHGGVGPYELGMEHCEKFEISETSVNRGPEKIRPECFELLRVLGKGGYGKVFQVRKVTGANTGKIFAMKVLKKAMIVRNAKDTAHTKAERNILEEVKHPFIVDLIYAFQTGGKLYLILEYLSGGELFMQLEREGIFMEDTACFYLAEISMALGHLHQKGIIYRDLKPENIMLNHQGHVKLTDFGLCKESIHDGTVTHTFCGTIEYMAPEILMRSGHNRAVDWWSLGALMYDMLTGAPPFTGENRKKTIDKILKCKLNLPPYLTQEARDLLKKLLKRNAASRLGAGPGDAGEVQAHPFFRHINWEELLARKVEPPFKPLLQSEEDVSQFDSKFTRQTPVDSPDDSTLSESANQVFLGFTYVAPSVLESVKEKFSFEPKIRSPRRFIGSPRTPVSPVKFSPGDFWGRGASASTANPQTPVEYPMETSGIEQMDVTMSGEASAPLPIRQPNSGPYKKQAFPMISKRPEHLRMNL

SEQ ID NO: 96901 - protein, 757 aa, Artificial Sequence
  derived and/or modified sequence
MAEGSFSVQSESYSVEDMDEGSDEVGEEEMVEGNDYEEFGAFGGYGTLTSFDIHILRAFGSLGPGLRILSNEPWELENPVLAQTLVEALQLDPETLANETAARAANVARAAASNRAARAAAAAARTAFSQVVASHRVATPQVSGEDTQPTTYAAEAQGPTPEPPLASPQTSQMLVTSKMAAPEAPATSAQSQTGSPAQEAATEGPSSACAFSQAPCAREVDANRPSTAFLGQNDVFDFTQPAGVSGMAFPRPKRPAPAQEAATEGPSAASGVPQTGPGREVAATRPKTTKSGKALAKTRWVEPQNVVAAAAAKAKMATSIPEPEGAAAATAQHSAEPWARMGGKRTKKSKHLDDEYESSEEERETPAVPPTWRASQPSLTVRAQLAPRPPMAPRSQIPSRHVLCLPPRNVTLLQERANKLVKYLMIKDYKKIPIKRADMLKDVIREYDEHFPEIIERATYTLEKKFGIHLKEIDKEEHLYILVCTRDSSARLLGKTKDTPRLSLLLVILGVIFMNGNRASEAVLWEALRKMGLRPGVRHPFLGDLRKLITDDFVKQKNPELREETPLSMAPSWYLEYKKIPNSNPPEYEFLWGLRARHETSKMRVLRFIAQNQNRDPREWKAHFLEAVDDAFKTMDVDMAEEHARAQMRAQMNIGDEALIGRWSWDDIQVELLTWDEDGDFGDAWARIPFAFWARYHQYILNSNRANRRATWRAGVSSGTNGGASTSVLDGPSTSSTIRTRNAARAGASFFSWIQHR

SEQ ID NO: 96902 - DNA, 2274 bp, Artificial Sequence
  derived and/or modified sequence
atggccgagggcagcttcagcgtgcagagcgagagctacagcgtggaggacatggacgagggcagcgacgaggtgggcgaggaggagatggtggagggcaacgactacgaggagttcggcgccttcggcggctacggcaccctgaccagcttcgacatccacatcctgagagccttcggcagcctgggccccggcctgagaatcctgagcaacgagccctgggagctggagaaccccgtgctggcccagaccctggtggaggccctgcagctggaccccgagaccctggccaacgagaccgccgccagagccgccaacgtggccagagccgccgccagcaacagagccgccagagccgccgccgccgccgccagaaccgccttcagccaggtggtggccagccacagagtggccaccccccaggtgagcggcgaggacacccagcccaccacctacgccgccgaggcccagggccccacccccgagccccccctggccagcccccagaccagccagatgctggtgaccagcaagatggccgcccccgaggcccccgccaccagcgcccagagccagaccggcagccccgcccaggaggccgccaccgagggccccagcagcgcctgcgccttcagccaggccccctgcgccagagaggtggacgccaacagacccagcaccgccttcctgggccagaacgacgtgttcgacttcacccagcccgccggcgtgagcggcatggccttccccagacccaagagacccgcccccgcccaggaggccgccaccgagggccccagcgccgccagcggcgtgccccagaccggccccggcagagaggtggccgccaccagacccaagaccaccaagagcggcaaggccctggccaagaccagatgggtggagccccagaacgtggtggccgccgccgccgccaaggccaagatggccaccagcatccccgagcccgagggcgccgccgccgccaccgcccagcacagcgccgagccctgggccagaatgggcggcaagagaaccaagaagagcaagcacctggacgacgagtacgagagcagcgaggaggagagagagacccccgccgtgccccccacctggagagccagccagcccagcctgaccgtgagagcccagctggcccccagaccccccatggcccccagaagccagatccccagcagacacgtgctgtgcctgccccccagaaacgtgaccctgctgcaggagagagccaacaagctggtgaagtacctgatgatcaaggactacaagaagatccccatcaagagagccgacatgctgaaggacgtgatcagagagtacgacgagcacttccccgagatcatcgagagagccacctacaccctggagaagaagttcggcatccacctgaaggagatcgacaaggaggagcacctgtacatcctggtgtgcaccagagacagcagcgccagactgctgggcaagaccaaggacacccccagactgagcctgctgctggtgatcctgggcgtgatcttcatgaacggcaacagagccagcgaggccgtgctgtgggaggccctgagaaagatgggcctgagacccggcgtgagacaccccttcctgggcgacctgagaaagctgatcaccgacgacttcgtgaagcagaagaaccccgagctgagagaggagacccccctgagcatggcccccagctggtacctggagtacaagaagatccccaacagcaacccccccgagtacgagttcctgtggggcctgagagccagacacgagaccagcaagatgagagtgctgagattcatcgcccagaaccagaacagagaccccagagagtggaaggcccacttcctggaggccgtggacgacgccttcaagaccatggacgtggacatggccgaggagcacgccagagcccagatgagagcccagatgaacatcggcgacgaggccctgatcggcagatggagctgggacgacatccaggtggagctgctgacctgggacgaggacggcgacttcggcgacgcctgggccagaatccccttcgccttctgggccagataccaccagtacatcctgaacagcaacagagccaacagaagagccacctggagagccggcgtgagcagcggcaccaacggcggcgccagcaccagcgtgctggacggccccagcaccagcagcaccatcagaaccagaaacgccgccagagccggcgccagcttcttcagctggatccagcacagatag

SEQ ID NO: 96903 - DNA, 2274 bp, Artificial Sequence
  derived and/or modified sequence
atggcagaagggtcgttctctgtgcagtccgagtcctactccgtggaagacatggacgaaggatctgatgaggtgggagaagaggaaatggtagaaggaaacgactacgaagagtttggcgcgttcgggggttacggtacgctcacctcattcgatattcatatcttgcgcgcattcgggtcacttggtcctggcttacgtatcttaagtaatgaaccctgggaactcgaaaacccggtgctcgcccaaaccctagtggaggctctccagctggacccagaaacactcgccaacgaaacagcggcgcgagcagctaacgtggccagggccgccgcaagcaatcgcgcagcccgcgctgcagccgcagccgcgcgaactgcctttagccaggtggtggccagtcatagggtggccacacctcaggtctctggcgaggacactcagccaaccacctacgcagccgaggcacaagggccaacccctgaacctcccctcgcctctcctcaaacgtcgcaaatgctggtgactagcaaaatggctgccccagaggctcccgctacctcagcccagtcacagaccggctcccctgcccaggaggcagccactgaaggtcccagttcagcatgcgccttctcacaggccccctgcgccagggaggtggatgcgaataggccctccaccgcatttctcgggcagaatgacgtgttcgacttcactcaacctgccggggtatctggtatggcctttccacgtccgaaacggccggctcccgcccaagaagctgcgactgagggaccatccgccgcatcaggggtgccgcagacaggccctgggcgggaagtcgccgctactcgtcccaagactactaaaagcggcaaagctctggccaaaactcgctgggtggagcctcaaaacgttgtcgcggctgccgcagccaaggccaagatggccacctccatacccgagcctgagggcgctgctgctgccaccgctcagcatagcgcagagccttgggcccggatgggggggaagcggacaaagaagtctaagcacttagacgacgagtacgaatcgagcgaagaagagagagaaacccctgcggtgccacccacttggcgggcatcccagccgagtctgaccgtccgggcgcaactggcaccccgaccccccatggccccccgatctcagatcccgtctagacacgtgctttgcctgccaccgagaaacgtgaccctgctgcaggaacgggccaataaattagtgaagtacttgatgattaaagattacaagaagatccctataaagagagcggatatgttgaaagatgttatccgcgagtatgacgagcacttccctgaaatcatagagcgcgctacatacacactcgaaaaaaaattcggaatccatctcaaagaaattgataaagaggaacacctgtatatccttgtttgtacgcgtgatagttctgctcggttactgggcaagaccaaggacacaccccgcttaagtctgttgctcgttattcttggggtgatttttatgaacggtaaccgagccagcgaagctgtcttatgggaagcactgagaaaaatggggcttcgtccaggcgtccgtcaccctttcctgggggatcttcgtaagctcataaccgatgacttcgtaaagcagaagaaccctgagctacgggaagaaactccactgtctatggccccctcctggtaccttgagtataagaaaatacctaactccaacccgccagaatacgagtttctgtggggactccgagcgagacatgagacaagcaaaatgagagtactgagatttatagctcaaaaccagaatcgggatccccgggagtggaaagctcactttttggaagctgtggacgacgcatttaagaccatggacgttgacatggccgaggagcacgcccgcgcccagatgagagcacaaatgaacattggggatgaagccctgatcggccgatggtcttgggacgacatccaggtggagctgttgacatgggatgaagacggagacttcggagatgcatgggctcgcataccatttgccttctgggcaaggtatcatcagtacatcttgaatagtaaccgggccaatcggcgcgccacatggcgtgcaggggtgtcttcgggtaccaacgggggcgcctccacatcagtgctcgatgggccatccactagcagcacgatccgaactcgcaacgcagccagggcgggggccagcttcttttcctggattcagcataggtag

SEQ ID NO: 96904 - DNA, 2274 bp, Artificial Sequence
  derived and/or modified sequence
atggccgagggcagcttctctgtgcagagcgagagctacagcgtggaggacatggatgagggcagtgatgaggtgggggaggaggagatggtggagggcaatgactatgaggagtttggagccttcggcggctacggcaccctgaccagctttgacatccacatcctgcgggccttcggcagcctgggccctggcctgcgcatcctgagcaatgagccctgggagctggagaaccctgtgctggcccagaccctggtggaggccctgcagctggaccctgagaccctggccaatgaaacagctgcccgggccgccaacgtggcccgggctgctgccagcaacagagctgcccgggctgctgctgctgctgccaggacagccttcagccaggtggtggccagccaccgggtggccaccccccaggtgtctggagaggacacccagcccaccacctatgctgctgaggcccagggccccaccccagagccccccctggccagcccccagaccagccagatgctggtgaccagcaagatggccgcccctgaggccccagccaccagcgcccagagccagacaggcagccctgcccaggaggccgccacagagggccccagcagcgcctgtgccttcagccaggccccctgtgcccgggaggtggatgccaaccggcccagcacagccttcctgggccagaatgatgtgtttgacttcacccagcctgctggggtgtctggcatggccttcccccggcccaagaggcctgccccagcccaggaggccgccacagagggccccagcgctgccagcggcgtgccccagacaggccctggccgggaggtggccgccacccggcccaagaccaccaagagcggcaaggccctggccaagacccgctgggtggagccccagaatgtggtggccgctgctgctgccaaggccaagatggccaccagcatccctgagcctgagggcgctgctgctgccacagcccagcacagcgctgagccctgggccaggatgggcggcaagaggaccaagaagagcaagcacctggatgatgaatatgagagcagcgaggaggagcgggagaccccagctgtgccccccacctggagggccagccagcccagcctgactgtgcgggcccagctggcccccaggcctcccatggcccccaggagccagatccccagcagacatgtgctgtgcctgcccccaagaaatgtgaccctgctgcaggagcgggccaacaagctggtgaagtacctgatgatcaaggactacaagaagatccccatcaagagagctgacatgctgaaggatgtgatccgggagtatgatgagcacttccctgagatcatcgagcgggccacctacaccctggagaagaagtttggcatccacctgaaggagattgacaaggaggagcacctgtacatcctggtgtgcacccgggacagcagcgcccggctgctgggcaagaccaaggacaccccccggctgagcctgctgctggtgatcctgggcgtcatcttcatgaatggaaacagagccagcgaggccgtgctgtgggaggccctgaggaagatgggcctgcggcctggggtgcgccaccccttcctgggggacctgaggaagctgatcacagatgactttgtgaagcagaagaaccctgagctgcgggaggagacccccctgtccatggcccccagctggtacctggagtacaagaagatccccaacagcaaccccccagaatatgagttcctgtggggcctgcgggcccggcatgagaccagcaagatgagggtgctgcgcttcatcgcccagaaccagaacagagacccccgggagtggaaggcccacttcctggaggccgtggatgatgccttcaagaccatggatgtggacatggccgaggagcacgcccgggcccagatgagggcccagatgaacattggagatgaggccctgattggccgctggagctgggatgacatccaggtggagctgctgacctgggatgaagatggagactttggagatgcctgggcccgcatcccctttgccttctgggcccgctaccaccagtacatcctgaacagcaacagagccaacagaagagccacctggagggctggggtgagcagcggcaccaatggaggagccagcacctctgtgctggatggccccagcaccagcagcaccatccgcaccagaaatgctgcccgggccggggccagcttcttctcctggatccagcacaggtag

SEQ ID NO: 96905 - DNA, 2274 bp, Artificial Sequence
  derived and/or modified sequence
atggccgagggcagcttcagcgtgcagagcgagagctacagcgtggaggacatggatgaggggtctgacgaagtaggagaggaagagatggtggaaggaaacgattatgaggaatttggagcttttggtggttatggcacattaacatcatttgatattcatattctgagagccttcgggtcactgggtccaggtcttcgaatcctgtccaacgagccttgggagctggagaatcccgttctcgctcagactttggtagaggcgttacaacttgatccagagaccctcgcaaacgagaccgctgcccgcgccgctaacgtcgcgcgggctgccgcttcaaaccgggcagctcgcgctgctgctgccgcagcccgcacggccttcagccaggttgttgcaagccatagagtggctaccccgcaggtgagcggtgaagacacgcagcccacgacctacgcagccgaggctcagggaccaactccagagccacctttggcttccccacagacttcccagatgctcgtcacctctaaaatggctgcacctgaggcacccgcaacctccgcacagagccagaccggcagccctgctcaggaggcagcaaccgaaggccctagctccgcttgtgctttttctcaggcaccgtgcgctcgggaggtggacgccaaccgcccgagcaccgcgttcctgggtcagaacgacgtctttgattttactcagcctgccggcgtctccggaatggccttcccgaggcccaagagacccgcccctgctcaggaggccgcgacagagggcccttctgcagcaagtggcgtgccacagaccgggccggggcgtgaagttgctgccacgcggcccaagacaactaagtccgggaaagccctggcaaagaccagatgggttgagccacagaatgtggtggcagccgccgccgccaaagccaagatggcgacgagtatcccagaacccgagggcgcggctgcagcgacagctcagcacagcgcagagccttgggcccgcatggggggaaagcgcaccaaaaagagcaagcatctggacgacgaatacgagagcagcgaagaagaacgggaaaccccagccgtaccacccacatggcgcgccagtcaaccttcgttgaccgtgcgcgcgcagctggcgcctcggcctccaatggcgcccaggagccagataccaagcaggcacgtcctttgtctgcctccccggaatgtcacattgttgcaggagagagcaaacaaacttgtcaagtatctgatgatcaaagattacaagaaaatcccaattaagagagcagatatgcttaaggacgtaatcagggaatatgatgaacatttccctgagattattgagcgtgcaacttacacgcttgagaaaaaatttggcatccacctcaaggagattgacaaagaggagcatctatacattctggtttgcacgcgggactcatcagcgagactcctgggcaaaaccaaagatacgccaagactgtcgctgctcttggtgattctcggcgttatttttatgaacgggaatagagcgagcgaggccgtcctctgggaggcactgagaaagatggggctgagacccggtgtccgccacccatttctgggcgatcttaggaagctcataaccgatgattttgtaaaacagaagaatccagaactgagagaagaaacacccttgtctatggcgccgtcttggtacctggaatacaagaaaatccctaattctaatccaccagaatacgagttcctgtgggggctccgtgccaggcacgagacctccaagatgagggttctccggttcatcgcccagaaccagaatcgggacccgcgcgagtggaaagcccatttcctcgaggctgttgatgatgctttcaaaaccatggacgtggatatggcggaagaacacgccagggcccagatgcgtgctcaaatgaatatcggagacgaggcattgatcggccggtggtcttgggatgatatccaggtagagctgttgacgtgggacgaagacggcgacttcggggacgcatgggcacggatcccgtttgccttctgggctaggtaccatcaatatatccttaattctaacagagccaaccggcgtgccacttggcgcgccggagttagctccggtacaaatggcggagccagtacatcagtacttgatggcccaagcacaagttccactatccgcacacggaacgctgcgagggccggcgcctcatttttctcctggatccagcaccgctag

SEQ ID NO: 96906 - DNA, 2650 bp, Artificial Sequence
  derived and/or modified sequence
gcatgcgcaggctacccagccgcggggggtgcacggagaaaaggggcggggtggtccgggctgctgtgctggcagcagtaggcgagggcgcggctgcggggttcctggtgctgaggacggacgccattggagttcccgagaaggctgagctctcatctccctgggacccgcagcatggctgagggaagcttcagcgtgcaatcggaaagctacagtgttgaagacatggatgagggtagcgacgaagtcggggaggaagagatggttgaaggcaacgactatgaagaattcggtgcgtttggtggctatggcaccctcaccagctttgacatccatatcctcagagccttcggaagcttgggtccaggccttcgcatcttatcgaatgagccctgggaactggaaaaccctgtgctggcccagaccctggtggaggcattgcagctggatccggaaacacttgccaatgagacggccgcccgtgctgccaacgtagcccgcgccgccgcctccaaccgtgcggctcgggccgctgccgccgctgcccgtaccgccttcagtcaggtggtcgctagccaccgggtggccacgccgcaggtctcaggagaggatacccagcccacgacctacgccgccgaggctcaggggcccacccctgagccaccccttgcttctccgcagacctcccagatgttagtcaccagtaagatggctgcccccgaggctccggcaacctccgcacagtcccagacaggctccccggcccaggaggctgctactgagggccctagtagcgcctgtgctttctctcaggctccgtgtgccagggaggtggacgccaaccggcccagcacagccttcctgggccagaatgatgtcttcgatttcactcagccggcaggtgtcagtggcatggccttcccgcgccccaagagacctgccccagcccaagaggctgccacagagggccccagtgctgcctctggtgtgccccagacgggacctggcagggaggtggcagccacccggcccaagaccaccaagtcggggaaggcgctggccaagactcggtgggtggagcctcagaatgttgtggcagcagctgctgccaaggccaagatggccacgagcatccctgagccggagggtgcagctgctgccactgctcagcacagtgctgagccctgggccaggatgggaggcaagaggaccaagaagtccaagcacctggatgatgagtatgagagcagcgaggaggagagagagactcccgcggtcccacccacctggagagcatcacagccctcattgacggtgcgggctcagttggcccctcggcccccgatggccccgaggtcccagataccctcaaggcacgtactgtgcctgcccccccgcaacgtgacccttctgcaggagagggcaaataagttggtgaaatacctgatgattaaggactacaagaagatccccatcaagcgcgcagacatgctgaaggatgtcatcagagaatatgatgaacatttccctgagatcattgaacgagcaacgtacaccctggaaaagaagtttgggatccacctgaaggagatcgacaaggaagaacacctgtatattcttgtctgcacacgggactcctcagctcgcctccttggaaaaaccaaggacactcccaggctgagtctcctcttggtgattctgggcgtcatcttcatgaatggcaaccgtgccagcgaggctgtcctctgggaggcactacgcaagatgggactgcgccctggggtgaggcacccattcctcggcgatctgaggaagctcatcacagatgactttgtgaagcagaagaacccggagctcagagaggagacgcctctgagcatggctcccagctggtacctggaatacaagaagatccccaacagcaacccacctgagtatgaattcctctggggcctgcgagcccgccatgagaccagcaagatgagggtcctgagattcatcgcccagaatcagaaccgagacccccgggaatggaaggctcatttcttggaggctgtggatgatgctttcaagacaatggatgtggatatggccgaggaacatgccagggcccagatgagggcccagatgaatatcggggatgaagcgctgattggacggtggagctgggatgacatacaagtcgagctcctgacctgggatgaggacggagattttggcgatgcctgggccaggatcccctttgctttctgggccagataccatcagtacattctgaatagcaaccgtgccaacaggagggccacgtggagagctggcgtcagcagtggcaccaatggaggggccagcaccagcgtcctagatggccccagcaccagctccaccatccggaccagaaatgctgccagagctggcgccagcttcttctcctggatccagcaccgttgacgaactgcagcgatcttactggccaagccagagcgcctcctctcagattccttctcgacacagcaccctaggcggcttcttcctgtcagtcggaggtggcatgcaagatgaagctctctttgctcttcctgctttcattttgtgcttttccttgtgttttcatgttttgggtatcagtgttacattaaagttgcaaaattaa

SEQ ID NO: 96907 - DNA, 2274 bp, Artificial Sequence
  derived and/or modified sequence
atggctgagggaagcttcagcgtccagagtgagagctactcagtggaggacatggatgagggtagtgacgaggtgggggaagaggaaatggtggaaggcaacgattatgaagaattcggcgctttcggcggatatggcaccttgacatcctttgacattcacatcctgcgtgctttcggtagcctggggccaggactgagaatcctgagcaacgagccatgggaacttgagaatcccgtgttggcacagacactcgttgaagcccttcagctagatcctgaaacactggccaacgagaccgccgctagagcagcaaacgtggcccgagccgctgccagcaatcgtgccgctcgggctgcagctgctgctgcacgaactgcgtttagccaggtggtggctagtcatagagttgcaacaccgcaggtctctggcgaggatacccagccaactacctatgcagcagaagcccagggccctactccagagccacccctcgccagtccacagacgagtcagatgctagtgacaagtaagatggccgctcccgaagcaccggctacatctgcacagtcccagactggatcccccgctcaggaagctgcaacagagggcccttcctccgcctgtgcattctcgcaagcaccatgtgcaagggaagtagacgccaaccggccatctaccgcttttttgggccaaaacgacgtcttcgacttcacccaacctgccggagtgagtggaatggccttccccaggcctaaaaggcccgctcccgcacaggaggccgctactgaggggccttcagccgcatcaggagtcccccaaactggcccagggagagaggttgcagccactcggcctaaaacgaccaaatcaggcaaggctctagcaaagactcgctgggtggagcctcagaacgtggtggcggctgccgcagccaaagcgaagatggcaacaagcattcccgagccggaaggcgctgctgccgcaactgcgcagcatagcgccgaaccgtgggccaggatgggcggtaagcggactaagaagtcaaaacatctggacgatgaatacgagtctagtgaagaggagcgcgagactcctgctgtgccacctacatggagagcttctcagccgtctctgacggtcagggcccaactggcccctcgaccgccaatggcccctagatcccagattcccagcagacacgtgctgtgcctgcccccaaggaacgttacgctgttgcaagaacgcgctaacaagcttgttaagtatctgatgataaaagattataagaagatcccaatcaaacgggcagacatgctgaaggacgtgataagagagtatgatgagcactttcccgagattattgagcgagctacatacactctggaaaagaaattcgggattcacttgaaggaaattgacaaggaagagcacctgtacatactcgtgtgtacccgggatagcagtgccagactcctgggaaaaaccaaggataccccacgcttgtccctgttgctcgtgatcctgggcgtgatattcatgaatggaaaccgagcctccgaggccgtgttatgggaggctttgagaaaaatggggctgaggcccggtgtaagacacccattcctgggggacctgcgtaagctgatcaccgatgactttgtcaagcagaagaaccctgagctgcgggaagagacccccctgtccatggcaccatcttggtacttggaatataagaaaattccgaatagcaatcctccagagtacgaatttctctgggggttaagagccaggcacgagacaagtaaaatgcgggttctcaggtttatcgcccaaaatcagaatcgtgaccccagggagtggaaggcccactttctggaagcggtagacgacgcctttaagacaatggacgtggatatggctgaggagcatgcaagggcacaaatgcgggctcagatgaatatcggcgacgaggctcttataggtcgctggtcatgggacgatatccaggtcgaactgttgacatgggacgaggacggtgatttcggggacgcctgggccaggatccctttcgctttctgggccagatatcaccagtacatcctgaacagcaacagagcgaaccggagagccacctggagggcgggtgtgagctcaggtacaaacggcggtgctagcacatctgtgctggacggaccctccaccagcagcacaattagaacccgcaatgcagcacgtgcaggtgcgtcttttttttcttggattcaacaccggtag

SEQ ID NO: 96908 - DNA, 2274 bp, Artificial Sequence
  derived and/or modified sequence
atggccgagggcagcttctctgttcagagcgagtcttatagcgttgaggacatggacgaggggtcagacgaagtgggcgaggaagagatggttgaaggcaacgactatgaggagttcggcgcctttggcggctatggcaccctcacgagtttcgacatacacatcttacgtgctttcggatcattgggtcccggcttgcggattctgtcaaacgaaccctgggaactagaaaatcctgtactagcccagaccctggttgaggcactccagctggaccctgagacacttgccaatgagactgccgcccgagccgctaatgttgctagagccgccgcctctaaccgggcggcccgcgctgccgccgccgctgcccgtacagctttctcacaggtggtggcttcccatagagtcgctacaccccaagtgtctggtgaagacacccaaccaactacctatgccgcggaggcacagggccctacaccagagccaccccttgcttctcctcaaacatctcagatgctagtgacgagtaagatggccgccccagaggcgcccgccacctcggcacagtcccaaacaggaagtcctgcccaggaggcagccacagaggggcccagctcagcatgcgcattttctcaggcaccctgtgcaagggaggtagacgccaatcgtcccagcacggccttcctagggcaaaatgatgtcttcgatttcacccagccggcgggtgtgtccgggatggcttttccaagacctaaaaggccagcacccgcccaggaagctgctacagagggaccgtctgctgccagcggggtgccgcaaaccgggcctggacgcgaggttgccgccacaagaccaaagacaacaaagagcggcaaggccttagctaagaccaggtgggtggaaccccaaaatgtggtggcagctgccgctgccaaagccaagatggccacgagcataccggaaccagagggcgctgccgcagccacagctcagcattccgcagaaccgtgggcccgtatgggcggaaagcgcacaaaaaaaagcaagcatctggacgacgaatacgaatcttcggaggaggaaagagagacacccgctgttccaccaacctggagggcctcccaacccagtttgaccgtgagggctcagttggccccgagacccccgatggccccacgcagtcagatcccaagtagacacgtgctatgtttgcccccacggaacgttactttgcttcaggagcgtgcaaacaagctggtgaagtacctaatgatcaaagattataaaaaaattccgatcaagcgcgccgatatgttaaaagacgtgataagggaatatgacgaacatttcccggaaatcatcgagcgcgctacatataccctcgagaaaaaatttggcatccatttgaaggaaattgacaaagaggaacatttgtacattcttgtgtgcacacgcgatagttccgcaaggctcctggggaaaacaaaggatacccccagactcagcctgctcctcgtgatcctgggggtaatttttatgaacggaaaccgggcatctgaggccgtcctgtgggaggctctgagaaagatgggtctgcggcccggtgtgcgccatcccttcctcggcgacctgaggaagcttataacagacgatttcgtaaaacagaaaaacccagaactgagggaggaaacacccctgagcatggccccgagctggtacctggaatataaaaaaatccctaactctaacccgcctgaatatgagttcctgtggggccttcgggctagacacgaaacctctaagatgcgggttctgaggtttattgctcagaatcagaatcgggacccccgtgaatggaaggcacattttctggaggccgtggatgatgcctttaaaaccatggacgtcgatatggcggaggagcacgcaagagctcagatgcgtgcgcagatgaacattggagacgaggccctgatagggcgatggagctgggatgatatccaggtggagcttctgacatgggacgaggatggggactttggggatgcttgggcccgcatacccttcgcattctgggcccgataccaccagtacattttaaattcaaacagggcgaataggagggccacttggagagctggggtgtcaagtggtacaaatggcggcgcttcaacttccgtgttggatgggccaagcacgtcgagtaccattagaaccaggaacgccgccagagccggcgccagtttcttctcatggatccaacatcgctag

SEQ ID NO: 96909 - DNA, 2274 bp, Artificial Sequence
  derived and/or modified sequence
atggcggagggctcttttagcgtacagagcgagagctactcagttgaagacatggacgagggatccgacgaggtaggagaagaggaaatggttgagggaaatgactacgaggaatttggggcctttggtggatacggcaccctgacatctttcgatatccacattctccgggccttcggttcccttggacctggcctccgcatcctctctaatgaaccctgggagctcgaaaacccagttttagcgcagacactcgtggaggctctgcagctggatccagaaactctggccaatgaaactgctgcgcgggcggctaatgtggctcgagccgctgcttcaaatcgagctgccagggccgcagctgcagcagctaggaccgccttcagccaggtggtggcttcccatcgcgtggccaccccgcaggtttctggcgaggacactcagccaacaacttacgccgccgaggctcagggccctaccccagaaccacctctggcctctccacagaccagtcagatgctagtcacgtcaaagatggcggcccccgaagctccagcaacgtctgcacagagccagactggatcgccagcgcaggaggccgccaccgagggacctagtagcgcctgcgccttttcccaggccccatgcgctcgtgaagtggacgctaaccgaccgagcaccgcttttctggggcagaacgacgtgtttgacttcactcagcctgctggtgtgtcagggatggccttccctaggcccaagcggcccgctcccgcgcaggaggctgccaccgaggggcccagtgccgccagcggtgtgccccaaaccggcccaggacgagaagttgcagccacgaggcccaagaccacaaagtctggtaaggctttggcaaaaacccgctgggtagagcctcagaatgtggtggctgccgcagccgctaaggctaagatggccacaagcatccctgaacccgaaggggcagcagctgccacagcccagcactccgctgagccatgggcaaggatgggcggaaagagaacaaagaagtccaaacacttggatgacgaatacgagagtagtgaagaagaacgcgagacaccagcggtccctcctacttggagagccagccagccttccctgactgttcgggcacaactcgcacccaggccaccaatggcgccccggagccaaatccctagccgacacgttctgtgccttccacctcgcaatgtcactctccttcaggaacgcgctaataagctcgttaagtacctgatgattaaagattacaagaaaatccctataaagcgggccgatatgctgaaagatgtaatcagggagtacgatgagcacttcccagaaattatcgagagagccacctacacactagagaaaaagttcgggattcacttaaaagaaattgataaggaagaacatttatacatcctcgtctgcactcgggattcctcggctcgccttcttggcaagacaaaggacacaccaagactctcacttctgctcgtgatcttgggcgtcatcttcatgaatggtaacagagcatctgaagccgtgctctgggaagcgctcagaaaaatgggtctgcgacctggagtgcggcacccctttttgggtgacttgcggaaactaattacagatgacttcgttaagcagaaaaaccccgagctgcgtgaggagaccccactgagtatggcccccagttggtatttggagtacaagaaaattccgaacagcaatccgcccgagtatgaatttctgtggggcctcagagcccggcatgagaccagcaaaatgagggttctcagattcattgcccagaaccagaacagggaccccagagagtggaaggcccactttctcgaagcagtcgacgatgcgttcaaaactatggacgtggacatggctgaagagcacgctagagctcagatgcgggcacaaatgaacattggagatgaggccctgattgggagatggagttgggacgatatccaggtcgaactgcttacatgggatgaggatggcgattttggcgatgcctgggcaagaataccgttcgctttttgggcgcgataccatcaatatatactgaacagcaaccgcgctaaccggagggctacctggcgggcgggggtgagtagcggaaccaatggtggagcatcaacatctgtgttggacggaccaagcaccagctccacgataagaactcgaaatgccgcccgcgcaggggcatctttcttttcatggattcaacacaggtag

SEQ ID NO: 96910 - DNA, 2274 bp, Artificial Sequence
  derived and/or modified sequence
atggccgagggcagcttcagcgtgcagagcgagagctacagcgtggaggatatggacgagggctccgacgaggtaggagaggaggagatggtggagggaaacgattacgaagagttcggtgcctttggtggttacggtaccctcacgtcctttgacatacatatactgcgagcctttgggagcttgggtcctggcctgcggatcctctcgaacgagccttgggagctggaaaatcctgttctcgcacagacattggtagaagctctgcagctggatccagagacactggctaacgaaaccgccgcccgcgccgccaatgtcgcacgcgccgccgcctcaaatagagcagccagagcagcggcagctgcggcgaggactgccttttcccaagtggtggcgagccaccgcgttgctacacctcaggttagcggcgaggacacacaacccacaacatatgccgccgaagcacaggggcccacgcccgagcctcccctggcctcaccccagacatctcagatgctcgtaacttctaagatggccgcccccgaggcacctgccacgtctgctcagagccagaccggaagccctgcgcaggaggccgcgaccgaaggtccgtcatcagcctgcgcctttagccaggcgccctgtgcccgggaggtggatgcaaataggccttccactgcctttttaggccagaatgatgtttttgatttcacacagccagctggggtgtccggcatggcctttccgcgccccaaaaggcccgctcccgcgcaggaggctgccactgagggaccatcggcggcctcaggcgtcccacagaccggcccaggtcgtgaggtggcagccaccagaccaaaaactacgaaaagcggaaaggctctagccaagacccgctgggtagagcctcagaacgtcgttgccgctgccgccgccaaagccaagatggctaccagtatccccgagcctgagggggctgccgcagcgactgcccagcatagcgctgaaccttgggcccgtatgggtggcaagcgtactaagaagagcaaacacttagacgacgagtatgaatcatctgaagaggaacgagagactcctgctgtcccacctacctggcgggcctcacaaccgtctttaactgtgcgagcacaactagcacccagaccaccaatggcaccgagatctcagattcccagccggcatgtattgtgcctgcccccgcgtaatgttactctgttgcaggaacgtgcaaataagctagtcaaatatctcatgattaaggattataagaagatcccaatcaagagggccgatatgctgaaagacgtgatccgagaatatgatgaacattttcccgagattatcgagagagctacatacacactggaaaaaaaatttggcattcacctgaaagagattgataaggaagagcacctgtatattttagtttgtacccgtgacagctctgcccgcttgttgggtaaaacaaaagacacccccaggttgtctttgctgctggtcatcctcggcgtcattttcatgaatggcaaccgcgcgtccgaagccgttctctgggaagccctgagaaagatggggcttcgacctggtgtgcggcacccatttctgggcgatctacgaaagctcataacagacgactttgtcaaacagaagaaccctgagctgagggaagagactcctctgagtatggctcctagctggtacctggagtataagaaaatacccaattccaacccacctgaatatgagttcttgtggggcctgcgtgcccgacacgagacctcaaaaatgcgtgtccttaggttcattgctcagaaccagaacagggaccctagagaatggaaagcccatttcctggaggcagtcgacgacgccttcaaaaccatggacgtggacatggcagaggagcacgcccgcgcccagatgcgagcccagatgaatatcggcgacgaagccctgatcgggcggtggagctgggacgatatacaggtcgagctcctcacttgggacgaggatggggatttcggggacgcctgggcacgaattcctttcgctttctgggctcgctaccaccagtacatcctgaactctaacagggctaaccggcgggccacgtggagagccggtgtttccagtgggacaaacgggggggcttcaacttcagtcctcgacggccccagcacttcaagcacaataaggaccagaaacgccgcgagagccggcgcctcctttttctcttggatccagcatcgttag

SEQ ID NO: 96911 - DNA, 2274 bp, Artificial Sequence
  derived and/or modified sequence
atggccgagggcagcttcagcgtgcagagcgagagctacagcgtggaggacatggacgaaggatctgatgaggtcggagaggaggaaatggtggaaggcaatgattatgaagagttcggcgccttcggcggttacggcaccctgacctcatttgatattcatatccttcgcgcatttggatcactgggcccaggactgcgaatcctctctaatgaaccctgggagctcgagaacccagtcctggcccaaacgctcgtggaagccctgcagcttgatccagaaacacttgccaatgaaaccgccgccagagcagcaaacgttgctagagcagctgccagtaatagggctgcgagagcagccgcagcagctgctcgcacggctttctcccaggtggttgccagccatcgagtagcaactccacaggtgtctggagaggatacccagccaaccacttatgcagctgaggcccagggtccaaccccagagccccctctcgcctcccctcagacctcacagatgcttgtgaccagcaaaatggccgccccagaagcccccgccacaagtgctcagtctcagacaggatctccagctcaggaggccgccaccgagggcccctcatccgcatgtgccttcagtcaagccccttgcgcaagggaagtcgatgcaaatcgccctagcaccgctttcctagggcaaaacgacgtcttcgactttacacagcccgccggtgtgtctgggatggcatttcctaggcccaaacggcccgcccctgcccaagaggccgccaccgagggcccctctgctgcttccggcgtgcctcagaccgggccaggcagagaggttgcagcgacgcgtccaaaaactactaagtcgggaaaggctcttgctaaaacaaggtgggttgaaccacagaatgtggtcgccgctgcagctgcaaaagctaaaatggccacatcaattcctgagccagagggtgccgccgctgccacagcacagcactcggccgagccctgggctcggatgggggggaaacgcactaaaaaatcaaaacatctcgatgacgagtatgaatcctcagaggaggaaagggagacgccagctgttccccctacttggagggcctcccagccttcccttacggtgagggcccagctggcacctcgaccacccatggcaccccgcagccagattccctctcggcatgtgctttgcctgccgcccagaaacgttaccttactccaagaacgtgctaataaactggtgaagtatctcatgatcaaggattacaagaagatacccatcaagcgggccgatatgctcaaggatgtaatccgagagtacgatgaacacttccctgaaattatcgagagagctacctacactttggaaaagaaattcgggatccacctcaaagaaattgacaaggaggagcacctttacattcttgtatgtacaagggatagctccgcacgactgctgggaaagacaaaggatacccccagactgtcactgctgctggtcattctcggagtgattttcatgaacggcaatcgggcctccgaggcagtgctatgggaggctctccggaagatgggacttcgcccaggtgtgcgccaccccttcctcggcgatctgcggaaattaattacagacgatttcgtcaagcaaaagaatcctgagttgcgtgaggaaactcccctgagcatggccccttcatggtatttagaatacaaaaagatacccaacagtaaccctcccgagtatgagttcctatgggggttgagggcacgccacgaaactagcaaaatgcgcgtgctgcgttttattgctcaaaaccagaatcgggacccccgcgagtggaaagcccatttcctagaggcggttgacgatgccttcaagactatggatgtcgatatggccgaggagcacgctcgtgcccagatgagggcccaaatgaatattggcgacgaggctctcattgggaggtggagctgggatgacattcaggtggaactgctaacctgggatgaggatggcgatttcggcgatgcttgggctagaattcctttcgccttctgggctagataccatcagtatattctgaatagcaatcgagcaaatcgaagagctacttggcgtgcaggcgtgagtagtggcacaaacggaggcgcctccacttctgttctggatgggcctagcaccagcagcactataagaacaaggaatgccgcccgcgcgggtgcatcctttttctcatggatacaacacaggtag

SEQ ID NO: 96912 - DNA, 2274 bp, Artificial Sequence
  derived and/or modified sequence
atggctgagggatcctttagcgtccagtccgagagctactctgtcgaagatatggatgaggggagcgacgaggtgggggaggaggaaatggtcgagggcaatgactacgaggagttcggagcatttggtggctacggaactctgacgagtttcgacatacatattctccgggctttcggcagcctcggtccgggtctgcgtatactctcaaatgaaccttgggaacttgaaaatcctgtgctggcccaaaccctcgtggaggccttgcagctggatcccgagacattagctaatgagaccgccgctagggcggcaaacgttgcccgtgctgctgcaagcaatcgagctgcgagggcggctgctgcggctgccaggacggcattttctcaagttgtcgccagccacagggtggctactccccaggtaagcggagaggatactcagcccaccacttacgctgccgaggcacagggcccaactcccgaacctccactagcctccccccagacatcccagatgctggttacatctaagatggctgctccagaagctcctgctacttctgctcaatcacaaacaggctcacccgctcaggaagcagcaacagagggcccatcttccgcgtgtgccttttcccaggcaccgtgcgcaagagaggtcgatgctaacaggccctcgacagcattcctcgggcaaaacgacgtcttcgactttacccaacccgcaggtgtgagtggcatggcgtttccacgaccaaaaaggccagcaccggctcaggaagctgcaaccgagggaccctctgccgcaagcggtgtccctcaaaccggtcccggacgggaagttgctgctaccagacccaagactaccaaatcagggaaagcactggcaaaaacccgctgggtggagccccagaacgtggtcgcagccgcagccgctaaggccaaaatggcgacaagcattcctgaacctgagggcgcagccgctgctacagctcaacattccgctgagccttgggcaagaatgggaggaaaacggacgaagaaatcaaagcacctcgacgatgagtacgagtcaagcgaagaagagcgcgaaactcctgcagtgccgcctacgtggagagcatcccaaccttcccttaccgtgcgagctcagcttgcacctaggcctcccatggctcccagatctcagatcccttcccggcatgtgctgtgcctgccccctcgcaacgtcaccctccttcaggagagagccaacaagttagtgaagtatttaatgatcaaggattacaaaaagattcctatcaagcgggctgatatgctgaaggacgttatccgtgagtacgatgagcactttcccgaaattattgaaagagcaacttacaccctggagaaaaagttcggaattcatctcaaagagattgataaggaagagcacctttacatcctcgtatgtactcgggattctagtgcacggctacttggcaagacaaaggataccccccgtctgtctttgctcctggtcattctgggagtcatcttcatgaatgggaaccgggcttcggaggccgtgctttgggaggccctgcgtaagatggggttgagacccggtgtgcgccaccccttcctgggcgacttgcgtaagctaatcaccgacgactttgtgaagcagaagaatcccgagctgcgggaggagacccccctctccatggcgccaagttggtacttggagtacaagaagatcccaaattcaaacccacccgaatatgagtttttatggggcctccgggcaagacacgagacttcgaagatgagagttttgcgttttattgcccaaaatcagaatagagaccccagggagtggaaggcccattttctagaagctgtggacgacgcgttcaagacaatggatgttgatatggccgaagaacacgcaagggcccagatgcgcgctcagatgaacattggcgatgaggctctgatcggtcgctggtcttgggacgacatccaggtcgagctcctcacctgggatgaagacggcgactttggcgacgcgtgggctagaatccccttcgccttctgggccagatatcaccaatatatcctgaactctaatcgggcaaaccgccgagctacttggagagccggagtgtcatccggcactaacgggggagcatccacaagcgtgctcgatggccctagtacctccagcaccattaggacaaggaacgccgctcgcgctggagctagttttttttcatggatccagcatcgctag

SEQ ID NO: 96913 - DNA, 2274 bp, Artificial Sequence
  derived and/or modified sequence
atggccgaagggtcatttagcgttcagtccgagtcttatagtgtggaggacatggatgagggttcagacgaggttggcgaagaggaaatggtcgagggtaacgattacgaagagttcggcgcttttggtgggtatggtacccttacttcattcgacatacatatattgcgtgcttttggcagtctcggtccaggcctcagaatccttagtaacgaaccatgggaattagaaaatcctgtacttgcccaaactctcgttgaagccctgcagctggatccggagactttggcaaatgagactgctgctcgcgctgctaacgtggctcgggctgccgcatcgaatcgcgcagctcgggctgctgctgccgctgctaggactgcattttcccaggtggtggcaagccatcgcgtcgcaacgccacaggtctcaggagaggatacacagccaactacatacgccgctgaggcacaagggccaactcctgagccccctctggcaagcccccagacctcccaaatgctcgtgacttcgaaaatggctgctccggaagctcccgctactagtgcgcagagccaaaccggctctcccgctcaggaggccgctaccgaaggcccatctagcgcctgcgcttttagccaagctccctgcgcaagagaggtggacgctaataggcccagtactgcgttcttgggccagaacgacgtcttcgatttcacccagccggctggggtttcagggatggcattccccaggcccaaacgccctgcaccagctcaggaggctgcaacagagggtccttccgccgcatctggtgtgcctcagactgggcctggcagggaggtagctgctacacggcctaaaactaccaaaagcggtaaagctctcgcaaagacgcggtgggttgagccacagaatgttgtggctgccgcagcagcgaaggccaaaatggccacgtctattccagaaccagagggtgctgccgcagcaaccgcgcagcactcagctgagccgtgggcccgtatgggcggaaaacggactaaaaagagcaagcatctggacgacgagtacgaaagttccgaagaagaacgggaaacaccagctgttccacccacctggcgggcatctcagccgtctctgactgtgcgggctcaactggcccctagaccacctatggctcccaggtctcagatacccagccgtcatgtgctgtgtctgcctccacgaaacgttactctcctccaggagcgggctaataaacttgtcaagtacctgatgatcaaggactacaaaaagattccaatcaagcgcgctgatatgctcaaggacgtgatccgtgagtacgacgagcactttccagagattatcgagagagcaacgtataccctggaaaagaagtttggcatccatctcaaagagatagataaggaggagcacctttacattctcgtgtgcacacgagactcgtctgctcggttactaggaaaaacaaaggacacacctagattgtctttactccttgtgatcctaggtgtgatctttatgaacggcaatcgagcatcagaggccgtgctgtgggaagctttacggaagatgggcctgaggccgggagtacgccacccattcctgggggacctgcgcaagttgattacggacgacttcgtgaagcagaaaaatccagaactgagagaggagactccactctctatggcaccgtcatggtacctggagtacaagaagattcctaactcaaatccaccggaatacgagttcctgtggggcttacgcgctcggcacgagacgtcaaaaatgagggttttacgttttatcgcacagaaccaaaatcgtgatccaagggagtggaaggcccacttcctggaggccgtcgatgacgcgtttaagacgatggatgttgatatggccgaggaacacgcacgtgctcaaatgagagctcagatgaatatcggagacgaagccctgatcggcaggtggagttgggacgatatccaggttgagctcctcacatgggatgaggacggggatttcggtgacgcctgggctcgtattcctttcgctttctgggcaagatatcatcaatacatactcaacagcaatcgcgctaacagacgagcgacatggcgggcaggagtcagctctggaacaaacggaggggctagcaccagtgtactggatggcccttcgacaagtagcactattcggacaagaaacgctgccagggccggagcgagtttcttttcctggatacaacatagatag

SEQ ID NO: 96914 - DNA, 991 bp, Artificial Sequence
  derived and/or modified sequence
gttgctttttagtcgtcagggaaagcttcgactgcaaaaatggtatgtcccactatcagacaaagagaagaaaaagatcacaagagaacttgttcagaccgttttagcacggaaacctaaaatgtgcagcttccttgagtggcgagatctgaagattgtttacaaaagatatgctagtctgtatttttgctgtgctattgaggatcaggacaatgaactaattaccctggaaataattcatcgttatgtggaattacttgacaagtatttcggcagtgtctgtgaactagatatcatctttaattttgagaaggcttattttattttggatgagtttcttttgggaggggaagttcaggaaacatccaagaaaaatgtccttaaagcaattgagcaggctgatctactgcaggagagccagaatgaagaatggggaggtttgtctgaggatatcttatgataaagagcagtctaaggctttagtccctttgatccccaacttatttattggaagctgaaaccccacgtagtgttcttgaagaaattggactgacataactctcctcccttgttgatgacttcttgtggcatttcacacactgtagatggtcactcccttcatgtccatgttagctcatggtgtaagatgatgtcttgtcagtattactgttttgctaagccgcttcattcatgcctacacaatttttttttaaaagggaactttagttaattaagtgataagggacttaaatatgaattagaatggtgcagaaagagataccttttctggatattttaaagtttaaaggtcagtttctcttaatctgattatgtgcacatatgaaaatggcacatcatatacatgtaaaatcaggcagtatacatttattaattactgtatttgacaaaggaaactcttaaattataatgtgaaacctggttttatgaaaccaaagactagtgcagcatttcagcatatgtaaaaaaaaaa

SEQ ID NO: 96915 - DNA, 462 bp, Artificial Sequence
  derived and/or modified sequence
atgctgttattttcacggcagggcaaactgagactgcagaagtggtacgtccccttgagcgataaggagaagaaaaaaatcacaagagagctcgtgcagactgtgctggctcggaaacctaaaatgtgtagttttcttgaatggagggacctgaaaattgtatataagcgctatgcatctctgtatttctgctgtgcaatagaggatcaagataacgaactgattacactggagataattcaccggtatgtcgaactgctggataaatactttggcagtgtctgcgagctggacattatattcaatttcgaaaaagcttactttatccttgatgagtttctccttgggggagaagtccaggagactagcaagaagaatgtgttaaaagctatcgaacaggcagatctgctgcaggaatcacagaatgaagagtggggcggactcagcgaagatatactgtag

SEQ ID NO: 96916 - DNA, 462 bp, Artificial Sequence
  derived and/or modified sequence
taactcctcttctcaagacaaggcaagcttagacttcagaagtggtacgttcctctgtccgacaaagaaaagaaaaaaattactcgcgaactggtgcaaacagtcctggcccgaaagcccaagatgtgcagctttctagagtggagagacctgaagatcgtgtataagagatatgcctccttatacttctgttgtgccatagaggaccaagataacgaactgataacactggaaatcattcaccgctacgtcgaattactggacaaatattttgggagcgtgtgtgaactcgacatcattttcaatttcgagaaggcttactttatcttggatgagttcttattaggcggtgaagttcaggagaccagcaagaagaacgtattaaaagcaattgagcaagctgatcttttgcaggagagtcaaaacgaggagtggggcgggttgtcagaagacatcctgtag

SEQ ID NO: 96917 - DNA, 462 bp, Artificial Sequence
  derived and/or modified sequence
atgctgctcttcagccggcagggcaagctgcggctgcagaagtggtacgtgcccctgagtgacaaggagaagaagaagatcacccgggagctggtgcagacagtgctggccaggaagcccaagatgtgcagcttcctggagtggagggacctgaagatcgtgtacaagagatatgccagcctgtacttctgctgtgccatcgaggaccaggacaatgagctgatcaccctggagatcatccacagatatgtggagctgctggacaagtactttggatctgtgtgtgagctggacatcatcttcaactttgagaaggcctacttcatcctggatgagttcctgctgggcggggaggtgcaggagaccagcaagaagaatgtgctgaaggccatcgagcaggccgacctgctgcaggagagccagaatgaggagtggggcggcctgtctgaggacatcctgtag

SEQ ID NO: 96918 - DNA, 462 bp, Artificial Sequence
  derived and/or modified sequence
tgactgctcttcagccggcagggcaagctgcggctgcagaagtggtacgtgcccctgagtgacaaggagaagaagaagatcacccgggagctggtgcagacagtgctggccaggaagcccaagatgtgcagcttcctggagtggagggacctgaagatcgtgtacaagagatatgccagcctgtacttctgctgtgccatcgaggaccaggacaatgagctgatcaccctggagatcatccacagatatgtggagctgctggacaagtactttggatctgtgtgtgagctggacatcatcttcaactttgagaaggcctacttcatcctggatgagttcctgctgggcggggaggtgcaggagaccagcaagaagaatgtgctgaaggccatcgagcaggccgacctgctgcaggagagccagaatgaggagtggggcggcctgtctgaggacatcctgtag

SEQ ID NO: 96919 - DNA, 462 bp, Artificial Sequence
  derived and/or modified sequence
atgctgctgttcagccggcagggcaagctgcggctgcagaagtggtatgttccgttgtccgataaagagaaaaagaagattacccgggagctggttcagacagtccttgcgagaaaaccaaagatgtgttctttcttagagtggcgcgaccttaagatcgtgtacaaacgctacgcttccctgtacttctgttgtgccatcgaggatcaggacaatgaactcatcactctggagattattcaccgctatgtggagttgctagataaatattttgggtccgtctgtgaactggacattatctttaactttgaaaaggcctactttattcttgatgaatttctgctgggcggtgaggtgcaggagactagtaaaaagaatgtcttgaaagctatcgaacaggcggacttgctccaagaatcccagaatgaggaatggggcgggttgtccgaggatatactgtag

SEQ ID NO: 96920 - DNA, 462 bp, Artificial Sequence
  derived and/or modified sequence
tgactgctgttcagccggcagggcaagctgcggctgcagaagtggtacgtgccactgtccgataaggagaaaaagaaaattacaagagagctagtgcagaccgtattggctcgaaaaccaaagatgtgttcctttcttgagtggcgagacctaaagatcgtatacaagaggtacgcctctttgtatttctgttgtgcaatcgaagaccaagacaacgagttgatcacactggaaattatacaccgctacgttgaactgcttgacaaatacttcggttccgtgtgtgagttagacatcatatttaacttcgagaaggcgtacttcatactagatgaattcctactaggcggtgaggtccaggaaacgtctaaaaaaaacgtactgaaggccatcgagcaggccgatttactgcaggagtcccaaaatgaagaatggggaggattgagcgaggacatactgtag

SEQ ID NO: 96921 - DNA, 462 bp, Artificial Sequence
  derived and/or modified sequence
atgctcctgttttccagacagggtaagttaaggcttcagaaatggtacgtccccctcagtgacaaagaaaagaaaaagataaccagggagctggttcagacagtcttggcgagaaaaccaaaaatgtgtagctttctggagtggagagatttaaaaatcgtgtacaaaaggtacgcctctctgtacttttgctgcgccattgaggaccaagacaacgagctgatcactctcgaaataatccaccggtacgtggagcttcttgataagtacttcggctcggtgtgtgagctggatattatttttaattttgaaaaggcctattttatccttgacgagttcctgctcggcggagaagtgcaggaaaccagcaagaagaacgtactgaaagcaattgagcaagcagatctcttgcaggagagtcagaacgaggaatggggtggtctttcagaggacatcctgtag

SEQ ID NO: 96922 - DNA, 462 bp, Artificial Sequence
  derived and/or modified sequence
tgacttcttttctccagacagggcaagctgagactgcaaaagtggtacgtccccctgagtgacaaagaaaaaaaaaaaatcacacgcgagctggtgcagaccgtactcgctagaaaaccaaaaatgtgctcttttctggaatggcgagacctgaagatcgtgtacaaacgatacgcgtctctgtacttctgttgcgccatcgaggatcaagataacgagttgatcactctcgaaatcatccataggtatgtagaattgttagacaagtacttcggcagcgtctgcgagctggacataattttcaattttgagaaggcctacttcatcttggacgaatttctcctcggtggtgaagtccaggaaaccagtaaaaaaaatgtgctgaaagcaattgaacaggcggaccttcttcaagaatctcaaaatgaggaatggggcggactgtccgaggatattttgtag

SEQ ID NO: 96923 - DNA, 462 bp, Artificial Sequence
  derived and/or modified sequence
atgctgctgttcagcagacagggcaagctgagactgcagaagtggtacgtgcccctgagcgacaaggagaagaagaagatcaccagagagctggtgcagaccgtgctggccagaaagcccaagatgtgcagcttcctggagtggagagacctgaagatcgtgtacaagagatacgccagcctgtacttctgctgcgccatcgaggaccaggacaacgagctgatcaccctggagatcatccacagatacgtggagctgctggacaagtacttcggcagcgtgtgcgagctggacatcatcttcaacttcgagaaggcctacttcatcctggacgagttcctgctgggcggcgaggtgcaggagaccagcaagaagaacgtgctgaaggccatcgagcaggccgacctgctgcaggagagccagaacgaggagtggggcggcctgagcgaggacatcctgtag

SEQ ID NO: 96924 - DNA, 462 bp, Artificial Sequence
  derived and/or modified sequence
tgactgctgttcagcagacagggcaagctgagactgcagaagtggtacgtgcccctgagcgacaaggagaagaagaagatcaccagagagctggtgcagaccgtgctggccagaaagcccaagatgtgcagcttcctggagtggagagacctgaagatcgtgtacaagagatacgccagcctgtacttctgctgcgccatcgaggaccaggacaacgagctgatcaccctggagatcatccacagatacgtggagctgctggacaagtacttcggcagcgtgtgcgagctggacatcatcttcaacttcgagaaggcctacttcatcctggacgagttcctgctgggcggcgaggtgcaggagaccagcaagaagaacgtgctgaaggccatcgagcaggccgacctgctgcaggagagccagaacgaggagtggggcggcctgagcgaggacatcctgtag

SEQ ID NO: 96925 - protein, 764 aa, Artificial Sequence
  derived and/or modified sequence
MAALDSLSLFTSLGLSEQKARETLKNSALSAQLREAATQAQQTLGSTIDKATGILLYGLASRLRDTRRLSFLVSYIATALEYVRSHPLDPIDTVDFERECGVGVIVTPEQIEEAVEAAINRHRPQLLVERYHFNMGLLMGEARAVLKWADGKMIKNEVDMQVLHLLGPKLEADLEKKFKVAKARLEETDRRTAKDVVENGETADQTLSLMEQLRGEALKFHKPGENYKTPGYVVTPHTMNLLKQHLEITGGQVRTRFPPEPNGILHIGHAKAINFNFGYAKANNGICFLRFDDTNPEKEEAKFFTAICDMVAWLGYTPYKVTYASDYFDQLYAWAVELIRRGLAYVCHQRGEELKGHNTLPSPWRDRPMEESLLLFEAMRKGKFSEGEATLRMKLVMEDGKMDPVAYRVKYTPHHRTGDKWCIYPTYDYTHCLCDSIEHITHSLCTKEFQARRSSYFWLCNALDVYCPVQWEYGRLNLHYAVVSKRKILQLVATGAVRDWDDPRLFTLTALRRRGFPPEAINNFCARVGVTVAQTTMEPHLLEACVRDVLNDTAPRAMAVLESLRVIITNFPAAKSLDIQVPNFPADETKGFHQVPFAPIVFIERTDFKEEPEPGFKRLAWGQPVGLRHTGYVIELQHVVKGPSGCVESLEVTCRRADAGEKPKAFIHWVSQPLMCEVRLYERLFQHKNPEDPTEVPGGFLSDLNLASLHVVDAALVDCSVALAKPFDKFQFERLGYFSVDPDSHQGKLVFNRTVTLKEDPGKV

SEQ ID NO: 96926 - DNA, 2295 bp, Artificial Sequence
  derived and/or modified sequence
atggccgccttggacagccttagcctgtttacttccctcgggctcagtgagcagaaggccagagagactctcaagaatagcgccctgtctgctcagctccgggaggccgcaacccaggcacaacaaacacttggcagcaccatcgacaaagctacaggcatcctgctgtatggacttgctagtcggctccgcgatactaggagactgtcattcctcgtctcttatatcgccacggccctcgaatacgtgcgttcccatcctctcgatccgatcgacactgtcgattttgagcgggagtgtggggtgggagtgatcgtcactcctgagcaaatcgaagaggccgtggaggccgccataaaccgccaccggccgcagttgctggtggagcgatatcattttaatatggggctcctcatgggagaggctcgggctgtcctgaagtgggccgacggaaagatgattaagaacgaggtggacatgcaggtgctgcacctcctggggccaaagttagaggctgatctggagaaaaaattcaaagtcgcaaaggctcgattagaagagactgacaggcggacagcaaaagatgtggttgaaaacggggagaccgccgaccaaactctctccctaatggaacaactgcggggcgaagccctcaaatttcataaaccaggcgagaactacaaaacacctggatacgtggttacgccccacacaatgaatctgctaaaacagcacctggaaataacaggggggcaagtaaggacccggtttccccccgaacccaatgggatcctgcatattggccatgccaaggcgattaactttaatttcggatacgccaaagcaaacaacggcatctgcttcttgcgtttcgatgatacaaaccccgagaaagaggaagccaagtttttcacagccatatgcgacatggtcgcctggctaggttacacaccctacaaagttacatatgcgtccgattattttgatcagctgtatgcgtgggccgtggaactgattagaaggggattagcctatgtgtgccatcaacgtggggaggagcttaaaggccataacacacttccaagtccctggcgtgacaggcccatggaagaaagcttgctcttattcgaagctatgcggaagggtaaattcagcgagggcgaagccacactcaggatgaaattggtgatggaggatggcaaaatggacccagtcgcctatagggtgaaatacacgccgcatcacaggactggcgataaatggtgcatttacccaacatacgattacacacactgtctatgtgatagcattgaacatattacgcattctctgtgcaccaaagagttccaagcacgccgctcctcttacttttggctatgtaatgctctggacgtgtactgcccagttcagtgggagtacgggcgactgaacttgcactatgccgtggtcagtaaaaggaaaatcctgcagctcgtagcgactggggctgtacgcgactgggatgacccgaggctgttcacactcacagcactccgtaggagaggatttcctcccgaagccataaacaacttctgcgccagggtaggagtcaccgtggctcaaacaacaatggagccccacctgctggaggcctgtgtgcgggatgtgttgaacgacaccgcgccacgggctatggccgtgctggagtccttgagagtcattattactaatttccccgctgcgaagagtctggacatacaggtcccaaactttccggcagacgaaaccaagggttttcaccaggtaccttttgcccccatcgttttcatcgagaggaccgactttaaggaagaacctgagcctggattcaagagattagcctggggccagcctgttgggctccgtcatacgggttatgtaattgaacttcagcacgtggtgaaaggaccctctggctgtgtggagagtcttgaggttacatgtagaagggccgatgccggcgagaaaccgaaggcgtttatccactgggtctcccagcctctgatgtgcgaggtgcgtctgtatgagaggctctttcagcacaaaaaccccgaggaccctaccgaagtcccagggggctttttgagtgatctgaatctggcatcacttcatgtggtggatgccgccctggtcgactgctcagttgctctggcaaagccttttgataaattccaatttgagaggctgggatatttttctgttgacccagattcccaccaggggaaactcgtgttcaacaggaccgtcaccctgaaagaggatccaggcaaagtgtag

SEQ ID NO: 96927 - DNA, 2412 bp, Artificial Sequence
  derived and/or modified sequence
tcttttagtttccggtgtctctgcaatggcggctctagactccctgtcgctcttcactagcctcggcctgagcgagcagaaggcccgcgagacgctcaagaactcggctctgagcgcgcagctgcgcgaggccgctactcaggctcagcagaccctgggttccaccattgacaaagctaccgggatcctgttatatggcttggcctcccgactcagggatacccggcgtctctccttccttgtaagctacatagccactgcccttgagtatgtgcggagtcaccccttggaccccatcgacactgtggacttcgagcgggaatgtggcgtgggtgtcattgtgaccccagagcagattgaggaggctgtggaggctgctattaacaggcaccggccccagctcctggtggaacgttaccatttcaacatggggctgctgatgggagaggctcgggctgtgctgaagtgggcagatggcaaaatgatcaagaatgaagtggacatgcaggtcctccaccttctgggccccaagttggaggctgatctggagaagaagttcaaggtggcaaaagctcggctagaagaaacagaccggaggacggcaaaggatgtggtggagaatggcgagactgctgaccagaccctgtctctgatggagcagctccggggggaggcccttaagttccacaagcctggtgagaactacaagaccccaggctatgtggtcactccacacaccatgaatctactaaagcagcacctggagattactggtgggcaggtacgtacccggttcccgccagaacccaatggaatcctgcatattggacatgccaaagccatcaatttcaactttggctatgccaaggccaacaatggcatctgttttctgcgttttgatgacaccaaccctgagaaggaggaagcaaagttcttcacggccatctgtgacatggtagcctggctaggctacacaccttacaaagtcacatatgcgtctgactattttgaccagctatatgcgtgggctgtggagctcatccgcaggggtctggcttatgtgtgccaccagcgaggagaggagctcaaaggccataatactctgccttcaccctggagagaccgtcccatggaggagtcactgctgctctttgaggcaatgcgcaagggcaagttttcagagggcgaggccacactacggatgaagctggtgatggaggatggcaagatggaccctgtagcctatcgagtcaagtatacaccacaccaccgcacaggggacaaatggtgcatctatcccacctacgactacacacactgcctctgtgactccatcgagcacatcactcactcactctgcaccaaggaattccaggcccgacgctcttcctacttctggctttgcaatgcactggacgtctattgccctgtgcagtgggagtatggccgcctcaacctgcactatgctgttgtctctaagaggaagatcctccagcttgtagcaactggtgctgtgcgggactgggatgacccacggctctttacactcacggccctgcgacggcggggcttcccacctgaggccatcaacaacttctgtgcccgggtgggagtgactgtggcacaaaccacaatggagccacatcttctagaagcctgtgtgcgtgatgtgctgaatgacacagccccacgagccatggctgtgctggagtcactacgggtcatcatcaccaactttcctgctgccaagtccttggacatccaggtgcccaacttcccagctgatgagaccaaaggcttccatcaggttccctttgcacccattgtcttcattgagaggactgacttcaaggaggagccagagccaggatttaagcgcctggcttggggccagcctgtgggcctgaggcatacaggctacgtcattgagctgcagcatgttgtcaagggccccagtggttgtgtagagagtctggaggtgacctgcagacgggcagatgctggagagaagccaaaggcctttattcactgggtgtcacagcctttgatgtgtgaggttcgcctctatgagcgactattccagcacaagaaccctgaagatcctactgaggtgcctggtggatttttaagtgacctgaacctggcatcactacacgtggtggatgcagcattagtggactgctctgtggccctggcaaaacccttcgacaagttccagtttgagcgtcttggatatttctccgtggatccagacagccatcagggaaagcttgtctttaaccgaactgtcacactgaaggaagacccaggaaaggtgtgagctggaagcactgaacctacctcatcctcctggagggtgtggctaccctcgccaccccaaattccatgtcaataaagaacagctaaattctc

SEQ ID NO: 96928 - DNA, 2295 bp, Artificial Sequence
  derived and/or modified sequence
atggccgccctggacagcctgagcctcttcaccagcctgggcctgtctgagcagaaggcccgggagaccctgaagaacagcgccctgagcgcccagctgcgggaggccgccacccaggcccagcagaccctgggcagcaccatcgacaaggccaccggcatcctgctgtatggcctggccagccggctgcgggacacccggcggctgtccttcctggtgtcctacatcgccacagccctggagtatgtgcgcagccaccccctggaccccatcgacacagtggactttgaaagagaatgtggggtgggcgtgattgtgaccccagagcagatcgaggaggccgtggaggccgccatcaacagacaccggccccagctgctggtggagcgctaccacttcaacatgggcctgctgatgggagaggcccgggctgtgctgaagtgggcagatggcaagatgatcaagaatgaggtggacatgcaggtgctgcacctgctgggccccaagctggaggccgacctggagaagaagttcaaggtggccaaggcccggctggaggagacagacagaagaacagccaaggatgtggtggagaatggagaaacagctgaccagaccctgagcctgatggagcagctgcggggggaggccctgaagttccacaagccaggagagaactacaagaccccaggctacgtggtgaccccccacaccatgaacctgctgaagcagcacctggagatcactggaggccaggtgaggacccgcttccccccagagcccaacggcatcctgcacatcggccacgccaaggccatcaacttcaactttggctacgccaaggccaacaacggcatctgcttcctgcgctttgatgacaccaaccctgagaaggaggaggccaagttcttcaccgccatctgtgacatggtggcctggctgggctacaccccctacaaggtgacctacgccagtgactactttgaccagctgtatgcctgggccgtggagctgatccggcggggcctggcctacgtgtgccaccagagaggagaggagctgaagggccacaacaccctgcccagcccctggagggaccggcccatggaggagagcctgctgctgtttgaggccatgaggaagggcaagttcagcgagggggaggccaccctgaggatgaagctggtgatggaggatggcaagatggaccctgtggcctacagagtgaagtacaccccccaccacaggactggagacaagtggtgcatctaccccacctatgactacacccactgcctgtgtgacagcattgagcacatcacccacagcctgtgcaccaaggagttccaggcccggcgcagcagctacttctggctgtgcaatgccctggatgtgtactgccctgtgcagtgggagtatggccgcctgaacctgcactatgctgtggtgtccaagaggaagatcctgcagctggtggccaccggggctgtgcgggactgggatgaccccaggctcttcaccctgacagccctgcggcggcggggcttccccccagaggccatcaacaacttctgtgcccgggtgggcgtgacagtggcccagaccaccatggagccccacctgctggaggcctgtgtgagagatgtgctgaatgacacagccccccgggccatggctgtgctggagagcctgcgggtcatcatcaccaacttccctgctgccaagagcctggacatccaggtgcccaacttcccagcagatgagaccaagggcttccaccaggtgccctttgcccccatcgtgttcattgaaagaacagacttcaaggaggagcctgagcccggcttcaagaggctggcctggggccagcctgtgggcctgcggcacacaggctacgtgattgagctgcagcacgtggtgaagggccccagcggctgtgtggagagcctggaggtgacctgcagaagagcagatgctggggagaagcccaaggccttcatccactgggtgtcccagcccctgatgtgtgaggtgcggctgtatgagcggctcttccagcacaagaaccctgaggaccccacagaggtgcctgggggcttcctgagtgacctgaacctggccagcctgcacgtggtggatgctgccctggtggactgcagcgtggccctggccaagccctttgacaagttccagtttgagcggctgggctacttctctgtggaccctgacagccaccagggcaagctggtgttcaacagaacagtgaccctgaaggaggaccccgggaaggtgtag

SEQ ID NO: 96929 - DNA, 2295 bp, Artificial Sequence
  derived and/or modified sequence
atggccgccctggacagcctgagcctgttcaccagcctgggcctgtcagaacagaaagcacgggaaaccctcaaaaattctgccctcagtgcacaactcagagaggcagcaacccaggcacagcagacactaggatctaccatagacaaagctactggaatccttctttatggcctagcctcgaggttaagagacaccaggcgcctgagttttttggtgtcatacatcgcaacagcactggaatatgtccgaagtcaccctctagaccccattgatactgtggacttcgagcgggagtgcggtgtgggcgtcattgttacaccagagcagattgaagaggccgtggaagcggcaataaaccggcacaggccacagctgctcgtggagcggtatcactttaacatgggcctgttaatgggtgaagcaagggccgtgctcaaatgggccgatggtaagatgattaaaaacgaagtggatatgcaagttcttcacctgctgggccctaaactggaagccgatctggagaaaaagttcaaggttgccaaggcccgacttgaggaaaccgaccgccgaacggccaaggacgttgttgagaatggggagactgcagaccagaccctcagcctgatggagcagctgcgcggagaagccctgaaatttcacaaacccggggagaattacaaaactcctggctacgtcgtcacgccccacacgatgaatctgcttaaacaacacctggagattacaggcgggcaagtgcggacaaggtttcctccagagcccaacggaatcctccacattggacatgccaaggctattaatttcaactttggttatgcaaaagccaataacggtatctgctttctgaggttcgacgacactaatccggaaaaggaggaagcaaagttcttcactgccatctgtgacatggtagcttggttgggctacaccccctataaagtaacctacgcctccgactacttcgaccagttgtatgcgtgggccgtggaactcatcaggcgcggactggcatacgtgtgccaccaacggggagaggagctgaaagggcataacacccttccctctccatggcgggatagaccaatggaagagagcttgcttctgttcgaggctatgcggaaagggaagtttagcgagggtgaagccacgctgcgaatgaagctggtaatggaggacggcaagatggatcccgtagcatacagggtaaagtacacgccccaccacagaaccggcgacaaatggtgtatttaccctacatacgactatacccattgcttgtgtgatagcattgagcacatcactcacagcctctgcaccaaggaattccaagcaaggcgttcgagctatttttggctgtgcaacgccctggatgtgtattgccccgtccaatgggaatacggtcgcctaaatctgcattacgcagtggtgtccaaacgaaagatcctgcagctggttgccacaggcgcagtaagggactgggatgatccgcgccttttcactcttacagccctcagaagacgcgggtttccgcctgaggctatcaataacttttgcgcccgcgttggggtaacagtggctcagactaccatggaacctcacctgctggaagcctgtgtgagggacgttctgaatgacaccgctccaagggccatggctgtcctggaatctctgagagtcattatcaccaatttccccgccgccaagtccctggacattcaggtacctaactttcctgcagacgagactaaggggtttcatcaggtacccttcgcccctatcgtttttattgagagaaccgactttaaggaagagccggaacccggcttcaaacgccttgcttgggggcagcccgtcgggcttagacacacagggtatgtgattgagcttcagcatgttgtgaaagggcctagtggctgcgtggaatccctggaggtgacttgccgccgggccgatgctggagagaaacctaaggcttttatccactgggtgagccagccgctgatgtgtgaagtgcggctatacgagcggctgtttcagcacaagaaccccgaggacccgacagaagtgccgggagggttcctatctgaccttaatctagccagtttgcatgtggttgacgctgctctcgtggactgctccgtggccctcgcaaagccattcgacaagtttcagtttgaacgcttaggctacttttccgtggacccagactcccaccagggtaagctagttttcaatcgaacagtcactttgaaagaggaccccggcaaagtatag

SEQ ID NO: 96930 - DNA, 2295 bp, Artificial Sequence
  derived and/or modified sequence
atggccgcactggatagcctcagcttgttcacatccctggggctgtctgagcagaaggcgagagagaccctgaagaacagtgccctgagcgcccaactccgtgaggcagcgacccaggcacagcagaccctagggtctaccatagacaaagctactgggatcctgctgtacgggctggcatccaggctgcgggatacccgtagattaagcttcctggtttcttacatcgcgactgccttggaatatgtgaggtcacatcctctcgacccaatcgatactgtggacttcgagagggagtgcggagtgggcgttatagtgacccccgaacaaattgaagaagcggtagaagcagccattaacaggcaccggcctcaactgcttgtggaaaggtatcatttcaacatgggtctactgatgggcgaggcccgtgctgtgctgaaatgggcggacggtaaaatgatcaagaatgaggtagacatgcaggtgttgcacctgctgggtcccaaactcgaggccgatctggagaagaaattcaaggttgccaaagccagactggaggagactgacagacgtaccgcaaaagatgtcgtcgaaaacggcgaaacggcagaccagaccctgtcattgatggagcaacttcgaggcgaggcactcaaatttcacaaaccaggcgagaactacaagacccctgggtacgttgtgacccctcacacaatgaaccttctgaaacagcacctagaaattacaggtgggcaggtacgcactcgatttcctccagagcccaatggtatcttgcacattggacatgctaaggcgataaactttaatttcggttatgctaaggctaacaatggtatttgcttcctccgcttcgacgacactaatcccgagaaggaggaggccaaatttttcaccgcgatctgtgacatggtggcctggctgggttacacaccctataaagtgacttacgctagcgactatttcgaccagctttatgcctgggctgtcgaattgattaggcggggtctggcatatgtgtgccatcaacggggagaggagctgaagggtcacaatacgcttccctctccatggcgggaccggcctatggaggagtctctcctcctatttgaggctatgagaaaggggaaattttctgagggggaagcaactctgaggatgaagctcgtcatggaagatggcaaaatggaccctgtagcctacagggtgaagtatacgccacaccaccgtaccggcgacaaatggtgcatctatccgacatacgactacactcactgtctgtgcgacagcatcgagcacatcacacacagcctgtgtacaaaggaatttcaggctaggcgaagttcatacttctggctgtgtaatgctctagatgtttactgtccggtgcagtgggagtatggcagactgaatctgcattacgccgtggtaagcaagcgaaaaatattgcagctcgtggccactggcgcagttagagattgggatgatccccgtctcttcactcttaccgctctgaggcgcagaggcttccccccagaagctattaacaacttctgtgctcgggtcggtgtgactgtggcacagacgaccatggagccacacctactggaagcatgcgtccgcgatgttttaaacgatacagctccccgtgcgatggccgtgctcgaaagcctccgagtcatcatcacgaactttccagcggcaaaaagcctcgacattcaggtaccaaactttcccgcagacgaaaccaaaggttttcaccaggtcccattcgctcccatcgtttttatcgaacggacggacttcaaggaagagccggagcccggattcaagaggctggcttgggggcagccggtcgggttgcgccatactggatatgtcattgagctccagcatgttgttaaggggcctagcggttgtgtcgagtctctggaagtcacttgccgaagggccgacgccggagaaaagccaaaagccttcattcattgggtgagccaaccccttatgtgcgaggtccggttgtacgagaggcttttccagcataaaaaccccgaggacccgaccgaagtgccgggaggctttctcagcgacctgaacctcgcgagcttgcatgtggtagatgccgcactcgtcgattgctccgtcgcccttgctaaaccgttcgacaagtttcagttcgagcgcctcggctatttctccgtcgacccagactctcaccagggcaagctagtgttcaacaggactgtgaccttgaaggaggatccaggcaaagtctag

SEQ ID NO: 96931 - DNA, 2295 bp, Artificial Sequence
  derived and/or modified sequence
atggccgccctggacagcctgagcctgttcaccagcctgggcctgagcgagcagaaggccagagagaccctgaagaacagcgccctgagcgcccagctgagagaggccgccacccaggcccagcagaccctgggcagcaccatcgacaaggccaccggcatcctgctgtacggcctggccagcagactgagagacaccagaagactgagcttcctggtgagctacatcgccaccgccctggagtacgtgagaagccaccccctggaccccatcgacaccgtggacttcgagagagagtgcggcgtgggcgtgatcgtgacccccgagcagatcgaggaggccgtggaggccgccatcaacagacacagaccccagctgctggtggagagataccacttcaacatgggcctgctgatgggcgaggccagagccgtgctgaagtgggccgacggcaagatgatcaagaacgaggtggacatgcaggtgctgcacctgctgggccccaagctggaggccgacctggagaagaagttcaaggtggccaaggccagactggaggagaccgacagaagaaccgccaaggacgtggtggagaacggcgagaccgccgaccagaccctgagcctgatggagcagctgagaggcgaggccctgaagttccacaagcccggcgagaactacaagacccccggctacgtggtgaccccccacaccatgaacctgctgaagcagcacctggagatcaccggcggccaggtgagaaccagattcccccccgagcccaacggcatcctgcacatcggccacgccaaggccatcaacttcaacttcggctacgccaaggccaacaacggcatctgcttcctgagattcgacgacaccaaccccgagaaggaggaggccaagttcttcaccgccatctgcgacatggtggcctggctgggctacaccccctacaaggtgacctacgccagcgactacttcgaccagctgtacgcctgggccgtggagctgatcagaagaggcctggcctacgtgtgccaccagagaggcgaggagctgaagggccacaacaccctgcccagcccctggagagacagacccatggaggagagcctgctgctgttcgaggccatgagaaagggcaagttcagcgagggcgaggccaccctgagaatgaagctggtgatggaggacggcaagatggaccccgtggcctacagagtgaagtacaccccccaccacagaaccggcgacaagtggtgcatctaccccacctacgactacacccactgcctgtgcgacagcatcgagcacatcacccacagcctgtgcaccaaggagttccaggccagaagaagcagctacttctggctgtgcaacgccctggacgtgtactgccccgtgcagtgggagtacggcagactgaacctgcactacgccgtggtgagcaagagaaagatcctgcagctggtggccaccggcgccgtgagagactgggacgaccccagactgttcaccctgaccgccctgagaagaagaggcttcccccccgaggccatcaacaacttctgcgccagagtgggcgtgaccgtggcccagaccaccatggagccccacctgctggaggcctgcgtgagagacgtgctgaacgacaccgcccccagagccatggccgtgctggagagcctgagagtgatcatcaccaacttccccgccgccaagagcctggacatccaggtgcccaacttccccgccgacgagaccaagggcttccaccaggtgcccttcgcccccatcgtgttcatcgagagaaccgacttcaaggaggagcccgagcccggcttcaagagactggcctggggccagcccgtgggcctgagacacaccggctacgtgatcgagctgcagcacgtggtgaagggccccagcggctgcgtggagagcctggaggtgacctgcagaagagccgacgccggcgagaagcccaaggccttcatccactgggtgagccagcccctgatgtgcgaggtgagactgtacgagagactgttccagcacaagaaccccgaggaccccaccgaggtgcccggcggcttcctgagcgacctgaacctggccagcctgcacgtggtggacgccgccctggtggactgcagcgtggccctggccaagcccttcgacaagttccagttcgagagactgggctacttcagcgtggaccccgacagccaccagggcaagctggtgttcaacagaaccgtgaccctgaaggaggaccccggcaaggtgtag

SEQ ID NO: 96932 - protein, 153 aa, Artificial Sequence
  derived and/or modified sequence
MEVENEASCSPGSASGGSREYKVVMLGAGGVGKSAMTMQFISHQFPDYHDPTIEDAYKTQVRIDNEPAYLDILDTAGQAEFTAMREQYMRGGEGFIICYSVTDRQSFQEAAKFKELIFQVRHTYEIPLVLVGNKIDLEQFRQPTLKEFGREEF

SEQ ID NO: 96933 - DNA, 462 bp, Artificial Sequence
  derived and/or modified sequence
atggaggtggagaacgaggccagctgcagccccggcagcgccagcggcggcagcagagagtacaaggtggtgatgctgggcgccggcggcgtgggcaagagcgccatgaccatgcagttcatcagccaccagttccccgactaccacgaccccaccatcgaggacgcctacaagacccaggtgagaatcgacaacgagcccgcctacctggacatcctggacaccgccggccaggccgagttcaccgccatgagagagcagtacatgagaggcggcgagggcttcatcatctgctacagcgtgaccgacagacagagcttccaggaggccgccaagttcaaggagctgatcttccaggtgagacacacctacgagatccccctggtgctggtgggcaacaagatcgacctggagcagttcagacagcccaccctgaaggagttcggcagagaggagttctag

SEQ ID NO: 96934 - DNA, 462 bp, Artificial Sequence
  derived and/or modified sequence
atggaagtagagaacgaagcctcctgttcccccggaagcgcctccggtgggagtcgggagtacaaggtcgttatgctgggggctggcggagttggcaagtcagcaatgacaatgcagttcatttcgcaccagtttccggattatcacgatccgaccattgaggacgcttacaagactcaagtgaggattgacaatgaacccgcctacctcgacattctggacacggcggggcaggctgaattcacagctatgagagaacagtatatgcggggaggggaaggtttcatcatttgttactccgttactgaccgccagtccttccaggaagccgccaagtttaaagagttgatctttcaggtgcggcacacatatgaaattcctctggtcctggtggggaataaaattgacctggagcagttccgacaacccaccctgaaggaatttggaagggaggagttttag

SEQ ID NO: 96935 - DNA, 462 bp, Artificial Sequence
  derived and/or modified sequence
atggaggtggagaatgaggccagctgcagccctggcagcgccagcggcggcagccgggagtacaaggtggtgatgctgggcgctgggggcgtgggcaagagcgccatgaccatgcagttcatcagccaccagttcccagactaccatgaccccaccattgaagatgcctacaagacccaggtgagaattgacaatgaaccagcctacctggacatcctggacacagctggccaggccgagttcaccgccatgagggagcagtacatgagaggaggagagggcttcatcatctgctacagcgtgacagaccggcagagcttccaggaggccgccaagttcaaggagctgatcttccaggtgcgccacacctatgagatccccctggtgctggtgggcaacaagattgacctggagcagttccggcagcccaccctgaaggagtttggccgggaggagttctag

SEQ ID NO: 96936 - DNA, 462 bp, Artificial Sequence
  derived and/or modified sequence
atggaggtggagaacgaggccagctgcagccccggcagcgccagcggaggatcacgggagtataaggtggtcatgttaggagctggcggcgttggtaagagcgctatgaccatgcagttcataagccaccaattccccgattatcatgatcccactatcgaagacgcctacaagacacaggtacgcattgataacgagcctgcatatttagacattctggatacagccgggcaggccgagtttacagctatgcgcgaacagtatatgaggggcggggaaggattcattatctgctatagtgtcactgaccggcaatcttttcaagaggcagctaaattcaaagaattaatttttcaagtgaggcacacctacgagatcccattagtccttgtcggaaacaaaatcgacctcgaacagtttcgccagcctactcttaaagaattcggccgagaggagttttag

SEQ ID NO: 96937 - DNA, 462 bp, Artificial Sequence
  derived and/or modified sequence
atggaggtcgagaacgaggcgagctgcagtcccggatcagcctcaggagggtccagggagtataaggtggtcatgctgggagccggtggagtcgggaagtccgctatgactatgcagttcattagccatcagttccctgactaccacgatcccacaatagaagacgcctataaaacccaggtgcgtattgacaacgaacccgcttacctagatatcctggataccgccggacaagcagagttcacagccatgcgagagcagtatatgagaggaggcgaagggttcattatttgttattctgtaacagacagacagagtttccaggaggccgcaaaattcaaagaattaatttttcaagtaaggcatacttatgaaatcccactggtgctcgtcgggaacaaaattgacctggagcagttccggcagccaacactgaaagagtttggtagggaagaattctag

SEQ ID NO: 96938 - DNA, 635 bp, Artificial Sequence
  derived and/or modified sequence
ggttgctatgagacccgctcgagcggaggaccagcagccagcccgacgctgatggttcttacctcgtactaaaacctttgctttgacacagttttagagttgcttaatattcgagcaagcacctgacacgggtgactttctccttctttttttcctccggtccctcgggtaagatggaggtagaaaatgaagccagctgctccccgggcagcgcatcaggcgggtccagagagtacaaggtggtaatgctgggagcagggggagttggtaaaagcgcaatgacaatgcagtttattagtcatcagttccctgattatcatgaccctactatagaagatgcttataagacccaggtcaggattgacaatgagccagcttacttggacatcttggacactgctggccaggcagaattcacagccatgcgggagcagtacatgcgaggtggggaaggcttcatcatctgctactccgtcactgaccgtcaatcatttcaggaggctgccaagtttaaagagctcatttttcaggtccgccacacctatgaaattcccctggtgctggtgggtaacaaaattgatctggaacagttccgccagcctacactgaaagagtttggaagggaagaattctga

SEQ ID NO: 96939 - DNA, 618 bp, Artificial Sequence
  derived and/or modified sequence
accatgagcagccacggcaacagcctgttcctgagagagagcggccagagactgggcagagtgggctggctgcagagactgcaggagagcctgcagcagagagccctgagaaccagactgagactgcagaccatgaccctggagcacgtgctgagattcctgagaagaaacgccttcatcctgctgaccgtgagcgccgtggtgatcggcgtgagcctggccttcgccctgagaccctaccagctgacctacagacagatcaagtacttcagcttccccggcgagctgctgatgagaatgctgcagatgctggtgctgcccctgatcgtgagcagcctggtgaccggcatggccagcctggacaacaaggccaccggcagaatgggcatgagagccgccgtgtactacatggtgaccaccatcatcgccgtgttcatcggcatcctgatggtgaccatcatccaccccggcaagggcagcaaggagggcctgcacagagagggcagaatcgagaccatccccaccgccgacgccttcatggacctgatcagaaacatgttcccccccaacctggtggaggcctgcttcaagcaggtgagaggcaagtacaccgtgtag

SEQ ID NO: 96940 - DNA, 939 bp, Artificial Sequence
  derived and/or modified sequence
atgagcagccacggcaacagcctgttcctgagagagagcggccagagactgggcagagtgggctggctgcagagactgcaggagagcctgcagcagagagccctgagaaccagactgagactgcagaccatgaccctggagcacgtgctgagattcctgagaagaaacgccttcatcctgctgaccgtgagcgccgtggtgatcggcgtgagcctggccttcgccctgagaccctaccagctgacctacagacagatcaagtacttcagcttccccggcgagctgctgatgagaatgctgcagatgctggtgctgcccctgatcgtgagcagcctggtgaccggcatggccagcctggacaacaaggccaccggcagaatgggcatgagagccgccgtgtactacatggtgaccaccatcatcgccgtgttcatcggcatcctgatggtgaccatcatccaccccggcaagggcagcaaggagggcctgcacagagagggcagaatcgagaccatccccaccgccgacgccttcatggacctgatcagaaacatgttcccccccaacctggtggaggcctgcttcaagcagttcaagacccagtacagcaccagagtggtgaccagaaccatggtgagaaccgagaacggcagcgagcccggcgccagcatgcccccccccttcagcgtggagaacggcaccagcttcctggagaacgtgaccagagccctgggcaccctgcaggagatgctgagcttcgaggagaccgtgcccgtgcccggcagcgccaacggcatcaacgccctgggcctggtggtgttcagcgtggccttcggcctggtgatcggcggcatgaagcacaagggcagagtgctgagagacttcttcgacagcctgaacgaggccatcatgagactggtgggcatcatcatctggtag

SEQ ID NO: 96941 - DNA, 618 bp, Artificial Sequence
  derived and/or modified sequence
acgatgagttcgcacgggaatagcctgttcttaagggaaagtggtcagcgccttggcagagtaggatggctgcaacggctgcaggagagccttcagcaaagggccttgagaactcggctgcgcttacagacaatgacgttagaacatgttctgaggttcctgcgtcggaatgcatttatcctactgaccgtctcagctgtcgtgattggggtgagcctggcttttgccctcaggccttaccagctaacctataggcaaatcaagtacttttctttccccggagaattgctgatgcggatgctgcagatgctagtgctccccctcattgttagtagcctagtgacagggatggcctctctggacaacaaagctacaggccgtatggggatgagggccgcagtgtattatatggtgactaccatcatcgctgtctttatcggtatcctgatggtgactattattcatcctgggaagggcagcaaagagggcttgcacagagaaggaaggatcgagacgatacccaccgccgacgcctttatggatcttataagaaatatgtttcccccgaacctggtggaggcctgtttcaagcaggtgcggggaaaatacaccgtatag

SEQ ID NO: 96942 - DNA, 939 bp, Artificial Sequence
  derived and/or modified sequence
atgtcttctcacggtaattccctgtttctcagggagagtgggcagaggctcggacgtgttggatggcttcagaggttgcaggaaagcctgcaacagagagctctgcgcacgagactgaggttgcaaacgatgaccctggagcacgtactaaggttcctacgcagaaacgctttcatcctgctgaccgtctcagcagtggtaataggcgtgagcctcgcttttgcactacggccgtatcaactaacctatcgacagatcaagtactttagcttccctggcgagctcctgatgcggatgcttcagatgcttgtcctgccccttattgtgtccagtcttgttacaggcatggcttcactggacaacaaagccacgggccgaatggggatgagggctgccgtgtattacatggtgactacgatcattgccgtatttatagggattctaatggtgacaatcatacaccccggaaaaggctcaaaggaaggcctccacagggagggccggattgaaactattccaaccgctgatgctttcatggacctcattcggaacatgtttccccccaacctcgtggaagcatgtttcaagcagttcaagacccagtattctactcgcgtggtgactaggacaatggtgcgcaccgagaacggatcggaaccaggtgcatctatgcctcctcctttttccgttgagaacggaacctctttcctggaaaacgtcacccgggccctcggtactttgcaagaaatgttatccttcgaagagacagtccccgtccctggatcggccaatggtatcaatgcactggggttagtagtcttctctgttgcctttggcctcgtgatcgggggaatgaaacacaagggtagagtattaagggatttctttgactcgctcaacgaagcaatcatgcgccttgtgggtatcattatttggtag

SEQ ID NO: 96943 - DNA, 618 bp, Artificial Sequence
  derived and/or modified sequence
accatgagcagccacggcaacagcctcttcctgcgggagagcggccagaggctgggccgggtgggctggctgcagaggctgcaggagagcctgcagcagagggccctgcggacccggctgcggctgcagaccatgaccctggagcacgtgctgcgcttcctgcggagaaatgccttcatcctgctgactgtgtctgctgtggtgattggagtgtccctggcctttgccctgcggccctaccagctgacctaccggcagatcaagtacttctccttccctggagagctgctgatgaggatgctgcagatgctggtgctgcccctgattgtgagcagcctggtgacaggcatggccagcctggacaacaaggccactggaaggatgggcatgagagctgctgtgtactacatggtgaccaccatcatcgctgtgttcatcggcatcctgatggtgaccatcatccaccctgggaagggcagcaaggagggcctgcaccgggagggccgcatcgagaccatccccacagcagatgccttcatggacctgatccggaacatgttcccccccaacctggtggaggcctgcttcaagcaggtgcggggcaagtacacagtgtag

SEQ ID NO: 96944 - DNA, 939 bp, Artificial Sequence
  derived and/or modified sequence
atgagcagccacggcaacagcctcttcctgcgggagagcggccagaggctgggccgggtgggctggctgcagaggctgcaggagagcctgcagcagagggccctgcggacccggctgcggctgcagaccatgaccctggagcacgtgctgcgcttcctgcggagaaatgccttcatcctgctgactgtgtctgctgtggtgattggagtgtccctggcctttgccctgcggccctaccagctgacctaccggcagatcaagtacttctccttccctggagagctgctgatgaggatgctgcagatgctggtgctgcccctcatcgtgagcagcctggtgacaggcatggccagcctggacaacaaggccaccggccgcatgggcatgagagctgctgtgtactacatggtgaccaccatcatcgctgtgttcatcggcatcctgatggtgaccatcatccaccctgggaagggcagcaaggagggcctgcaccgggagggcagaattgagaccatccccacagcagatgccttcatggacctgatccggaacatgtttcctcccaacctggtggaggcctgcttcaagcagttcaagacccagtacagcaccagggtggtgaccaggaccatggtgaggacagaaaatggcagcgagcccggggcctccatgcccccacccttctctgtggagaatggcaccagcttcctggagaatgtgacccgggccctgggcaccctgcaggagatgctgagctttgaggagaccgtgcctgtgcccggcagcgccaacggcatcaatgccctgggcctggtggtgttttctgtggccttcggcctggtgattggaggcatgaagcacaagggccgggtgctgcgggacttctttgacagcctgaatgaggccatcatgaggctggtgggcatcatcatctggtag

SEQ ID NO: 96945 - DNA, 618 bp, Artificial Sequence
  derived and/or modified sequence
accatgagcagccacggcaacagcctgttcctgcgggagagcggccagagactggggagagtgggctggctgcaacgactgcaggaaagtctgcaacaaagagcacttcggaccagactgagattgcagaccatgaccctggaacatgtgctgagattcctgcgccgaaatgcctttattctgctgaccgtgtctgccgtggtgataggcgtcagcctggccttcgccttgcgcccataccagctgacgtaccgtcagattaaatacttctctttccctggcgagcttctcatgcgtatgctacaaatgctggttctgccattgatcgtcagtagtctggtgacaggaatggcaagccttgacaacaaagcaaccggccgcatgggaatgcgggcagcagtgtactatatggtcaccactatcattgctgtcttcatagggatactcatggtcacgattatccaccccggaaagggtagtaaggaggggctgcatagagaaggtcggatcgaaactatcccgacggctgatgccttcatggacctcatcaggaacatgtttccaccaaacctggtcgaagcttgcttcaagcaagtgcggggtaagtataccgtatag

SEQ ID NO: 96946 - DNA, 939 bp, Artificial Sequence
  derived and/or modified sequence
atgagcagccacggcaacagcctgttcctgcgggagagcggccagcgcctaggccgtgtggggtggttgcagagactgcaggaatccctccagcagcgcgctctgcgaacccgactgaggctgcagaccatgaccctcgaacacgttcttagatttctcagaagaaacgccttcatcttgctcacggtctccgccgttgtcatcggtgtgagcctcgccttcgcactgcgaccttatcaactgacctaccggcagattaaatacttttccttccctggcgagctgttgatgcggatgttgcagatgctcgtgctaccactgatagtctcctccctggtgacagggatggcatccttagacaacaaagccaccggccgcatgggaatgcgggctgccgtttactatatggttacaactatcattgcagttttcattggaatactgatggtgaccatcatccacccaggcaagggcagtaaagagggcctgcatcgggagggacggattgagactatcccaaccgctgatgctttcatggatctgatcagaaacatgtttcctcctaacctcgtagaagcctgtttcaagcaatttaaaactcaatactcaactagggttgtgacccggaccatggtccggaccgaaaatggctccgaaccgggagcttctatgccacctcctttcagcgtggagaacggtacctctttccttgagaatgtcaccagagctcttggaactttgcaggagatgctttcttttgaggaaactgttcctgtgcccggtagtgcgaatgggatcaatgctctcggtctcgtcgtgttcagcgtggcattcggactggtcattggcggcatgaaacacaagggtcgagtgttgagagatttctttgactcactgaatgaagccattatgaggcttgttggcattatcatttggtag

SEQ ID NO: 96947 - DNA, 618 bp, Artificial Sequence
  derived and/or modified sequence
accatgtcaagccatggcaatagcttgttcctccgggagagtgggcagcggctcggacgagtcggttggctccagcggttgcaggagtctctccaacaaagagcacttcgcactcgactgaggctccagacaatgactcttgagcatgtgctgcgattcttacgcaggaacgcatttatcctgctgacagtcagcgccgtggtgatcggtgtgagtctggcctttgccttaaggccctaccaactgacatacaggcagattaagtatttcagtttcccaggcgagctgctcatgagaatgctgcagatgctggtcctgccactcatcgtgtcctcactcgtcacaggtatggcctctctagacaataaagctactggacgaatgggaatgcgcgcagccgtgtattatatggtcacaacaatcatcgccgtatttatcggcattctgatggtgactatcattcatccagggaaaggatcaaaagaggggctgcacagggaggggaggattgagactattcctaccgccgacgcgtttatggatctgatccgaaacatgtttcctccaaacctggtagaggcatgcttcaagcaagtacgaggcaaatatacagtgtag

SEQ ID NO: 96948 - DNA, 939 bp, Artificial Sequence
  derived and/or modified sequence
atgtctagtcacggaaacagcctattcctgcgtgagtctgggcaaagattggggcgagtaggatggttacaacgactccaggagtctctgcagcagcgggctctgcgaacacgcctacgcctacaaacaatgactctggagcacgtgctccgatttcttaggagaaacgctttcatcttactgacagtgtccgctgtggtaatcggcgtcagtctggcctttgcactgcggccttatcaattgacataccgtcaaattaagtacttcagctttcctggcgagctcctgatgaggatgcttcaaatgctggtgttacctctcattgtcagttcgttggtaaccggaatggcatcactggacaataaggctacgggccgaatgggtatgcgcgcagctgtctactatatggtcacaaccataatcgctgtgttcatcggaattctcatggtgacaattatccatcccggaaaaggcagcaaggagggactgcatagagaggggaggatagagaccattcccacagctgacgcgtttatggatctgattcgtaacatgtttcccccaaacttagtagaagcatgtttcaagcagttcaagacacagtattcaactcgcgtcgtgacacggacaatggtgcgcactgagaatggatccgaacctggggcatccatgcccccacccttttctgtggagaacggaacatcctttctggagaatgttacgcgagccctggggacactgcaggaaatgctatcttttgaggagaccgtgccagttcccggatccgccaacggcatcaacgccctgggcctggtggtgttctcggtggcatttggactagttatcggtggaatgaaacacaaggggcgtgtcctcagggatttcttcgactcacttaatgaggctatcatgaggttagtcgggatcatcatttggtag

SEQ ID NO: 96949 - DNA, 889 bp, Artificial Sequence
  derived and/or modified sequence
agaagcagcattgtggtttcaggagatgggtccatttggagcaggatcctaagtggggcttggcattgggaatttggattagctctagaggacgcaggatctggaaaatcagggcagatttcccatcccttggatatggtggggagttgaggagggcaaggaagatcccagaaaagccagtggcagcaaaacacaaaggccagggacctacgtactggtaaaactgagacctccaagaaacctgcagctcgacctggttgaattcagatagaccatgagcagccatggcaacagcctgttcctgcgggagagcggccagcggctgggccgggtgggctggctgcagcggctgcaggaaagcctgcagcagagagcactgcgcacgcgcctgcgcctgcagaccatgaccctcgagcacgtgctgcgcttcctgcgccgaaacgccttcattctgctgacggtcagcgccgtggtcattggggtcagcctggcctttgccctgcgcccatatcagctcacctaccgccagatcaagtacttctcttttcctggagagcttctgatgaggatgctgcagatgctggtgttacctctcattgtctccagcctggtcacaggtatggcatccctggacaacaaggccacggggcggatggggatgcgggcagctgtgtactacatggtgaccaccatcatcgcggtcttcatcggcatcctcatggtcaccatcatccatcccgggaagggctccaaggaggggctgcaccgggagggccggatcgagaccatccccacagctgatgccttcatggacctgatcagaaatatgtttccaccaaaccttgtggaggcctgcttcaaacaggtcagggggaagtacacagtttga

SEQ ID NO: 96950 - DNA, 1772 bp, Artificial Sequence
  derived and/or modified sequence
ggtccggtccccgcgccggtgctgcacagtccctggcgggtccccgcggccccggccgggcgcttcgccgggctccggctcctgcatccgggcgcagcgcgcaggccgaggcgcgggcaggccgcccccgccgctccggacgccgatagaccatgagcagccatggcaacagcctgttcctgcgggagagcggccagcggctgggccgggtgggctggctgcagcggctgcaggaaagcctgcagcagagagcactgcgcacgcgcctgcgcctgcagaccatgaccctcgagcacgtgctgcgcttcctgcgccgaaacgccttcattctgctgacggtcagcgccgtggtcattggggtcagcctggcctttgccctgcgcccatatcagctcacctaccgccagatcaagtacttctcttttcctggagagcttctgatgaggatgctgcagatgctggtgttacctctcattgtctccagcctggtcacaggtatggcatccctggacaacaaggccacggggcggatggggatgcgggcagctgtgtactacatggtgaccaccatcatcgcggtcttcatcggcatcctcatggtcaccatcatccatcccgggaagggctccaaggaggggctgcaccgggagggccggatcgagaccatccccacagctgatgccttcatggacctgatcagaaatatgtttccaccaaaccttgtggaggcctgcttcaaacagttcaagacgcagtacagcacgagggtggtaaccaggaccatggtgaggacagagaacgggtctgagccgggtgcctccatgcctcctccattctcagtggagaacggaaccagcttcctggaaaatgtcactcgggccttgggtaccctgcaggagatgctgagctttgaggagactgtacccgtgcctggctccgccaatggcatcaacgccctgggcctcgtggtcttctctgtggcctttgggctggtcattggtggcatgaaacacaagggcagagtcctcagggacttcttcgacagcctcaatgaggctattatgaggctggtgggcatcattatctggtgagtcctggtctgtgcccacgggatggtggagccagagctgggaagtcaggctgtggggaagctgccgaagggcttgctggggacttttggtcattcatttacgtattgggtgattcacttacccactcaccaactcattcattcatgtctttctgggatgatttcatcactagttgacttccttgttcatctgttcattcattcattcttctatgcattggttagttcatggaatatctcactctttcattcattcatgtccttctgcaatgattcattcactgctttgttcatctgttcattcactcattcttctatgcattgatgaaatcactcattcagtgatttattcatctatactcatgcttcaatgcattgatttactcatttcctcatgcatttattcattcatctatgcattggttaaatcactggccaactcactaactcattcattcattcacacttttctgcaatgatttgttcacttgttcactcccttgcttatctgttcattcactcattcttcaatacattgaccaagccattcactgacatttattcagctacatttattctttcatgcattggtttctggatttatttggtcattcatttatttattttgcaaaattaatgtatttttaattgacaaataaaaactgtatatattttcatgtgc

SEQ ID NO: 96951 - protein, 295 aa, Artificial Sequence
  derived and/or modified sequence
MGMTARTKRTRSGSRWWCTRARHGWGARTRSSSTSPLGHPPQVRTIRQTIVKLGNKVQELEKQQVTILATPLPEESMKQELQNLRDEIKQLGREIRLQLKAIEPQKEEADENYNSVNTRMRKTQHGVLSQQFVELINKCNSMQSEYREKNVERIRRQLKITNAGMVSDEELEQMLDSGQSEVFVSNILKDTQVTRQALNEISARHSEIQQLERSIRELHDIFTFLATEVEMQGEMINRIEKNILSSADYVERGQEHVKTALENQKKARKKKVLIAICVSITVVLLAVIIGVTVVG

SEQ ID NO: 96952 - DNA, 888 bp, Artificial Sequence
  derived and/or modified sequence
atgggcatgaccgccagaaccaagagaaccagaagcggcagcagatggtggtgcaccagagccagacacggctggggcgccagaaccagaagcagcagcaccagccccctgggccaccccccccaggtgagaaccatcagacagaccatcgtgaagctgggcaacaaggtgcaggagctggagaagcagcaggtgaccatcctggccacccccctgcccgaggagagcatgaagcaggagctgcagaacctgagagacgagatcaagcagctgggcagagagatcagactgcagctgaaggccatcgagccccagaaggaggaggccgacgagaactacaacagcgtgaacaccagaatgagaaagacccagcacggcgtgctgagccagcagttcgtggagctgatcaacaagtgcaacagcatgcagagcgagtacagagagaagaacgtggagagaatcagaagacagctgaagatcaccaacgccggcatggtgagcgacgaggagctggagcagatgctggacagcggccagagcgaggtgttcgtgagcaacatcctgaaggacacccaggtgaccagacaggccctgaacgagatcagcgccagacacagcgagatccagcagctggagagaagcatcagagagctgcacgacatcttcaccttcctggccaccgaggtggagatgcagggcgagatgatcaacagaatcgagaagaacatcctgagcagcgccgactacgtggagagaggccaggagcacgtgaagaccgccctggagaaccagaagaaggccagaaagaagaaggtgctgatcgccatctgcgtgagcatcaccgtggtgctgctggccgtgatcatcggcgtgaccgtggtgggctag

SEQ ID NO: 96953 - DNA, 888 bp, Artificial Sequence
  derived and/or modified sequence
atgggcatgaccgcgcgcacaaagcgcactcgctccggatcgcgttggtggtgcacgagagccaggcacggatggggcgctcgaacgaggtcctcgtccacttctcccctgggtcatccccctcaagttaggaccattcgacaaacgatcgtgaagctgggcaacaaagtgcaggagctggaaaaacagcaggttacaattcttgctacccctctgcccgaggaatcaatgaagcaagagctgcagaatctacgggatgaaatcaaacaactggggcgagaaattagacttcagttgaaagctatcgagccccagaaggaggaggctgacgaaaattacaactctgtgaataccagaatgcgcaaaacacaacatggcgtgttgtcccaacagtttgttgaactcataaacaaatgcaattccatgcagagtgagtaccgagagaaaaacgtggaacggatcaggcggcagctcaaaatcacaaacgcaggtatggtctcagatgaagagttagaacaaatgttggatagcggacagagtgaggtgttcgtttcaaatatcctgaaagacacccaagttaccaggcaggcacttaatgaaatcagcgcccggcactctgagatccagcaacttgagagatcaatcagagaactgcacgacatttttactttcttagccacggaagtagagatgcagggggagatgatcaataggatcgaaaaaaatatcctctcctccgccgattatgtcgagcgcgggcaggagcatgtgaagactgctttagagaatcagaaaaaagcacgaaaaaaaaaggtgctcatagctatctgcgtaagtatcaccgtggtcctacttgccgtgataatcggggtcaccgtggtgggatag

SEQ ID NO: 96954 - DNA, 888 bp, Artificial Sequence
  derived and/or modified sequence
atgggcatgacagcccggaccaagaggaccaggagcggcagccgctggtggtgcacccgggcccggcacggctggggcgcccggaccaggagcagcagcaccagccccctgggccaccccccccaggtgaggaccatccggcagaccatcgtgaagctgggcaacaaggtgcaggagctggagaagcagcaggtgaccatcctggccacccccctgcctgaggagagcatgaagcaggagctgcagaacctgagagatgagatcaagcagctgggccgggagatccggctgcagctgaaggccatcgagccccagaaggaggaggctgatgagaactacaacagcgtgaacaccaggatgaggaagacccagcacggcgtgctgagccagcagtttgtggagctgatcaacaagtgcaacagcatgcagagcgagtaccgggagaagaatgtggagcgcatccggcggcagctgaagatcaccaatgccggcatggtgtctgatgaggagctggagcagatgctggacagcggccagagcgaggtgtttgtgagcaacatcctgaaggacacccaggtgacccggcaggccctgaatgagatcagcgcccggcacagcgagatccagcagctggagaggagcatccgggagctgcatgacatcttcaccttcctggccacagaggtggagatgcagggcgagatgatcaacagaattgagaagaacatcctgagcagcgctgactatgtggagcggggccaggagcacgtgaagacagccctggagaaccagaagaaggccaggaagaagaaggtgctgattgccatctgtgtgtccatcaccgtggtgctgctggccgtcatcattggagtgacagtggtgggctag

SEQ ID NO: 96955 - DNA, 888 bp, Artificial Sequence
  derived and/or modified sequence
atgggcatgaccgcccggaccaagcggacccggagcggcagccggtggtggtgcacacgggctcgccacggatggggggcccgcaccaggtcatcttccacatctccgctcgggcacccacctcaggtgcgtaccataaggcagactatcgttaaactggggaacaaagtccaagaattagagaagcaacaagtgacaattcttgctacacctcttcctgaggagagcatgaagcaggaactgcaaaacctgcgcgatgaaatcaagcagctcggtagggagatccggctgcagctgaaagccatcgagcctcagaaagaggaagcagacgagaactacaattccgtcaacacacggatgcggaaaacacagcacggagttctctcccagcaattcgtggagctcataaataagtgtaacagcatgcagtctgaatatagggagaaaaatgtggagaggatcagaagacagctgaaaattacgaatgccgggatggtgagtgatgaagaactggagcagatgctggatagcggccagtcagaggtatttgtgtcaaatatcctgaaagatactcaggtaacccggcaagcattaaatgagatttcggcgcgacatagtgagatccaacagctcgagcggagtattcgggagctccacgacatttttactttcctcgctactgaagttgagatgcagggcgaaatgatcaatcgaatcgaaaagaatatcctgagttcagcagattacgtggaacgtggacaagagcatgtgaaaacagcattggagaatcaaaaaaaggctcgcaaaaagaaggttctgatcgccatatgtgtctcaatcaccgtcgtacttctggctgttatcattggggttactgtggtgggttag

SEQ ID NO: 96956 - DNA, 888 bp, Artificial Sequence
  derived and/or modified sequence
atgggcatgaccgccaggaccaagaggaccaggagcggcagccgctggtggtgtacgagggccagacacggctggggagccagaacgcgctctagctcaaccagcccccttggacatcctcctcaggtgaggaccatccgacagactatagttaaactcggcaacaaagttcaagagctcgaaaaacagcaagttaccattctggccacacctctgcccgaggaaagcatgaaacaagagctacagaacctccgcgacgaaatcaagcagcttggccgagagatacgccttcaattgaaagctatcgagccacagaaagaagaggcggatgaaaattacaatagcgtcaatacgagaatgaggaaaactcaacatggagtgttaagtcagcaattcgtcgaactgatcaacaagtgcaattctatgcagagcgagtaccgagagaagaatgtggaaaggatccggcgacagcttaaaataacaaacgcgggtatggttagtgatgaggagctggagcagatgctagatagcggccagtcagaagtgttcgtttctaacatcctgaaagacacccaggtaacgagacaggccctgaatgagatttcagccagacactccgaaattcagcagttagaacgctctatccgggagctgcatgatatttttaccttcttagcgactgaagtggagatgcagggcgagatgatcaacaggatcgagaaaaacatactcagcagcgcagactacgtggagcgaggacaggaacacgtgaagactgccctagaaaatcaaaagaaagcacgaaagaaaaaagtcctcatcgcaatatgtgttagcatcacagtagtgctcctagcagttatcataggggttacagtcgtgggatag

SEQ ID NO: 96957 - DNA, 1498 bp, Artificial Sequence
  derived and/or modified sequence
acccactgcctcgaaaggcctctgggggtggtcggcgcgcccctccccacctcgcgggggccgtgtgggcgtcgctcggtcgttggggtgccggggacgtcgtgatgagaacggcgtcccagagacggcggtgacagagccgggacacgtgacagtcacagggtcacattctgcggtccacgagtttgggaccgggctggtcacgtgacgcgatttccgttggaagatgcaacggttccggtgacggtagcaagttctcgcgtccaggcatctccgcttccgctcggggcgcaacaacttccgactccaccttcccagcctcgggcaaggaagagacgcgaccatggggatgacagctcggacgaagaggacaaggagcgggtcgcgctggtggtgcacccgggcacggcacggctggggagcccggacgaggagttcttccacaagccctctcggtcaccctccccaggtccggacaattcggcagactattgtcaaactggggaataaagtccaggagttggagaaacagcaggtcaccatcctggccacgccccttcccgaggagagcatgaagcaggagctgcagaacctgcgcgatgagatcaaacagctggggagggagatccgcctgcagctgaaggccatagagccccagaaggaggaagctgatgagaactataactccgtcaacacaagaatgagaaaaacccagcatggggtcctgtcccagcaattcgtggagctcatcaacaagtgcaattcaatgcagtccgaataccgggagaagaacgtggagcggattcggaggcagctgaagatcaccaatgctgggatggtgtctgatgaggagttggagcagatgctggacagtgggcaaagcgaggtgtttgtgtccaatatcctgaaggacacgcaggtgactcgacaggccttaaatgagatctcggcccggcacagtgagatccagcagcttgaacgcagtattcgtgagctgcacgacatattcacttttctggctaccgaagtggagatgcagggggagatgatcaatcggattgagaagaacatcctgagctcagcggactacgtggaacgtgggcaggagcacgtcaagacggccctggagaaccagaagaaggcgaggaagaagaaagtcttgattgccatctgtgtgtccatcaccgtcgtcctcctagcagtcatcattggcgtcacagtggttggataatgtcgcacattgttggcactaggagcaccaggaacccagggcctggccttctctcccagcagcctggggggcagggcagagcctccagtcggaccccttcctcacactggcccctatgcagaagggcagacagttcttctggggttggcagctgctcattcatgatggcctcctccttcaggcctcaatgcctgggggaggcctgcactgtcctgattggccgggacacacggttttgtaaaaaattaaaaaacaaaaaaagagcat

SEQ ID NO: 96958 - protein, 305 aa, Artificial Sequence
  derived and/or modified sequence
MNCQQLWLGFLLPMTVSGRVLGLAEVAPVDYLSQYGYLQKPLEGSNNFKPEDITEALRAFQEASELPVSGQLDDATRARMRQPRCGLEDPFNQKTLKYLLLGRWRKKHLTFRILNLPSTLPPHTARAALRQAFQDWSNVAPLTFQEVQAGAADIRLSFHGRQSSYCSNTFDGPGKKSPVIRDEEEEETELPTVPPVPTEPSPMPDPCSSELDAMMLGEAPPLQAVGRRWGQPADPEAWTNGSDMGLQHEQWRAPWEDLCFQGGLCVDCIRFRTGPLVPSVCPLGGAPRKPGCCCLLASNTMDSLL

SEQ ID NO: 96959 - DNA, 918 bp, Artificial Sequence
  derived and/or modified sequence
atgaactgccagcagctgtggctgggcttcctgctgcccatgaccgtgagcggcagagtgctgggcctggccgaggtggcccccgtggactacctgagccagtacggctacctgcagaagcccctggagggcagcaacaacttcaagcccgaggacatcaccgaggccctgagagccttccaggaggccagcgagctgcccgtgagcggccagctggacgacgccaccagagccagaatgagacagcccagatgcggcctggaggaccccttcaaccagaagaccctgaagtacctgctgctgggcagatggagaaagaagcacctgaccttcagaatcctgaacctgcccagcaccctgcccccccacaccgccagagccgccctgagacaggccttccaggactggagcaacgtggcccccctgaccttccaggaggtgcaggccggcgccgccgacatcagactgagcttccacggcagacagagcagctactgcagcaacaccttcgacggccccggcaagaagagccccgtgatcagagacgaggaggaggaggagaccgagctgcccaccgtgccccccgtgcccaccgagcccagccccatgcccgacccctgcagcagcgagctggacgccatgatgctgggcgaggccccccccctgcaggccgtgggcagaagatggggccagcccgccgaccccgaggcctggaccaacggcagcgacatgggcctgcagcacgagcagtggagagccccctgggaggacctgtgcttccagggcggcctgtgcgtggactgcatcagattcagaaccggccccctggtgcccagcgtgtgccccctgggcggcgcccccagaaagcccggctgctgctgcctgctggccagcaacaccatggacagcctgctgtag

SEQ ID NO: 96960 - DNA, 918 bp, Artificial Sequence
  derived and/or modified sequence
atgaactgtcagcagttatggcttgggtttctcctgccaatgacagtatcaggaagggtgttagggctggccgaggtcgccccggtggactatctcagtcaatacggatatctccaaaagccactggagggtagtaataatttcaaaccggaggatataaccgaagcactccgagcatttcaagaggcaagtgagctgcccgtgtctggccagttagatgacgccacccgggctaggatgcggcagccaagatgtggattggaggacccatttaatcagaaaactttaaagtacctgctgttagggaggtggagaaaaaagcacttaaccttcaggattctcaatctgcccagcacactcccaccgcacaccgccagggccgctctcagacaagcatttcaggattggtcaaacgtggcccccctgacatttcaggaagtgcaagctggcgccgctgatatcaggctatcctttcacggacggcagagttcctactgcagcaatacttttgatgggcctggtaagaaaagccctgtcatcagggatgaagaggaagaggaaaccgagttacccacggttccgcctgtccccacggagccgtccccaatgcctgatccctgtagttccgaactggacgctatgatgctcggagaagcacctcctctccaagccgttggaaggcggtgggggcaacccgccgatccggaggcctggacaaatggatccgatatgggcctgcaacatgaacagtggcgcgcaccttgggaagatctgtgtttccagggtggcctgtgcgtcgactgtattagatttcgcactggtccgctggtccctagcgtttgccccttagggggggcccctcgcaaacctggctgctgctgcctgctcgctagtaacaccatggacagcttgctctag

SEQ ID NO: 96961 - DNA, 918 bp, Artificial Sequence
  derived and/or modified sequence
atgaactgccagcagctgtggctgggcttcctgctgcccatgacagtgtctggccgggtgctgggcctggccgaggtggcccctgtggactacctgagccagtatggctacctgcagaagcccctggagggcagcaacaacttcaagccagaggacatcacagaggccctgcgggccttccaggaggccagcgagctgcctgtgtctggccagctggatgatgccacccgggccaggatgaggcagccccgctgtggcctggaggaccccttcaaccagaagaccctgaagtacctgctgctgggccgctggaggaagaagcacctgaccttccgcatcctgaacctgcccagcaccctgcccccccacacagcccgggccgccctgcggcaggccttccaggactggagcaatgtggcccccctgaccttccaggaggtgcaggccggggctgctgacatccggctgtccttccacggccggcagagcagctactgcagcaacacctttgatggccctgggaagaagagccctgtgatcagagatgaggaggaggaggagacagagctgcccaccgtgccccctgtgcccacagagcccagccccatgccagacccctgcagcagcgagctggatgccatgatgctgggggaggccccacccctgcaggccgtgggccgccgctggggccagcctgctgaccctgaggcctggaccaacggcagtgacatgggcctgcagcacgagcagtggagggccccctgggaggacctgtgcttccagggcggcctgtgtgtggactgcatccgcttcagaacaggccccctggtgcccagcgtgtgccccctgggcggggcccccaggaagccaggctgctgctgcctgctggccagcaacaccatggacagcctgctgtag

SEQ ID NO: 96962 - DNA, 918 bp, Artificial Sequence
  derived and/or modified sequence
atgaactgccagcagctgtggctgggcttcctgctgcccatgaccgtctcagggagagtcttggggctggctgaagtggctcctgtcgactatctgtcccagtacggctatctgcagaagcccctggagggctccaacaacttcaagcctgaagacattacagaagccctacgtgccttccaggaggcctctgaactgcccgtgtctggccaactggacgatgctaccagagcacgaatgagacagccacgatgtgggctcgaagatccgtttaatcagaagacgttgaagtatttgctcttgggccgttggagaaaaaaacatctcaccttccgcatacttaatctcccctccacgctgcctccccacaccgccagagccgccctgaggcaggcatttcaggattggtccaatgttgcccccttgacattccaggaagttcaggccggagccgccgatattaggctttccttccacggtaggcagagttcttattgctctaataccttcgacgggcctggcaagaaatctcccgttatccgcgacgaggaagaagaggaaactgaattaccaaccgttcccccagtcccaaccgaaccctcacctatgccagacccttgttcctcggaactggatgcaatgatgctgggcgaggctccgcctttgcaggccgtgggacgaaggtggggacagccagcagatcccgaagcttggaccaatggttccgacatgggactccagcacgagcagtggagggcgccctgggaggacttatgcttccagggcggattgtgtgtcgactgtattcgcttccgtactggcccactggtgccctccgtctgcccactcgggggggctccccgcaagcccgggtgctgctgcctgctggcctccaatactatggactctctgctgtag

SEQ ID NO: 96963 - DNA, 918 bp, Artificial Sequence
  derived and/or modified sequence
atgaactgccagcagttatggttggggttcttactacctatgactgtgtctggacgggttctgggcctcgccgaggtagcacctgtggattatctctcacaatacggatatctccaaaaacctctggagggctctaacaattttaaaccagaggacatcacagaggccctccgggcattccaggaagcttccgaactgcccgtatctggacagctggatgatgccaccagggctcggatgagacagcccaggtgcggtttggaggatccttttaaccaaaaaaccctaaaatacctgctactcggacggtggcggaaaaaacatctgaccttcagaattctgaatcttccctcaacactgcccccacacacggctagagccgctctgcggcaggcattccaggactggtcgaacgtggctccactgaccttccaggaggtgcaggctggtgcggcagacattcgcctttccttccatggacgacagagctcttattgttctaatacttttgatggaccaggtaagaaaagccccgtcatcagggatgaagaggaagaagagacagaattacccactgtcccgcctgtgccaacagaaccgagccctatgcctgacccctgctcctcagagctcgacgcgatgatgctgggagaggcccctccactgcaagccgtcggacggaggtggggacagcccgctgaccccgaggcatggacgaatgggtccgacatgggactgcagcacgagcagtggcgggctccctgggaagatctctgctttcaaggcggtctttgcgtcgactgtatcaggttccgcacagggcctcttgttcccagtgtttgtcccctaggaggtgcccctcgtaaacctgggtgctgttgcctgctggcaagtaataccatggacagtttattgtag

SEQ ID NO: 96964 - DNA, 918 bp, Artificial Sequence
  derived and/or modified sequence
atgaactgtcaacagctttggttaggcttcttattgcccatgaccgtaagtggtcgcgtgctgggattagcggaggttgctccagtggactacctttcacagtacggatacctgcaaaaacccctcgaagggtctaacaactttaagcccgaagatattacagaggcgctgcgcgccttccaggaggcctcagagctgccggtgagcggtcagttggacgatgccaccagagcacgcatgcgtcaaccccgctgcggacttgaggatcctttcaatcagaaaaccttaaagtacctcctcttaggacggtggagaaaaaaacatctcacattccgcattctcaacctccctagtacactaccgcctcatacagcaagagccgccctcagacaggctttccaagattggagcaatgtcgcccctttgacctttcaggaggtgcaggccggtgcagcggacatccgcctgtcatttcacggaaggcagagcagttactgttccaacacatttgatggtccaggaaagaagagcccagtaataagagacgaagaagaagaagagaccgaactgccaaccgtgcctcccgtcccgacagaaccctctcccatgcccgatccctgctcgtccgagctagacgctatgatgctgggcgaagcaccccctctacaggcagtcgggcggagatgggggcagccagctgatccagaggcatggacaaatggcagcgacatggggttgcagcatgaacagtggagagctccatgggaggatctatgctttcagggcggcttatgtgtggactgcatccgatttcgaactggcccgttggtgccctctgtctgccctctcggcggcgctccacgcaaacccgggtgttgctgtctgctggcatcaaatactatggactcattactatag

SEQ ID NO: 96965 - DNA, 918 bp, Artificial Sequence
  derived and/or modified sequence
atgaattgtcagcagctttggctgggatttcttttgcctatgaccgtgagtggcagagtcttaggcctagctgaggtcgctccagttgactatctcagccagtatggctacctgcagaaaccgctagaaggttctaacaacttcaaacccgaagacattacagaagcacttcgagcctttcaagaagcatctgaactccctgtttcaggtcagctagacgatgctaccagagcacgtatgagacagccgcgctgtggactcgaggacccattcaaccagaaaaccctgaagtatctcctcttaggacggtggagaaaaaaacatctcacattccgcattctcaacctccctagtacactaccgcctcatacagcaagagccgccctcagacaggctttccaagattggagcaatgtcgcccctttgacctttcaggaggtgcaggccggtgcagcggacatccgcctgtcatttcacggaaggcagagcagttactgttccaacacatttgatggtccaggaaagaagagcccagtaataagagacgaagaagaagaagagaccgaactgccaaccgtgcctcccgtcccgacagaacccagcccaatgcctgacccctgctcgtcagaactcgatgccatgatgttgggcgaggccccaccactgcaagccgttggccgccgctggggtcagcctgccgacccagaagcatggaccaacggcagcgatatgggtcttcagcatgaacaatggagagccccatgggaggatctttgttttcagggaggcttatgtgtggattgtattagatttcgaaccgggcctctagtgcctagcgtgtgcccactcggtggagccccaaggaaacctggatgttgctgcctccttgcttcaaacaccatggactctttgctttag

SEQ ID NO: 96966 - DNA, 1431 bp, Artificial Sequence
  derived and/or modified sequence
agaactgggggtaagagcccctctgcctagcactgctcccccaaggctcccagaaatctcaggtcagaggcacggacagcctctggagctctcgtctggtgggaccatgaactgccagcagctgtggctgggcttcctactccccatgacagtctcaggccgggtcctggggcttgcagaggtggcgcctgtggactacctgtcacaatatgggtacctacagaagcctctagaaggatctaataacttcaagccagaagatatcaccgaggctctgagagcttttcaggaagcatctgaacttccagtctcaggtcagctggatgatgccacaagggcccgcatgaggcagcctcgttgtggcctagaggatcccttcaaccagaagacccttaaatacctgttgctgggccgctggagaaagaagcacctgactttccgcatcttgaacctgccctccacccttccaccccacacagcccgggcagccctgcgtcaagccttccaggactggagcaatgtggctcccttgaccttccaagaggtgcaggctggtgcggctgacatccgcctctccttccatggccgccaaagctcgtactgttccaatacttttgatgggcctggcaagaagagtccagtgataagggatgaggaagaagaagagacagagctgcccactgtgcccccagtgcccacagaacccagtcccatgccagacccttgcagtagtgaactggatgccatgatgctgggtgaggcccctcccctccaggctgttggcaggcggtgggggcagcctgctgatcctgaggcctggacaaatgggagtgacatgggacttcagcatgagcaatggagggccccgtgggaagacctatgctttcaagggggactatgtgtggactgtatcagattcaggaccgggccccttgttccgagtgtctgccctttgggaggggctccccggaaacctggatgctgctgtctactcgcctcgaacacaatggattcacttctttaaggggctccgggtactggcagtgggacgagctagcccgaactgacttcagcagctaccccaaaccaatcaagggtttgtttacgggagtgccaaaccagccctcggctgctatgagttggcaagatggccgagtctacttcttcaagggcaaagtctactggcgcctcaaccagcagcttcgagtagagaaaggctatcccagaaatatttcccacaactggatgcactgtcgtccccggactatagacactaccccatcaggtgggaataccactccctcaggtacgggcataaccttggataccactctctcagccacagaaaccacgtttgaatactgactgctcacccacagacacaatcttggacattaacccctgaggctccaccacccaccctttcatttc

SEQ ID NO: 96967 - RNA, 918 nt, Artificial Sequence
  derived and/or modified sequence
augaacugucaacagcuuugguuaggcuucuuauugcccaugaccguaaguggucgcgugcugggauuagcggagguugcuccaguggacuaccuuucacaguacggauaccugcaaaaaccccucgaagggucuaacaacuuuaagcccgaagauauuacagaggcgcugcgcgccuuccaggaggccucagagcugccggugagcggucaguuggacgaugccaccagagcacgcaugcgucaaccccgcugcggacuugaggauccuuucaaucagaaaaccuuaaaguaccuccucuuaggacgguggagaaaaaaacaucucacauuccgcauucucaaccucccuaguacacuaccgccucauacagcaagagccgcccucagacaggcuuuccaagauuggagcaaugucgccccuuugaccuuucaggaggugcaggccggugcagcggacauccgccugucauuucacggaaggcagagcaguuacuguuccaacacauuugaugguccaggaaagaagagcccaguaauaagagacgaagaagaagaagagaccgaacugccaaccgugccucccgucccgacagaacccucucccaugcccgaucccugcucguccgagcuagacgcuaugaugcugggcgaagcacccccucuacaggcagucgggcggagaugggggcagccagcugauccagaggcauggacaaauggcagcgacaugggguugcagcaugaacaguggagagcuccaugggaggaucuaugcuuucagggcggcuuauguguggacugcauccgauuucgaacuggcccguuggugcccucugucugcccucucggcggcgcuccacgcaaacccggguguugcugucugcuggcaucaaauacuauggacucauuacuauag

SEQ ID NO: 96968 - RNA, 918 nt, Artificial Sequence
  derived and/or modified sequence
augaauugucagcagcuuuggcugggauuucuuuugccuaugaccgugaguggcagagucuuaggccuagcugaggucgcuccaguugacuaucucagccaguauggcuaccugcagaaaccgcuagaagguucuaacaacuucaaacccgaagacauuacagaagcacuucgagccuuucaagaagcaucugaacucccuguuucaggucagcuagacgaugcuaccagagcacguaugagacagccgcgcuguggacucgaggacccauucaaccagaaaacccugaaguaucuccucuuaggacgguggagaaaaaaacaucucacauuccgcauucucaaccucccuaguacacuaccgccucauacagcaagagccgcccucagacaggcuuuccaagauuggagcaaugucgccccuuugaccuuucaggaggugcaggccggugcagcggacauccgccugucauuucacggaaggcagagcaguuacuguuccaacacauuugaugguccaggaaagaagagcccaguaauaagagacgaagaagaagaagagaccgaacugccaaccgugccucccgucccgacagaacccagcccaaugccugaccccugcucgucagaacucgaugccaugauguugggcgaggccccaccacugcaagccguuggccgccgcuggggucagccugccgacccagaagcauggaccaacggcagcgauaugggucuucagcaugaacaauggagagccccaugggaggaucuuuguuuucagggaggcuuauguguggauuguauuagauuucgaaccgggccucuagugccuagcgugugcccacucgguggagccccaaggaaaccuggauguugcugccuccuugcuucaaacaccauggacucuuugcuuuag

SEQ ID NO: 96969 - protein, 1828 aa, Artificial Sequence
  derived and/or modified sequence
MMRNKDKSQEEDSSLHSNASSHSASEEASGSDSGSQSESEQGSDPGSGHGSESNSSSESSESQSESESESAGSKSQPVLPEAKEKPASKKERIADVKKMWEEYPDVYGVRRSNRSRQEPSRFNIKEEASSGSESGSPKRRGQRQLKKQEKWKQEPSEDEQEQGTSAESEPEQKKVKARRPVPRRTVPKPRVKKQPKTQRGKRKKQDSSDEDDDDDEAPKRQTRRRAAKNVSYKEDDDFETDSDDLIEMTGEGVDEQQDNSETIEKVLDSRLGKKGATGASTTVYAIEANGDPSGDFDTEKDEGEIQYLIKWKGWSYIHSTWESEESLQQQKVKGLKKLENFKKKEDEIKQWLGKVSPEDVEYFNCQQELASELNKQYQIVERVIAVKTSKSTLGQTDFPAHSRKPAPSNEPEYLCKWMGLPYSECSWEDEALIGKKFQNCIDSFHSRNNSKTIPTRECKALKQRPRFVALKKQPAYLGGENLELRDYQLEGLNWLAHSWCKNNSVILADEMGLGKTIQTISFLSYLFHQHQLYGPFLIVVPLSTLTSWQREFEIWAPEINVVVYIGDLMSRNTIREYEWIHSQTKRLKFNALITTYEILLKDKTVLGSINWAFLGVDEAHRLKNDDSLLYKTLIDFKSNHRLLITGTPLQNSLKELWSLLHFIMPEKFEFWEDFEEDHGKGRENGYQSLHKVLEPFLLRRVKKDVEKSLPAKVEQILRVEMSALQKQYYKWILTRNYKALAKGTRGSTSGFLNIVMELKKCCNHCYLIKPPEENERENGQEILLSLIRSSGKLILLDKLLTRLRERGNRVLIFSQMVRMLDILAEYLTIKHYPFQRLDGSIKGEIRKQALDHFNADGSEDFCFLLSTRAGGLGINLASADTVVIFDSDWNPQNDLQAQARAHRIGQKKQVNIYRLVTKGTVEEEIIERAKKKMVLDHLVIQRMDTTGRTILENNSGRSNSNPFNKEELTAILKFGAEDLFKELEGEESEPQEMDIDEILRLAETRENEVSTSATDELLSQFKVANFATMEDEEELEERPHKDWDEIIPEEQRKKVEEEERQKELEEIYMLPRIRSSTKKAQTNDSDSDTESKRQAQRSSASESETEDSDDDKKPKRRGRPRSVRKDLVEGFTDAEIRRFIKAYKKFGLPLERLECIARDAELVDKSVADLKRLGELIHNSCVSAMQEYEEQLKENASEGKGPGKRRGPTIKISGVQVNVKSIIQHEEEFEMLHKSIPVDPEEKKKYCLTCRVKAAHFDVEWGVEDDSRLLLGIYEHGYGNWELIKTDPELKLTDKILPVETDKKPQGKQLQTRADYLLKLLRKGLEKKGAVTGGEEAKLKKRKPRVKKENKVPRLKEEHGIELSSPRHSDNPSEEGEVKDDGLEKSPMKKKQKKKENKENKEKQMSSRKDKEGDKERKKSKDKKEKPKSGDAKSSSKSKRSQGPVHITAGSEPVPIGEDEDDDLDQETFSICKERMRPVKKALKQLDKPDKGLNVQEQLEHTRNCLLKIGDRIAECLKAYSDQEHIKLWRRNLWIFVSKFTEFDARKLHKLYKMAHKKRSQEEEEQKKKDDVTGGKKPFRPEASGSSRDSLISQSHTSHNLHPQKPHLPASHGPQMHGHPRDNYNHPNKRHFSNADRGDWQRERKFNYGGGNNNPPWGSDRHHQYEQHWYKDHHYGDRRHMDAHRSGSYRPNNMSRKRPYDQYSSDRDHRGHRDYYDRHHHDSKRRRSDEFRPQNYHQQDFRRMSDHRPAMGYHGQGPSDHYRSFHTDKLGEYKQPLPPLHPAVSDPRSPPSQKSPHDSKSPLDHRSPLERSLEQKNNPDYNWNVRKT

SEQ ID NO: 96970 - protein, 183 aa, Artificial Sequence
  derived and/or modified sequence
MMRNKDKSQEEDSSLHSNASSHSASEEASGSDSGSQSESEQGSDPGSGHGSESNSSSESSESQSESESESAGSKSQPVLPEAKEKPASKKERIADVKKMWEEYPDVYGVRRSNRSRQEPSRFNIKEEASSGSESGSPKRRGQRQLKKQEKWKQEPSEDEQEQGTSAESEPEQKKVKARRPVPR

SEQ ID NO: 96971 - protein, 1739 aa, Artificial Sequence
  derived and/or modified sequence
MMRNKDKSQEEDSSLHSNASSHSASEEASGSDSGSQSESEQGSDPGSGHGSESNSSSESSESQSESESESAGSKSQPVLPEAKEKPASKKERIADVKKMWEEYPDVYGVRRSNRSRQEPSRFNIKEEASSGSESGSPKRRGQRQLKKQEKWKQEPSEDEQEQGTSAESEPEQKKVKARRPVPRRTVPKPRVKKQPKTQRGKRKKQDSSDEDDDDDEAPKRQTRRRAAKNVSYKEDDDFETDSDDLIEMTGEGVDEQQDNSETIEKVLDSRLGKKGATGASTTVYAIEANGDPSGDFDTEKDEGEIQYLIKWKGWSYIHSTWESEESLQQQKVKGLKKLENFKKKEDEIKQWLGKVSPEDVEYFNCQQELASELNKQYQIVERVIAVKTSKSTLGQTDFPAHSRKPAPSNEPEYLCKWMGLPYSECSWEDEALIGKKFQNCIDSFHSRNNSKTIPTRECKALKQRPRFVALKKQPAYLGGENLELRDYQLEGLNWLAHSWCKNNSVILADEMGLGKTIQTISFLSYLFHQHQLYGPFLIVVPLSTLTSWQREFEIWAPEINVVVYIGDLMSRNTIREYEWIHSQTKRLKFNALITTYEILLKDKTVLGSINWAFLGVDEAHRLKNDDSLLYKTLIDFKSNHRLLITGTPLQNSLKELWSLLHFIMPEKFEFWEDFEEDHGKGRENGYQSLHKVLEPFLLRRVKKDVEKSLPAKVEQILRVEMSALQKQYYKWILTRNYKALAKGTRGSTSGFLNIVMELKKCCNHCYLIKPPEENERENGQEILLSLIRSSGKLILLDKLLTRLRERGNRVLIFSQMVRMLDILAEYLTIKHYPFQRLDGSIKGEIRKQALDHFNADGSEDFCFLLSTRAGGLGINLASADTVVIFDSDWNPQNDLQAQARAHRIGQKKQVNIYRLVTKGTVEEEIIERAKKKMVLDHLVIQRMDTTGRTILENNSGRSNSNPFNKEELTAILKFGAEDLFKELEGEESEPQEMDIDEILRLAETRENEVSTSATDELLSQFKVANFATMEDEEELEERPHKDWDEIIPEEQRKKVEEEERQKELEEIYMLPRIRSSTKKAQTNDSDSDTESKRQAQRSSASESETEDSDDDKKPKRRGRPRSVRKDLVEGFTDAEIRRFIKAYKKFGLPLERLECIARDAELVDKSVADLKRLGELIHNSCVSAMQEYEEQLKENASEGKGPGKRRGPTIKISGVQVNVKSIIQHEEEFEMLHKSIPVDPEEKKKYCLTCRVKAAHFDVEWGVEDDSRLLLGIYEHGYGNWELIKTDPELKLTDKILPVETDKKPQGKQLQTRADYLLKLLRKGLEKKGAVTGGEEAKLKKRKPRVKKENKVPRLKEEHGIELSSPRHSDNPSEEGEVKDDGLEKSPMKKKQKKKENKENKEKQMSSRKDKEGDKERKKSKDKKEKPKSGDAKSSSKSKRSQGPVHITAGSEPVPIGEDEDDDLDQETFSICKERMRPVKKALKQLDKPDKGLNVQEQLEHTRNCLLKIGDRIAECLKAYSDQEHIKLWRRNLWIFVSKFTEFDARKLHKLYKMAHKKRSQEEEEQKKKDDVTGGKKPFRPEASGSSRDSLISQSHTSHNLHPQKPHLPASHGPQMHGHPRDNYNHPNKRHFSNADRGDWQRERKFNYGGGNNNPPWGSDRHHQYEQHWYKDHHYGDRRHMDAHRSGSYRPNNMSRKRPYDQYSSDRDHRGHRDYYDRYAKGCETPGANLCQELFLGRK

SEQ ID NO: 96972 - DNA, 9374 bp, Artificial Sequence
  derived and/or modified sequence
ctcagagctgggaaggaggctctagatggcggctgtgccttagagagagcgcgctctgctccctgcctttgcctcactttacgcaactttccctaactttcgggcagcctcagggggcccccgtagccccctgcctttcctagggacttactggggtcgattcgaacctttttttgggagaaaagcagcttttaggagctttcttttcgtgccttgttggaaagaagcagccgtactgagagcccaggtcgttgttttttccagcttagaagccatggcgcacctccatttttgtgcgctctcctaatgaggttttttttctttcggacctgttttagtattaattattgctttatttttttgaccagttaacatatttgagggttattttatttatttttcgttttttaacggaggattttgcctttatttttaattatttgggatctgatatttttctactagtagataggactcttggtttggacatactacatggatcagtaaatacctgggcacaggacttcaaagcaaacacagattccccctcccccttaatatttaagaattaaaagatgatgagaaataaggacaaaagccaagaggaggacagttcgctacacagcaatgcatcgagtcactcagcctctgaagaagcttcgggttcagactcaggcagtcagtcggaaagtgagcagggaagtgatccaggaagtggacatggcagcgagtcgaacagcagctctgaatcttctgagagtcagtcggaatctgagagcgaatcagcaggttccaaatcccagccagtcctcccagaagccaaagagaagccagcctctaagaaggaacggatagctgatgtgaagaagatgtgggaagaatatcctgatgtttatggggtcaggcggtcaaaccgaagcagacaagaaccatcgcgatttaatattaaggaagaggcaagtagcgggtctgagagtgggagcccaaaaagaagaggccagaggcagctgaaaaaacaagaaaaatggaaacaggaaccctcagaagatgaacaggaacaaggcaccagtgcagagagtgagccagaacaaaaaaaagtaaaagccagaagacctgtccccagaagaacagtgcccaaacctcgtgttaaaaagcagccgaagactcagcgtggaaagagaaaaaagcaagattcttctgatgaggatgatgatgatgacgaagctcccaaaaggcagactcgtcgaagagcggctaaaaacgttagttacaaagaagatgatgactttgagactgactcagatgatctcattgaaatgactggagaaggagttgatgaacagcaagataatagtgaaactattgaaaaggtcttagattcaagactgggaaagaaaggagccactggagcatctactactgtatatgcgattgaagctaatggcgaccctagtggtgactttgacactgaaaaggatgaaggtgaaatccagtacctcatcaagtggaagggttggtcttacatccacagcacatgggagagtgaagaatccttacagcaacagaaagtgaagggcctaaaaaaactagagaacttcaagaaaaaagaggacgaaatcaaacaatggttagggaaagtttctcctgaagatgtagaatatttcaattgccaacaggagctggcttcagagttgaataaacagtatcagatagtagaaagagtaatagctgtgaagacaagtaaatctacattgggtcaaacagattttccagctcatagtcggaagccggcaccctcaaatgagcccgaatatctatgtaaatggatgggactcccctattcagagtgtagctgggaagatgaagccctcattggaaagaaattccagaattgcattgacagcttccacagtaggaacaactcaaaaaccatcccaacaagagaatgcaaggccctgaagcagagaccacgatttgtagctttaaagaaacaacctgcatatttaggaggggagaatctggaacttcgagattatcagctagaaggtctaaactggctagctcattcctggtgcaaaaataatagtgtaatccttgctgatgaaatgggcctaggaaagaccatccagaccatatcattcctctcctacctgttccaccaacaccagctgtatggcccctttcttatagtcgtccctttatccaccctcacctcatggcagagagagtttgaaatctgggcaccagagattaacgtagtggtttacataggtgacctgatgagcagaaatacgatacgggaatatgaatggattcattcccaaaccaaaagattgaagttcaacgcacttataacaacatatgagatcctcttgaaagataagactgtgctgggcagtattaactgggcctttctgggagtggatgaagcccatcggttgaagaatgatgactctttattgtataaaactctgattgatttcaagtccaaccataggctcctgattacggggacccctcttcagaattccctcaaagagctctggtccttgctgcactttattatgccggagaagtttgaattttgggaagattttgaagaagaccatgggaaggggagagaaaatggctaccagagtcttcataaggtgctagagcctttccttctccggagagtcaaaaaagatgtggagaaatcccttcctgctaaagtggaacagattctcagggtggagatgtcagcccttcagaaacagtattacaagtggattctgaccaggaattacaaggctcttgccaaaggaacaagaggcagcacatctggttttcttaatattgtgatggaactgaaaaaatgttgcaaccactgctatctgattaaaccccctgaagaaaatgaaagggaaaatggacaggagattcttctgtccctcataaggagcagtgggaagttgattttattagacaaactgttgacaagacttcgagaaagggggaatcgagtgcttatcttctctcagatggtgagaatgttggatatcctggctgaatacctaactattaaacactatcctttccagcgtctggatggttccatcaagggagaaatccgaaaacaggcactggaccacttcaatgcagatgggtctgaggacttctgtttcctgctctcgacaagggctggtggcctgggaatcaatttggcttcagcggacacagtcgtcatctttgactctgactggaacccccagaatgacttgcaggcacaagcccgagcgcatagaattggtcaaaagaagcaggtaaatatttaccgcttagttacaaaggggactgtggaggaggagatcatagaacgggccaaaaagaagatggtattagatcatctggtgattcagcgcatggacaccactggccggacgatcctggaaaacaactcaggaaggtccaactcaaatccttttaataaagaagagctgacagctattttgaaatttggagcagaggatctcttcaaagaactggaaggggaggaatcagaacctcaggaaatggatatagatgaaattttgcggttggctgaaacgagagagaatgaagtgtcaacaagtgcaacagatgaacttctatcacagtttaaggttgccaactttgcaacaatggaagatgaagaagagctagaagagcgtcctcacaaggactgggatgagatcattccagaggaacaaaggaaaaaagtagaggaggaagagcggcagaaggagctagaagaaatttatatgctgcctcgaattcggagttccactaaaaaggctcagacaaatgacagtgactctgacactgagtctaagaggcaggcccagagatcctctgcttctgagagtgaaacggaagactctgatgatgacaagaagccaaagcgcagagggcgtccgaggagtgtgcggaaggacctcgtggagggatttactgatgcagagatccgaaggttcatcaaggcttataagaagtttggtctccctcttgaacggctggagtgcatagcacgtgatgctgagctggtagataagtcggtggcagatctgaagcgcctgggtgaactgatccacaacagctgtgtgtcagcaatgcaggaatacgaagagcagctgaaagaaaatgccagcgagggaaaaggaccagggaaaaggagaggtccaacaatcaagatatccggagttcaggttaatgtgaaatccattatccaacatgaagaggagtttgagatgctgcataaatctatccctgtggaccctgaagaaaaaaaaaaatactgcttaacctgtcgtgtcaaagctgcacattttgatgtagagtggggggtggaagatgattctcgcctgttgctggggatttatgaacatggctatggaaactgggagttaattaaaacagacccagagcttaaattaactgacaaaattctgccggtggagacagataaaaagcctcaggggaagcagctacagacccgagcggattacttgttgaagctgctcagaaagggtctggagaagaagggggctgtgacaggtggggaagaggccaaattaaagaagcggaagcctcgggtaaagaaggaaaacaaagtgcccaggctgaaagaggagcatggaattgagctttcatctcctaggcattcagataatccatcagaagagggagaagtgaaagatgatggcttggaaaaaagtccaatgaaaaaaaaacagaagaagaaagagaacaaggagaacaaggagaaacaaatgagttctaggaaagacaaagaaggggacaaggaaagaaagaagtcaaaagataagaaagagaagcctaaaagtggtgatgccaaatcttcgagtaaatcaaagcgatctcagggtcctgtccatattacagcaggaagtgaacctgtccccattggagaggatgaggatgatgatctggaccaggagacattcagcatatgtaaggagaggatgaggcccgtgaaaaaggcactgaaacagctcgacaaacctgacaaggggctcaacgtgcaagaacagctggaacacacccggaactgcctgctgaaaatcggagaccggatagccgagtgccttaaagcctactcagatcaggagcacatcaaactctggaggaggaacctatggatttttgtttccaagtttacagaatttgatgctcgaaaactgcataagttatacaagatggctcataagaaaaggtctcaagaagaagaggagcaaaagaagaaagacgacgtgactgggggtaagaaaccatttcgtccagaggcctcaggctccagccgggactctctgatatctcagtcccatacctcacacaaccttcaccctcagaagcctcatttgcctgcctcccatggcccacagatgcatggacacccaagagataactacaatcaccccaacaagagacacttcagtaatgcagatcgaggagactggcagagggaaagaaagttcaactatggtggtggcaacaacaatccaccatggggaagcgacaggcaccatcagtatgagcagcactggtacaaggaccaccattatggggaccggcgacatatggatgcccaccgttccggaagctatcgacccaacaacatgtccagaaagaggccttatgaccagtacagcagtgaccgagaccaccggggacacagagattattatgacaggcaccatcatgactccaagcggaggagatccgatgaatttaggcctcaaaattaccaccagcaggatttccgacgaatgtctgatcaccgccccgctatgggctaccatggccagggaccctcagaccattaccgctctttccacacagataaactgggggaatataaacagcctctacccccattgcaccctgcagtctcagatcctcgctcacccccttctcagaaatctcctcacgattccaagtcacccctggatcataggtctcctttggagagatcactagaacagaaaaacaacccagattataactggaatgttcggaaaacataaaggacagctcgtaaaggagagagtaagagtcaccaaacacgtggatatttttggtctgatcctacagtagccggttatctagaccagtaagtggagttttggacatgctgctgctgtcaactcactggctgaaggagcacttcaaggaatgggaggcctttcactgggtccagctctgattcgggtcaccactcctgcactttggcaccccatcccattccagcctagttctggcctcccactttgacgggcacttggaggaggagctgactgtgtgtgtaccagcttcactgggatgtgtttccccagtcaaggaacaggggatcttcagagtcatgaatgttttcttgccagggtcagtgttcccaggaccttagtgcatggtcggggcaggaactggtgcatggaggctgctgggacctggtgaacagtgtgtgatttggttgatttggttcactctgacatgatggatgctgctgatggggagtggcgagttggggcaagcgggtggggacaagcataggacttgaaggggagcaggtacacccctcaaatgtgttcttgggagaagtgatacactcggcctcattatgtgaaacctgtgggtggggttggggtggagaagtagagagagggcaacagcttccacaactgcttcatctctgccaacactaatttttcccacactgtctttgtacatttcagagctttggtctcctgagtgggcctccttttcccactgtgccagggaaggtaggtttctctggctgactgagtactgtgagtgaggcaacactgatgccagcatgggtcttacttgactggggagtaggctgagtgaggggtagggtggggtaggtggggagtagtgtggccagggaactggaatccctggtggatttctgattcctgtggtgagaaggaaagctacaggacctggagaaggggatgcagaggcaggcctgctgaccaacttgttgcaatcacaaaggtgggggtcctggtgcaggcagtgaacaggcttctaatgtggggttcagtagtgccagcaagtgggggaaactttcagtattgcgctaggtcaacacttcctgctgcatttccttccctttgcacagcttgaagaaatagagtagacagaatcacacatcatgtggtgggcagatggaaataagtacctgtggtgaacaagtttctactgtagttggagatcattagaattgaattcagtttctcttagaatataatcaggtataaacctaagttaaactttttcccaaacaaggagcatccaaagacacagtgacttgagctatagatagtaaaaatcatacgagagttgaactgagtcaggtttaggaagcaagtttggttgcatcaattaagcaggctcttttcaattgactgatgctggggccttcagttttattctcagtatagattgccagtattgttaagagtatccaaaggcctttctagatggagacagaataactgacttgaacatacagtgtgcctgtaagtgtccaggctcagagctggtgaaaacccttctgttgggcgtgtgcagggttaaactcctgaagtaacttgtgaggacttcagtgcttgctggtgtcctgggcagcaccatgaatgcctttaccaagacatgccaagttggatcccccgaatgaagcagatgtggctgtggtgtgacccttgctccctgctacacagagcatcgcagggctggcctgtgtggtttccagatgagggtctgggtcccggaagcttgtgttgagagctcagtggacccaccccgcttgctgaaccctcacagttcttggggttgtccagcctggacttgtagcacacatgtcctgaagcaaagctccggtgactgcatgagccacctggccacagtcctcccatggagggcctgccgtgacgctcagtggagagggcagggcctgtgtctccacttaggccacacagtgatgaggaaaccacagatggagcttcttgccgataatactgactctagcccatgattgccttgcccaagccaaagaggaaggttaggttggcttgtcgagcccttgagcgttgggagatggggtgggaaggaggtgagcccctgcagagagttgggtagtgtccttcaggaatgaaaggaggggcaaaggagtcaccagaggtcctgcatttccatcagggtttccacagtcatcagggcttctctcttgagttgctgataggagatgtgagttatgcccagagatgtcttatcgtgaggaaaaagaaacttccttttgttcacatttaggactctcagtgccatatgaagtagcaaaaggcagtatcggccagatcagtgttacattgattctaaaattacagtgtccccattagacaactattttaggtgctggagtatgtttgaagagtgtgctgggaaaaaggaagcatttcttcattgatttaaatcagtatgaatattatatgcctaaataaaaaatttgcacaggtaaattctctcacttgtgaatgggagaagctgccccaggaatctgtgaggatggtattccctggagtctggctttgaaagatttcattgttggtagaaataacaggttgagaaagagggagttagcatcacctaaaacctgcacgtgaacaagggttgacatgatacactatggccttagaaaagggccaggtgaaaccccaagctaatcactgcggtctttcagagccggacagacaggtgccagcagagcccggggctcactctcctttcagtcattcctcagcccttcgaagggaagcccaaacactttgcacgctgtgctgcagacattctggcctggtgtgtctgaaagttgcatcagtcctcacggtgcaaacacagttgatttaggaagtcacacaatgacactgaaatcctacagaccaaaatccacttgtcagcaggagcagcagcccaggcccagcaccagcggtcttccggctcctctgagggctgccacgttgggcgaggggagccatgccaagggtccaggctgctttaggccatctgtgccccactcatctggggacagatggtttttctttattgtaaaattgtggacttttaaaacctgttgactaaacagtaattaatttatatttgtgaaaaatgccactgtcctagtgatttctgatgtaaataatgttgtttatatagtatgtattaaattttcctacattgtaaaactgctgtacttttgattcttgtatattaaaaagtgttactgagcatttttagaattgggctaacaaaaaaaaaaa

SEQ ID NO: 96973 - DNA, 5487 bp, Artificial Sequence
  derived and/or modified sequence
atgatgcggaacaaggataaatcccaggaggaagacagcagcctgcacagtaacgcttctagtcactcggcttccgaagaagcgtccgggagtgactcaggctcgcagtccgagagtgagcaagggtcggatccgggaagcgggcatggatccgagtctaacagctcttccgagtcgtctgagtcccagtcagagtccgagagcgagagcgctggatcaaaatctcaaccagtgctgcccgaagcaaaggagaaaccggctagtaaaaaggagcgcatcgctgacgtgaagaaaatgtgggaggaataccccgacgtctatggcgtccgtcgctctaaccggtctcgacaagagccgtctcgcttcaacatcaaggaagaggctagctccggctcagagtctggcagtccaaaacgccgaggacagagacagctcaagaagcaggaaaagtggaaacaggagcctagcgaggacgaacaggagcagggcacttccgctgaaagcgagcccgaacagaaaaaagtgaaggctaggagaccggtgcccaggagaaccgtgcctaagcctcgggtgaaaaaacagccaaagacgcagagagggaagaggaaaaagcaggacagcagcgatgaggatgacgacgatgatgaagccccaaaacggcagaccagaagacgcgccgccaaaaatgtttcatataaagaggacgatgacttcgaaaccgactcagatgacctgatcgaaatgacaggagaaggagtggacgaacagcaggacaattcagaaacaattgagaaagtgcttgatagtcgcttggggaagaaaggcgcgactggcgccagtaccactgtgtacgccatagaagcaaatggggatccgagcggcgacttcgataccgagaaagatgaaggggagatccagtatctgatcaagtggaagggctggagttacatccattcaacctgggaatcagaagagagcctgcaacagcagaaagtgaagggtctgaaaaaactggaaaattttaagaagaaggaggacgagattaaacaatggctggggaaagtatcacctgaggacgtggagtactttaactgtcaacaggagctagcaagtgagcttaacaagcaatatcagatcgtggaacgagtgattgcggtgaaaactagcaagtctaccctaggacagacagactttccagcccatagcaggaagccagcaccatcgaatgaaccggagtatctgtgcaaatggatggggctgccatattctgagtgtagttgggaggacgaagccctgatcggaaagaagttccagaattgtattgactcctttcatagtagaaataatagtaagaccatccctacgagggaatgcaaggcgttaaaacagcggccacggtttgtggctctgaagaaacaacctgcctacctgggaggagagaacttggagctacgtgattaccaattagaaggactcaattggctggctcactcgtggtgcaaaaacaattccgttatccttgctgatgagatgggacttggcaagaccatacaaacaatatccttcctatcttacctctttcaccagcaccaattatacggccctttcctgatcgtggtcccactttcgactttgacctcctggcagagggaatttgaaatttgggcacccgagattaatgtggttgtgtatatcggggatttaatgagtcggaacaccattcgcgaatacgagtggattcacagtcagactaagagattaaaatttaatgccctgattacgacctacgagatcctgttgaaggacaaaactgttctgggatcaattaactgggcgttcctcggagttgatgaagcgcatcggctcaagaatgacgatagcctgctttataaaacactgatagacttcaagtcaaaccatagactgctgataactgggacgcctctacagaactccctgaaggaactctggtctctgctccacttcatcatgccagaaaaattcgagttctgggaggacttcgaagaggatcacggaaaaggtcgagagaacggatatcaaagcctccataaggtgttggaaccattcctccttcgtcgggtaaagaaagatgtcgagaaatccctgccggctaaagtcgagcagatccttcgggttgaaatgtccgcactgcagaagcagtactacaagtggatccttacgcggaattataaggccctcgcaaaagggacacggggaagcacaagcgggttcctgaacattgtaatggagttaaaaaagtgttgtaatcattgctatttaataaaacccccagaggagaatgaaagagagaacgggcaggaaatcctgctgtctctgatccggtccagtgggaagcttatcttgctcgataaattactgactcgtctgcgcgagaggggcaatcgggtcttaatcttcagccagatggtaagaatgctggatatccttgcagagtatcttactattaaacattatccttttcagaggttagatggctccatcaagggcgaaatcagaaagcaagccctagaccatttcaatgccgatggcagcgaagacttctgcttcttgctctctactagggccgggggactgggcatcaatctggctagcgccgataccgtggtgatcttcgactccgattggaaccctcagaacgacctgcaggctcaggctcgcgctcataggattgggcagaagaaacaggtgaacatttacaggcttgtgactaaagggaccgtcgaagaagaaataatcgagagggcaaagaaaaagatggtattagaccatctagtgatccagcggatggacactacaggtaggacaatcctggaaaacaattccgggcggagtaacagtaacccattcaacaaagaagagttgactgctatcctgaaattcggcgctgaggacctgttcaaagaattggaaggtgaagaatctgaaccccaggaaatggatatcgatgagatcttaaggttggcagagacccgagagaatgaggtctccacctccgccaccgatgaactcttgagtcagtttaaagtggccaatttcgccaccatggaagacgaggaggaacttgaagagaggccccataaggactgggatgagatcatccccgaggagcagaggaagaaagtcgaggaggaagagcggcagaaggaactggaggaaatttacatgctgcctcggatcaggagctcaacaaagaaggcccaaacgaacgactctgactccgacactgaatcaaaaagacaggcacaacgcagttccgcaagcgagtctgaaaccgaagatagcgacgatgacaaaaaacctaaacggagaggccgccctcggtccgtgcgcaaagacctagtggaggggtttaccgacgctgagatcaggcggttcataaaagcttacaagaaatttggacttccattggaacgcctggagtgtatcgccagagatgcagagcttgtggacaagagtgtcgcggacctgaagcgtctaggtgaattaatccacaattcatgcgtgtccgccatgcaggagtatgaagaacagctcaaagaaaatgctagcgaaggaaaagggcctggcaagcgccgaggacctacaattaagatttcaggcgtacaagtaaacgtaaagagcataatccagcacgaggaggaatttgagatgctacataagtccataccggtggatcccgaggagaaaaaaaagtattgtctgacttgtagagttaaggcggcccacttcgacgtagaatggggagtagaagatgatagccgacttctgcttggcatttatgagcacggctacggtaattgggagcttatcaaaactgatccagaattaaagctgacagacaagattctgccagtggagacagacaagaaacctcagggaaaacaacttcagacgcgcgccgactacttgttaaagttgctgaggaaaggtctggagaagaagggggcggtgaccggaggggaggaagctaagttgaagaaacgcaaaccacgcgtgaagaaagagaataaggtgccccgattgaaggaagaacacggcattgaactctcctccccacgacatagcgataatccaagtgaggagggcgaagtgaaagatgacggcctcgagaagagccccatgaagaaaaagcagaaaaaaaaggagaacaaagagaataaggagaaacagatgtctagcagaaaggataaggagggggacaaggagagaaagaagagcaaggacaagaaggagaaacccaagagtggtgacgctaagagttcctccaaaagcaaacgctcacaaggccccgtccatatcactgcgggcagtgaaccagtgcccatcggtgaggatgaggatgatgacctcgatcaggagactttttcaatctgcaaggaaaggatgaggcctgtgaagaaagccctgaagcagctggataaaccagataaaggcttaaacgttcaagagcagctcgaacacacacgcaattgccttctcaaaatcggggaccgcatcgcagaatgccttaaagcatacagtgatcaggagcacataaaactgtggcggcgcaacctatggattttcgtctccaagtttactgagttcgacgcacggaagctgcacaaactttacaaaatggctcacaagaagaggagtcaggaggaagaggaacagaagaaaaaggacgacgtaacaggtggtaagaagccctttagacccgaggccagcggttctagtcgggatagccttattagtcagtctcatacatcccacaacctgcacccacagaaacctcaccttccggccagccacggtccacagatgcatggtcatccccgagacaactataaccatccgaacaagcggcacttctcgaatgccgacagaggagattggcagagagaacgcaaattcaattacggtggagggaataacaatccaccctggggtagtgaccggcatcaccagtatgagcagcactggtataaagaccaccactatggagatcgccgacacatggacgcacacaggagcggctcctataggccaaacaacatgagtagaaaaagaccatatgatcagtactcgtcagatcgtgaccacagagggcaccgggattactatgatagacatcatcatgattccaaacggaggaggagtgacgagttccggccacagaactaccaccaacaagactttcgcagaatgagtgaccatcgcccagctatgggctaccatggacaaggcccaagcgaccattacagatcctttcatactgataaattgggcgagtacaaacaacctctgcctcctctccaccccgcagtgtcggatccaagatcgccaccctcccagaaatcccctcacgactcaaagtcacctctcgatcatcgcagtcctctggagcggtctctagaacagaagaataacccagactataattggaatgtgcgcaagacctag

SEQ ID NO: 96974 - DNA, 5220 bp, Artificial Sequence
  derived and/or modified sequence
atgatgcggaacaaagacaagagtcaggaagaggactcctcattacacagcaatgcttcatcacatagcgcctcagaagaagccagtggatctgatagtggcagccaaagcgaaagcgagcagggatccgaccctgggagtggccatggatcggagtctaatagttcgagtgagtcctcagagagccagtccgaaagcgaatccgaaagtgccggatcaaagtcacaaccagttctcccagaagcgaaagaaaaaccagcatccaaaaaagaaaggattgcagatgtgaagaagatgtgggaagagtaccccgatgtgtatggggtgagacggagtaatcggagtagacaggagccgagtagatttaacataaaagaagaagcatccagtgggtcagaaagtggttcgcctaagcggaggggtcagcgccaattgaaaaaacaggagaaatggaagcaggaaccatctgaggacgaacaagagcaaggcacctccgccgaatcagagccagaacaaaagaaggtgaaggcacggcgacctgtcccccgccgaacggtaccaaagccacgagtgaagaaacagccaaagacgcaacggggaaagcgcaaaaaacaggacagctcagacgaggacgatgacgatgatgaggctccaaaacggcagacgcggagaagagctgccaaaaatgtcagctataaggaggacgacgactttgaaaccgacagcgacgaccttatcgaaatgacaggcgaaggtgtcgacgaacagcaggataattcggaaacgatcgaaaaagtgttagatagcaggttgggcaagaaaggggccactggcgcttctactaccgtgtatgccatcgaggctaacggagatccctctggagacttcgacactgaaaaggacgaaggggagatccagtacctcattaagtggaagggatggagttatattcattctacctgggagagcgaagagagtctccagcaacagaaggtaaaaggattgaaaaaacttgagaactttaaaaagaaggaagacgagatcaagcaatggctgggcaaggtatccccggaagacgtggagtatttcaactgtcagcaggagctggccagcgagttaaacaagcaataccagatagtggagcgtgtcattgccgttaaaacctccaaatccaccctgggccagaccgattttccggcccactcgcgtaagccagccccaagtaacgaacccgagtatctctgcaagtggatggggcttccgtactcggaatgttcttgggaggatgaagcgttaataggcaaaaagtttcagaattgtatcgattctttccatagcaggaacaactccaagaccatcccgacccgagagtgtaaagctctcaaacagcgcccccgtttcgtggcactgaagaaacaacccgcctacctgggcggggaaaatctggaactacgcgactaccagcttgaaggactgaactggctggcacattcgtggtgtaagaacaactcagtgattctggcggacgagatgggactgggtaaaacaattcagaccattagttttctgtcctatctgttccatcagcaccagttgtacggcccttttctgattgtcgtgccacttagcactctgacctcttggcaacgggagttcgagatctgggcccccgaaataaatgtcgttgtttacataggtgatctaatgtctaggaataccataagagaatatgaatggatccacagccagaccaagaggctgaaatttaacgctctgattaccacatacgaaatactgctcaaggacaaaacagtcctcggatccattaattgggcctttctgggcgtcgatgaagcccaccgcctgaagaatgatgactcgctgctgtacaaaactctgatagattttaagtccaaccacaggctgctgatcacgggtactcccctgcaaaatagtctgaaggaactttggtccctcctgcacttcatcatgcccgagaagttcgaattctgggaagatttcgaggaggaccacggcaagggaagagagaacggctaccagtctctccataaagtgctggaaccttttctcttgcggagagtaaagaaagacgtggagaaatctctacctgcaaaagtggaacagatcctgcgagtcgaaatgtccgccctacagaaacagtactataagtggattcttacgaggaattacaaggccctggctaaaggcacacgcggctccacatccggtttcctgaatattgttatggaactgaagaagtgttgcaatcattgctacctgatcaagccgcctgaggaaaatgagcgcgaaaatggccaggagattctactgagcctcattcgttcttccgggaagctgattctgctcgataagctgttaacccgcctgagggaacgtggaaatagggtgctgatctttagccagatggtaagaatgctagacatcttggcagagtacctcactatcaaacactatccgtttcagcggctcgatggcagtatcaaaggcgaaatcagaaagcaggccttagaccacttcaatgcagacgggagtgaagacttttgttttttgctgtccactagggcgggcggtcttggaattaatctggcatctgccgatactgttgtcattttcgactctgattggaatcctcaaaatgaccttcaggcccaagccagggctcacagaattggccagaaaaagcaagtgaacatatatcgcctggtgacaaagggaactgtggaagaagaaataatagaaagagccaagaagaaaatggttctggaccacctcgtgatacagcgcatggacacaaccggaagaactattcttgaaaacaactccggcaggtccaattctaatcccttcaacaaggaagaactgactgctattctcaagttcggtgcggaagatctgtttaaagagctagagggagaggaatccgagcctcaggagatggacatcgatgaaatcctgagactggctgagacacgagaaaatgaggtcagcacctcagcaacagacgagctgctgtctcagtttaaggtggcaaacttcgcaacaatggaggatgaagaagagctggaggagcgtccccacaaggactgggatgaaatcatccctgaggagcagcgtaaaaaggtggaggaagaggagaggcagaaggaacttgaggaaatatacatgctgcccagaattcgaagctctacaaagaaagcacagaccaacgacagcgatagcgataccgaatcaaaacggcaggcccagcgaagctctgcctcagagtcggagaccgaggatagcgatgatgacaagaaaccgaagcgtcggggcagaccacggagcgtccgcaaggatctggtggaaggatttacggacgcagaaatacgacgcttcattaaagcatataaaaagttcgggctccccctcgagagactggaatgcattgcccgggatgccgagctcgtggacaaaagcgtagctgacctcaagagacttggtgagcttattcataactcctgcgtctccgccatgcaggagtacgaggagcagttgaaggaaaacgcctcagaaggcaaggggcccggcaaaaggcgaggacctaccatcaaaatcagtggtgttcaggtgaatgtgaaaagtataatacagcatgaggaggagtttgaaatgttgcacaagtctatccctgtcgatccagaagagaagaagaagtactgcctcacatgccgggtgaaagccgcccacttcgacgtcgaatggggggtcgaggatgactcacgtctcctgcttggcatatatgagcatggatacggaaactgggagctaatcaagaccgacccagaactcaaactgacggacaaaatactgcccgtggaaacggacaaaaaaccccagggcaagcagcttcagactcgagctgactatctcttaaagcttcttagaaaaggactcgagaagaaaggggcagtgaccgggggcgaggaagccaagctcaaaaaaagaaaaccacgtgttaaaaaggagaacaaagtgccacgattgaaagaggagcatggcatagaactgtctagcccacggcatagcgataacccctccgaagaaggtgaagttaaggacgatggcctggaaaagtccccaatgaagaaaaaacaaaaaaaaaaagaaaataaagaaaacaaggagaagcagatgagttcgcgaaaagataaagagggggacaaagagagaaagaagtcaaaagacaaaaaggaaaagccaaagtccggagatgcgaaaagtagtagcaaatctaagcgctcccagggcccagtgcatattactgcaggctctgagcctgtccccatcggagaggatgaagacgacgacctagaccaagaaactttcagcatttgcaaagagaggatgaggcctgtgaagaaagcactgaagcagttggacaagcccgataaaggtctgaatgttcaggaacagctggagcacaccaggaactgcctgctgaaaatcggggaccggattgccgagtgtctgaaagcctattctgaccaggaacacatcaagctgtggaggcggaacttgtggatctttgtcagtaagttcaccgagtttgatgcccggaagctccacaagctgtataagatggcccataagaaacgatcccaggaagaggaggaacagaagaagaaagatgacgttactggaggcaagaagccttttagaccagaagcctccggctccagccgggactcactgattagtcagtcccacactagtcacaatctgcaccctcagaaaccgcacctccccgcttcccatggtccacaaatgcacggccaccctcgggataattacaaccaccccaataagagacattttagcaatgcagaccgcggggactggcaacgcgagaggaaattcaattatgggggtgggaacaataatcctccatggggttctgataggcaccatcaatatgaacagcactggtacaaagatcaccactatggagaccgcagacacatggacgcacacaggtcaggcagctacaggcctaacaacatgtcccgcaagcgaccttatgatcagtattcctccgaccgggatcatcgaggacaccgcgactactatgatagatatgcgaagggatgtgaaacgcccggggcaaatctttgtcaggaactcttcctgggccggaagtag

SEQ ID NO: 96975 - DNA, 5487 bp, Artificial Sequence
  derived and/or modified sequence
atgatgaggaacaaggacaagagccaggaggaggacagcagcctgcacagcaatgccagcagccacagcgccagcgaggaggccagcggcagtgacagcggcagccagagcgagagcgagcagggcagtgaccccggcagcggccacggcagcgagagcaacagcagcagcgagagcagcgagagccagagcgagagcgagagcgagagcgctggcagcaagagccagcctgtgctgcctgaggccaaggagaagccagccagcaagaaggagagaattgctgatgtgaagaagatgtgggaggagtacccagatgtgtatggagtgcggcgcagcaacagaagccggcaggagcccagccgcttcaacatcaaggaggaggccagcagcggcagcgagagcggcagccccaagagaagaggccagaggcagctgaagaagcaggagaagtggaagcaggagcccagtgaagatgagcaggagcagggcaccagcgctgagagcgagcctgagcagaagaaggtgaaggcccggcggcctgtgcccaggagaacagtgcccaagccccgggtgaagaagcagcccaagacccagaggggcaagaggaagaagcaggacagcagtgatgaagatgatgatgatgatgaggcccccaagaggcagacccggcggcgggccgccaagaatgtgtcctacaaggaggatgatgactttgaaacagacagtgatgacctgattgagatgactggagagggcgtggatgagcagcaggacaacagcgagaccatcgagaaggtgctggacagccggctgggcaagaagggggccactggagccagcaccaccgtgtatgccatcgaggccaatggagaccccagcggggactttgacacagagaaggatgaaggagagatccagtacctgatcaagtggaagggctggagctacatccacagcacctgggagagcgaggagagcctgcagcagcagaaggtgaagggcctgaagaagctggagaacttcaagaagaaggaggatgagatcaagcagtggctgggcaaggtgtccccagaagatgtggagtacttcaactgccagcaggagctggccagcgagctgaacaagcagtaccagatcgtggagcgggtgattgctgtgaagaccagcaagagcaccctgggccagacagacttccctgcccacagcaggaagccagcccccagcaatgaacctgagtacctgtgcaagtggatgggcctgccctacagcgagtgctcctgggaggatgaggccctgattggcaagaagttccagaactgcatcgacagcttccacagcaggaacaacagcaagaccatccccacccgggagtgcaaggccctgaagcagaggcccaggtttgtggccctgaagaagcagcctgcctacctgggcggggagaacctggagctgcgggactaccagctggagggcctgaactggctggcccacagctggtgcaagaacaacagcgtcatcctggctgatgagatgggcctgggcaagaccatccagaccatctccttcctgagctacctgttccaccagcaccagctgtatggccccttcctgattgtggtgcccctgagcaccctgacctcctggcagcgggagtttgagatctgggcccctgagatcaacgtggtggtgtacatcggggacctgatgagcaggaacaccatccgggagtatgagtggatccacagccagaccaagaggctgaagttcaatgccctgatcaccacctatgagatcctgctgaaggacaagacagtgctgggcagcatcaactgggccttcctgggcgtggatgaggcccaccggctgaagaatgatgacagcctgctgtacaagaccctgattgacttcaagagcaaccaccggctgctgatcaccggcacccccctgcagaacagcctgaaggagctgtggagcctgctgcacttcatcatgcctgagaagtttgagttctgggaggactttgaggaggaccacggcaagggcagagaaaatggctaccagagcctgcacaaggtgctggagcccttcctgctgcggcgggtgaagaaggatgtggagaagagcctgcctgccaaggtggagcagatcctgcgggtggagatgtctgccctgcagaagcagtactacaagtggatcctgaccaggaactacaaggccctggccaagggcacccggggcagcaccagcggcttcctgaacatcgtgatggagctgaagaagtgctgcaaccactgctacctgatcaagcccccagaagaaaatgaaagagaaaatggccaggagatcctgctgagcctcatccgcagcagcggcaagctgatcctgctggacaagctgctgacccggctgcgggagcggggcaacagagtgctgatcttcagccagatggtgaggatgctggacatcctggccgagtacctgaccatcaagcactaccccttccagaggctggatggcagcatcaagggggagatcaggaagcaggccctggaccacttcaatgctgatggcagcgaggacttctgcttcctgctgagcaccagggctgggggcctgggcatcaacctggccagcgctgacacagtggtgatctttgacagcgactggaacccccagaatgacctgcaggcccaggcccgggcccaccgcatcggccagaagaagcaggtgaacatctaccgcctggtgaccaagggcaccgtggaggaggagatcatcgagcgggccaagaagaagatggtgctggaccacctggtgatccagaggatggacaccaccggccgcaccatcctggagaacaacagcggccgcagcaacagcaaccccttcaacaaggaggagctgacagccatcctgaagtttggagcagaagatctcttcaaggagctggagggggaggagagcgagccccaggagatggacattgatgagatcctgcggctggccgagacccgggagaatgaggtgtccaccagcgccacagatgagctgctgagccagttcaaggtggccaactttgccaccatggaggatgaggaggagctggaggagcggccccacaaggactgggatgagatcatccctgaggagcagaggaagaaggtggaggaggaggagcggcagaaggagctggaggagatctacatgctgccccgcatccgcagcagcaccaagaaggcccagaccaatgacagcgacagcgacacagagagcaagaggcaggcccagaggagcagcgccagcgagagcgagacagaggacagtgatgatgacaagaagcccaagaggcggggccggcccaggtctgtgaggaaggacctggtggagggcttcacagatgctgagatccgccgcttcatcaaggcctacaagaagtttggcctgcccctggagcggctggagtgcatcgccagagatgctgagctggtggacaagtctgtggccgacctgaagaggctgggggagctgatccacaacagctgtgtgtctgccatgcaggagtatgaggagcagctgaaggaaaatgccagcgagggcaagggccctgggaagagaagaggccccaccatcaagatctctggagtgcaggtgaatgtgaagagcatcatccagcacgaggaggagtttgagatgctgcacaagagcatccctgtggaccctgaggagaagaagaagtactgcctgacctgccgggtgaaggccgcccactttgatgtggagtggggcgtggaggatgacagccggctgctgctgggcatctatgagcacggctacggcaactgggagctgatcaagacagatcctgagctgaagctgacagacaagatcctgcctgtggagacagacaagaagccccagggcaagcagctgcagaccagggctgactacctgctgaagctgctgaggaagggcctggagaagaagggagctgtgactggaggagaggaggccaagctgaagaagaggaagccccgggtgaagaaggagaacaaggtgccccggctgaaggaggagcacggcatcgagctgagcagccccaggcacagcgacaaccccagcgaggagggggaggtgaaggatgatggcctggagaagagccccatgaagaagaagcagaagaagaaggagaacaaggagaacaaggagaagcagatgagcagcaggaaggacaaggagggggacaaggagaggaagaagagcaaggacaagaaggagaagcccaagtctggagatgccaagagcagcagcaagagcaagaggagccagggccctgtgcacatcacagctggcagcgagcctgtgcccatcggggaggatgaagatgatgacctggaccaggagaccttcagcatctgcaaggagaggatgaggcctgtgaagaaggccctgaagcagctggacaagccagacaagggcctgaatgtgcaggagcagctggagcacaccaggaactgcctgctgaagattggagacagaattgctgaatgtctgaaggcctacagcgaccaggagcacatcaagctgtggaggaggaacctgtggatctttgtgtccaagttcacagaatttgatgccaggaagctgcacaagctgtacaagatggcccacaagaagaggagccaggaggaggaggagcagaagaagaaggatgatgtgactggaggcaagaagcccttccggcctgaggccagcggcagcagccgggacagcctcatcagccagagccacaccagccacaacctgcacccccagaagccccacctgcctgccagccacggcccccagatgcacggccacccccgggacaactacaaccaccccaacaagaggcacttcagcaatgctgacagaggagactggcagcgggagaggaagttcaactacggcggcggcaacaacaaccccccctggggcagtgacagacaccaccagtatgagcagcactggtacaaggaccaccactatggagaccggcggcacatggatgcccacaggagcggcagctaccggcccaacaacatgagcaggaagaggccctatgaccagtacagcagtgaccgggaccaccggggccaccgggactactatgacagacaccaccacgacagcaagagaagaagaagtgatgagttccggccccagaactaccaccagcaggacttccggaggatgtctgaccacaggcctgccatgggctaccacggccagggccccagcgaccactaccgctccttccacacagacaagctgggggagtacaagcagcccctgccccccctgcaccctgctgtgtctgaccccaggagcccccccagccagaagagcccccatgacagcaagagccccctggaccacaggagccccctggagaggagcctggagcagaagaacaacccagactacaactggaatgtgaggaagacctag

SEQ ID NO: 96976 - DNA, 5220 bp, Artificial Sequence
  derived and/or modified sequence
atgatgaggaacaaggacaagagccaggaggaggacagcagcctgcacagcaatgccagcagccacagcgccagcgaggaggccagcggcagtgacagcggcagccagagcgagagcgagcagggcagtgaccccggcagcggccacggcagcgagagcaacagcagcagcgagagcagcgagagccagagcgagagcgagagcgagagcgctggcagcaagagccagcctgtgctgcctgaggccaaggagaagccagccagcaagaaggagagaattgctgatgtgaagaagatgtgggaggagtacccagatgtgtatggagtgcggcgcagcaacagaagccggcaggagcccagccgcttcaacatcaaggaggaggccagcagcggcagcgagagcggcagccccaagagaagaggccagaggcagctgaagaagcaggagaagtggaagcaggagcccagtgaagatgagcaggagcagggcaccagcgctgagagcgagcctgagcagaagaaggtgaaggcccggcggcctgtgcccaggagaacagtgcccaagccccgggtgaagaagcagcccaagacccagaggggcaagaggaagaagcaggacagcagtgatgaagatgatgatgatgatgaggcccccaagaggcagacccggcggcgggccgccaagaatgtgtcctacaaggaggatgatgactttgaaacagacagtgatgacctgattgagatgactggagagggcgtggatgagcagcaggacaacagcgagaccatcgagaaggtgctggacagccggctgggcaagaagggggccactggagccagcaccaccgtgtatgccatcgaggccaatggagaccccagcggggactttgacacagagaaggatgaaggagagatccagtacctgatcaagtggaagggctggagctacatccacagcacctgggagagcgaggagagcctgcagcagcagaaggtgaagggcctgaagaagctggagaacttcaagaagaaggaggatgagatcaagcagtggctgggcaaggtgtccccagaagatgtggagtacttcaactgccagcaggagctggccagcgagctgaacaagcagtaccagatcgtggagcgggtgattgctgtgaagaccagcaagagcaccctgggccagacagacttccctgcccacagcaggaagccagcccccagcaatgaacctgagtacctgtgcaagtggatgggcctgccctacagcgagtgctcctgggaggatgaggccctgattggcaagaagttccagaactgcatcgacagcttccacagcaggaacaacagcaagaccatccccacccgggagtgcaaggccctgaagcagaggcccaggtttgtggccctgaagaagcagcctgcctacctgggcggggagaacctggagctgcgggactaccagctggagggcctgaactggctggcccacagctggtgcaagaacaacagcgtcatcctggctgatgagatgggcctgggcaagaccatccagaccatctccttcctgagctacctgttccaccagcaccagctgtatggccccttcctgattgtggtgcccctgagcaccctgacctcctggcagcgggagtttgagatctgggcccctgagatcaacgtggtggtgtacatcggggacctgatgagcaggaacaccatccgggagtatgagtggatccacagccagaccaagaggctgaagttcaatgccctgatcaccacctatgagatcctgctgaaggacaagacagtgctgggcagcatcaactgggccttcctgggcgtggatgaggcccaccggctgaagaatgatgacagcctgctgtacaagaccctgattgacttcaagagcaaccaccggctgctgatcaccggcacccccctgcagaacagcctgaaggagctgtggagcctgctgcacttcatcatgcctgagaagtttgagttctgggaggactttgaggaggaccacggcaagggcagagaaaatggctaccagagcctgcacaaggtgctggagcccttcctgctgcggcgggtgaagaaggatgtggagaagagcctgcctgccaaggtggagcagatcctgcgggtggagatgtctgccctgcagaagcagtactacaagtggatcctgaccaggaactacaaggccctggccaagggcacccggggcagcaccagcggcttcctgaacatcgtgatggagctgaagaagtgctgcaaccactgctacctgatcaagcccccagaagaaaatgaaagagaaaatggccaggagatcctgctgagcctcatccgcagcagcggcaagctgatcctgctggacaagctgctgacccggctgcgggagcggggcaacagagtgctgatcttcagccagatggtgaggatgctggacatcctggccgagtacctgaccatcaagcactaccccttccagaggctggatggcagcatcaagggggagatcaggaagcaggccctggaccacttcaatgctgatggcagcgaggacttctgcttcctgctgagcaccagggctgggggcctgggcatcaacctggccagcgctgacacagtggtgatctttgacagcgactggaacccccagaatgacctgcaggcccaggcccgggcccaccgcatcggccagaagaagcaggtgaacatctaccgcctggtgaccaagggcaccgtggaggaggagatcatcgagcgggccaagaagaagatggtgctggaccacctggtgatccagaggatggacaccaccggccgcaccatcctggagaacaacagcggccgcagcaacagcaaccccttcaacaaggaggagctgacagccatcctgaagtttggagcagaagatctcttcaaggagctggagggggaggagagcgagccccaggagatggacattgatgagatcctgcggctggccgagacccgggagaatgaggtgtccaccagcgccacagatgagctgctgagccagttcaaggtggccaactttgccaccatggaggatgaggaggagctggaggagcggccccacaaggactgggatgagatcatccctgaggagcagaggaagaaggtggaggaggaggagcggcagaaggagctggaggagatctacatgctgccccgcatccgcagcagcaccaagaaggcccagaccaatgacagcgacagcgacacagagagcaagaggcaggcccagaggagcagcgccagcgagagcgagacagaggacagtgatgatgacaagaagcccaagaggcggggccggcccaggtctgtgaggaaggacctggtggagggcttcacagatgctgagatccgccgcttcatcaaggcctacaagaagtttggcctgcccctggagcggctggagtgcatcgccagagatgctgagctggtggacaagtctgtggccgacctgaagaggctgggggagctgatccacaacagctgtgtgtctgccatgcaggagtatgaggagcagctgaaggaaaatgccagcgagggcaagggccctgggaagagaagaggccccaccatcaagatctctggagtgcaggtgaatgtgaagagcatcatccagcacgaggaggagtttgagatgctgcacaagagcatccctgtggaccctgaggagaagaagaagtactgcctgacctgccgggtgaaggccgcccactttgatgtggagtggggcgtggaggatgacagccggctgctgctgggcatctatgagcacggctacggcaactgggagctgatcaagacagatcctgagctgaagctgacagacaagatcctgcctgtggagacagacaagaagccccagggcaagcagctgcagaccagggctgactacctgctgaagctgctgaggaagggcctggagaagaagggagctgtgactggaggagaggaggccaagctgaagaagaggaagccccgggtgaagaaggagaacaaggtgccccggctgaaggaggagcacggcatcgagctgagcagccccaggcacagcgacaaccccagcgaggagggggaggtgaaggatgatggcctggagaagagccccatgaagaagaagcagaagaagaaggagaacaaggagaacaaggagaagcagatgagcagcaggaaggacaaggagggggacaaggagaggaagaagagcaaggacaagaaggagaagcccaagtctggagatgccaagagcagcagcaagagcaagaggagccagggccctgtgcacatcacagctggcagcgagcctgtgcccatcggggaggatgaagatgatgacctggaccaggagaccttcagcatctgcaaggagaggatgaggcctgtgaagaaggccctgaagcagctggacaagccagacaagggcctgaatgtgcaggagcagctggagcacaccaggaactgcctgctgaagattggagacagaattgctgaatgtctgaaggcctacagcgaccaggagcacatcaagctgtggaggaggaacctgtggatctttgtgtccaagttcacagaatttgatgccaggaagctgcacaagctgtacaagatggcccacaagaagaggagccaggaggaggaggagcagaagaagaaggatgatgtgactggaggcaagaagcccttccggcctgaggccagcggcagcagccgggacagcctcatcagccagagccacaccagccacaacctgcacccccagaagccccacctgcctgccagccacggcccccagatgcacggccacccccgggacaactacaaccaccccaacaagaggcacttcagcaatgctgacagaggagactggcagcgggagaggaagttcaactacggcggcggcaacaacaaccccccctggggcagtgacagacaccaccagtatgagcagcactggtacaaggaccaccactatggagaccggcggcacatggatgcccacaggagcggcagctaccggcccaacaacatgagcaggaagaggccctatgaccagtacagcagtgaccgggaccaccggggccaccgggactactatgacagatatgccaagggctgtgagacccctggggccaacctgtgccaggagctgttcctgggcaggaagtag

SEQ ID NO: 96977 - DNA, 5487 bp, Artificial Sequence
  derived and/or modified sequence
atgatgcggaacaaggacaagagccaggaggaggacagcagcctgcattctaatgcctcttctcatagtgcttcagaagaagccagcggctccgactccggaagccaatccgagtccgaacaaggtagtgaccctggctctggccacgggtctgagtccaattcctcctctgagtctagtgagtcacagtctgagtctgagtctgaatcggcaggcagcaagtctcagcccgtcttgcctgaagctaaagagaaacctgccagcaagaaggaacgtatcgccgacgttaaaaagatgtgggaggagtatcctgacgtgtacggagtgcggcgctcaaatcggtcaaggcaggaaccaagcagatttaatatcaaagaagaggccagtagcggttccgaatccggttctccgaaacggagggggcagcgacagctcaaaaagcaggagaaatggaaacaagaaccatcggaggacgagcaggagcagggcacttccgcagaaagcgagcccgaacagaagaaagtgaaagcaagaagacccgtgccccgccgcacagtcccaaagcccagggtgaagaaacagcctaaaactcaaagaggaaagcgtaagaagcaggacagcagcgatgaagacgacgatgatgacgaggctccgaagaggcaaacaaggagacgagctgccaaaaacgtgagctataaagaagacgacgacttcgaaacagacagtgacgacttgattgaaatgactggtgagggcgttgacgaacagcaggataattccgagaccatagagaaagtgctagatagccggcttgggaagaagggcgccaccggggccagcactacagtctacgcaatagaggcaaacggtgatccctctggagatttcgatacagagaaggatgagggggaaatccaatatctgatcaagtggaagggctggtcttatatacattctacctgggagagtgaggaaagcctccaacagcaaaaagtaaagggactgaagaaacttgaaaatttcaagaaaaaagaagacgaaataaagcagtggttaggtaaggtgtctcccgaagacgtggagtattttaattgccagcaagaactggcctcagaactgaacaagcagtaccagattgtggaacgtgtcatagccgtaaaaaccagcaagagcacactagggcagacggactttcctgcccacagtagaaagcccgccccctcaaatgaacctgaatacctgtgtaagtggatgggtctcccatacagtgagtgttcttgggaggacgaagcactaatcgggaaaaagttccagaattgtatcgactctttccattcacggaacaactcaaaaacaatccccacgcgcgagtgtaaagctttgaagcagaggccgcgtttcgtggcactcaaaaaacagcctgcatatctcggaggtgagaatctggagctccgggattaccaactcgagggcctcaactggctggcccactcatggtgtaagaacaatagcgtcatactcgcagacgagatggggctcgggaagactattcagacaatttcatttctgtcctacctgttccaccagcaccagctgtacggcccattccttatcgtggtgcccctgtctaccctgaccagctggcagagggaatttgagatctgggccccggagattaatgtcgtggtgtacattggcgatctgatgagccggaacacaatacgagagtatgaatggatccactcccagacgaaaagacttaagttcaatgccctcatcacaacctacgagattttactgaaagataagaccgtgttggggtcaatcaactgggcctttctgggagttgacgaggcccaccggctcaagaacgacgacagtctgctatacaagacactgatcgacttcaagagcaaccaccgccttttaatcacaggtactccactgcagaattctctgaaggagctttggagcctgctccacttcatcatgccggagaaatttgaattctgggaggactttgaagaggaccatggtaagggccgggaaaatggctaccaatccctgcacaaagtgctagaacccttcctcctaaggcgtgtcaagaaagacgtcgagaaatcgctgccagccaaagtggaacagattctccgcgtggagatgtcagccttacagaaacaatactataagtggattctgacacggaattataaggcattagctaaaggtacgcgcggcagcacgagtggtttcctgaacattgttatggagctaaagaagtgctgcaatcactgctaccttattaagcctccagaggaaaatgaaagagaaaatggacaggagatactcctctcgctcatccggagttctgggaagctcattctgctcgataagctcttgaccaggctgcgggagaggggcaacagagttcttatcttttcacaaatggttcgcatgctggatatactggccgagtacctcactatcaaacattacccattccagaggctagatgggagtataaagggcgagataaggaagcaggccctggaccactttaatgctgatggttcagaagacttctgcttcctgctctccaccagggcaggaggcctgggaatcaacctcgcgagcgcagacaccgtagtgatcttcgactctgactggaacccacagaatgacctgcaggcccaggcccgggcccatagaattgggcagaagaaacaggtgaatatttaccgcctggtcactaagggtacggttgaggaagagattattgaaagagccaagaaaaagatggtgcttgaccacttggtgatccaaagaatggataccactggaaggactattctcgaaaataactctggtagatctaactccaatcctttcaataaggaggagcttacagcaatcctgaaattcggagcggaagatctgttcaaagaactggagggggaagagagcgagcctcaagaaatggatattgatgaaatcctccgactggccgagactcgggaaaacgaagtctccacctccgcaactgacgagctgctgtcacagttcaaagttgctaattttgccaccatggaggacgaggaggaactggaggaacggccccacaaggattgggatgaaattatccctgaggagcagagaaaaaaagtggaggaggaggagagacaaaaagaattagaggaaatttacatgctaccccgaattcgctcatccactaagaaggctcagaccaacgacagcgactcagacactgagtccaagagacaagcacaacgatctagtgcatcagagtcagagacagaagacagtgacgatgacaaaaaacctaaaaggagaggccgaccgagatccgtgaggaaagacttggtcgaaggcttcaccgatgccgagattcgccggtttatcaaagcatacaaaaaatttggcctgcccttggagcgactggagtgtattgcccgcgacgccgaacttgtagataaatctgtggccgatctgaaacgattaggcgagttgattcacaattcttgtgtctccgctatgcaggaatatgaggaacagctgaaggaaaatgcatccgaaggcaagggcccaggcaagaggcggggtcctaccatcaagattagcggggttcaagttaatgtcaaatccattatccagcacgaggaggagtttgagatgctccacaagagcattcctgtagatcccgaggagaagaagaagtactgcctgacttgtcgtgtgaaggccgcccatttcgacgtggaatggggggttgaggatgactcacggctcctgctggggatatacgagcacgggtacggtaactgggaactcattaagacagatcccgaactgaaattgactgacaagatccttccggtggagacagataagaaaccccaggggaaacagctgcaaacaagagcggattatttgctgaagttgctgcgcaagggcctggagaaaaagggcgccgttacagggggagaggaagctaagctaaaaaagagaaagccaagggtgaaaaaggaaaacaaagtgccaagattgaaggaggaacacggcatagagctgtctagccccagacattccgacaacccttcagaggaaggcgaagtgaaggacgacggtctggagaagtctcctatgaagaaaaagcagaaaaaaaaggagaacaaggagaacaaagaaaagcagatgtcctccaggaaagacaaggaaggcgacaaggagcgcaaaaaatctaaggacaaaaaggaaaagcctaagtccggcgacgctaaatcttctagcaagtccaaaaggtcacaaggccctgtgcacatcaccgctgggtccgaacccgtacctataggagaggacgaggacgatgacctggaccaggaaacctttagtatttgcaaggagcgtatgcgtccagttaaaaaggccctcaaacagcttgataagccggataagggcctgaacgtccaggagcaactggaacatacacggaactgtctgctgaaaattggtgataggattgcagagtgtttgaaggcatatagcgatcaagaacatatcaagctgtggaggcggaacctgtggattttcgtgtcaaagttcactgaattcgatgcccgtaaactgcataagctctataaaatggcccacaaaaagaggagccaagaggaagaagaacagaaaaagaaagatgatgtgacaggaggaaaaaagcccttccgcccagaagcttctggtagctcccgtgactccctgatttcccagtcacatacttcacataacttgcaccctcagaaaccccacttgccagctagtcacggcccacagatgcacgggcacccacgcgataattataaccaccctaacaaaagacactttagcaacgcagaccgcggtgactggcagcgtgaaagaaaattcaactacggaggagggaataataatccaccgtgggggagtgatcggcaccaccaatacgaacaacactggtacaaggaccaccactatggggaccgtcgacatatggatgctcaccggtctgggtcctacagaccgaacaacatgagtcgaaagcgtccctatgatcagtattcttctgatcgagaccatcgggggcatcgcgactactatgatcgccaccaccacgacagtaagcggagacgaagcgatgaattcaggccacaaaactatcaccagcaggatttccggagaatgagcgaccatcgtccagccatgggctatcacggacagggtccgagtgaccattacagaagcttccacaccgataagctcggcgagtacaagcagcctctgccaccactacaccctgcggtctctgacccccggtcccctcctagccagaaatctccccacgatagtaaatcccctctggaccaccgtagtccattggaacgttcactggaacaaaaaaacaacccagattacaactggaacgtgagaaaaacgtag

SEQ ID NO: 96978 - DNA, 5220 bp, Artificial Sequence
  derived and/or modified sequence
atgatgcggaacaaggacaagagccaggaggaggacagcagcctgcactctaatgcaagctcccacagtgccagcgaagaggcttcaggaagcgacagtggcagccagtctgagtccgaacagggctccgaccctggtagtggacatggctccgagtcaaatagcagcagcgaatcatctgagagccagtctgagtccgagtccgaaagcgcaggctcaaaaagtcagcctgtgctgcccgaagctaaagagaagcctgcctcaaagaaagagcgcatcgccgacgtcaagaaaatgtgggaggagtaccctgacgtctacggtgtgaggcgctctaaccggagtcgccaggagcccagccggtttaatatcaaggaggaggctagcagcgggagtgagtctgggtcgcccaaacggcgaggccaaaggcaactcaagaaacaggagaagtggaaacaggaaccttctgaagacgagcaggagcagggtaccagtgccgaaagtgagcccgagcagaagaaggtaaaagcccgtaggcccgtacccaggcggacagttccaaagccacgggtgaagaagcagccaaagacgcagagaggcaaaaggaaaaagcaggactcatctgatgaggacgatgacgacgatgaagctccaaagcggcagacccgaaggcgagctgcaaaaaatgtttcttacaaagaagacgatgatttcgagacagacagcgacgatctgatcgagatgacaggcgagggggtggatgagcagcaggataactcagagaccattgagaaagtattggacagtcgactggggaagaagggcgctaccggagcttccaccactgtctatgcaatcgaggcaaacggcgacccttccggagacttcgacaccgaaaaagatgagggagaaatccaatatctgattaagtggaaaggatggagttatattcacagcacttgggaaagcgaggagagcctgcagcagcagaaggtgaagggcctgaagaaactcgagaatttcaagaaaaaggaagacgaaatcaagcagtggctcggaaaggtgtcccccgaggatgtagagtattttaactgccaacaggagttggcaagcgagctgaacaaacaataccagatcgtcgaaagggtgatcgccgttaagacttctaaaagcacactgggacagacagatttcccagcccacagtaggaagcccgctccttcaaatgagccggaatatctctgtaagtggatgggtctgccttacagcgagtgcagctgggaagacgaagccctgatcgggaagaagttccaaaattgcatcgactccttccactcccgcaataactccaagacaatcccgactagggagtgcaaggctctcaagcaacgccctagatttgtggccttgaagaagcagccggcttatctggggggagagaacctagagctgcgagactatcaattggagggattaaattggcttgcccactcctggtgcaagaataactctgtgattctggccgacgagatgggtctgggaaagacaatccagaccataagtttccttagctacctcttccaccagcaccagctgtacggtcctttcctgatcgttgtgccactgagcacactgacgtcttggcagcgggagtttgaaatttgggcgccagagatcaacgtggtggtctacattggggacttgatgagtcggaacactatccgggaatacgagtggatccacagccagactaaacggctcaagttcaacgccttgattacaacctacgaaattctcctgaaggacaaaacagtgttgggctcaatcaattgggcattcctaggcgttgatgaagcccaccgcctaaagaacgatgatagcctgctgtataaaacactaatcgactttaagagtaatcatcggctcctgataactggtacacccctgcaaaacagtctgaaggaactgtggtcactcctccatttcatcatgcccgagaagtttgagttttgggaggacttcgaggaggaccatggaaaagggcgtgaaaatggatatcaatcactgcacaaggtcttggagcccttcctcctgagaagggtcaaaaaggacgtcgaaaagtcactgcctgccaaggtggagcagatcttgcgggtcgagatgtctgctctgcagaaacagtactataagtggatcctaaccaggaactataaggccttggctaagggtaccagagggagcacgtcgggattccttaatatcgtgatggagctgaagaagtgctgcaaccattgttaccttataaaaccccccgaagagaacgagcgtgagaatggacaggagattctgctaagcctgatccgcagcagcggaaagctaatcctgttagacaagctactgacaagattacgtgagaggggaaatcgtgtactcatatttagtcagatggtaaggatgctggacatcctggcggagtacttaacgataaagcactacccttttcagagactggatggcagtattaaaggagaaatccgaaaacaagccctggatcactttaacgcggacgggagcgaggacttttgcttcctgctgagcacccgggcggggggccttggtattaaccttgcgagtgccgacacggtggttatcttcgattctgattggaatccccagaacgacctgcaggcccaggcccgagcgcacaggattggccagaagaagcaggtaaacatctatcgccttgtgacgaaaggaaccgttgaggaagaaatcatcgaacgggctaaaaagaaaatggtcctggaccatctggtcatccaacggatggacactaccgggaggaccatcctcgagaataactctggacggagcaactccaacccttttaacaaggaagagctcaccgcaatcctcaagttcggagcagaggatcttttcaaggaactggagggagaagagagcgaacctcaggagatggatattgacgagattctgagactggcagaaacacgagagaatgaggtgtcaacaagtgctactgatgagctcctgagtcagtttaaggtcgcaaattttgcaactatggaagacgaggaggagttagaggagcgaccccataaggactgggatgagataattcccgaggagcagcggaagaaagtggaggaagaggagcggcagaaggaattggaggaaatctacatgttgccgcggataagatctagcacaaagaaggcccaaacaaatgatagcgattcagataccgaatctaagcgccaggcgcagagatcctcagcttctgaaagcgagacagaagatagcgatgacgataaaaaaccaaagaggcgggggcgcccacggagcgtgagaaaggatcttgtcgagggcttcacagatgcagaaattaggagatttatcaaagcctacaagaaattcggcctcccactggaacggctggaatgtatcgcacgcgatgccgagcttgtcgacaaaagcgttgccgacctcaagcgactaggagagctgatccacaactcatgcgtatccgccatgcaggagtacgaggaacagttgaaagagaatgccagcgaggggaaaggccctgggaagcgcagaggacccactatcaagattagcggagtgcaagtcaatgttaagtccatcatacagcacgaagaagaatttgagatgctccacaaatcaatcccagtggaccccgaggagaagaagaagtattgtctgacttgtagggtcaaggctgcacatttcgacgtggagtggggagttgaagatgatagccgccttctacttggaatttatgagcacggttatgggaattgggagttgattaaaactgatccagagttgaaacttaccgataagatcctccctgttgagacagataaaaaaccgcaagggaagcagcttcagacccgcgccgattatctgctgaaattgttacgaaagggattggaaaagaaaggggctgtgaccggcggcgaggaggctaaactgaagaagcgcaagccacgggtcaagaaggagaataaggtgcctcgcctaaaggaggagcacggaattgagctgagctctcctaggcactcagataatccttcggaggagggggaggtaaaagatgatggcctagagaaaagcccgatgaagaagaaacagaaaaaaaaagaaaataaggagaacaaggagaagcagatgagcagcagaaaggacaaggagggcgataaggagcgtaaaaagtccaaggataagaaggaaaagcctaagtccggggacgcaaaaagctcgtccaagtctaaaaggagccaaggccccgttcacataactgcaggatctgagcccgtgcctattggggaggatgaagacgatgatcttgaccaggagacgtttagcatctgcaaggagaggatgagacctgtgaaaaaggccctgaaacagttggacaaacctgataaagggctgaacgttcaggaacaactcgagcacacgagaaactgcctgctgaagatcggagacagaatcgcagagtgtctgaaagcctacagtgatcaagaacatattaagctgtggcgtcggaacctctggatctttgtgtctaagttcactgagttcgatgccaggaagcttcacaaactgtataagatggcccataagaagaggagccaggaagaggaggaacagaaaaagaaggacgatgtcaccggcgggaaaaaaccttttagacccgaagcttccggttcttcacgtgattcactgatctctcagtcacacacttcccacaatttgcacccacagaaacctcacctccctgcaagtcacgggcctcagatgcacggacaccctagagacaactacaaccatcccaacaaaagacatttcagcaatgccgatcggggcgattggcagcgggaaaggaagtttaattacggcgggggtaataacaatcccccttggggttcagatagacatcaccagtatgaacagcactggtacaaggatcaccactacggagaccggagacacatggacgctcacagatctgggagctatcgaccaaataacatgagccgaaagagaccctatgaccaatactccagcgatcgtgatcacagagggcatagagactattacgatcgatatgcaaaggggtgcgagacaccgggcgcgaacttgtgtcaagaactgtttttagggcgtaaatag

SEQ ID NO: 96979 - DNA, 5486 bp, Artificial Sequence
  derived and/or modified sequence
atgatgcgcaacaaggacaagagccaggaagaggactcaagtctgcacagcaatgcgtcatctcacagcgcaagcgaagaggcaagtgggagtgactctgggtcgcagtctgaatcagagcaggggtcagatcccggttccgggcatggaagtgaatccaattctagttcggaaagctccgagagccagtccgaatcagaatctgagagcgcagggagtaaaagccaacctgtgttaccagaggcgaaggaaaaacctgcttccaagaaggagagaatagcggatgtaaagaaaatgtgggaggagtatcccgacgtgtacggagtgcggagaagcaatagatcccggcaggaaccttcacggtttaacatcaaagaagaggccagcagcggcagtgagagtggatctccgaagcggagaggccaaagacaactgaaaaagcaggaaaaatggaaacaggaaccaagcgaggacgaacaggaacagggcacgtccgcagagagcgagcctgaacaaaagaaagtgaaggctcggcgacctgttccccgacgcacagtccctaaaccaagggtgaagaaacagcccaagactcagcgcggtaagcgcaagaaacaggattcaagcgacgaggacgacgacgacgacgaagcacccaaacggcaaacaagacggagagccgcaaaaaatgtgagctataaggaagatgacgattttgaaaccgacagcgatgacctgattgaaatgaccggggagggcgtggatgaacagcaggacaatagcgaaacaatcgagaaggtgttggatagcaggttgggcaaaaagggagccaccggtgcttcaacaactgtgtacgccattgaggctaacggagacccctctggtgatttcgatactgagaaagatgaaggagaaatccagtatttaatcaaatggaagggctggtcctatatccacagtacttgggaaagcgaggagagcctccaacaacagaaagttaagggcctgaaaaaactcgaaaatttcaagaaaaaagaagatgagatcaagcagtggttaggcaaagtgtcgcctgaggacgtggagtattttaactgtcagcaggaactcgcgtccgagctgaacaagcagtatcagatcgtcgagcgggtaatcgcagtcaaaacgtccaaatctaccctgggccaaacggacttcccggctcattcaaggaagcctgccccatccaacgagcccgagtatctctgtaaatggatgggcctgccttactctgagtgctcctgggaggatgaagccctgatagggaaaaagtttcagaactgcatagactctttccactcaaggaataacagcaaaactatccctaccagagagtgtaaggccctcaaacagcgaccacgcttcgttgcgctgaagaagcagccggcttacctgggaggggaaaacttggagctgcgcgactatcagcttgaggggctcaactggttggcccactcctggtgtaaaaataattctgtgatactcgcagatgaaatgggcctcggcaaaacgatccagaccatctcttttctgtcttatttgtttcatcaacaccagttgtacggcccattcctgatcgtcgtgccactcagtactttaacaagctggcaacgggaatttgagatttgggcccctgaaatcaatgtggtggtatacattggggatctgatgtctcgaaatacgatccgagaatatgagtggatccacagtcagaccaagagactcaaattcaacgcgcttatcacaacatacgagatcctactcaaggacaagaccgtcctgggctccattaattgggcctttctcggtgtggacgaggcccatcggctcaagaacgatgactctttattgtacaaaactctgatcgattttaagtccaaccaccggctcctcattaccggtacaccattgcagaacagtctaaaggaactgtggagcctgctccattttattatgcccgaaaagtttgaattttgggaggacttcgaggaggaccatggaaaggggagagagaatgggtaccaatcactgcacaaggttctcgagccatttcttttgagacgcgttaagaaggatgtagaaaaatcccttccagcgaaggttgagcaaattttgcgggttgaaatgagtgccttgcagaaacagtattataagtggatcctcaccagaaattataaagcacttgccaaaggcacccgcggaagcacttccggctttctaaacatcgtgatggagctgaagaaatgttgcaaccactgctacctgattaaacctccagaggagaacgagcgggaaaatggtcaagagatcttgttgagcttaattagatcctctgggaagctgattctacttgacaagctgctgaccaggctcagagagcgagggaaccgcgtgctgatcttcagccagatggtgcggatgcttgatattctcgcagaatacttaaccattaaacactatccttttcagaggctcgatgggtcaatcaaaggcgagattaggaaacaggcactcgaccattttaacgccgatggatctgaagatttctgcttcctgctatctacccgggctggcggactgggcatcaatctggcttctgccgataccgttgtcatattcgattctgattggaaccctcagaacgatctgcaggcccaagcgagagcgcataggattggacagaaaaagcaggtgaatatttaccgcctggtgaccaaggggacagttgaagaagagatcatagagagagctaagaaaaagatggtgctcgatcacctagtgatccagagaatggacacaactggccgaactatactggagaataattcgggcaggagcaactctaacccattcaataaggaggagttaacagccatcctcaagttcggggctgaggatctgtttaaagagctggaaggcgaagagtccgaaccacaggaaatggacattgacgagattctgcggctggccgaaacacgggaaaatgaagtgtcaacctccgcaactgacgagttattgtcacagtttaaggtggcaaatttcgctactatggaagacgaggaggaactggaagaaagacctcataaagattgggacgaaatcatccctgaggagcagcggaaaaaggttgaagaggaggaacggcagaaggagctggaggagatttatatgctgcccagaatccgatccagtaccaaaaaggcccaaacgaacgattctgactccgacacagagtctaagagacaagcccagagatcttctgcctcggagagcgaaaccgaggactcggatgatgacaagaaacccaaaaggagggggcgacccaggtcggtgcgcaaggaccttgttgaggggtttactgatgccgaaatacggaggtttatcaaggcctataagaagtttggtctgcctttggagaggcttgagtgtatcgcacgagatgccgagctggtcgataaaagtgttgctgatctgaagcggttgggagaactaattcataacagttgtgtttccgctatgcaggagtatgaggagcagctgaaagagaacgcgtccgagggcaaaggccctggaaagaggcgaggcccaaccatcaagatctcgggtgtgcaggttaacgtgaaaagtattatccagcacgaagaagaatttgagatgcttcacaaatccatccccgtagatccggaggaaaaaaagaagtactgtctcacttgtagggtgaaggctgctcacttcgacgtggaatggggtgtagaggacgatagtagattgctgttgggaatctatgagcatggatacggtaactgggagttaattaagaccgatcctgaacttaagctgaccgacaagatcctccctgtggagacagacaagaaaccccaaggcaagcagctgcagaccagagctgactacctcttgaagctgctccggaagggactggagaaaaaaggcgcagtaacagggggtgaagaggcgaaattaaaaaaaaggaagcctcgggtgaagaaggaaaacaaggtgccaagattgaaagaagagcatggaattgagttatctagtcccagacactctgacaatccaagcgaggagggcgaagtgaaggatgacggactggagaagagtccaatgaagaagaaacagaagaagaaggaaaataaagagaacaaggaaaaacagatgagctcaagaaaggacaaagaaggcgataaggaaaggaaaaaatcaaaggataagaaggagaagcccaagtcaggcgacgctaaaagcagttccaagtccaaacgcagtcagggtccagtccacatcactgccggatcagagccagtgcctataggcgaagacgaggacgatgacctggatcaggagaccttttctatttgcaaggagcgtatgagacccgtaaagaaagctctgaagcagctggacaagcccgataagggactgaatgttcaggaacagttagaacacaccagaaattgcctgcttaagataggggaccggatcgccgagtgtctgaaagcctattcagaccaggaacacatcaagttatggcggcgtaacctgtggatttttgtgagcaagtttacggaatttgacgcccgaaaattacacaaactatacaaaatggcccacaagaagcgctctcaagaggaagaggaacagaagaagaaggatgatgtgaccggcggaaagaaaccatttagacccgaagcgtccggaagctccagggactctctgatctcccagagtcatacctcacataacctgcacccacaaaaaccccatctgcccgcatcacatggccctcagatgcacggccaccctagagataattataatcacccgaacaagagacatttttcaaacgctgaccggggagattggcagagagagcgcaagtttaattacgggggtggcaataataatcctccgtggggatctgataggcatcaccagtacgaacagcattggtacaaagaccaccattacggggatcgtcgccatatggacgcgcatagatcgggctcatatcggccaaataatatgtcgcgaaaaaggccctacgaccagtattcctccgatcgcgatcacagaggtcatagagattactatgaccgtcaccatcatgactctaagcgtcggcgtagcgacgaattccgcccacaaaactatcatcagcaggatttccggagaatgtctgatcataggcccgctatgggctatcacggccaaggaccttcagatcattatagatcatttcataccgataagctgggcgaatataagcagcctttgccacctttacacccagctgtatccgatccaagatcgccgccttcacagaaatcccctcatgactctaaatccccattggaccaccgctccccactcgagagaagcctggaacagaagaacaatcctgattataattggaacgtgcgaaagactta

SEQ ID NO: 96980 - DNA, 5220 bp, Artificial Sequence
  derived and/or modified sequence
atgatgcgcaacaaagacaagagccaggaggaggactcatcgctccactcgaatgccagctcccattctgccagcgaagaggcgtccgggagcgattctgggtctcaaagtgaatccgaacaggggtccgatcccggaagcggccatgggtccgaatcaaattcttcttcggaatcctccgaaagtcagtcagaatccgaaagtgaaagtgctggtagcaagagtcaaccagtgttgcctgaagccaaggagaagccagcatctaagaaagagcgcatcgccgacgtaaaaaagatgtgggaagaataccccgatgtgtacggcgtgcgtcggagcaacagatccagacaagagcctagcaggtttaatatcaaagaggaagcatccagtggcagtgaatctggcagtccaaaaagaagaggacagagacaactcaagaaacaagaaaagtggaaacaggaaccatccgaggatgagcaagagcagggaaccagcgctgagagcgaacctgagcaaaagaaggtgaaagccaggcggcctgtaccacggagaacagtgcctaaaccccgagtaaaaaagcaaccaaaaacgcaacgcggtaagcgcaaaaagcaagacagctctgatgaggatgatgacgacgatgaagcgcctaaaaggcaaacaagacgacgagccgctaagaacgtcagctacaaagaggatgacgatttcgaaacagattccgacgacctgattgaaatgacaggcgaaggggtggacgaacagcaggataactccgaaactattgagaaagtcctagactcccgactcggcaaaaagggcgctaccggtgctagtacaaccgtgtatgctattgaagctaacggcgatcccagtggagatttcgatacggaaaaggacgaaggtgaaattcaatacttgattaaatggaaaggatggtcttacattcactcaacctgggaatccgaagagtcacttcagcagcagaaggtcaaaggcttgaagaaactggaaaatttcaagaagaaggaagatgagattaagcaatggctgggcaaggtgagccccgaggatgtcgaatactttaattgccaacaagagctagcctcagaactcaataagcagtaccagatagtagagagagttatcgcagtaaagaccagcaaaagtacactgggtcagaccgactttccagcccacagccggaaacccgctccgtctaacgagccagagtatctttgtaagtggatgggattaccttacagtgagtgctcttgggaggatgaggcactgattgggaaaaagttccagaattgcattgactcatttcactcgcgcaataattcgaagacaatccccacaagggagtgcaaagccttgaagcagcgccctaggttcgtggctttgaaaaaacagcccgcttacctggggggtgagaatcttgaactgcgcgattatcagctagaagggcttaattggctggcccattcctggtgcaagaataattccgtaattctggccgacgaaatggggttaggcaaaactattcagactatctcgttcttatcttacctctttcatcagcaccagctctacgggccattccttattgtcgtgcccctttccacgttgactagctggcaaagagagtttgaaatttgggcacctgagattaacgtggtggtctacataggcgacttaatgtccaggaacaccattagggagtatgagtggatacattctcaaactaaaagactgaaatttaacgccctgattaccacgtacgagattttactcaaagataagactgtcctggggtccatcaattgggcattcctcggggtggacgaagcccatagactgaaaaacgatgattcactgctgtacaaaacgctgattgatttcaagagcaaccaccggcttctgatcacggggaccccattgcagaactcgttgaaagaactttggtctctgctgcatttcatcatgcccgagaaatttgagttttgggaagatttcgaagaggatcacggcaagggcagagaaaatggttaccaaagcctgcataaagtgctggaaccgttcttactgagaagagtaaagaaggatgttgaaaaatccttgcccgcaaaagtggaacaaatcctcagagtggagatgtccgcgctgcagaagcagtactataagtggattttgacacgtaactacaaggctctggcaaaggggactaggggatccacctccggattcctaaatatagtcatggagttgaaaaaatgttgtaatcactgctatctgatcaagccccctgaggaaaatgaacgtgagaacgggcaagaaatcctcctgagcctcatcaggagcagcggtaaactgatcctgctggacaaactgttaacccgtctgagagaacgaggcaatcgcgttttgatatttagtcaaatggtgcgcatgttggacattctcgcggaatatctcacaatcaagcattatccattccagaggctagatggttctattaaaggggagataagaaagcaagctctcgatcacttcaatgctgacgggagtgaggacttttgttttctgctcagcacacgagcagggggtttgggaatcaatttagcaagcgcggacaccgtggtgattttcgatagcgattggaatccccagaacgatctgcaggcccaagccagagctcacagaattgggcagaagaaacaggtcaacatctaccgactggtgacaaagggaaccgtcgaggaggaaattattgaacgggcaaaaaagaaaatggtgttggatcacctcgttattcagagaatggatacaacaggaaggacaatccttgaaaataactcaggtcgatcaaacagtaatccgttcaataaagaggagctgacggccatcttgaaattcggagcagaagatctttttaaagaactggagggtgaagagagtgagccgcaagagatggacattgacgagatcttacgtctcgcagagacaagagaaaatgaagtctctacctcagccacggatgagctgctgtctcagttcaaggttgccaacttcgccactatggaggacgaggaagaattagaagagcgtccccacaaggactgggatgagatcatccctgaggaacaaaggaagaaagtagaggaggaagagagacagaaagaattagaagaaatctatatgctgccgcgaataagatcctctaccaaaaaggcgcagacgaacgatagcgacagcgacaccgaaagcaagcgccaggcacaacgtagcagtgcgtctgaatcagaaacagaagatagtgacgatgataagaaacccaaaaggcggggacggcctagaagtgtgcggaaagatctggtggaaggttttacagatgcagaaattcgcagatttattaaggcatacaagaagttcggactgccgctcgaaagactggaatgtatcgccagagatgccgaattggttgacaagtcagtggctgatctcaaacggttaggggagctaatacacaactcatgcgtaagcgcgatgcaggaatacgaggagcaattgaaggagaatgcctcagaggggaagggccctgggaagcgtcgagggcctacaattaaaatcagtggcgtccaagtcaacgtgaagtctattatacagcatgaggaagaatttgagatgttgcacaagtctattccagtcgaccctgaagagaagaaaaagtactgtctcacctgtagagtgaaagccgcacattttgacgtggaatggggcgtcgaagacgactccagactgctgctaggaatttacgagcacggatacgggaattgggaactcatcaaaaccgatccagaactgaaacttacagataaaatactgccggtggaaacagataaaaaaccacaggggaagcagttacagactagagcagactacctactgaagctgctgagaaagggactggaaaagaagggcgctgttacaggaggcgaggaagcaaagctcaaaaagagaaaacctcgcgtcaaaaaggagaacaaggtacctcgtttgaaggaggagcatggcattgagctgagtagtccaagacactctgataacccatcagaggaaggggaagttaaagatgacggtctggagaaaagtcctatgaagaaaaagcagaaaaagaaagagaacaaggaaaataaggagaagcagatgtcttcccgaaaagataaggaaggcgacaaagagcgaaaaaaatccaaagataagaaagagaagcccaagtccggcgatgcaaagagcagcagcaaaagcaaaagatcccaagggcctgtacatattacggctgggagcgaaccagtgcctatcggagaggacgaagatgacgatctggatcaggagactttcagtatttgtaaggagcgcatgcgacccgtaaagaaagctctgaagcagttggacaagcccgataaaggtctcaatgtgcaggaacaactcgaacacacacgcaactgtttactgaagataggagatagaatcgctgaatgcttgaaagcgtacagcgatcaggagcacataaagctctggcgtagaaatttatggatcttcgtgagtaagttcactgagtttgacgcgagaaaactgcacaagctctataagatggcccacaagaagcggagtcaggaagaggaagaacagaaaaaaaaggacgacgtcaccgggggaaaaaaaccatttagacctgaagcatcagggtcctcacgggattctctgatctctcagtctcatacgagtcataatttgcacccacagaaacctcacctgcccgcatcacacgggcctcagatgcatggtcatcctagagacaattacaaccaccctaacaagcgtcacttttccaatgccgataggggagattggcagagagaaaggaagttcaattacggtgggggtaacaacaaccctccgtggggatctgacaggcaccatcagtacgagcaacactggtacaaggaccatcactacggagaccgtaggcatatggatgcccatcgcagcggatcctacaggcccaacaacatgagccggaaacggccatacgatcagtatagctctgatcgcgatcatagaggacatagggactactacgacagatacgctaagggttgtgaaacacctggggcaaacttgtgccaggagctcttcctgggacgcaagtac

SEQ ID NO: 96981 - DNA, 9857 bp, Artificial Sequence
  derived and/or modified sequence
taaagaaggaaaaacttgaatttatattatgaaattaaggttttacttttatttagcaatcatttcacccattgggggattaatttttaaaaagattagtacttagctgagctttagattctctaagaattatccctttttcaaaatggcttgataaaacaccacttcctgtccagggaggaagttattttagctcaaggactgaaatatttagcagatctttagacaaaaggaacaaattacatttctctctggcttaaaaagggtgcttgagccagagggggttaagaagccctcccccctccccctgttggggtggtctggaggggcagggaggtgtgggggtgggggtccttaggctccctgggatggaggatctgtctctctctctctctctcctttttttttttttggtggagatgaaggggtgggtctatggtacatcacctgagttgtggggtaaatgtagagagtgtcaatcaaaggcagagctctcagagctgggaaggaggctctagatggcggctgtgccttagagagagcgcgctctgctccctgcctttgcctcactttacgcaactttccctaactttcgggcagcctcagggggcccccgtagccccctgcctttcctagggacttactggggtcgattcgaacctttttttgggagaaaagcagcttttaggagctttcttttcgtgccttgttggaaagaagcagccgtactgagagcccaggtcgttgttttttccagcttagaagccatggcgcacctccatttttgtgcgctctcctaatgaggttttttttctttcggacctgttttagtattaattattgctttatttttttgaccagttaacatatttgagggttattttatttatttttcgttttttaacggaggattttgcctttatttttaattatttgggatctgatatttttctactagtagataggactcttggtttggacatactacatggatcagtaaatacctgggcacaggacttcaaagcaaacacagattccccctcccccttaatatttaagaattaaaagatgatgagaaataaggacaaaagccaagaggaggacagttcgctacacagcaatgcatcgagtcactcagcctctgaagaagcttcgggttcagactcaggcagtcagtcggaaagtgagcagggaagtgatccaggaagtggacatggcagcgagtcgaacagcagctctgaatcttctgagagtcagtcggaatctgagagcgaatcagcaggttccaaatcccagccagtcctcccagaagccaaagagaagccagcctctaagaaggaacggatagctgatgtgaagaagatgtgggaagaatatcctgatgtttatggggtcaggcggtcaaaccgaagcagacaagaaccatcgcgatttaatattaaggaagaggcaagtagcgggtctgagagtgggagcccaaaaagaagaggccagaggcagctgaaaaaacaagaaaaatggaaacaggaaccctcagaagatgaacaggaacaaggcaccagtgcagagagtgagccagaacaaaaaaaagtaaaagccagaagacctgtccccagaagaacagtgcccaaacctcgtgttaaaaagcagccgaagactcagcgtggaaagagaaaaaagcaagattcttctgatgaggatgatgatgatgacgaagctcccaaaaggcagactcgtcgaagagcggctaaaaacgttagttacaaagaagatgatgactttgagactgactcagatgatctcattgaaatgactggagaaggagttgatgaacagcaagataatagtgaaactattgaaaaggtcttagattcaagactgggaaagaaaggagccactggagcatctactactgtatatgcgattgaagctaatggcgaccctagtggtgactttgacactgaaaaggatgaaggtgaaatccagtacctcatcaagtggaagggttggtcttacatccacagcacatgggagagtgaagaatccttacagcaacagaaagtgaagggcctaaaaaaactagagaacttcaagaaaaaagaggacgaaatcaaacaatggttagggaaagtttctcctgaagatgtagaatatttcaattgccaacaggagctggcttcagagttgaataaacagtatcagatagtagaaagagtaatagctgtgaagacaagtaaatctacattgggtcaaacagattttccagctcatagtcggaagccggcaccctcaaatgagcccgaatatctatgtaaatggatgggactcccctattcagagtgtagctgggaagatgaagccctcattggaaagaaattccagaattgcattgacagcttccacagtaggaacaactcaaaaaccatcccaacaagagaatgcaaggccctgaagcagagaccacgatttgtagctttaaagaaacaacctgcatatttaggaggggagaatctggaacttcgagattatcagctagaaggtctaaactggctagctcattcctggtgcaaaaataatagtgtaatccttgctgatgaaatgggcctaggaaagaccatccagaccatatcattcctctcctacctgttccaccaacaccagctgtatggcccctttcttatagtcgtccctttatccaccctcacctcatggcagagagagtttgaaatctgggcaccagagattaacgtagtggtttacataggtgacctgatgagcagaaatacgatacgggaatatgaatggattcattcccaaaccaaaagattgaagttcaacgcacttataacaacatatgagatcctcttgaaagataagactgtgctgggcagtattaactgggcctttctgggagtggatgaagcccatcggttgaagaatgatgactctttattgtataaaactctgattgatttcaagtccaaccataggctcctgattacggggacccctcttcagaattccctcaaagagctctggtccttgctgcactttattatgccggagaagtttgaattttgggaagattttgaagaagaccatgggaaggggagagaaaatggctaccagagtcttcataaggtgctagagcctttccttctccggagagtcaaaaaagatgtggagaaatcccttcctgctaaagtggaacagattctcagggtggagatgtcagcccttcagaaacagtattacaagtggattctgaccaggaattacaaggctcttgccaaaggaacaagaggcagcacatctggttttcttaatattgtgatggaactgaaaaaatgttgcaaccactgctatctgattaaaccccctgaagaaaatgaaagggaaaatggacaggagattcttctgtccctcataaggagcagtgggaagttgattttattagacaaactgttgacaagacttcgagaaagggggaatcgagtgcttatcttctctcagatggtgagaatgttggatatcctggctgaatacctaactattaaacactatcctttccagcgtctggatggttccatcaagggagaaatccgaaaacaggcactggaccacttcaatgcagatgggtctgaggacttctgtttcctgctctcgacaagggctggtggcctgggaatcaatttggcttcagcggacacagtcgtcatctttgactctgactggaacccccagaatgacttgcaggcacaagcccgagcgcatagaattggtcaaaagaagcaggtaaatatttaccgcttagttacaaaggggactgtggaggaggagatcatagaacgggccaaaaagaagatggtattagatcatctggtgattcagcgcatggacaccactggccggacgatcctggaaaacaactcaggaaggtccaactcaaatccttttaataaagaagagctgacagctattttgaaatttggagcagaggatctcttcaaagaactggaaggggaggaatcagaacctcaggaaatggatatagatgaaattttgcggttggctgaaacgagagagaatgaagtgtcaacaagtgcaacagatgaacttctatcacagtttaaggttgccaactttgcaacaatggaagatgaagaagagctagaagagcgtcctcacaaggactgggatgagatcattccagaggaacaaaggaaaaaagtagaggaggaagagcggcagaaggagctagaagaaatttatatgctgcctcgaattcggagttccactaaaaaggctcagacaaatgacagtgactctgacactgagtctaagaggcaggcccagagatcctctgcttctgagagtgaaacggaagactctgatgatgacaagaagccaaagcgcagagggcgtccgaggagtgtgcggaaggacctcgtggagggatttactgatgcagagatccgaaggttcatcaaggcttataagaagtttggtctccctcttgaacggctggagtgcatagcacgtgatgctgagctggtagataagtcggtggcagatctgaagcgcctgggtgaactgatccacaacagctgtgtgtcagcaatgcaggaatacgaagagcagctgaaagaaaatgccagcgagggaaaaggaccagggaaaaggagaggtccaacaatcaagatatccggagttcaggttaatgtgaaatccattatccaacatgaagaggagtttgagatgctgcataaatctatccctgtggaccctgaagaaaaaaaaaaatactgcttaacctgtcgtgtcaaagctgcacattttgatgtagagtggggggtggaagatgattctcgcctgttgctggggatttatgaacatggctatggaaactgggagttaattaaaacagacccagagcttaaattaactgacaaaattctgccggtggagacagataaaaagcctcaggggaagcagctacagacccgagcggattacttgttgaagctgctcagaaagggtctggagaagaagggggctgtgacaggtggggaagaggccaaattaaagaagcggaagcctcgggtaaagaaggaaaacaaagtgcccaggctgaaagaggagcatggaattgagctttcatctcctaggcattcagataatccatcagaagagggagaagtgaaagatgatggcttggaaaaaagtccaatgaaaaaaaaacagaagaagaaagagaacaaggagaacaaggagaaacaaatgagttctaggaaagacaaagaaggggacaaggaaagaaagaagtcaaaagataagaaagagaagcctaaaagtggtgatgccaaatcttcgagtaaatcaaagcgatctcagggtcctgtccatattacagcaggaagtgaacctgtccccattggagaggatgaggatgatgatctggaccaggagacattcagcatatgtaaggagaggatgaggcccgtgaaaaaggcactgaaacagctcgacaaacctgacaaggggctcaacgtgcaagaacagctggaacacacccggaactgcctgctgaaaatcggagaccggatagccgagtgccttaaagcctactcagatcaggagcacatcaaactctggaggaggaacctatggatttttgtttccaagtttacagaatttgatgctcgaaaactgcataagttatacaagatggctcataagaaaaggtctcaagaagaagaggagcaaaagaagaaagacgacgtgactgggggtaagaaaccatttcgtccagaggcctcaggctccagccgggactctctgatatctcagtcccatacctcacacaaccttcaccctcagaagcctcatttgcctgcctcccatggcccacagatgcatggacacccaagagataactacaatcaccccaacaagagacacttcagtaatgcagatcgaggagactggcagagggaaagaaagttcaactatggtggtggcaacaacaatccaccatggggaagcgacaggcaccatcagtatgagcagcactggtacaaggaccaccattatggggaccggcgacatatggatgcccaccgttccggaagctatcgacccaacaacatgtccagaaagaggccttatgaccagtacagcagtgaccgagaccaccggggacacagagattattatgacaggcaccatcatgactccaagcggaggagatccgatgaatttaggcctcaaaattaccaccagcaggatttccgacgaatgtctgatcaccgccccgctatgggctaccatggccagggaccctcagaccattaccgctctttccacacagataaactgggggaatataaacagcctctacccccattgcaccctgcagtctcagatcctcgctcacccccttctcagaaatctcctcacgattccaagtcacccctggatcataggtctcctttggagagatcactagaacagaaaaacaacccagattataactggaatgttcggaaaacataaaggacagctcgtaaaggagagagtaagagtcaccaaacacgtggatatttttggtctgatcctacagtagccggttatctagaccagtaagtggagttttggacatgctgctgctgtcaactcactggctgaaggagcacttcaaggaatgggaggcctttcactgggtccagctctgattcgggtcaccactcctgcactttggcaccccatcccattccagcctagttctggcctcccactttgacgggcacttggaggaggagctgactgtgtgtgtaccagcttcactgggatgtgtttccccagtcaaggaacaggggatcttcagagtcatgaatgttttcttgccagggtcagtgttcccaggaccttagtgcatggtcggggcaggaactggtgcatggaggctgctgggacctggtgaacagtgtgtgatttggttgatttggttcactctgacatgatggatgctgctgatggggagtggcgagttggggcaagcgggtggggacaagcataggacttgaaggggagcaggtacacccctcaaatgtgttcttgggagaagtgatacactcggcctcattatgtgaaacctgtgggtggggttggggtggagaagtagagagagggcaacagcttccacaactgcttcatctctgccaacactaatttttcccacactgtctttgtacatttcagagctttggtctcctgagtgggcctccttttcccactgtgccagggaaggtaggtttctctggctgactgagtactgtgagtgaggcaacactgatgccagcatgggtcttacttgactggggagtaggctgagtgaggggtagggtggggtaggtggggagtagtgtggccagggaactggaatccctggtggatttctgattcctgtggtgagaaggaaagctacaggacctggagaaggggatgcagaggcaggcctgctgaccaacttgttgcaatcacaaaggtgggggtcctggtgcaggcagtgaacaggcttctaatgtggggttcagtagtgccagcaagtgggggaaactttcagtattgcgctaggtcaacacttcctgctgcatttccttccctttgcacagcttgaagaaatagagtagacagaatcacacatcatgtggtgggcagatggaaataagtacctgtggtgaacaagtttctactgtagttggagatcattagaattgaattcagtttctcttagaatataatcaggtataaacctaagttaaactttttcccaaacaaggagcatccaaagacacagtgacttgagctatagatagtaaaaatcatacgagagttgaactgagtcaggtttaggaagcaagtttggttgcatcaattaagcaggctcttttcaattgactgatgctggggccttcagttttattctcagtatagattgccagtattgttaagagtatccaaaggcctttctagatggagacagaataactgacttgaacatacagtgtgcctgtaagtgtccaggctcagagctggtgaaaacccttctgttgggcgtgtgcagggttaaactcctgaagtaacttgtgaggacttcagtgcttgctggtgtcctgggcagcaccatgaatgcctttaccaagacatgccaagttggatcccccgaatgaagcagatgtggctgtggtgtgacccttgctccctgctacacagagcatcgcagggctggcctgtgtggtttccagatgagggtctgggtcccggaagcttgtgttgagagctcagtggacccaccccgcttgctgaaccctcacagttcttggggttgtccagcctggacttgtagcacacatgtcctgaagcaaagctccggtgactgcatgagccacctggccacagtcctcccatggagggcctgccgtgacgctcagtggagagggcagggcctgtgtctccacttaggccacacagtgatgaggaaaccacagatggagcttcttgccgataatactgactctagcccatgattgccttgcccaagccaaagaggaaggttaggttggcttgtcgagcccttgagcgttgggagatggggtgggaaggaggtgagcccctgcagagagttgggtagtgtccttcaggaatgaaaggaggggcaaaggagtcaccagaggtcctgcatttccatcagggtttccacagtcatcagggcttctctcttgagttgctgataggagatgtgagttatgcccagagatgtcttatcgtgaggaaaaagaaacttccttttgttcacatttaggactctcagtgccatatgaagtagcaaaaggcagtatcggccagatcagtgttacattgattctaaaattacagtgtccccattagacaactattttaggtgctggagtatgtttgaagagtgtgctgggaaaaaggaagcatttcttcattgatttaaatcagtatgaatattatatgcctaaataaaaaatttgcacaggtaaattctctcacttgtgaatgggagaagctgccccaggaatctgtgaggatggtattccctggagtctggctttgaaagatttcattgttggtagaaataacaggttgagaaagagggagttagcatcacctaaaacctgcacgtgaacaagggttgacatgatacactatggccttagaaaagggccaggtgaaaccccaagctaatcactgcggtctttcagagccggacagacaggtgccagcagagcccggggctcactctcctttcagtcattcctcagcccttcgaagggaagcccaaacactttgcacgctgtgctgcagacattctggcctggtgtgtctgaaagttgcatcagtcctcacggtgcaaacacagttgatttaggaagtcacacaatgacactgaaatcctacagaccaaaatccacttgtcagcaggagcagcagcccaggcccagcaccagcggtcttccggctcctctgagggctgccacgttgggcgaggggagccatgccaagggtccaggctgctttaggccatctgtgccccactcatctggggacagatggtttttctttattgtaaaattgtggacttttaaaacctgttgactaaacagtaattaatttatatttgtgaaaaatgccactgtcctagtgatttctgatgtaaataatgttgtttatatagtatgtattaaattttcctacattgtaaaactgctgtacttttgattcttgtatattaaaaagtgttactgagcatttttagaattgggctaaca

SEQ ID NO: 96982 - DNA, 7764 bp, Artificial Sequence
  derived and/or modified sequence
ccctgggatggaggatctgtctctctctctctctctcctttttttttttttggtggagatgaaggggtgggtctatggtacatcacctgagttgtggggtaaatgtagagagtgtcaatcaaaggcagagctctcagagctgggaaggaggctctagatggcggctgtgccttagagagagcgcgctctgctccctgcctttgcctcactttacgcaactttccctaactttcgggcagcctcagggggcccccgtagccccctgcctttcctagggacttactggggtcgattcgaacctttttttgggagaaaagcagcttttaggagctttcttttcgtgccttgttggaaagaagcagccgtactgagagcccaggtcgttgttttttccagcttagaagccatggcgcacctccatttttgtgcgctctcctaatgaggttttttttctttcggacctgttttagtattaattattgctttatttttttgaccagttaacatatttgagggttattttatttatttttcgttttttaacggaggattttgcctttatttttaattatttgggatctgatatttttctactagtagataggactcttggtttggacatactacatggatcagtaaatacctgggcacaggacttcaaagcaaacacagattccccctcccccttaatatttaagaattaaaagatgatgagaaataaggacaaaagccaagaggaggacagttcgctacacagcaatgcatcgagtcactcagcctctgaagaagcttcgggttcagactcaggcagtcagtcggaaagtgagcagggaagtgatccaggaagtggacatggcagcgagtcgaacagcagctctgaatcttctgagagtcagtcggaatctgagagcgaatcagcaggttccaaatcccagccagtcctcccagaagccaaagagaagccagcctctaagaaggaacggatagctgatgtgaagaagatgtgggaagaatatcctgatgtttatggggtcaggcggtcaaaccgaagcagacaagaaccatcgcgatttaatattaaggaagaggcaagtagcgggtctgagagtgggagcccaaaaagaagaggccagaggcagctgaaaaaacaagaaaaatggaaacaggaaccctcagaagatgaacaggaacaaggcaccagtgcagagagtgagccagaacaaaaaaaagtaaaagccagaagacctgtccccagaagaacagtgcccaaacctcgtgttaaaaagcagccgaagactcagcgtggaaagagaaaaaagcaagattcttctgatgaggatgatgatgatgacgaagctcccaaaaggcagactcgtcgaagagcggctaaaaacgttagttacaaagaagatgatgactttgagactgactcagatgatctcattgaaatgactggagaaggagttgatgaacagcaagataatagtgaaactattgaaaaggtcttagattcaagactgggaaagaaaggagccactggagcatctactactgtatatgcgattgaagctaatggcgaccctagtggtgactttgacactgaaaaggatgaaggtgaaatccagtacctcatcaagtggaagggttggtcttacatccacagcacatgggagagtgaagaatccttacagcaacagaaagtgaagggcctaaaaaaactagagaacttcaagaaaaaagaggacgaaatcaaacaatggttagggaaagtttctcctgaagatgtagaatatttcaattgccaacaggagctggcttcagagttgaataaacagtatcagatagtagaaagagtaatagctgtgaagacaagtaaatctacattgggtcaaacagattttccagctcatagtcggaagccggcaccctcaaatgagcccgaatatctatgtaaatggatgggactcccctattcagagtgtagctgggaagatgaagccctcattggaaagaaattccagaattgcattgacagcttccacagtaggaacaactcaaaaaccatcccaacaagagaatgcaaggccctgaagcagagaccacgatttgtagctttaaagaaacaacctgcatatttaggaggggagaatctggaacttcgagattatcagctagaaggtctaaactggctagctcattcctggtgcaaaaataatagtgtaatccttgctgatgaaatgggcctaggaaagaccatccagaccatatcattcctctcctacctgttccaccaacaccagctgtatggcccctttcttatagtcgtccctttatccaccctcacctcatggcagagagagtttgaaatctgggcaccagagattaacgtagtggtttacataggtgacctgatgagcagaaatacgatacgggaatatgaatggattcattcccaaaccaaaagattgaagttcaacgcacttataacaacatatgagatcctcttgaaagataagactgtgctgggcagtattaactgggcctttctgggagtggatgaagcccatcggttgaagaatgatgactctttattgtataaaactctgattgatttcaagtccaaccataggctcctgattacggggacccctcttcagaattccctcaaagagctctggtccttgctgcactttattatgccggagaagtttgaattttgggaagattttgaagaagaccatgggaaggggagagaaaatggctaccagagtcttcataaggtgctagagcctttccttctccggagagtcaaaaaagatgtggagaaatcccttcctgctaaagtggaacagattctcagggtggagatgtcagcccttcagaaacagtattacaagtggattctgaccaggaattacaaggctcttgccaaaggaacaagaggcagcacatctggttttcttaatattgtgatggaactgaaaaaatgttgcaaccactgctatctgattaaaccccctgaagaaaatgaaagggaaaatggacaggagattcttctgtccctcataaggagcagtgggaagttgattttattagacaaactgttgacaagacttcgagaaagggggaatcgagtgcttatcttctctcagatggtgagaatgttggatatcctggctgaatacctaactattaaacactatcctttccagcgtctggatggttccatcaagggagaaatccgaaaacaggcactggaccacttcaatgcagatgggtctgaggacttctgtttcctgctctcgacaagggctggtggcctgggaatcaatttggcttcagcggacacagtcgtcatctttgactctgactggaacccccagaatgacttgcaggcacaagcccgagcgcatagaattggtcaaaagaagcaggtaaatatttaccgcttagttacaaaggggactgtggaggaggagatcatagaacgggccaaaaagaagatggtattagatcatctggtgattcagcgcatggacaccactggccggacgatcctggaaaacaactcaggaaggtccaactcaaatccttttaataaagaagagctgacagctattttgaaatttggagcagaggatctcttcaaagaactggaaggggaggaatcagaacctcaggaaatggatatagatgaaattttgcggttggctgaaacgagagagaatgaagtgtcaacaagtgcaacagatgaacttctatcacagtttaaggttgccaactttgcaacaatggaagatgaagaagagctagaagagcgtcctcacaaggactgggatgagatcattccagaggaacaaaggaaaaaagtagaggaggaagagcggcagaaggagctagaagaaatttatatgctgcctcgaattcggagttccactaaaaaggctcagacaaatgacagtgactctgacactgagtctaagaggcaggcccagagatcctctgcttctgagagtgaaacggaagactctgatgatgacaagaagccaaagcgcagagggcgtccgaggagtgtgcggaaggacctcgtggagggatttactgatgcagagatccgaaggttcatcaaggcttataagaagtttggtctccctcttgaacggctggagtgcatagcacgtgatgctgagctggtagataagtcggtggcagatctgaagcgcctgggtgaactgatccacaacagctgtgtgtcagcaatgcaggaatacgaagagcagctgaaagaaaatgccagcgagggaaaaggaccagggaaaaggagaggtccaacaatcaagatatccggagttcaggttaatgtgaaatccattatccaacatgaagaggagtttgagatgctgcataaatctatccctgtggaccctgaagaaaaaaaaaaatactgcttaacctgtcgtgtcaaagctgcacattttgatgtagagtggggggtggaagatgattctcgcctgttgctggggatttatgaacatggctatggaaactgggagttaattaaaacagacccagagcttaaattaactgacaaaattctgccggtggagacagataaaaagcctcaggggaagcagctacagacccgagcggattacttgttgaagctgctcagaaagggtctggagaagaagggggctgtgacaggtggggaagaggccaaattaaagaagcggaagcctcgggtaaagaaggaaaacaaagtgcccaggctgaaagaggagcatggaattgagctttcatctcctaggcattcagataatccatcagaagagggagaagtgaaagatgatggcttggaaaaaagtccaatgaaaaaaaaacagaagaagaaagagaacaaggagaacaaggagaaacaaatgagttctaggaaagacaaagaaggggacaaggaaagaaagaagtcaaaagataagaaagagaagcctaaaagtggtgatgccaaatcttcgagtaaatcaaagcgatctcagggtcctgtccatattacagcaggaagtgaacctgtccccattggagaggatgaggatgatgatctggaccaggagacattcagcatatgtaaggagaggatgaggcccgtgaaaaaggcactgaaacagctcgacaaacctgacaaggggctcaacgtgcaagaacagctggaacacacccggaactgcctgctgaaaatcggagaccggatagccgagtgccttaaagcctactcagatcaggagcacatcaaactctggaggaggaacctatggatttttgtttccaagtttacagaatttgatgctcgaaaactgcataagttatacaagatggctcataagaaaaggtctcaagaagaagaggagcaaaagaagaaagacgacgtgactgggggtaagaaaccatttcgtccagaggcctcaggctccagccgggactctctgatatctcagtcccatacctcacacaaccttcaccctcagaagcctcatttgcctgcctcccatggcccacagatgcatggacacccaagagataactacaatcaccccaacaagagacacttcagtaatgcagatcgaggagactggcagagggaaagaaagttcaactatggtggtggcaacaacaatccaccatggggaagcgacaggcaccatcagtatgagcagcactggtacaaggaccaccattatggggaccggcgacatatggatgcccaccgttccggaagctatcgacccaacaacatgtccagaaagaggccttatgaccagtacagcagtgaccgagaccaccggggacacagagattattatgacaggtatgcaaaaggctgtgagacaccaggtgccaacctttgccaggagctgtttctagggagaaagtgacgtatacatgaatgtatttatctatcaaattactgaagatctcatcatgcatgtgtcagccacagcgaatcccatgtcttggttataggttttatgttttgttttgtgggtcatagggagcacatttcacctgtgcaggaaaagagttttctgccgtcttttgaggaaatctagtgaagaggtcgccataaaatattagagtcaacaaccaaaattattaagctctgtgcgaggctgtcagccacactaggtatcagggatcccgagatgggtaccagcccacagtccttacctgccacgagcccataattgaagagtcaaagtcttctgaagctgcaccctctttacttcagtacaatgccaccagtagtacgatgagccgaagctttacattgtgagagtagcaagtccagggagagctaaagaggttttatctgtatttcctaatttcaaatcttggataatttaacctcatagcagctttggttttccctgggctgatgatgtgcgtcatttgcactgtaccttgaatttacagtgggaaaatttcatataaacgtgtcaaagtcgtgctttgtttttggaagatctggtaacagcagcccgcattagcagagagctgtagctgagtagctgccacctcgttgggagactgcccctcgctcccacccttctctattgtctggacccagtgggcatcttgccctgcgttcttctagtaggtctgtatttctatttgatgtcactttccttttgcctgaaggactttttctgctggtgataaactctttcagtgtttgtatatatgcctgaaaaagtattttgccttcatttttgaaagtagtttttgctgagtgtatacatttttggctttacagtttctttcagtgctttaaagatgtacctctgctatttacttgcattgttttgtgatgaaaaatctgtcatccttatctttgttcctctttacataatgttccttttaaaaaaaatcactgattatgatgtgccttggtgtatttttccttggtttcttgtgcttggaaatttttgaacttcttggatctgtgggtttattgtttccataaaatttggaaatttttacaatcttcttcaaatattttttctgatcccccactctctcttcttctttggagattctcattacacctatattagcttgcttgaagttgtctcacagctcacttgtattctgttgacttttaaaaaattatgctttctgtttcactgtggatagtttctattgctacctcttcaagttcactaatactttccttttcaatgtcaagactgctgtgaggcccatccagtgtactttgcattttatacattgtagttctaaaagttcggaaagttgtttttgggtctttttatatatgttctgtgtctaaccttttaaaacctggaacacagatataacaatggttttgatgtccttgtctgcgaatcttatcacttgggtcagtttcagttgatacctcctcactgtgggtcttgctcccctggtgctttctgtgcctagtaatttttgtcagatgccagatgtaacatttaccttgttgggtgctggatatttctgtattcctgtaagtattctggagctttgttatgagttgcaggttatttggaagcagtttcctttttcaggtcttgctgttaagattcgttaggtagaaccagagcagtgctcagtcaagggctaatgattgcccacccccaaggtaaagagcctcattgcactctacccaattgcgttagtctgttttgcaggaatacctgaggctgggtaatttatagagaaaagagttttatttgg

SEQ ID NO: 96983 - DNA, 5487 bp, Artificial Sequence
  derived and/or modified sequence
atgatgagaaacaaggacaagagccaggaggaggacagcagcctgcacagcaacgccagcagccacagcgccagcgaggaggccagcggcagcgacagcggcagccagagcgagagcgagcagggcagcgaccccggcagcggccacggcagcgagagcaacagcagcagcgagagcagcgagagccagagcgagagcgagagcgagagcgccggcagcaagagccagcccgtgctgcccgaggccaaggagaagcccgccagcaagaaggagagaatcgccgacgtgaagaagatgtgggaggagtaccccgacgtgtacggcgtgagaagaagcaacagaagcagacaggagcccagcagattcaacatcaaggaggaggccagcagcggcagcgagagcggcagccccaagagaagaggccagagacagctgaagaagcaggagaagtggaagcaggagcccagcgaggacgagcaggagcagggcaccagcgccgagagcgagcccgagcagaagaaggtgaaggccagaagacccgtgcccagaagaaccgtgcccaagcccagagtgaagaagcagcccaagacccagagaggcaagagaaagaagcaggacagcagcgacgaggacgacgacgacgacgaggcccccaagagacagaccagaagaagagccgccaagaacgtgagctacaaggaggacgacgacttcgagaccgacagcgacgacctgatcgagatgaccggcgagggcgtggacgagcagcaggacaacagcgagaccatcgagaaggtgctggacagcagactgggcaagaagggcgccaccggcgccagcaccaccgtgtacgccatcgaggccaacggcgaccccagcggcgacttcgacaccgagaaggacgagggcgagatccagtacctgatcaagtggaagggctggagctacatccacagcacctgggagagcgaggagagcctgcagcagcagaaggtgaagggcctgaagaagctggagaacttcaagaagaaggaggacgagatcaagcagtggctgggcaaggtgagccccgaggacgtggagtacttcaactgccagcaggagctggccagcgagctgaacaagcagtaccagatcgtggagagagtgatcgccgtgaagaccagcaagagcaccctgggccagaccgacttccccgcccacagcagaaagcccgcccccagcaacgagcccgagtacctgtgcaagtggatgggcctgccctacagcgagtgcagctgggaggacgaggccctgatcggcaagaagttccagaactgcatcgacagcttccacagcagaaacaacagcaagaccatccccaccagagagtgcaaggccctgaagcagagacccagattcgtggccctgaagaagcagcccgcctacctgggcggcgagaacctggagctgagagactaccagctggagggcctgaactggctggcccacagctggtgcaagaacaacagcgtgatcctggccgacgagatgggcctgggcaagaccatccagaccatcagcttcctgagctacctgttccaccagcaccagctgtacggccccttcctgatcgtggtgcccctgagcaccctgaccagctggcagagagagttcgagatctgggcccccgagatcaacgtggtggtgtacatcggcgacctgatgagcagaaacaccatcagagagtacgagtggatccacagccagaccaagagactgaagttcaacgccctgatcaccacctacgagatcctgctgaaggacaagaccgtgctgggcagcatcaactgggccttcctgggcgtggacgaggcccacagactgaagaacgacgacagcctgctgtacaagaccctgatcgacttcaagagcaaccacagactgctgatcaccggcacccccctgcagaacagcctgaaggagctgtggagcctgctgcacttcatcatgcccgagaagttcgagttctgggaggacttcgaggaggaccacggcaagggcagagagaacggctaccagagcctgcacaaggtgctggagcccttcctgctgagaagagtgaagaaggacgtggagaagagcctgcccgccaaggtggagcagatcctgagagtggagatgagcgccctgcagaagcagtactacaagtggatcctgaccagaaactacaaggccctggccaagggcaccagaggcagcaccagcggcttcctgaacatcgtgatggagctgaagaagtgctgcaaccactgctacctgatcaagccccccgaggagaacgagagagagaacggccaggagatcctgctgagcctgatcagaagcagcggcaagctgatcctgctggacaagctgctgaccagactgagagagagaggcaacagagtgctgatcttcagccagatggtgagaatgctggacatcctggccgagtacctgaccatcaagcactaccccttccagagactggacggcagcatcaagggcgagatcagaaagcaggccctggaccacttcaacgccgacggcagcgaggacttctgcttcctgctgagcaccagagccggcggcctgggcatcaacctggccagcgccgacaccgtggtgatcttcgacagcgactggaacccccagaacgacctgcaggcccaggccagagcccacagaatcggccagaagaagcaggtgaacatctacagactggtgaccaagggcaccgtggaggaggagatcatcgagagagccaagaagaagatggtgctggaccacctggtgatccagagaatggacaccaccggcagaaccatcctggagaacaacagcggcagaagcaacagcaaccccttcaacaaggaggagctgaccgccatcctgaagttcggcgccgaggacctgttcaaggagctggagggcgaggagagcgagccccaggagatggacatcgacgagatcctgagactggccgagaccagagagaacgaggtgagcaccagcgccaccgacgagctgctgagccagttcaaggtggccaacttcgccaccatggaggacgaggaggagctggaggagagaccccacaaggactgggacgagatcatccccgaggagcagagaaagaaggtggaggaggaggagagacagaaggagctggaggagatctacatgctgcccagaatcagaagcagcaccaagaaggcccagaccaacgacagcgacagcgacaccgagagcaagagacaggcccagagaagcagcgccagcgagagcgagaccgaggacagcgacgacgacaagaagcccaagagaagaggcagacccagaagcgtgagaaaggacctggtggagggcttcaccgacgccgagatcagaagattcatcaaggcctacaagaagttcggcctgcccctggagagactggagtgcatcgccagagacgccgagctggtggacaagagcgtggccgacctgaagagactgggcgagctgatccacaacagctgcgtgagcgccatgcaggagtacgaggagcagctgaaggagaacgccagcgagggcaagggccccggcaagagaagaggccccaccatcaagatcagcggcgtgcaggtgaacgtgaagagcatcatccagcacgaggaggagttcgagatgctgcacaagagcatccccgtggaccccgaggagaagaagaagtactgcctgacctgcagagtgaaggccgcccacttcgacgtggagtggggcgtggaggacgacagcagactgctgctgggcatctacgagcacggctacggcaactgggagctgatcaagaccgaccccgagctgaagctgaccgacaagatcctgcccgtggagaccgacaagaagccccagggcaagcagctgcagaccagagccgactacctgctgaagctgctgagaaagggcctggagaagaagggcgccgtgaccggcggcgaggaggccaagctgaagaagagaaagcccagagtgaagaaggagaacaaggtgcccagactgaaggaggagcacggcatcgagctgagcagccccagacacagcgacaaccccagcgaggagggcgaggtgaaggacgacggcctggagaagagccccatgaagaagaagcagaagaagaaggagaacaaggagaacaaggagaagcagatgagcagcagaaaggacaaggagggcgacaaggagagaaagaagagcaaggacaagaaggagaagcccaagagcggcgacgccaagagcagcagcaagagcaagagaagccagggccccgtgcacatcaccgccggcagcgagcccgtgcccatcggcgaggacgaggacgacgacctggaccaggagaccttcagcatctgcaaggagagaatgagacccgtgaagaaggccctgaagcagctggacaagcccgacaagggcctgaacgtgcaggagcagctggagcacaccagaaactgcctgctgaagatcggcgacagaatcgccgagtgcctgaaggcctacagcgaccaggagcacatcaagctgtggagaagaaacctgtggatcttcgtgagcaagttcaccgagttcgacgccagaaagctgcacaagctgtacaagatggcccacaagaagagaagccaggaggaggaggagcagaagaagaaggacgacgtgaccggcggcaagaagcccttcagacccgaggccagcggcagcagcagagacagcctgatcagccagagccacaccagccacaacctgcacccccagaagccccacctgcccgccagccacggcccccagatgcacggccaccccagagacaactacaaccaccccaacaagagacacttcagcaacgccgacagaggcgactggcagagagagagaaagttcaactacggcggcggcaacaacaaccccccctggggcagcgacagacaccaccagtacgagcagcactggtacaaggaccaccactacggcgacagaagacacatggacgcccacagaagcggcagctacagacccaacaacatgagcagaaagagaccctacgaccagtacagcagcgacagagaccacagaggccacagagactactacgacagacaccaccacgacagcaagagaagaagaagcgacgagttcagaccccagaactaccaccagcaggacttcagaagaatgagcgaccacagacccgccatgggctaccacggccagggccccagcgaccactacagaagcttccacaccgacaagctgggcgagtacaagcagcccctgccccccctgcaccccgccgtgagcgaccccagaagcccccccagccagaagagcccccacgacagcaagagccccctggaccacagaagccccctggagagaagcctggagcagaagaacaaccccgactacaactggaacgtgagaaagacctag

SEQ ID NO: 96984 - DNA, 5220 bp, Artificial Sequence
  derived and/or modified sequence
atgatgagaaacaaggacaagagccaggaggaggacagcagcctgcacagcaacgccagcagccacagcgccagcgaggaggccagcggcagcgacagcggcagccagagcgagagcgagcagggcagcgaccccggcagcggccacggcagcgagagcaacagcagcagcgagagcagcgagagccagagcgagagcgagagcgagagcgccggcagcaagagccagcccgtgctgcccgaggccaaggagaagcccgccagcaagaaggagagaatcgccgacgtgaagaagatgtgggaggagtaccccgacgtgtacggcgtgagaagaagcaacagaagcagacaggagcccagcagattcaacatcaaggaggaggccagcagcggcagcgagagcggcagccccaagagaagaggccagagacagctgaagaagcaggagaagtggaagcaggagcccagcgaggacgagcaggagcagggcaccagcgccgagagcgagcccgagcagaagaaggtgaaggccagaagacccgtgcccagaagaaccgtgcccaagcccagagtgaagaagcagcccaagacccagagaggcaagagaaagaagcaggacagcagcgacgaggacgacgacgacgacgaggcccccaagagacagaccagaagaagagccgccaagaacgtgagctacaaggaggacgacgacttcgagaccgacagcgacgacctgatcgagatgaccggcgagggcgtggacgagcagcaggacaacagcgagaccatcgagaaggtgctggacagcagactgggcaagaagggcgccaccggcgccagcaccaccgtgtacgccatcgaggccaacggcgaccccagcggcgacttcgacaccgagaaggacgagggcgagatccagtacctgatcaagtggaagggctggagctacatccacagcacctgggagagcgaggagagcctgcagcagcagaaggtgaagggcctgaagaagctggagaacttcaagaagaaggaggacgagatcaagcagtggctgggcaaggtgagccccgaggacgtggagtacttcaactgccagcaggagctggccagcgagctgaacaagcagtaccagatcgtggagagagtgatcgccgtgaagaccagcaagagcaccctgggccagaccgacttccccgcccacagcagaaagcccgcccccagcaacgagcccgagtacctgtgcaagtggatgggcctgccctacagcgagtgcagctgggaggacgaggccctgatcggcaagaagttccagaactgcatcgacagcttccacagcagaaacaacagcaagaccatccccaccagagagtgcaaggccctgaagcagagacccagattcgtggccctgaagaagcagcccgcctacctgggcggcgagaacctggagctgagagactaccagctggagggcctgaactggctggcccacagctggtgcaagaacaacagcgtgatcctggccgacgagatgggcctgggcaagaccatccagaccatcagcttcctgagctacctgttccaccagcaccagctgtacggccccttcctgatcgtggtgcccctgagcaccctgaccagctggcagagagagttcgagatctgggcccccgagatcaacgtggtggtgtacatcggcgacctgatgagcagaaacaccatcagagagtacgagtggatccacagccagaccaagagactgaagttcaacgccctgatcaccacctacgagatcctgctgaaggacaagaccgtgctgggcagcatcaactgggccttcctgggcgtggacgaggcccacagactgaagaacgacgacagcctgctgtacaagaccctgatcgacttcaagagcaaccacagactgctgatcaccggcacccccctgcagaacagcctgaaggagctgtggagcctgctgcacttcatcatgcccgagaagttcgagttctgggaggacttcgaggaggaccacggcaagggcagagagaacggctaccagagcctgcacaaggtgctggagcccttcctgctgagaagagtgaagaaggacgtggagaagagcctgcccgccaaggtggagcagatcctgagagtggagatgagcgccctgcagaagcagtactacaagtggatcctgaccagaaactacaaggccctggccaagggcaccagaggcagcaccagcggcttcctgaacatcgtgatggagctgaagaagtgctgcaaccactgctacctgatcaagccccccgaggagaacgagagagagaacggccaggagatcctgctgagcctgatcagaagcagcggcaagctgatcctgctggacaagctgctgaccagactgagagagagaggcaacagagtgctgatcttcagccagatggtgagaatgctggacatcctggccgagtacctgaccatcaagcactaccccttccagagactggacggcagcatcaagggcgagatcagaaagcaggccctggaccacttcaacgccgacggcagcgaggacttctgcttcctgctgagcaccagagccggcggcctgggcatcaacctggccagcgccgacaccgtggtgatcttcgacagcgactggaacccccagaacgacctgcaggcccaggccagagcccacagaatcggccagaagaagcaggtgaacatctacagactggtgaccaagggcaccgtggaggaggagatcatcgagagagccaagaagaagatggtgctggaccacctggtgatccagagaatggacaccaccggcagaaccatcctggagaacaacagcggcagaagcaacagcaaccccttcaacaaggaggagctgaccgccatcctgaagttcggcgccgaggacctgttcaaggagctggagggcgaggagagcgagccccaggagatggacatcgacgagatcctgagactggccgagaccagagagaacgaggtgagcaccagcgccaccgacgagctgctgagccagttcaaggtggccaacttcgccaccatggaggacgaggaggagctggaggagagaccccacaaggactgggacgagatcatccccgaggagcagagaaagaaggtggaggaggaggagagacagaaggagctggaggagatctacatgctgcccagaatcagaagcagcaccaagaaggcccagaccaacgacagcgacagcgacaccgagagcaagagacaggcccagagaagcagcgccagcgagagcgagaccgaggacagcgacgacgacaagaagcccaagagaagaggcagacccagaagcgtgagaaaggacctggtggagggcttcaccgacgccgagatcagaagattcatcaaggcctacaagaagttcggcctgcccctggagagactggagtgcatcgccagagacgccgagctggtggacaagagcgtggccgacctgaagagactgggcgagctgatccacaacagctgcgtgagcgccatgcaggagtacgaggagcagctgaaggagaacgccagcgagggcaagggccccggcaagagaagaggccccaccatcaagatcagcggcgtgcaggtgaacgtgaagagcatcatccagcacgaggaggagttcgagatgctgcacaagagcatccccgtggaccccgaggagaagaagaagtactgcctgacctgcagagtgaaggccgcccacttcgacgtggagtggggcgtggaggacgacagcagactgctgctgggcatctacgagcacggctacggcaactgggagctgatcaagaccgaccccgagctgaagctgaccgacaagatcctgcccgtggagaccgacaagaagccccagggcaagcagctgcagaccagagccgactacctgctgaagctgctgagaaagggcctggagaagaagggcgccgtgaccggcggcgaggaggccaagctgaagaagagaaagcccagagtgaagaaggagaacaaggtgcccagactgaaggaggagcacggcatcgagctgagcagccccagacacagcgacaaccccagcgaggagggcgaggtgaaggacgacggcctggagaagagccccatgaagaagaagcagaagaagaaggagaacaaggagaacaaggagaagcagatgagcagcagaaaggacaaggagggcgacaaggagagaaagaagagcaaggacaagaaggagaagcccaagagcggcgacgccaagagcagcagcaagagcaagagaagccagggccccgtgcacatcaccgccggcagcgagcccgtgcccatcggcgaggacgaggacgacgacctggaccaggagaccttcagcatctgcaaggagagaatgagacccgtgaagaaggccctgaagcagctggacaagcccgacaagggcctgaacgtgcaggagcagctggagcacaccagaaactgcctgctgaagatcggcgacagaatcgccgagtgcctgaaggcctacagcgaccaggagcacatcaagctgtggagaagaaacctgtggatcttcgtgagcaagttcaccgagttcgacgccagaaagctgcacaagctgtacaagatggcccacaagaagagaagccaggaggaggaggagcagaagaagaaggacgacgtgaccggcggcaagaagcccttcagacccgaggccagcggcagcagcagagacagcctgatcagccagagccacaccagccacaacctgcacccccagaagccccacctgcccgccagccacggcccccagatgcacggccaccccagagacaactacaaccaccccaacaagagacacttcagcaacgccgacagaggcgactggcagagagagagaaagttcaactacggcggcggcaacaacaaccccccctggggcagcgacagacaccaccagtacgagcagcactggtacaaggaccaccactacggcgacagaagacacatggacgcccacagaagcggcagctacagacccaacaacatgagcagaaagagaccctacgaccagtacagcagcgacagagaccacagaggccacagagactactacgacagatacgccaagggctgcgagacccccggcgccaacctgtgccaggagctgttcctgggcagaaagtag

SEQ ID NO: 96985 - protein, 591 aa, Artificial Sequence
  derived and/or modified sequence
MNRFNGLCKVCSERRYRQITIPRGKDGFGFTICCDSPVRVQAVDSGGPAERAGLQQLDTVLQLNERPVEHWKCVELAHEIRSCPSEIILLVWRMVPQVKPGPDGGVLRRASCKSTHDLQSPPNKREKNCTHGVQARPEQRHSCHLVCDSSDGLLLGGWERYTEVAKRGGQHTLPALSRATAPTDPNYIILAPLNPGSQLLRPVYQEDTIPEESGSPSKGKSYTGLGKKSRLMKTVQTMKGHGNYQNCPVVRPHATHSSYGTYVTLAPKVLVFPVFVQPLDLCNPARTLLLSEELLLYEGRNKAAEVTLFAYSDLLLFTKEDEPGRCDVLRNPLYLQSVKLQEGSSEDLKFCVLYLAEKAECLFTLEAHSQEQKKRVCWCLSENIAKQQQLAASPPDSKMSGADTVGDDDEASRKRKSKNLAKDMKNKLGIFRRRNESPGAPPAGKADKMMKSFKPTSEEALKWGESLEKLLVHKYGLAVFQAFLRTEFSEENLEFWLACEDFKKVKSQSKMASKAKKIFAEYIAIQACKEVNLDSYTREHTKDNLQSVTRGCFDLAQKRIFGLMEKDSYPRFLRSDLYLDLINQKKMSPPL

SEQ ID NO: 96986 - DNA, 1776 bp, Artificial Sequence
  derived and/or modified sequence
atgaatcgatttaacggactctgtaaagtgtgctctgaacgaagataccggcaaatcactatcccaaggggtaaagacggctttgggttcacgatatgttgcgactcaccagtaagggtccaggcagttgatagtgggggtcccgcagaaagggccggcttgcagcagctggatacagtgctgcaactgaatgagagacctgtggaacactggaagtgtgtggaactggcccacgaaattagatcctgcccttccgaaattatccttctggtgtggcgaatggttccccaagtaaaaccaggcccagatgggggtgtgctgaggcgggccagttgtaaatctacacacgaccttcagtcaccacccaacaaaagggaaaaaaattgcactcacggggtccaagctaggccagagcagcgccattcatgtcacctcgtctgcgattcaagcgatggcctcctgttaggaggctgggaaaggtacactgaggtagcgaagaggggaggacagcacaccctcccagccctgtcgagagcgactgctcccactgatccaaactatatcatcttggccccgctgaaccccggtagtcagctgcttcgtccagtgtaccaagaggataccatacccgaggagtctggcagccctagtaagggtaaatcgtacaccgggctggggaagaaaagcagactgatgaagacagtacagacaatgaaagggcatggtaattatcagaactgtcccgttgtccgaccacatgccacgcactcctcatacgggacctacgtcacccttgcccctaaagttcttgtcttccccgttttcgtccagccactggacctttgcaaccctgctagaacacttttgctatctgaggagctgctgttatacgagggcaggaataaggccgccgaggtcacgctgttcgcctactctgacctcctgctgtttacgaaagaagacgaaccagggcgctgcgacgtgcttcgcaatccactgtatctccaatccgtgaagctgcaagagggttctagcgaggatttaaaattttgcgtgttgtatctggccgagaaggcggaatgtctctttactctagaagcacactcacaggagcagaagaagcgggtgtgttggtgcttgtcagaaaacattgctaagcagcaacaactggccgctagtccaccagactccaagatgtctggagctgacaccgtgggagacgatgacgaggcgagtcggaagagaaagtctaagaacctggcgaaggacatgaaaaacaagctcggtatatttaggcgacgaaacgagtctcctggcgcaccccctgccggcaaagccgataaaatgatgaagagtttcaagcctaccagtgaggaagcattgaagtggggggaaagtctggagaaactcctagtgcataaatatgggctggctgtgttccaggcgttcttacgaactgagttctctgaggaaaatctggagttttggctggcttgcgaagatttcaagaaggtcaagagccagtccaagatggcctccaaggctaagaaaatcttcgcagaatatattgcaatacaggcttgtaaagaggtcaacctggactcttacacacgggagcacacaaaggataacctgcaatctgtgaccagaggctgcttcgacctcgcgcagaagaggatcttcggattaatggaaaaggacagttatcctagattcctgcggagtgacctctacctcgatctgatcaaccagaagaagatgagccccccactgtag

SEQ ID NO: 96987 - DNA, 1776 bp, Artificial Sequence
  derived and/or modified sequence
atgaaccgcttcaacggcctgtgcaaggtgtgcagcgagcggcgctaccggcagatcaccatcccccggggcaaggatggcttcggcttcaccatctgctgtgacagccctgtgcgggtgcaggccgtggacagcggcggccctgctgagcgggccggcctgcagcagctggacacagtgctgcagctgaatgaaagacctgtggagcactggaagtgtgtggagctggcccacgagatccgcagctgccccagcgagatcatcctgctggtgtggaggatggtgccccaggtgaagccaggcccagatggaggagtgctgcggcgggccagctgcaagagcacccatgacctgcagagcccccccaacaagcgggagaagaactgcacccatggagtgcaggcccggcctgagcagaggcacagctgccacctggtgtgtgacagcagtgatggcctgctgctgggcggctgggagcgctacacagaggtggccaagaggggcggccagcacaccctgcctgccctgagccgggccacagcccccacagaccccaactacatcatcctggcccccctgaaccctggcagccagctgctgcggcctgtgtaccaggaggacaccatccctgaggagagcggcagccccagcaagggcaagagctacacaggcctgggcaagaagagccggctgatgaagacagtgcagaccatgaagggccacggcaactaccagaactgccctgtggtgcggccccacgccacccacagcagctatggcacctacgtgaccctggcccccaaggtgctggtgtttcctgtgtttgtgcagcccctggacctgtgcaacccagcccggaccctgctgctgtctgaggagctgctgctgtatgagggcaggaacaaggctgctgaggtgaccctgtttgcctacagcgacctgctgctcttcaccaaggaggatgagcccggccgctgtgatgtgctgaggaaccccctgtacctgcagagcgtgaagctgcaggagggcagcagcgaggacctgaagttctgtgtgctgtacctggccgagaaggccgagtgcctcttcaccctggaggcccacagccaggagcagaagaagagggtgtgctggtgcctgtctgagaacatcgccaagcagcagcagctggccgccagccccccagacagcaagatgtctggagctgacacagtgggagatgatgatgaggccagcaggaagaggaagagcaagaacctggccaaggacatgaagaacaagctgggcatcttcagaagaagaaatgaaagccctggggcccctcctgctgggaaggctgacaagatgatgaagagcttcaagcccaccagcgaggaggccctgaagtggggcgagagcctggagaagctgctggtgcacaagtatggcctggccgtgttccaggccttcctgaggacagagttcagcgaggagaacctggagttctggctggcctgtgaggacttcaagaaggtgaagagccagagcaagatggccagcaaggccaagaagatctttgctgagtacatcgccatccaggcctgcaaggaggtgaacctggacagctacacccgggagcacaccaaggacaacctgcagagcgtgacccggggctgctttgacctggcccagaagaggatcttcggcctgatggagaaggacagctacccccgcttcctgcggagtgacctgtacctggacctgatcaaccagaagaagatgagcccccccctgtag

SEQ ID NO: 96988 - DNA, 1776 bp, Artificial Sequence
  derived and/or modified sequence
atgaaccggttcaacggcctgtgcaaggtgtgcagcgagcggcggtataggcagatcactattcctaggggcaaagacgggtttggttttaccatttgctgcgactcgcctgtgcgagtgcaggccgtggacagtgggggtcctgctgagcgtgccggattacagcaactggacacagttctacagctcaatgagcggccagttgaacattggaagtgcgttgaactggctcacgaaatacggtcgtgccctagcgagatcatccttcttgtctggaggatggttccgcaggtgaaaccaggacccgacggtggtgttctgaggcgggcatcatgtaaatccactcacgacctgcagtcacctccaaataaacgcgagaaaaattgcacacacggagttcaggcacgacccgaacagagacatagctgtcatctggtatgtgactcttccgatggcctacttctgggcggttgggagagatacaccgaagttgcaaaaaggggtggtcagcatacacttccggccttgagtcgtgccacagcccccaccgatccaaactacataatcctggcaccgctgaacccagggtctcagcttctgaggccagtatatcaggaagacaccatcccagaagaatcagggagccctagcaagggcaagagctatactggcctgggcaaaaaaagccgcctgatgaagaccgtgcagaccatgaagggacacgggaactaccagaactgccctgtggtgaggccccacgcaacccacagcagttacggcacatacgttacgttggcccccaaggttcttgttttcccagtgtttgtccagccgctcgacctctgcaatccagcccggaccttgttactgtccgaggaactgttgctgtacgaggggcggaacaaggccgccgaagtcactctgttcgcctatagtgacctgctgctgttcacgaaagaagacgagccagggcggtgcgacgtacttagaaatccgctgtatctacagagtgttaagctgcaggaaggctcttctgaagatctaaaattctgtgtgttatacttagctgagaaggctgagtgtctgtttaccctggaagcacactcccaagagcagaagaagagggtttgttggtgcttgtccgaaaatattgcaaaacaacagcagctagctgctagccccccagattccaaaatgagtggagctgacaccgttggtgacgacgatgaggcctcacggaagcggaagtcaaagaatctggccaaggatatgaaaaataaactgggcattttcagaagaagaaacgaaagcccaggagcccctccagctgggaaggcggataagatgatgaaatcgttcaagcccacaagtgaggaggctttgaaatggggagagagcctagagaagctcttggtccacaaatacggccttgccgtcttccaggcatttctcaggacagagttctctgaggagaacctggagttctggctggcatgcgaagacttcaaaaaagtgaagagccagagcaagatggcctcgaaggctaaaaagattttcgccgaatatatagctatacaggcttgcaaggaggtgaacctcgatagctatacgcgcgagcacactaaagacaaccttcagtccgtgacccgggggtgttttgatctggcccagaaacggatttttgggctgatggagaaagacagctaccccagatttctgcggtcggacctgtacctcgacctcattaatcagaagaagatgagtcctcccctctag

SEQ ID NO: 96989 - DNA, 1776 bp, Artificial Sequence
  derived and/or modified sequence
atgaatcgtttcaatggtctgtgcaaggtgtgctctgaacggcgatacagacaaattacaatccctaggggaaaagacggattcggttttaccatctgttgtgattccccggtgagagttcaggccgtagacagtgggggacctgcggaacgcgcagggctccagcagctggacacagttctccaattgaacgagcgaccggtggagcactggaaatgtgttgagctggcacacgaaattcgaagctgcccgagtgagataattctattggtctggcgtatggtcccccaggtgaagcctggccctgatggcggtgtcctgcgtcgggcatcgtgtaaatctacccacgatcttcagtccccaccaaataagcgggagaagaactgcactcacggcgttcaggctcggcctgaacaacgtcactcgtgccatctggtgtgcgacagttcagacggcctcttgctgggtggttgggagcggtacacagaagttgccaaaagaggcggtcagcacacacttccagcactatctagagcaaccgctcccaccgatcctaattatatcatattggctcctctgaaccctggttcgcagttgctgcggcctgtgtatcaagaagacaccattcctgaggagagcggatccccgagtaaggggaagtcctacaccgggctgggaaagaagtcaagactgatgaaaaccgttcagaccatgaaaggccacggaaactatcaaaattgccccgtggtgagacctcatgccacacacagctcatacggtacctatgttactctggcccctaaggtactcgtctttcctgtgttcgttcaaccgctggatctgtgtaacccagcccgaacactgcttttgagtgaggagctgttgctatatgagggcagaaataaggcagctgaagtgacgctgtttgcgtactcggaccttctcctctttaccaaggaagacgaacccggacgatgcgacgtgcttcgaaacccgttatacctgcaaagtgtcaagcttcaagaagggagttcagaggatttaaaattctgtgtgctctatctcgccgagaaggccgagtgcctgtttacactggaggcacacagtcaggaacagaaaaaacgcgtgtgctggtgcctctctgagaatattgctaaacaacagcaactagccgctagtccgcctgatagcaaaatgagtggtgccgacacagtcggcgacgatgacgaggccagccgaaagaggaagtctaagaatctggctaaggacatgaagaataagttggggatctttagaagacgcaacgagtctcccggtgccccaccagccggaaaagcagacaagatgatgaaatctttcaagcctacttccgaagaagctctgaagtggggcgagagtctggagaaattactcgtccataagtacggcctcgctgtctttcaggccttcctgcgtactgaattctcggaggagaacctagagttctggctcgcttgcgaggatttcaaaaaggtgaagtcccagagcaagatggcgtcaaaggcaaagaaaatcttcgctgaatacatcgcaattcaggcctgtaaggaggtaaatcttgactcctacacacgtgagcacacaaaggacaacctacagtcggtaactaggggatgctttgatctggctcagaaacggattttcggcctaatggaaaaagacagctatccaaggtttctcagaagcgacctgtacctggatctcattaatcaaaagaagatgtccccacctctgtag

SEQ ID NO: 96990 - DNA, 2623 bp, Artificial Sequence
  derived and/or modified sequence
agtgcgggctcccgctgctgggggagagctgggttttcatggggcggcagccgaggcaggacccgcagccatgaaccgcttcaatgggctctgcaaggtgtgctcggagcgccgctaccgccagatcaccatcccgaggggaaaggacggctttggcttcaccatctgctgcgactctccagttcgagtccaggccgtggattccgggggtccggcggaacgggcagggctgcagcagctggacacggtgctgcagctgaatgagaggcctgtggagcactggaaatgtgtggagctggcccacgagatccggagctgccccagtgagatcatcctactcgtgtggcgcatggtcccccaggtcaagccaggaccagatggcggggtcctgcggcgggcctcctgcaagtcgacacatgacctccagtcaccccccaacaaacgggagaagaactgcacccatggggtccaggcacggcctgagcagcgccacagctgccacctggtatgtgacagctctgatgggctgctgctcggcggctgggagcgctacaccgaggtggccaagcgcgggggccagcacaccctgcctgcactgtcccgtgccactgcccccaccgaccccaactacatcatcctggccccgctgaatcctgggagccagctgctccggcctgtgtaccaggaggataccatccccgaagaatcagggagtcccagtaaagggaagtcctacacaggcctggggaagaagtcccggctgatgaagacagtgcagaccatgaagggccacgggaactaccaaaactgcccggttgtgaggccgcatgccacgcactcaagctatggcacctacgtcaccctggcccccaaagtcctggtgttccctgtctttgttcagcctctagatctctgtaatcctgcccggaccctcctgctgtcagaggagctgctgctgtatgaagggaggaacaaggctgccgaggtgacactgtttgcctattcggacctgctgctcttcaccaaggaggacgagcctggccgctgcgacgtcctgaggaaccccctctacctccagagtgtgaagctgcaggaaggttcttcagaagacctgaaattctgcgtgctctatctagcagagaaggcagagtgcttattcactttggaagcgcactcgcaggagcagaagaagagagtgtgctggtgcctgtcggagaacatcgccaagcagcaacagctggcagcatcacccccggacagcaagatgagcggggctgacaccgttggggatgatgacgaagcctcccggaagagaaagagcaaaaacctagccaaggacatgaagaacaagctggggatcttcagacggcggaatgagtcccctggagcccctcccgcgggcaaggcagacaaaatgatgaagtcattcaagcccacctcagaggaagccctcaagtggggcgagtccttggagaagctgctggttcacaaatacgggttagcagtgttccaagccttccttcgcactgagttcagtgaggagaatctggagttctggttggcttgtgaggacttcaagaaggtcaagtcacagtccaagatggcatccaaggccaagaagatctttgctgaatacatcgcgatccaggcatgcaaggaggtcaacctggactcctacacgcgggagcacaccaaggacaacctgcagagcgtcacgcggggctgcttcgacctggcacagaagcgcatcttcgggctcatggaaaaggactcgtaccctcgctttctccgttctgacctctacctggaccttattaaccagaagaagatgagtcccccgctttaggggccactggagtcgagctcagcgttcacaccaggcgggctgggtcccctgcccacctgcctccctgccccctgtgacggagggggcaagcaagcccccagaggctgtgtctctggacagacggatagacatacggaagcgaggcctggaccaagagaggcccaggctactggaggagtagaaggatgggccccgtggggtccccactgccccggtacgagggggcccaagaccctggcaggtcaggggccctggccaagccagatctggagctgctgctccctgctgcggagaccgcggaggcttcgcgttgaccaagttccttaaagaactggctgatggggcaggaggtccaggcctgggctctcgggccctcctagagggccattggagcttgcagctcagacccccactttgagttttatttatttaaatagtagttggatgcttggcacgtcgtcctgtaataggaaacccttgcctcatcagttttcctgatttacaagtgcaatattttagccaatgccttgggagaagctgccatgcaaaggtggacaccattctccagcttcaggggatatgctcgtcccgggcaccggtggcaggcagctggccttctggactaaggcagcctggggggacactgcagtctggctacacacagagatctggcaccccctgggtggagtgtccctcgggggctttgggaaagcatggcaccctcagaccacacagtagccaagttctggagcaaataaaaggcctgtgttatttctt

SEQ ID NO: 96991 - DNA, 1776 bp, Artificial Sequence
  derived and/or modified sequence
atgaacagattcaacggcctgtgcaaggtgtgcagcgagagaagatacagacagatcaccatccccagaggcaaggacggcttcggcttcaccatctgctgcgacagccccgtgagagtgcaggccgtggacagcggcggccccgccgagagagccggcctgcagcagctggacaccgtgctgcagctgaacgagagacccgtggagcactggaagtgcgtggagctggcccacgagatcagaagctgccccagcgagatcatcctgctggtgtggagaatggtgccccaggtgaagcccggccccgacggcggcgtgctgagaagagccagctgcaagagcacccacgacctgcagagcccccccaacaagagagagaagaactgcacccacggcgtgcaggccagacccgagcagagacacagctgccacctggtgtgcgacagcagcgacggcctgctgctgggcggctgggagagatacaccgaggtggccaagagaggcggccagcacaccctgcccgccctgagcagagccaccgcccccaccgaccccaactacatcatcctggcccccctgaaccccggcagccagctgctgagacccgtgtaccaggaggacaccatccccgaggagagcggcagccccagcaagggcaagagctacaccggcctgggcaagaagagcagactgatgaagaccgtgcagaccatgaagggccacggcaactaccagaactgccccgtggtgagaccccacgccacccacagcagctacggcacctacgtgaccctggcccccaaggtgctggtgttccccgtgttcgtgcagcccctggacctgtgcaaccccgccagaaccctgctgctgagcgaggagctgctgctgtacgagggcagaaacaaggccgccgaggtgaccctgttcgcctacagcgacctgctgctgttcaccaaggaggacgagcccggcagatgcgacgtgctgagaaaccccctgtacctgcagagcgtgaagctgcaggagggcagcagcgaggacctgaagttctgcgtgctgtacctggccgagaaggccgagtgcctgttcaccctggaggcccacagccaggagcagaagaagagagtgtgctggtgcctgagcgagaacatcgccaagcagcagcagctggccgccagcccccccgacagcaagatgagcggcgccgacaccgtgggcgacgacgacgaggccagcagaaagagaaagagcaagaacctggccaaggacatgaagaacaagctgggcatcttcagaagaagaaacgagagccccggcgccccccccgccggcaaggccgacaagatgatgaagagcttcaagcccaccagcgaggaggccctgaagtggggcgagagcctggagaagctgctggtgcacaagtacggcctggccgtgttccaggccttcctgagaaccgagttcagcgaggagaacctggagttctggctggcctgcgaggacttcaagaaggtgaagagccagagcaagatggccagcaaggccaagaagatcttcgccgagtacatcgccatccaggcctgcaaggaggtgaacctggacagctacaccagagagcacaccaaggacaacctgcagagcgtgaccagaggctgcttcgacctggcccagaagagaatcttcggcctgatggagaaggacagctaccccagattcctgagaagcgacctgtacctggacctgatcaaccagaagaagatgagcccccccctgtag

SEQ ID NO: 96992 - protein, 483 aa, Artificial Sequence
  derived and/or modified sequence
MATLGHTFPFYAGPKPTFPMDTTLASIIMIFLTALATFIVILPGIRGKTRLFWLLRVVTSLFIGAAILAVNFSSEWSVGQVSTNTSYKAFSSEWISADIGLQVGLGGVNITLTGTPVQQLNETINYNEEFTWRLGENYAEEYAKALEKGLPDPVLYLAEKFTPRSPCGLYRQYRLAGHYTSAMLWVAFLCWLLANVMLSMPVLVYGGYMLLATGIFQLLALLFFSMATSLTSPCPLHLGASVLHTHHGPAFWITLTTGLLCVLLGLAMAVAHRMQPHRLKAFFNQSVDEDPMLEWSPEEGGLLSPRYRSMADSPKSQDIPLSEASSTKAYYRPRRLSLVPADVRGLAPAALSALPGALLAQAWRALLPGLRCPKAGKESRLGPPHSPWRFGPEGCEERWAEHTGDSPRPLRGRGTGRLWRWGSKERRACGVRAMLPRLVSNSGLKRPSCLDLPKCWDYRRDARAFFHLLEPTPCVTSRHTPLI

SEQ ID NO: 96993 - DNA, 1452 bp, Artificial Sequence
  derived and/or modified sequence
atggcaacactcggtcacacttttccattctacgccggcccaaaaccaaccttccccatggacactacactggccagcataattatgattttcctgactgcactcgctactttcatcgttattctgccagggattcgagggaagactcgcctgttttggctgttgcgtgttgtcacctccttgtttatcggagcggcaatactcgcggtgaatttctcttccgagtggagcgtgggacaggtaagcaccaatacctcgtataaggctttctctagcgaatggattagtgccgacatcgggctgcaggtgggcctaggaggagtgaatatcacactgaccggcacacccgttcagcagctgaatgagaccatcaattataatgaggagttcacatggcggctcggggagaattacgcagaggaatacgctaaagcactggagaagggactcccagatccggtgttatacctcgcagaaaagttcaccccaaggagtccttgcgggttgtataggcagtacagactcgcgggccattatactagcgcaatgctctgggtcgcatttctgtgttggctgttggcaaacgttatgctatccatgccagtattggtttatggaggatacatgcttttagccacagggattttccagcttttggcacttcttttcttcagcatggcaacctctctgacgtcaccatgcccactacaccttggtgctagtgtgttgcatactcaccatggccccgccttctggattaccctcacaactggcctgctctgcgtcctgctggggttggctatggcggtagcccacaggatgcagccgcataggttgaaggcgttttttaaccaaagtgttgatgaagatcccatgctcgagtggtcccctgaagaaggcggcttgctaagtccgcgctaccgttccatggcggatagccctaaatcacaagacatcccgctgagcgaggcctcttcaactaaagcttactatagacctagaagactctctttggtaccggctgatgtgcgtggattggcacctgccgctctgagtgctctcccaggagccctgctggcgcaggcgtggagggcactactaccaggccttcgatgcccaaaggctggcaaagagagccgacttggtcccccacactcaccttggcgattcggacccgaagggtgtgaggaacgctgggccgagcataccggggacagcccccgaccgttgcgcgggcgcgggaccggtcggctctggcgctggggttccaaggagcgacgggcatgtggggtgcgcgccatgctgcctcgactggtaagtaattcaggcctgaaaaggccttcctgcttagacttgcctaaatgctgggattacagacgagacgcccgtgccttcttccacttactggaacccaccccttgtgttacaagtcggcataccccacttatctag

SEQ ID NO: 96994 - DNA, 42 bp, Artificial Sequence
  derived and/or modified sequence
atggccactctcggccacaccttccccttttacgccggttag

SEQ ID NO: 96995 - DNA, 1452 bp, Artificial Sequence
  derived and/or modified sequence
atggccaccctcggccacacctttcccttctatgctggccctaaacccacattcccaatggacaccacactggcaagcatcattatgatctttttaacagctctggccacctttattgtaattctgcccggaattcgaggcaaaacccggctgttttggctattgcgcgtcgttacaagcctgtttattggcgccgctattcttgccgtgaatttctcctccgagtggtctgtcggacaggtctctactaatacttcttacaaggccttctcctcagagtggatcagtgccgacatcgggctccaagtcggtctggggggagtcaacattaccctgaccggcacccctgtgcagcagctgaacgaaacaattaattataatgaggaattcacatggagattgggcgagaattatgcagaggaatacgcaaaggccctcgaaaagggcttacccgaccccgtcctctaccttgccgagaaattcacgcctcggtcaccatgcggcctgtatcggcagtatcggttggctggtcactacacatcagcaatgctctgggtagcctttctgtgttggctgctggccaacgtaatgctgagcatgcccgttctcgtttacggaggctacatgctcttggctaccggcatctttcagttactggcgttgctctttttctccatggctacctctctgacttccccatgccctctgcacctgggtgcctcagttcttcatacacaccacggccctgccttctggattacattaactacaggactgctgtgtgtgcttttaggcctggccatggcagtggcccatcggatgcaaccacaccgcctaaaggctttctttaatcaatccgtggatgaagatccaatgcttgaatggtcccccgaggagggcggcctcctgagcccaaggtatagatccatggccgattcacccaaatctcaagatattcctcttagcgaggcatcatcaactaaggcttattaccgtccccgacgtctcagcttagtgccagctgatgtgcgaggcctggccccagcagccctaagcgctctgcctggcgcgctcctggcccaggcttggcgcgccctgttaccaggactgcgttgcccaaaagcaggtaaagagagcagactgggacctccacacagtccttggcgcttcggcccggagggatgcgaggagcgatgggctgagcacacaggcgattcacctcgtccactcagaggccgaggaacagggagactgtggcgatggggctccaaagagagaagagcttgcggcgtgcgagccatgctgccacggctggtgtcgaattccggactcaaacgcccatcctgtcttgatctgcccaagtgttgggactatcggcgtgatgctagagctttctttcatctcctggagcctaccccgtgcgtcacatcacgacatactcctctgatttag

SEQ ID NO: 96996 - DNA, 1452 bp, Artificial Sequence
  derived and/or modified sequence
atggccaccctgggccacaccttccccttctacgccggccccaagcccaccttccccatggacaccaccctggccagcatcatcatgatcttcctgacagccctggccaccttcatcgtcatcctgcccggcatccggggcaagaccaggctcttctggctgctgcgggtggtgaccagcctcttcatcggggccgccatcctggccgtgaacttcagcagcgagtggagcgtgggccaggtgtccaccaacaccagctacaaggccttcagcagcgagtggatctctgctgacatcggcctgcaggtgggcctgggcggcgtgaacatcaccctgaccggcacccctgtgcagcagctgaatgagaccatcaactacaatgaggagttcacctggaggctgggggagaactatgcagaggagtatgccaaggccctggagaagggcctgcctgaccctgtgctgtacctggccgagaagttcacccccaggagcccctgtggcctgtaccggcagtaccgcctggccggccactacaccagcgccatgctgtgggtggccttcctgtgctggctgctggccaacgtgatgctgtccatgcctgtgctggtgtatggaggctacatgctgctggccaccggcatcttccagctgctggccctgctcttcttctccatggccaccagcctgaccagcccctgccccctgcacctgggcgcctctgtgctgcacacccaccacggccctgccttctggatcaccctgaccaccggcctgctgtgtgtgctgctgggcctggccatggctgtggcccacaggatgcagccccaccggctgaaggccttcttcaaccagagcgtggatgaggaccccatgctggagtggagccctgaggagggcggcctgctgagcccccgctaccgctccatggctgacagccccaagagccaggacatccccctgtctgaggccagcagcaccaaggcctactaccggccccggcggctgagcctggtgcctgcagatgtgcggggcctggccccagctgccctgagcgccctgcccggggccctgctggcccaggcctggagggccctgctgcccggcctgcgctgccccaaggccggcaaggagagccggctgggccccccccacagcccctggaggtttggacctgagggctgtgaggagcgctgggccgagcacactggagacagcccccggcccctgcggggccggggcaccggccgcctgtggcgctggggcagcaaggagcggcgggcctgtggggtgcgggccatgctgccccggctggtgagcaacagcggcctgaagaggcccagctgcctggacctgcccaagtgctgggactacagaagagatgcccgggccttcttccacctgctggagcccaccccctgtgtgaccagccgccacacccccctcatctag

SEQ ID NO: 96997 - DNA, 1452 bp, Artificial Sequence
  derived and/or modified sequence
atggccaccctgggccacaccttccccttctacgccggccccaagcccacatttcctatggatactacgctggcttctatcatcatgatttttttaacagctttagccaccttcatagttatcctccccggcatccgtgggaagacccgactgttttggttattgcgggtcgtcacttctctcttcatcggagctgccatcctagcagtgaatttctccagtgagtggagcgttggccaggtgtcaaccaacacatcctataaggctttttcctcagagtggatatccgctgacatcggattacaggtcggactcggcggcgtcaacattactctcaccggcactcccgtccaacaactgaacgaaacgatcaattacaacgaggagttcacttggcggctaggagagaattacgccgaggaatatgctaaagctctcgaaaagggcctccctgaccccgtgctttacctggctgagaagttcactccaagaagcccttgtggcttgtaccgccagtacaggctggccgggcactatacaagcgccatgctgtgggtggccttcctgtgctggctcttggccaatgtgatgctatccatgcctgtattggtgtatggaggatatatgttgttggcaaccggcatcttccagctgctggcgctcctgtttttctctatggcaaccagcctgacttcgccctgccccttacatctgggtgcctcggtcctgcacacccaccatggcccagcattttggatcaccctgactacggggctgctctgtgtgctcttgggcctcgccatggccgtggcgcaccgtatgcagcctcatcgtctgaaggcatttttcaatcagagcgtagacgaggaccccatgctggaatggtcgccggaggaaggtggcctgttgagccctcggtatagaagcatggcagattcccccaagtcacaagatatacctctgtccgaggcatcaagcacaaaagcctactacaggccgcggagactgtctttagttcctgccgacgtgcgcggccttgctcccgcggcgctttcagcactcccaggcgccctattggcccaggcgtggcgggccctgttacctggcctccgctgccctaaagctggcaaggaatctagactgggacctccacactctccttggagatttggacctgagggatgtgaggagcgttgggcagaacatactggggattcacccagacccttgcgcggccggggcacgggcagactttggcggtggggctccaaagagcgacgggcctgcggggttcgagctatgttgcccaggcttgtgtccaactccggcttgaagcgcccaagttgcttagacctgcccaagtgctgggactataggcgcgatgctcgcgctttttttcatctgctagagccaacaccctgcgttacaagccggcacacacccttgatctag

SEQ ID NO: 96998 - DNA, 1452 bp, Artificial Sequence
  derived and/or modified sequence
atggccaccctgggccacaccttccccttctacgccggccccaagcctaccttccccatggatacgacactggctagcattattatgatctttctaactgctttagccacatttatcgtcatactcccaggtatcagagggaaaacgcggctgttctggctgttacgggtggtgacatctctgttcataggagctgccatcctggcagttaacttcagcagtgaatggagcgttggccaggtaagtacgaataccagctacaaggcattcagctcagagtggatttccgcagatattgggctccaggtggggctgggcggggtgaatatcaccctgactggcactcctgttcagcaactgaacgagacaatcaattacaacgaggagtttacatggcgccttggagagaattacgcagaagagtacgccaaagctcttgagaaggggctcccagatcccgtgttgtatcttgcagaaaagttcacacccaggtctccgtgcggtctctatagacaatacagactggccgggcattacacatctgccatgctttgggtagcttttctgtgttggctactggccaatgtgatgctctccatgccagtattggtctatgggggctatatgctcctggctaccggtatctttcaactgttagcactgttatttttcagcatggcgacctcacttacgagcccatgcccattgcatctcggggcaagtgtcttgcatacacatcacggcccagctttttggatcacactgactaccggcttactgtgcgtcctgctgggcttggcgatggccgtcgcacatcgaatgcagcctcatcggttgaaggccttctttaatcagagcgttgatgaggatcccatgttagagtggtctcctgaggaaggcggactcctgtctccccggtacaggagtatggctgacagtcctaaatctcaagatattcccctgtctgaggcctcttcaaccaaagcatactatcgccctcgacgattgagtctcgtgcccgcagatgtcaggggtctggcaccagcggccctgtccgccttgcctggagcgctgctcgcccaggcatggcgtgccttgctgccaggcctgcgctgccctaaagccgggaaggagagcagactaggtcctccccactccccttggagattcggacccgaaggatgcgaagaaagatgggctgagcacacgggcgactcaccacgcccactgcgcggcagggggaccggacggttgtggcgctgggggtcaaaggagaggagagcttgtggagtgcgggctatgctgcctcgactagtatctaattctggcctgaaacgtcccagctgcctggacctgccaaagtgctgggattacaggcgagacgccagagccttctttcacctcttggagcccaccccttgtgttacttcccgtcataccccattaatttag

SEQ ID NO: 96999 - DNA, 1452 bp, Artificial Sequence
  derived and/or modified sequence
atggctacactgggacacacatttcctttttatgccggacccaagcctacgttcccgatggacactacacttgcttcgatcataatgatttttctgaccgccctcgcaacgttcattgtcatcctgcctggcatcagaggcaaaactcgactgttctggctactgagagtagttacttcactgttcatcggagccgcaattctcgccgttaacttctcctcagagtggtcagtggggcaggtgtctaccaatacatcttacaaggcattctctagcgaatggatttcagcagacatcggacttcaagtagggctaggcggtgtgaatattactctcaccggaacaccggtacagcagttaaatgagacaatcaactacaatgaggaattcacctggcgcctgggcgaaaactatgccgaagagtatgctaaggccttggaaaaggggctgccagatcccgtgctgtacctggctgagaaatttacacctcgctccccctgcggactctaccgccagtaccgccttgcaggccactatacctctgcaatgctttgggtggcatttctgtgctggttgctcgcaaatgtgatgttatcgatgccagttttagtgtacggtggctatatgctgctcgcaacaggcatcttccaactactcgcactgctgttcttttccatggcaacttcattgacctcaccttgccccttgcatctcggcgcttccgtgctgcatacccatcatgggcctgcgttttggatcacccttactactggattgctgtgtgtactgctggggcttgctatggccgtggctcaccggatgcagccccaccgtctgaaagcctttttcaaccagtcagttgacgaggaccctatgctagaatggagtccagaagagggcggtctgctatcgccacgctataggtctatggcggatagccccaaatcccaggacatacctctgtccgaagcatcttcaacaaaggcttattatcgccctcgcaggctgtcgctggtacccgcagacgtcaggggcttggcaccagccgctctgtccgctttgcccggagccctgctggcccaggcatggcgcgctctgttacctggcctgcgttgtcctaaagccggaaaggagtctagactgggccctccccattcaccatggcgattcggcccagagggttgtgaagagagatgggctgagcacactggggactctccgaggccccttaggggcaggggtaccggcaggctctggcgatggggatccaaggaaagaagggcatgtggcgtgcgggcaatgctccccagactagtgtcgaacagcggtctcaagcgaccttcctgtcttgatctgccaaagtgttgggattaccgtcgcgacgccagggcattcttccatttactagaaccaacgccttgcgtcacatcacgtcacacaccactcatttag

SEQ ID NO: 97000 - DNA, 42 bp, Artificial Sequence
  derived and/or modified sequence
atggccactttgggtcacacatttcctttctatgccggatag

SEQ ID NO: 97001 - DNA, 1452 bp, Artificial Sequence
  derived and/or modified sequence
atggctacccttggacatacctttccgttctacgcgggaccaaagcctactttccccatggacactactctggcgtcaatcatcatgatcttcctgaccgccttagctaccttcatagtaatcctcccgggaatcagagggaaaaccaggcttttttggctgctgagggtggtgacctcactgttcatcggagccgctattctcgcggtgaacttcagttccgagtggtccgtcggtcaggtcagcacgaatacatcatataaggctttttcatctgagtggatcagcgccgacataggtcttcaagtaggcctggggggtgtcaatatcaccttgaccggcacgcctgtccaacagctgaacgaaactataaattataatgaggagtttacatggcgcttgggggaaaactatgcagaagagtatgcgaaggccctcgaaaagggattgccggaccccgtactgtacttagccgagaagtttacacccagatcaccttgcggactgtacagacagtacaggctcgctggtcattacacttctgctatgctgtgggtcgccttcctgtgttggctcctggccaatgtcatgctgtccatgcctgtgttagtgtatgggggttacatgttgctggccacagggatctttcaacttctggccttgttgttctttagcatggctacctcactgacatccccctgccccctccacctgggcgcatcagtgttgcatactcatcacggcccagcattttggataacacttaccacaggtctcctctgcgtactcctggggctggccatggccgtggcccaccgcatgcagccccatcggctgaaggctttctttaatcagtccgtggatgaggatccgatgctggaatggtctcccgaggaaggcggtcttttgtcaccacggtatcgatctatggctgacagcccaaaatcccaggacattcctctatccgaggcgtccagcaccaaagcttactatcgacctagacgattatcactggtccctgcagacgtcagggggttggctcccgcagccttgtcagccctaccaggggcactcctggctcaggcgtggagagccctgctgcctggcctgcgatgcccaaaggccggtaaggagtcccggttgggacctccccatagcccatggaggttcggcccagaagggtgtgaggagcgctgggccgagcacactggggattccccccgacccctgaggggcagaggcacaggcaggttatggaggtggggatccaaggaaagaagagcttgtggcgtgagagcaatgctgcctaggctggtgagtaattcaggccttaagcggccatcgtgtttggatcttccaaagtgctgggactaccggcgagatgctcgggctttttttcacctgctggagccaactccttgtgtgacaagcagacacacccccctgatctag

SEQ ID NO: 97002 - DNA, 1452 bp, Artificial Sequence
  derived and/or modified sequence
atggccaccctgggccacaccttccccttctacgccggccccaagcccaccttccccatggacaccaccctggccagcatcatcatgatcttcctgaccgccctggccaccttcatcgtgatcctgcccggcatcagaggcaagaccagactgttctggctgctgagagtggtgaccagcctgttcatcggcgccgccatcctggccgtgaacttcagcagcgagtggagcgtgggccaggtgagcaccaacaccagctacaaggccttcagcagcgagtggatcagcgccgacatcggcctgcaggtgggcctgggcggcgtgaacatcaccctgaccggcacccccgtgcagcagctgaacgagaccatcaactacaacgaggagttcacctggagactgggcgagaactacgccgaggagtacgccaaggccctggagaagggcctgcccgaccccgtgctgtacctggccgagaagttcacccccagaagcccctgcggcctgtacagacagtacagactggccggccactacaccagcgccatgctgtgggtggccttcctgtgctggctgctggccaacgtgatgctgagcatgcccgtgctggtgtacggcggctacatgctgctggccaccggcatcttccagctgctggccctgctgttcttcagcatggccaccagcctgaccagcccctgccccctgcacctgggcgccagcgtgctgcacacccaccacggccccgccttctggatcaccctgaccaccggcctgctgtgcgtgctgctgggcctggccatggccgtggcccacagaatgcagccccacagactgaaggccttcttcaaccagagcgtggacgaggaccccatgctggagtggagccccgaggagggcggcctgctgagccccagatacagaagcatggccgacagccccaagagccaggacatccccctgagcgaggccagcagcaccaaggcctactacagacccagaagactgagcctggtgcccgccgacgtgagaggcctggcccccgccgccctgagcgccctgcccggcgccctgctggcccaggcctggagagccctgctgcccggcctgagatgccccaaggccggcaaggagagcagactgggccccccccacagcccctggagattcggccccgagggctgcgaggagagatgggccgagcacaccggcgacagccccagacccctgagaggcagaggcaccggcagactgtggagatggggcagcaaggagagaagagcctgcggcgtgagagccatgctgcccagactggtgagcaacagcggcctgaagagacccagctgcctggacctgcccaagtgctgggactacagaagagacgccagagccttcttccacctgctggagcccaccccctgcgtgaccagcagacacacccccctgatctag

SEQ ID NO: 97003 - DNA, 42 bp, Artificial Sequence
  derived and/or modified sequence
atggccaccctgggccacaccttccccttctacgccggctag

SEQ ID NO: 97004 - DNA, 1996 bp, Artificial Sequence
  derived and/or modified sequence
cgcgcgaggtgagacggcgagggctcccggggcgcaggtagagatgttccgtcggtgccgaaggcccggctagtgcggttgtgtggacggcgaaaaaaaccaggccaggcgtcaaagcaagtcacccatccgacctaaacccctctaagaccccggagtcacgtctccctccggggatcctcgtgaggtcttgggggtcccaccgccctgcgagccgcgcccgcgccccgccagacccggaactgcgtcgctagaacgtcgggacctggttccctctttaatcacacccccgggggcgcttcgtgtgaggttccacgggggaaggcgagaggcgcaggctgccacacacgcactgtttggaagaggggaagcattgccccccctgcaccacctcaccaagatggctactttgggacacacattccccttctatgctggccccaagccaaccttcccgatggacaccactttggccagcatcatcatgatctttctgactgcactggccacgttcatcgtcatcctgcctggcattcggggaaagacgaggctgttctggctgcttcgggtggtgaccagcttattcatcggggctgcaatcctggctgtgaatttcagttctgagtggtctgtgggccaggtcagcaccaacacatcatacaaggccttcagttctgagtggatcagcgctgatattgggctgcaggtcgggctgggtggagtcaacatcacactcacagggacccccgtgcagcagctgaatgagaccatcaattacaacgaggagttcacctggcgcctgggtgagaactatgctgaggagtatgcaaaggctctggagaaggggctgccagaccctgtgttgtacctagctgagaagttcactccaagaagcccatgtggcctataccgccagtaccgcctggcgggacactacacctcagccatgctatgggtggcattcctctgctggctgctggccaatgtgatgctctccatgcctgtgctggtatatggtggctacatgctattggccacgggcatcttccagctgttggctctgctcttcttctccatggccacatcactcacctcaccctgtcccctgcacctgggcgcttctgtgctgcatactcaccatgggcctgccttctggatcacattgaccacaggactgctgtgtgtgctgctgggcctggctatggcggtggcccacaggatgcagcctcacaggctgaaggctttcttcaaccagagtgtggatgaagaccccatgctggagtggagtcctgaggaaggtggactcctgagcccccgctaccggtccatggctgacagtcccaagtcccaggacattcccctgtcagaggcttcctccaccaaggcatactatcgccccaggagactttccctggtgcctgcggatgtccgaggcctcgcgccagcagcgctcagtgcccttcctggagctctcctggcccaggcctggcgggcactgcttcccggcctgcgatgtcccaaggcggggaaggagtccagattgggtccccctcacagtccttggcgctttggtccagaagggtgcgaagagcgctgggccgaacatactggagactcaccacggcccctccgaggaagaggcacaggacgcctgtggcggtggggatcgaaagaaaggagggcatgtggagtcagggctatgttgcccaggctggtctcgaactctggcctcaaacgaccttcctgcctcgacctcccaaagtgctgggattacaggcgtgatgcccgggccttcttccatcttttggagcctaccccttgtgttacctcccgccacacacctctaatctgaattacatgaaacacggcaagacaccaaacccttctgagccccccacttttcatctgtaaaatggtcataacagtgcctgtttctgcgaactattgagaggggcaaatagggtaatagatgtgaattcattctgtaaactggaaa

SEQ ID NO: 97005 - DNA, 1965 bp, Artificial Sequence
  derived and/or modified sequence
agcgcgcgaggtgagacggcgagggctcccggggcgcagtccaaggccatcgatcacctgccacccacagaccaggccaggcgtcaaagcaagtcacccatccgacctaaacccctctaagaccccggagtcacgtctccctccggggatcctcgtgaggtcttgggggtcccaccgccctgcgagccgcgcccgcgccccgccagacccggaactgcgtcgctagaacgtcgggacctggttccctctttaatcacacccccgggggcgcttcgtgtgaggttccacgggggaaggcgagaggcgcaggctgccacacacgcactgtttggaagaggggaagcattgccccccctgcaccacctcaccaagatggctactttgggacacacattccccttctatgctggccccaagccaaccttcccgatggacaccactttggccagcatcatcatgatctttctgactgcactggccacgttcatcgtcatcctgcctggcattcggggaaagacgaggctgttctggctgcttcgggtggtgaccagcttattcatcggggctgcaatcctggctgtgaatttcagttctgagtggtctgtgggccaggtcagcaccaacacatcatacaaggccttcagttctgagtggatcagcgctgatattgggctgcaggtcgggctgggtggagtcaacatcacactcacagggacccccgtgcagcagctgaatgagaccatcaattacaacgaggagttcacctggcgcctgggtgagaactatgctgaggagtatgcaaaggctctggagaaggggctgccagaccctgtgttgtacctagctgagaagttcactccaagaagcccatgtggcctataccgccagtaccgcctggcgggacactacacctcagccatgctatgggtggcattcctctgctggctgctggccaatgtgatgctctccatgcctgtgctggtatatggtggctacatgctattggccacgggcatcttccagctgttggctctgctcttcttctccatggccacatcactcacctcaccctgtcccctgcacctgggcgcttctgtgctgcatactcaccatgggcctgccttctggatcacattgaccacaggactgctgtgtgtgctgctgggcctggctatggcggtggcccacaggatgcagcctcacaggctgaaggctttcttcaaccagagtgtggatgaagaccccatgctggagtggagtcctgaggaaggtggactcctgagcccccgctaccggtccatggctgacagtcccaagtcccaggacattcccctgtcagaggcttcctccaccaaggcatactatcgccccaggagactttccctggtgcctgcggatgtccgaggcctcgcgccagcagcgctcagtgcccttcctggagctctcctggcccaggcctggcgggcactgcttcccggcctgcgatgtcccaaggcggggaaggagtccagattgggtccccctcacagtccttggcgctttggtccagaagggtgcgaagagcgctgggccgaacatactggagactcaccacggcccctccgaggaagaggcacaggacgcctgtggcggtggggatcgaaagaaaggagggcatgtggagtcagggctatgttgcccaggctggtctcgaactctggcctcaaacgaccttcctgcctcgacctcccaaagtgctgggattacaggcgtgatgcccgggccttcttccatcttttggagcctaccccttgtgttacctcccgccacacacctctaatctgaattacatgaaacacggcaagacaccaaacccttctgagccccccacttttcatctgtaaaatggtcataacagtgcctgtttctgcgaactattgagaggggcaaatagggtaatagatgtgaattcattctgtaaactgg

SEQ ID NO: 97006 - protein, 438 aa, Artificial Sequence
  derived and/or modified sequence
MATLGHTFPFYAGPKPTFPMDTTLASIIMIFLTALATFIVILPGIRGKTRLFWLLRVVTSLFIGAAILGTPVQQLNETINYNEEFTWRLGENYAEEYAKALEKGLPDPVLYLAEKFTPRSPCGLYRQYRLAGHYTSAMLWVAFLCWLLANVMLSMPVLVYGGYMLLATGIFQLLALLFFSMATSLTSPCPLHLGASVLHTHHGPAFWITLTTGLLCVLLGLAMAVAHRMQPHRLKAFFNQSVDEDPMLEWSPEEGGLLSPRYRSMADSPKSQDIPLSEASSTKAYYRPRRLSLVPADVRGLAPAALSALPGALLAQAWRALLPGLRCPKAGKESRLGPPHSPWRFGPEGCEERWAEHTGDSPRPLRGRGTGRLWRWGSKERRACGVRAMLPRLVSNSGLKRPSCLDLPKCWDYRRDARAFFHLLEPTPCVTSRHTPLI

SEQ ID NO: 97007 - DNA, 1317 bp, Artificial Sequence
  derived and/or modified sequence
atggcgaccctgggccatacatttcccttctacgctgggcccaaaccaactttccccatggatactacgctggccagcatcattatgatctttctgaccgccctggcaactttcatcgtgatcctcccggggatccgtgggaagacacgcctcttctggctcttgagagtggtcacctctcttttcataggagccgcaattctgggcacccccgttcagcaactgaatgagacaatcaactataacgaagaatttacctggagactcggagagaactatgccgaagaatacgcaaaggctttggagaagggtctgccagaccctgtcctgtatctcgccgaaaagtttacaccacgttcgccatgcggtctatatcggcagtatagactcgccgggcattacacaagtgctatgctgtgggtggcgttcctgtgttggctgctggcgaatgtaatgctgtccatgccagtcctcgtctacggcggttatatgctgctggcaaccgggatcttccaattactggccctgttgtttttttccatggccacttctctcactagcccgtgccccctgcatctgggagcctctgtactgcacactcaccacggaccggccttttggattacactcactacagggctcctgtgcgtgttgcttggtctggctatggcagtggcccacagaatgcaaccccatcgactcaaagcgttttttaaccagtcagtggacgaggacccaatgttagaatggtcccctgaggaagggggactgctgtcaccccgctaccgcagcatggcagacagcccaaaatctcaggacatccctctgagtgaagcatcatccaccaaggcatattaccggcctagaagactttcgttagtgccagctgacgttagaggactcgcgccagctgccctgagcgccctgccaggagcactgctggcacaagcatggagagctctcctgcccggactcagatgtcctaaagccggaaaagaatccagacttgggcctccacactctccgtggcgcttcgggccagaaggatgtgaggaaaggtgggctgaacatactggtgactctcccaggcccctgcgtggaaggggaacagggaggctgtggcggtgggggtccaaagagcggcgggcctgtggtgtgagagccatgctgccccgactggtatccaatagtggactgaagcgaccttcgtgcttggacttaccgaagtgttgggattacaggagggacgctagagccttctttcacttgcttgagcctaccccctgcgtgaccagtcggcatacaccactgatctag

SEQ ID NO: 97008 - DNA, 1317 bp, Artificial Sequence
  derived and/or modified sequence
atggccaccctgggccacaccttccccttctacgccggccccaagcccaccttccccatggacaccaccctggccagcatcatcatgatcttcctgacagccctggccaccttcatcgtcatcctgcccggcatccggggcaagaccaggctcttctggctgctgcgggtggtgaccagcctcttcatcggggccgccatcctgggcacccctgtgcagcagctgaatgagaccatcaactacaatgaggagttcacctggaggctgggagaaaattatgcagaggagtatgccaaggccctggagaagggcctgcctgaccctgtgctgtacctggccgagaagttcacccccaggagcccctgtggcctgtaccggcagtaccgcctggccggccactacaccagcgccatgctgtgggtggccttcctgtgctggctgctggccaacgtgatgctgtccatgcctgtgctggtgtatggaggctacatgctgctggccaccggcatcttccagctgctggccctgctcttcttctccatggccaccagcctgaccagcccctgccccctgcacctgggcgcctctgtgctgcacacccaccacggccctgccttctggatcaccctgaccaccggcctgctgtgtgtgctgctgggcctggccatggctgtggcccacaggatgcagccccaccggctgaaggccttcttcaaccagagcgtggatgaggaccccatgctggagtggagccctgaggagggcggcctgctgagcccccgctaccgctccatggctgacagccccaagagccaggacatccccctgtctgaggccagcagcaccaaggcctactaccggccccggcggctgagcctggtgcctgcagatgtgcggggcctggccccagctgccctgagcgccctgcccggggccctgctggcccaggcctggagggccctgctgcccggcctgcgctgccccaaggccggcaaggagagccggctgggccccccccacagcccctggaggtttggacctgagggctgtgaggagcgctgggccgagcacactggagacagcccccggcccctgcggggccggggcaccggccgcctgtggcgctggggcagcaaggagcggcgggcctgtggggtgcgggccatgctgccccggctggtgagcaacagcggcctgaagaggcccagctgcctggacctgcccaagtgctgggactacagaagagatgcccgggccttcttccacctgctggagcccaccccctgtgtgaccagccgccacacccccctcatctag

SEQ ID NO: 97009 - DNA, 1317 bp, Artificial Sequence
  derived and/or modified sequence
atggccaccctgggccacaccttccccttctacgccggccccaagcctacctttcccatggacacgacacttgcttctatcatcatgatttttcttacagcactggccaccttcattgtgatactgccagggattcgaggcaagacgcgactcttctggcttctcagagtcgttacttcgctgttcattggcgcagcaatcctggggactcccgtccagcagctgaatgagaccattaactacaatgaggaatttacttggcggcttggcgagaattacgcagaggagtacgcaaaagcgctcgagaaagggttgccagatccagtcctctatctggcagaaaagttcacacctaggtccccctgcggcctgtatcggcagtaccggctagctgggcactatacttcagcaatgctgtgggtggcgtttctatgttggctgttggccaacgtgatgctctctatgcctgtcctcgtctatggagggtacatgctcctggccaccggcatctttcaactgctcgctttgttattcttctccatggctacctccctcactagtccctgtcccttgcacctcggagcttcagtgctacatactcaccatggccccgcattctggattaccttgacaaccggtttgttgtgcgtacttctggggctggcaatggctgtggcccacagaatgcagccccaccggctaaaggcctttttcaatcagtccgtcgatgaggatcctatgttggaatggagtccagaggagggcggactgctgtcacctaggtaccgctcaatggccgattcgcctaagagccaagacataccattgtctgaagcctcttctactaaggcctactataggcctcgaaggctctctctggtaccagctgatgttaggggcctcgcgcctgcagcactgagtgccttgcccggagctctcctcgcacaggcttggagggcactcctccccggtttgcggtgtcccaaagcagggaaagaaagtcgtctcggaccacctcatagcccttggcgctttggcccggaaggctgcgaggaacgctgggccgagcacacaggtgactccccacgccccttacgaggacgaggcacagggagactgtggagatgggggtccaaggagcgacgtgcctgcggggtgcgggctatgttgccgcggttagtctcaaattccggactgaagagaccgtcttgcctggatttacctaaatgctgggactatcgccgggatgcaagagctttcttccacctgctagaacccacgccttgcgtcactagtcggcatacgcccttaatctag

SEQ ID NO: 97010 - DNA, 1317 bp, Artificial Sequence
  derived and/or modified sequence
atggccaccctggggcacacattccctttctacgccggacccaaaccgacctttccaatggataccacccttgcttccattataatgatcttccttaccgccctcgcaaccttcatagtgatcctgccagggatccgaggaaaaacgagactgttctggctgctgagagtggtgacatccctgttcatcggagccgctattctgggcacacccgtgcagcagctgaacgagaccattaattataatgaggagttcacttggaggctgggagaaaactacgccgaagagtacgccaaggcccttgagaaaggcctccctgaccctgtcctctacttggccgaaaaattcactccacggagcccctgcggcctgtaccggcaataccggctcgccggacactatacaagtgcaatgctctgggttgctttcctgtgctggttgctggcaaacgtcatgctaagcatgcccgtgctggtctatggcggatatatgcttctggcgaccgggatatttcagctgctggctctgctttttttcagcatggcaacgagcctcaccagtccatgccctttgcacctaggggcatctgtgcttcatactcaccacggacctgctttttggatcactttgaccacagggcttctgtgcgtcctgttgggcctggcaatggcggttgcccacagaatgcagccacacaggctgaaagccttcttcaaccagtcagtcgacgaggatcccatgcttgagtggtctcctgaagaagggggactcctctcccctagatatcgaagtatggccgacagccctaagagccaggacattccattgagcgaggcctcatctaccaaggcgtattaccgacctagaagattatccctggtgcctgctgatgtgcggggtctggcccctgctgcgttgtcagccttacctggcgctctgctggcacaagcctggagggccctgctccctggacttagatgtcctaaggcgggtaaggagtcaagacttggcccaccccactctccttggcggtttggtcccgagggatgtgaggaacgatgggctgaacacaccggtgactctcctcggcctctgagaggaaggggaaccgggagactatggaggtggggctccaaggagcggcgagcctgcggagtgcgagccatgttgcccagactggtttcgaactctgggcttaaaaggccgtcgtgtctggatctgcctaaatgctgggactatcgacgggacgccagagccttctttcatctccttgagccgactccgtgcgtgacaagcagacatacgccattaatctag

SEQ ID NO: 97011 - DNA, 1317 bp, Artificial Sequence
  derived and/or modified sequence
atggccaccctgggccacaccttccccttctacgccggccccaagcccaccttccccatggacaccaccctggccagcatcatcatgatcttcctgaccgccctggccaccttcatcgtgatcctgcccggcatcagaggcaagaccagactgttctggctgctgagagtggtgaccagcctgttcatcggcgccgccatcctgggcacccccgtgcagcagctgaacgagaccatcaactacaacgaggagttcacctggagactgggcgagaactacgccgaggagtacgccaaggccctggagaagggcctgcccgaccccgtgctgtacctggccgagaagttcacccccagaagcccctgcggcctgtacagacagtacagactggccggccactacaccagcgccatgctgtgggtggccttcctgtgctggctgctggccaacgtgatgctgagcatgcccgtgctggtgtacggcggctacatgctgctggccaccggcatcttccagctgctggccctgctgttcttcagcatggccaccagcctgaccagcccctgccccctgcacctgggcgccagcgtgctgcacacccaccacggccccgccttctggatcaccctgaccaccggcctgctgtgcgtgctgctgggcctggccatggccgtggcccacagaatgcagccccacagactgaaggccttcttcaaccagagcgtggacgaggaccccatgctggagtggagccccgaggagggcggcctgctgagccccagatacagaagcatggccgacagccccaagagccaggacatccccctgagcgaggccagcagcaccaaggcctactacagacccagaagactgagcctggtgcccgccgacgtgagaggcctggcccccgccgccctgagcgccctgcccggcgccctgctggcccaggcctggagagccctgctgcccggcctgagatgccccaaggccggcaaggagagcagactgggccccccccacagcccctggagattcggccccgagggctgcgaggagagatgggccgagcacaccggcgacagccccagacccctgagaggcagaggcaccggcagactgtggagatggggcagcaaggagagaagagcctgcggcgtgagagccatgctgcccagactggtgagcaacagcggcctgaagagacccagctgcctggacctgcccaagtgctgggactacagaagagacgccagagccttcttccacctgctggagcccaccccctgcgtgaccagcagacacacccccctgatctag

SEQ ID NO: 97012 - DNA, 1317 bp, Artificial Sequence
  derived and/or modified sequence
atggctactttgggacacacattccccttctatgctggccccaagccaaccttcccgatggacaccactttggccagcatcatcatgatctttctgactgcactggccacgttcatcgtcatcctgcctggcattcggggaaagacgaggctgttctggctgcttcgggtggtgaccagcttattcatcggggctgcaatcctggggacccccgtgcagcagctgaatgagaccatcaattacaacgaggagttcacctggcgcctgggtgagaactatgctgaggagtatgcaaaggctctggagaaggggctgccagaccctgtgttgtacctagctgagaagttcactccaagaagcccatgtggcctataccgccagtaccgcctggcgggacactacacctcagccatgctatgggtggcattcctctgctggctgctggccaatgtgatgctctccatgcctgtgctggtatatggtggctacatgctattggccacgggcatcttccagctgttggctctgctcttcttctccatggccacatcactcacctcaccctgtcccctgcacctgggcgcttctgtgctgcatactcaccatgggcctgccttctggatcacattgaccacaggactgctgtgtgtgctgctgggcctggctatggcggtggcccacaggatgcagcctcacaggctgaaggctttcttcaaccagagtgtggatgaagaccccatgctggagtggagtcctgaggaaggtggactcctgagcccccgctaccggtccatggctgacagtcccaagtcccaggacattcccctgtcagaggcttcctccaccaaggcatactatcgccccaggagactttccctggtgcctgcggatgtccgaggcctcgcgccagcagcgctcagtgcccttcctggagctctcctggcccaggcctggcgggcactgcttcccggcctgcgatgtcccaaggcggggaaggagtccagattgggtccccctcacagtccttggcgctttggtccagaagggtgcgaagagcgctgggccgaacatactggagactcaccacggcccctccgaggaagaggcacaggacgcctgtggcggtggggatcgaaagaaaggagggcatgtggagtcagggctatgttgcccaggctggtctcgaactctggcctcaaacgaccttcctgcctcgacctcccaaagtgctgggattacaggcgtgatgcccgggccttcttccatcttttggagcctaccccttgtgttacctcccgccacacacctctaatctga

SEQ ID NO: 97013 - protein, 574 aa, Artificial Sequence
  derived and/or modified sequence
MGTTGLESLSLGDRGAAPTVTSSERLVPDPPNDLRKEDVAMELERVGEDEEQMMIKRSSECNPLLQEPIASAQFGATAGTECRKSVPCGWERVVKQRLFGKTAGRFDVYFISPQGLKFRSKSSLANYLHKNGETSLKPEDFDFTVLSKRGIKSRYKDCSMAALTSHLQNQSNNSNWNLRTRSKCKKDVFMPPSSSSELQESRGLSNFTSTHLLLKEDEGVDDVNFRKVRKPKGKVTILKGIPIKKTKKGCRKSCSGFVQSDSKRESVCNKADAESEPVAQKSQLDRTVCISDAGACGETLSVTSEENSLVKKKERSLSSGSNFCSEQKTSGIINKFCSAKDSEHNEKYEDTFLESEEIGTKVEVVERKEHLHTDILKRGSEMDNNCSPTRKDFTEDTIPRTQIERRKTSLYFSSKYNKEALSPPRRKAFKKWTPPRSPFNLVQETLFHDPWKLLIATIFLNRTSGKMAIPVLWKFLEKYPSAEVARTADWRDVSELLKPLGLYDLRAKTIVKFSDEYLTKQWKYPIELHGIGKYGNDSYRIFCVNEWKQVHPEDHKLNKYHDWLWENHEKLSLS

SEQ ID NO: 97014 - DNA, 1725 bp, Artificial Sequence
  derived and/or modified sequence
atgggcaccaccggcctggagagcctgagcctgggcgacagaggcgccgcccccaccgtgaccagcagcgagagactggtgcccgacccccccaacgacctgagaaaggaggacgtggccatggagctggagagagtgggcgaggacgaggagcagatgatgatcaagagaagcagcgagtgcaaccccctgctgcaggagcccatcgccagcgcccagttcggcgccaccgccggcaccgagtgcagaaagagcgtgccctgcggctgggagagagtggtgaagcagagactgttcggcaagaccgccggcagattcgacgtgtacttcatcagcccccagggcctgaagttcagaagcaagagcagcctggccaactacctgcacaagaacggcgagaccagcctgaagcccgaggacttcgacttcaccgtgctgagcaagagaggcatcaagagcagatacaaggactgcagcatggccgccctgaccagccacctgcagaaccagagcaacaacagcaactggaacctgagaaccagaagcaagtgcaagaaggacgtgttcatgccccccagcagcagcagcgagctgcaggagagcagaggcctgagcaacttcaccagcacccacctgctgctgaaggaggacgagggcgtggacgacgtgaacttcagaaaggtgagaaagcccaagggcaaggtgaccatcctgaagggcatccccatcaagaagaccaagaagggctgcagaaagagctgcagcggcttcgtgcagagcgacagcaagagagagagcgtgtgcaacaaggccgacgccgagagcgagcccgtggcccagaagagccagctggacagaaccgtgtgcatcagcgacgccggcgcctgcggcgagaccctgagcgtgaccagcgaggagaacagcctggtgaagaagaaggagagaagcctgagcagcggcagcaacttctgcagcgagcagaagaccagcggcatcatcaacaagttctgcagcgccaaggacagcgagcacaacgagaagtacgaggacaccttcctggagagcgaggagatcggcaccaaggtggaggtggtggagagaaaggagcacctgcacaccgacatcctgaagagaggcagcgagatggacaacaactgcagccccaccagaaaggacttcaccgaggacaccatccccagaacccagatcgagagaagaaagaccagcctgtacttcagcagcaagtacaacaaggaggccctgagcccccccagaagaaaggccttcaagaagtggaccccccccagaagccccttcaacctggtgcaggagaccctgttccacgacccctggaagctgctgatcgccaccatcttcctgaacagaaccagcggcaagatggccatccccgtgctgtggaagttcctggagaagtaccccagcgccgaggtggccagaaccgccgactggagagacgtgagcgagctgctgaagcccctgggcctgtacgacctgagagccaagaccatcgtgaagttcagcgacgagtacctgaccaagcagtggaagtaccccatcgagctgcacggcatcggcaagtacggcaacgacagctacagaatcttctgcgtgaacgagtggaagcaggtgcaccccgaggaccacaagctgaacaagtaccacgactggctgtgggagaaccacgagaagctgagcctgagctag

SEQ ID NO: 97015 - DNA, 1725 bp, Artificial Sequence
  derived and/or modified sequence
atggggactactggattagagtctctgtcattgggcgaccgcggagccgctcccaccgtgacctccagcgagaggctggtcccagaccccccaaatgacttgaggaaggaggatgtggccatggagttggaaagggtgggagaggacgaggagcagatgatgatcaagcggtcctctgagtgcaatccactgctccaagagcctattgccagtgctcaattcggagcaacagctggtaccgaatgcaggaagtcagtgccctgcgggtgggagcgagttgtgaagcagcgcctgttcggaaaaactgctggccggttcgatgtctattttattagccctcaagggttgaaattcaggagtaaaagctcactcgctaattatctgcacaagaacggagaaacttctctgaagccagaagatttcgacttcactgtcctcagtaagagggggattaaaagcagatacaaagattgttccatggctgccttaacatcgcacctgcagaaccagtctaacaacagcaactggaatctcaggacccgatccaaatgtaagaaagatgtttttatgcccccgtcttcatcctccgaactccaggaatctcggggactgagtaactttacaagcacgcaccttctgttgaaagaagacgagggcgtggacgacgtgaactttcgcaaggtacggaagccaaaaggtaaggtgacgatcctcaaggggatccccatcaaaaaaacaaaaaagggctgtaggaaaagctgctcgggctttgtccagtcggactcgaaacgggaatctgtgtgcaacaaggcagacgccgagtctgagcctgtggcccagaaatcccagctcgatcgcactgtttgtatctctgacgcgggggcctgcggcgaaactttgtcggtgactagcgaagaaaatagcctggtcaaaaagaaggaaaggagtctttcatctggatctaacttctgctctgagcaaaaaacgagtggaatcatcaacaagttctgttctgcaaaggacagcgagcataatgaaaaatatgaggatacgtttcttgaatcagaagaaatcggtaccaaggtagaagtcgtagaacgtaaagagcatctgcacacagacatcctgaaaagaggctctgaaatggacaataattgttcgcctacacgtaaggactttacagaggacacaatacctcgcacacagattgaacggcgaaaaacttctctttatttcagctcaaagtataacaaagaggctttatctccccctagaagaaaagcctttaagaaatggacaccgccacgtagtccattcaacctggtgcaggagactttgttccatgacccttggaaactgcttattgcaacgattttcctgaatcgcactagcggaaagatggctattcctgtgctgtggaagttcctggaaaaatatccctcagccgaggtcgcccgaactgccgactggagggacgtatctgaactgcttaaacctctgggcctctacgacctgcgggcaaagacaatagtaaaattttctgatgagtatttaaccaaacagtggaaataccccatcgagcttcacggcatcggcaaatatggcaatgactcgtaccgaatcttctgtgtgaacgaatggaagcaagtgcatccagaagaccacaaattaaacaagtaccacgactggctttgggagaatcacgaaaaattgagcttgagttag

SEQ ID NO: 97016 - DNA, 1725 bp, Artificial Sequence
  derived and/or modified sequence
atgggcaccaccggcctggagagcctgagcctgggggacagaggagctgcccccaccgtgaccagcagcgagcggctggtgcctgaccccccaaatgacctgaggaaagaagatgtggccatggagctggagcgggtgggggaggatgaggagcagatgatgatcaagaggagcagcgagtgcaaccccctgctgcaggagcccatcgccagcgcccagtttggagccacagctggaacagaatgtaggaagtctgtgccctgtggctgggagcgggtggtgaagcagaggctgtttgggaagacagctggccgctttgatgtgtacttcatcagcccccagggcctgaagttccgcagcaagagcagcctggccaactacctgcacaagaatggagagaccagcctgaagccagaagattttgacttcaccgtgctgagcaagaggggcatcaagagccgctacaaggactgcagcatggccgccctgaccagccacctgcagaaccagagcaacaacagcaactggaacctgcggaccaggagcaagtgcaagaaggatgtgttcatgccacccagcagcagcagcgagctgcaggagagccggggcctgagcaacttcaccagcacccacctgctgctgaaggaggatgaaggagtggatgatgtgaacttcaggaaggtgaggaagcccaagggcaaggtgaccatcctgaagggcatccccatcaagaagaccaagaagggctgcaggaagagctgcagcggctttgtgcagagcgacagcaagcgggagagcgtgtgcaacaaggcagatgctgagagcgagcctgtggcccagaagagccagctggacagaacagtgtgcatcagtgatgctggggcctgtggggagaccctgtctgtgaccagcgaggagaacagcctggtgaagaagaaggagaggagcctgagcagcggcagcaacttctgcagcgagcagaagaccagcggcatcatcaacaagttctgcagcgccaaggacagcgagcacaatgagaagtatgaggacaccttcctggagagcgaggagatcggcaccaaggtggaggtggtggagaggaaggagcacctgcacacagacatcctgaagaggggcagcgagatggacaacaactgcagccccaccaggaaggacttcacagaggacaccatccccaggacccagattgaaagaaggaagaccagcctgtacttcagcagcaagtacaacaaggaggccctgagcccccccaggaggaaggccttcaagaagtggaccccacccaggagccccttcaacctggtgcaggagaccctcttccatgacccctggaagctgctgattgccaccatcttcctgaacagaaccagcggcaagatggccatccctgtgctgtggaagttcctggagaagtaccccagcgctgaggtggccaggacagctgactggagagatgtgtctgagctgctgaagcccctgggcctgtatgacctgcgggccaagaccatcgtgaagttcagtgatgagtacctgaccaagcagtggaagtaccccatcgagctgcatggaattggcaagtatggaaatgacagctaccgcatcttctgtgtgaatgagtggaagcaggtgcaccctgaggaccacaagctgaacaagtaccatgactggctgtgggagaaccacgagaagctgagcctgtcctag

SEQ ID NO: 97017 - DNA, 2478 bp, Artificial Sequence
  derived and/or modified sequence
gattggtggagcgtggaaatggcggctgtagccgagggggcggccggaaagcagcggcggcgtctggggcgctttcgcaacattcagacctcggttgcagcccggtgccgtgagctgaagaggtttcacatcttactccgccccacaccctgggcgttgcggcgctgggctcgttgctgcagccggaccctgctcgatgggcacgactgggctggagagtctgagtctgggggaccgcggagctgcccccaccgtcacctctagtgagcgcctagtcccagacccgccgaatgacctccgcaaagaagatgttgctatggaattggaaagagtgggagaagatgaggaacaaatgatgataaaaagaagcagtgaatgtaatcccttgctacaagaacccatcgcttctgctcagtttggtgctactgcaggaacagaatgccgtaagtctgtcccatgtggatgggaaagagttgtgaagcaaaggttatttgggaagacagcaggaagatttgatgtgtactttatcagcccacaaggactgaagttcagatccaaaagttcacttgctaattatcttcacaaaaatggagagacttctcttaagccagaagattttgattttactgtactttctaaaaggggtatcaagtcaagatataaagactgcagcatggcagccctgacatcccatctacaaaaccaaagtaacaattcaaactggaacctcaggacccgaagcaagtgcaaaaaggatgtgtttatgccgccaagtagtagttcagagttgcaggagagcagaggactctctaactttacttccactcatttgcttttgaaagaagatgagggtgttgatgatgttaacttcagaaaggttagaaagcccaaaggaaaggtgactattttgaaaggaatcccaattaagaaaactaaaaaaggatgtaggaagagctgttcaggttttgttcaaagtgatagcaaaagagaatctgtgtgtaataaagcagatgctgaaagtgaacctgttgcacaaaaaagtcagcttgatagaactgtctgcatttctgatgctggagcatgtggtgagaccctcagtgtgaccagtgaagaaaacagccttgtaaaaaaaaaagaaagatcattgagttcaggatcaaatttttgttctgaacaaaaaacttctggcatcataaacaaattttgttcagccaaagactcagaacacaacgagaagtatgaggatacctttttagaatctgaagaaatcggaacaaaagtagaagttgtggaaaggaaagaacatttgcatactgacattttaaaacgtggctctgaaatggacaacaactgctcaccaaccaggaaagacttcactgaagataccatcccacgaacacagatagaaagaaggaaaacaagcctgtatttttccagcaaatataacaaagaagctcttagccccccacgacgtaaagcctttaagaaatggacacctcctcggtcaccttttaatctcgttcaagaaacactttttcatgatccatggaagcttctcatcgctactatatttctcaatcggacctcaggcaaaatggcaatacctgtgctttggaagtttctggagaagtatccttcagctgaggtagcaagaaccgcagactggagagatgtgtcagaacttcttaaacctcttggtctctacgatcttcgggcaaaaaccattgtcaagttctcagatgaatacctgacaaagcagtggaagtatccaattgagcttcatgggattggtaaatatggcaacgactcttaccgaattttttgtgtcaatgagtggaagcaggtgcaccctgaagaccacaaattaaataaatatcatgactggctttgggaaaatcatgaaaaattaagtctatcttaaactctgcagctttcaagctcatctgttatgcatagctttgcacttcaaaaaagcttaattaagtacaaccaaccacctttccagccatagagattttaattagcccaactagaagcctagtgtgtgtgctttcttaatgtgtgtgccaatggtggatctttgctactgaatgtgtttgaacatgttttgagatttttttaaaataaattattatttgacaacaatccaaaaaaaatacggcttttccaatgatgaaatataatcagaagatgaaaaatagttctaaactatcaataatacaaagcaaatttctatcagccttgctaaagctaggggcccactaaatatttttatcggctaggcgtggtggtgcatgcctgtaatctcggaaggctgaggcaggaggatcatttgagctcatgagggcccaggaggtcaaggcttcagtgagccatgatcatgccactgcactccagtctggatgacagagagagaccctgtctcaaaaaatatatatttaaaaaataaaaataaaagctgaccccaaagacaaataa

SEQ ID NO: 97018 - DNA, 1725 bp, Artificial Sequence
  derived and/or modified sequence
atgggcaccaccggcctggagagcctgagcctgggcgaccggggcgctgcccctactgttacctccagtgagagacttgttcccgatccccccaacgacctaaggaaggaagacgtggcaatggagttggaacgtgttggagaggacgaggagcagatgatgatcaaaaggtcttcagagtgcaatccgttgttgcaggaacccattgcctctgcacagttcggcgctactgccggaacggagtgcaggaaatctgtgccttgcgggtgggagcgcgtcgtcaaacagcggctgttcgggaagaccgcggggaggtttgatgtatattttatatcccctcagggactgaaattccgaagcaagagctctttggctaattatttgcataaaaacggtgagacgtcgttgaagcccgaggatttcgactttactgtgttaagtaagcgggggatcaaatcaaggtacaaagactgctccatggccgctttgacctctcacctccaaaaccaaagcaacaactccaactggaatttgcgcacccggtcgaagtgtaaaaaagacgtgttcatgccaccttcctcaagcagcgagctccaggagagccgcggtttgtccaactttaccagtacgcacttgctactcaaagaagatgaaggcgtggacgatgttaactttcgcaaggtgcggaaacccaagggtaaagtcacaatcttgaagggtatccctattaagaagacaaaaaagggatgcaggaagagttgttcggggttcgtgcagtctgactcaaagagggagtctgtgtgtaacaaggccgatgccgaatcggaaccagtggcacagaagagccagttggataggacggtgtgtatatcagacgcaggagcatgtggagaaacactgtctgtaacttccgaggaaaatagtctggtgaagaaaaaagagcggagtctgtcttctggatctaacttctgtagtgagcaaaaaacctccggcatcatcaataaattttgcagtgccaaagatagcgagcacaacgagaaatatgaggacaccttcctcgaatcagaagagataggcacaaaagtggaggtcgtggagcgcaaggaacacctacacacagatatcctgaaacggggaagcgagatggacaacaactgcagcccaacgcgaaaagacttcaccgaagacacgattccaagaacccagattgagagacggaagacctccctgtatttctcatccaaatacaacaaggaagcactgtccccaccacgacgcaaagcattcaaaaaatggactcccccacggtcacctttcaatctggtacaggagactctatttcacgacccttggaagttgcttatcgccacaatttttctgaaccggacttcaggtaagatggctattccagttttgtggaagtttttggaaaagtacccttccgccgaggtagctaggactgccgactggcgcgatgtttcggagttattgaagccactgggtctatacgacctgcgggctaaaacaatcgtcaaatttagcgacgagtacctaacaaagcagtggaagtaccccatcgaattgcacggtataggcaaatacgggaacgactcctaccggatcttctgcgttaacgagtggaaacaagtacatccagaagatcataaactgaacaaataccacgactggctgtgggaaaaccacgaaaaactttcattgtcatag

SEQ ID NO: 97019 - DNA, 1725 bp, Artificial Sequence
  derived and/or modified sequence
atgggtaccaccggcctggaaagtctttccttgggcgatcgtggggctgcccctaccgtaactagtagcgaacggctcgttccagatcccccaaacgacttacgaaaggaggatgttgctatggagctggaaagggtcggcgaggacgaggagcaaatgatgattaaacggtctagcgaatgcaaccccctcctccaagagcccattgccagcgcccagtttggagctaccgcgggaactgagtgtagaaagtcagtgccatgcgggtgggaaagagtcgttaagcaaagactgtttggcaaaaccgccggaaggttcgatgtttatttcatctccccacagggtctcaagtttcgtagcaaatcttctctggccaattacctccacaaaaacggggaaacaagcctgaaacccgaggactttgatttcaccgttctgtcaaaaagaggcatcaagtctcgttacaaagattgcagtatggccgcactgacctcccatttgcaaaaccagtctaacaacagcaattggaacctcaggacccgaagtaaatgcaagaaagatgtgtttatgccaccgtctagctcttcagagctgcaggagagtcgcggactgtcaaatttcacttcaacacaccttttgctgaaagaggacgagggcgtggacgatgtcaacttccgcaaggtaagaaagcccaaggggaaagttacaattctgaagggtatccccattaaaaagactaagaaggggtgcagaaagtcctgcagtgggtttgtgcagtcagactctaagcgggaaagcgtctgtaataaagctgacgctgagtctgagccagtcgcccaaaaaagtcagcttgatcgcactgtgtgcatcagcgacgcaggcgcatgcggagaaacgctttcagtgacaagcgaagaaaactcgctagtcaaaaagaaggagagatctctgtcctccggatctaatttttgctccgagcagaagacttccggcattattaataaattctgtagtgcgaaagattctgagcataacgaaaaatacgaggataccttccttgagtccgaagagatcgggactaaagtggaggtggtggagaggaaggaacatttgcacaccgatatactgaaacgaggatcagaaatggataataactgtagccccaccagaaaggactttacagaagacacgatcccccgtacacagattgaacgcagaaagacatctctgtacttttcctctaaatataacaaggaggcactctcaccacctagacgcaaggcctttaagaaatggactccccctcgatctcccttcaatttggtccaagagaccttgtttcacgacccctggaaactgctgattgccacaatctttcttaatcgcacatcagggaagatggccatccctgtgctctggaagttcctggagaagtacccgagcgcggaggtggccagaactgctgattggagggacgtgagcgaactgctcaagcccctcggattgtacgacttgcgcgcaaagactattgtgaaattctccgacgaatacctaaccaagcagtggaagtacccaatcgaactccatggcattggaaagtatggcaatgatagctatcggatcttctgcgtgaatgagtggaagcaagtacatcccgaagatcataagctgaacaaatatcatgactggctatgggagaatcacgaaaaactgtctctgtcctag

SEQ ID NO: 97020 - protein, 262 aa, Artificial Sequence
  derived and/or modified sequence
MGTTGLESLSLGDRGAAPTVTSSERLVPDPPNDLRKEDVAMELERVGEDEEQMMIKRSSECNPLLQEPIASAQFGATAGTECQDTIPRTQIERRKTSLYFSSKYNKEALSPPRRKAFKKWTPPRSPFNLVQETLFHDPWKLLIATIFLNRTSGKMAIPVLWKFLEKYPSAEVARTADWRDVSELLKPLGLYDLRAKTIVKFSDEYLTKQWKYPIELHGIGKYGNDSYRIFCVNEWKQVHPEDHKLNKYHDWLWENHEKLSLS

SEQ ID NO: 97021 - DNA, 789 bp, Artificial Sequence
  derived and/or modified sequence
atgggcaccaccggcctggagagcctgagcctgggcgacagaggcgccgcccccaccgtgaccagcagcgagagactggtgcccgacccccccaacgacctgagaaaggaggacgtggccatggagctggagagagtgggcgaggacgaggagcagatgatgatcaagagaagcagcgagtgcaaccccctgctgcaggagcccatcgccagcgcccagttcggcgccaccgccggcaccgagtgccaggacaccatccccagaacccagatcgagagaagaaagaccagcctgtacttcagcagcaagtacaacaaggaggccctgagcccccccagaagaaaggccttcaagaagtggaccccccccagaagccccttcaacctggtgcaggagaccctgttccacgacccctggaagctgctgatcgccaccatcttcctgaacagaaccagcggcaagatggccatccccgtgctgtggaagttcctggagaagtaccccagcgccgaggtggccagaaccgccgactggagagacgtgagcgagctgctgaagcccctgggcctgtacgacctgagagccaagaccatcgtgaagttcagcgacgagtacctgaccaagcagtggaagtaccccatcgagctgcacggcatcggcaagtacggcaacgacagctacagaatcttctgcgtgaacgagtggaagcaggtgcaccccgaggaccacaagctgaacaagtaccacgactggctgtgggagaaccacgagaagctgagcctgagctag

SEQ ID NO: 97022 - DNA, 789 bp, Artificial Sequence
  derived and/or modified sequence
atgggcaccacgggtctcgagagtctatcacttggcgaccgcggggcggcccccaccgtgacaagttctgagcgactggtgcctgatccaccaaatgatctgcgaaaagaggacgtggccatggaactcgaaagggtcggagaagacgaggagcagatgatgattaaaagatccagcgagtgcaaccccctgctccaggagccaatcgcttcagcacaatttggcgccacagccgggactgagtgccaggacaccattccgcggacacagatcgaacgcagaaaaacctccctatacttctcatctaagtataacaaagaggctctctctccccctaggcggaaggcctttaagaagtggacccccccaaggtctcccttcaaccttgtccaagaaacattatttcacgacccctggaaattgctaattgcaaccatctttctgaatcgcaccagtgggaaaatggccatcccagtcctgtggaagttcttagaaaaatacccgagcgccgaagtcgccagaacagctgactggagggatgtgtctgaactcctgaaaccactcgggctgtatgacctgcgtgcaaagacgattgtaaaattttccgacgaatatctgaccaaacagtggaagtaccctatcgagctccatggaatcgggaagtatgggaacgacagctatcgcatcttttgtgtcaacgagtggaagcaggtgcaccctgaagatcataaactcaacaaataccatgattggctgtgggaaaaccacgagaagctttcactttcttag

SEQ ID NO: 97023 - DNA, 789 bp, Artificial Sequence
  derived and/or modified sequence
atgggcaccaccggcctggagagcctgagcctgggggacagaggagctgcccccaccgtgaccagcagcgagcggctggtgcctgaccccccaaatgacctgaggaaagaagatgtggccatggagctggagcgggtgggggaggatgaggagcagatgatgatcaagaggagcagcgagtgcaaccccctgctgcaggagcccatcgccagcgcccagtttggagccacagctggaacagagtgccaggacaccatccccaggacccagattgaaagaaggaagaccagcctgtacttcagcagcaagtacaacaaggaggccctgagcccccccaggaggaaggccttcaagaagtggaccccacccaggagccccttcaacctggtgcaggagaccctcttccatgacccctggaagctgctgattgccaccatcttcctgaacagaaccagcggcaagatggccatccctgtgctgtggaagttcctggagaagtaccccagcgctgaggtggccaggacagctgactggagagatgtgtctgagctgctgaagcccctgggcctgtatgacctgcgggccaagaccatcgtgaagttcagtgatgagtacctgaccaagcagtggaagtaccccatcgagctgcatggaattggcaagtatggaaatgacagctaccgcatcttctgtgtgaatgagtggaagcaggtgcaccctgaggaccacaagctgaacaagtaccatgactggctgtgggagaaccacgagaagctgagcctgtcctag

SEQ ID NO: 97024 - DNA, 804 bp, Artificial Sequence
  derived and/or modified sequence
atgggcacgactgggctggagagtctgagtctgggggaccgcggagctgcccccaccgtcacctctagtgagcgcctagtcccagacccgccgaatgacctccgcaaagaagatgttgctatggaattggaaagagtgggagaagatgaggaacaaatgatgataaaaagaagcagtgaatgtaatcccttgctacaagaacccatcgcttctgctcagtttggtgctactgcaggaacagaatgccaagataccatcccacgaacacagatagaaagaaggaaaacaagcctgtatttttccagcaaatataacaaagaagctcttagccccccacgacgtaaagcctttaagaaatggacacctcctcggtcaccttttaatctcgttcaagaaacactttttcatgatccatggaagcttctcatcgctactatatttctcaatcggacctcaggcaaaatggcaatacctgtgctttggaagtttctggagaagtatccttcagctgaggtagcaagaaccgcagactggagagatgtgtcagaacttcttaaacctcttggtctctacgatcttcgggcaaaaaccattgtcaagttctcagatgaatacctgacaaagcagtggaagtatccaattgagcttcatgggattggtaaatatggcaacgactcttaccgaattttttgtgtcaatgagtggaagcaggtgcaccctgaagaccacaaattaaataaatatcatgactggctttgggaaaatcatgaaaaattaagtctatcttaaactctgcagctttca

SEQ ID NO: 97025 - DNA, 789 bp, Artificial Sequence
  derived and/or modified sequence
atgggcaccaccggcctggagagcctgagcctgggcgaccggggcgcagcacctactgtgacctcatctgagaggcttgtacccgacccacctaacgacctgaggaaagaggatgtagctatggagctggaacgggtgggtgaggacgaggagcaaatgatgattaagcgctctagcgagtgtaatcctcttcttcaagagccaattgccagcgcccaattcggcgccaccgccggcacggagtgtcaggatactatacctcggacacagatcgagcgccgcaaaacttcactctattttagcagcaaatataataaggaggcacttagccctcctagacggaaggctttcaaaaaatggacacccccgcgctccccatttaacctagtacaagagaccctcttccacgacccctggaagctgctaatcgcaacgatctttctcaaccgcacttcagggaaaatggccattcccgtgctgtggaagttcctcgagaaataccctagtgctgaggtcgcccggacagccgattggcgggacgttagtgagttgttaaagccactcggtctctacgacttacgggccaaaacaattgtcaaatttagtgacgaatatctgaccaagcaatggaagtatccaatcgaactccatggtatcggcaagtatggcaatgatagctatcgaattttttgcgtcaacgagtggaaacaagttcatcctgaggaccataagctgaacaaatatcacgactggctgtgggaaaatcacgaaaagctttcccttagttag

SEQ ID NO: 97026 - DNA, 789 bp, Artificial Sequence
  derived and/or modified sequence
atggggactactgggctagagagtctttcgctcggcgaccgcggtgcggcacctacagtgacaagtagcgaaagattggtgcccgaccctccaaacgacctccggaaggaggacgtcgctatggaactggaaagagtcggcgaggacgaggagcagatgatgatcaagagaagctccgaatgcaatccacttctgcaggaacctatcgcatccgcacagttcggggctaccgctggtacggagtgccaggacaccatcccaagaacccagatcgaacggaggaagaccagcctgtattttagctccaagtataacaaggaggctctctcacctccacgacgcaaagctttcaagaagtggaccccacctcgctctccattcaatctcgtgcaggagactctctttcacgacccatggaaacttctgattgcaacgatttttttgaacaggacaagcggcaaaatggccatcccggtcctatggaaattcctggagaaataccctagtgccgaagtcgccaggacagctgattggcgggatgtctctgagctgctgaagcccctggggctgtatgacctgcgtgccaagactatcgtgaaatttagcgacgagtatctcaccaagcagtggaagtacccgattgaactgcatggaattggtaagtatgggaacgattcatatcgaattttttgtgtcaatgaatggaaacaggtgcaccccgaggaccacaaactgaacaagtaccacgattggctgtgggaaaaccacgaaaagctatccctttcttag

SEQ ID NO: 97027 - protein, 252 aa, Artificial Sequence [sequence omitted]

SEQ ID NO: 97028 - protein, 454 aa, Artificial Sequence
  derived and/or modified sequence
MDPSNWSSFIFQGHAQNPLQVGAELQSRFFASQGCAQSPFQAAPAPPPTPQAPAAEPLQVDLLPVLAAAQESAAAAAAAAAAAAAVAAAPPAPAAASTVDTAALKQPPAPPPPPPPVSAPAAEAAPPASAATIAAAAATAVVAPTSTVAVAPVASALEKKTKSKGPYICALCAKEFKNGYNLRRHEAIHTGAKAGRVPSGAMKMPTMVPLSLLSVPQLSGAGGGGGEAGAGGGAAAVAAGGVVTTTASGKRIRKNHACEMCGKAFRDVYHLNRHKLSHSDEKPYQCPVCQQRFKRKDRMSYHVRSHDGAVHKPYNCSHCGKSFSRPDHLNSHVRQVHSTERPFKCEKCEAAFATKDRLRAHTVRHEEKVPCHVCGKMLSSAYISDHMKVHSQGPHHVCELCNKGTGEVCPMAAAAAAAAAAAAAAVAAPPTAVGSLSGAEGVPVSSQPLPSQPW

SEQ ID NO: 97029 - DNA, 759 bp, Artificial Sequence
  derived and/or modified sequence
atgaaaatgccaactatggtccccctctcactactatctgtgccccagctgtctggcgccggcggcggcgggggtgaagcaggggctggaggcggagcagccgccgtggctgctggaggtgtcgtcacaaccaccgcatccggcaagaggatccggaagaatcacgcttgtgagatgtgcggcaaggcctttcgagatgtgtaccatctcaataggcacaagttgagccatagtgatgagaagccataccagtgcccagtgtgtcagcagaggtttaaacgtaaagaccgaatgtcctaccacgtccgaagccatagaaggtgtgccaagccttataattgtagccattgtggaaaaagctttagccgccctgaccacctaaactcccatgtccgccaggtgcattctactgagaggcccttcaaatgtgagaagtgtgaagcggcattcgcgaccaaggatagattgcgagcccacaccgttaggcatgaggagaaggtgccctgccatgtctgcggcaagatgctgtcctcggcctacatctctgatcatatgaaggtgcacagccagggtccccatcacgtgtgtgaactctgcaacaaaggtaccggcgaagtgtgcccgatggccgcggcggccgcagccgcagctgcagctgcagcagctgcagtggccgcaccaccaaccgccgtgggtagtctcagcggtgctgagggagtaccagtgagttctcagccgctacctagccagccatggtag

SEQ ID NO: 97030 - DNA, 1365 bp, Artificial Sequence
  derived and/or modified sequence
atggaccctagcaattggagttcttttatttttcagggacatgcccagaacccactccaggtcggcgccgagctgcagtccaggttttttgcttcccagggctgcgcacaatcccccttccaggctgcccccgccccccctcccactccccaggctcccgcagccgaacccctccaagttgatctcttgccagtactggctgccgctcaagaaagtgccgctgccgctgccgctgcagctgccgcagctgccgcggttgccgcggctcctcctgccccagcggcagctagtaccgtcgacaccgccgccctcaaacaaccacccgcacctcccccacctcccccccctgtgtcagcaccagccgccgaggcagccccacccgcatccgcggcaacaatcgctgccgccgccgctacagctgttgtcgcacccacctcaacagtggccgtcgcccctgtcgccagcgcgctggaaaagaagacgaaaagtaagggtccgtacatctgcgcactgtgtgctaaggaatttaagaatggatataatctgcggcgccacgaagcaatacataccggcgctaaagctggccgcgtgccgtcaggggctatgaagatgcctaccatggtgcctctctctcttttatctgtgcctcaactgagtggcgccggggggggtgggggagaggctggagcgggcgggggggcagccgcagtggccgcgggaggagttgtgaccactactgccagtgggaagcggattaggaagaatcatgcgtgtgagatgtgcgggaaagcatttagagacgtgtatcatctgaaccggcacaagttatctcactccgacgaaaaaccctatcagtgtcccgtttgtcagcagagattcaagaggaaggacagaatgtcataccacgtccggtcccatgacggggcggtccacaaaccttataattgctctcactgcggcaagtctttcagtagacctgaccatctgaactcccatgtgcggcaggtgcacagcactgaacggcctttcaaatgcgagaagtgcgaggccgctttcgctaccaaggaccgacttcgcgcccacaccgtgcgacacgaagagaaagttccttgccatgtatgtggaaaaatgcttagcagcgcatacatttccgatcatatgaaggttcattctcagggaccgcatcacgtttgcgaactgtgcaataagggcaccggggaagtctgtccaatggctgccgccgccgctgccgccgccgctgcagcagccgctgctgtcgctgctccccccacagcagtgggctccctctccggtgctgaaggcgtccctgtaagctctcagcctctgccatctcagccatggtag

SEQ ID NO: 97031 - DNA, 759 bp, Artificial Sequence
  derived and/or modified sequence
atgaagatgcccaccatggtgcccctgagcctgctgtctgtgccccagctgagcggggccggcggcggcggcggggaggccggggccggcggcggcgctgctgctgtggccgccggcggcgtggtgaccaccacagccagcggcaagaggatcaggaagaaccacgcctgtgagatgtgtgggaaggccttcagagatgtgtaccacctgaacagacacaagctgagccacagtgatgagaagccctaccagtgccctgtgtgccagcagcgcttcaagaggaaggacaggatgagctaccacgtgcgcagccaccggcgctgtgccaagccctacaactgcagccactgcggcaagagcttcagcaggccagaccacctgaacagccacgtgcggcaggtgcacagcacagagcggcccttcaagtgtgagaagtgtgaggccgcctttgccaccaaggaccggctgcgggcccacacagtgagacatgaggagaaggtgccctgccacgtgtgtgggaagatgctgagcagcgcctacatcagtgaccacatgaaggtgcacagccagggcccccaccacgtgtgtgagctgtgcaacaagggcactggagaggtgtgccccatggctgctgctgctgctgctgctgctgctgctgctgctgctgctgtggccgccccacccacagctgtgggcagcctgtctggagctgagggcgtgcctgtgagcagccagcccctgcccagccagccctggtag

SEQ ID NO: 97032 - DNA, 1365 bp, Artificial Sequence
  derived and/or modified sequence
atggaccccagcaactggagcagcttcatcttccagggccacgcccagaaccccctgcaggtgggcgctgagctgcagagccgcttctttgccagccagggctgtgcccagagccccttccaggccgccccagcccccccacccaccccccaggccccagctgctgagcccctgcaggtggacctgctgcctgtgctggccgccgcccaggagagcgctgctgctgctgctgctgctgctgctgctgctgctgctgtggccgccgcccccccagccccagctgctgccagcacagtggacacagctgccctgaagcagcccccagcccctcctcctcctcctcctcctgtgtctgccccagctgctgaggccgcccccccagccagcgctgccaccatcgctgctgctgctgccacagctgtggtggcccccaccagcacagtggccgtggcccctgtggccagcgccctggagaagaagaccaagagcaagggcccctacatctgtgccctgtgtgccaaggagttcaagaatggctacaacctgcggagacatgaggccatccacactggagccaaggccggccgggtgcccagcggggccatgaagatgcccaccatggtgcccctgagcctgctgtctgtgccccagctgtctggagctgggggcggcggcggggaggccggggccggcggcggcgctgctgctgtggccgccggcggcgtggtgaccaccacagccagcggcaagaggatcaggaagaaccacgcctgtgagatgtgtgggaaggccttcagagatgtgtaccacctgaacagacacaagctgagccacagtgatgagaagccctaccagtgccctgtgtgccagcagcgcttcaagaggaaggacaggatgagctaccacgtgcgcagccatgatggagctgtgcacaagccctacaactgcagccactgcggcaagagcttcagcaggccagaccacctgaacagccacgtgcggcaggtgcacagcacagagcggcccttcaagtgtgagaagtgtgaggccgcctttgccaccaaggaccggctgcgggcccacacagtgagacatgaggagaaggtgccctgccacgtgtgtgggaagatgctgagcagcgcctacatcagtgaccacatgaaggtgcacagccagggcccccaccacgtgtgtgagctgtgcaacaagggcactggagaggtgtgccccatggctgctgctgctgctgctgctgctgctgctgctgctgctgctgtggccgccccacccacagctgtgggcagcctgtctggagctgagggcgtgcctgtgagcagccagcccctgcccagccagccctggtag

SEQ ID NO: 97033 - DNA, 991 bp, Artificial Sequence
  derived and/or modified sequence
aaggagttcaagaacggctacaatctccggaggcacgaagccatccacacgggagccaaggccggccgggtcccctcgggtgctatgaagatgccgaccatggtgcccctgagcctcctgagcgtgccccagctgagcggagccggcgggggagggggagaggcgggtgccggcggcggcgctgccgcagtggccgccggtggcgtggtgaccacgaccgcctcggggaagcgcatccggaagaaccatgcctgcgagatgtgtggcaaggccttccgcgacgtctaccacctgaaccgacacaagctgtcgcactcggacgagaagccctaccagtgcccggtgtgccagcagcgcttcaagcgcaaggaccgcatgagctaccacgtgcgctcacatcggcgctgtgcaaagccctacaactgctcccactgtggcaagagcttctcccggccggatcacctcaacagtcacgtcagacaagtgcactcaacagaacggcccttcaaatgtgagaaatgtgaggcagctttcgccacgaaggatcggctgcgggcgcacacagtacgacacgaggagaaagtgccatgtcacgtgtgtggcaagatgctgagctcggcttatatttcggaccacatgaaggtgcacagccagggtcctcaccatgtctgtgagctctgcaacaaaggtactggtgaggtttgtccaatggcggcggcagcggcagcggcggcagcggcagcagcggcagcagtagcagcccctcccacagctgtgggctccctctcgggggcggagggggtgcctgtgagctctcagccacttccctcccaaccctggtgagctccaagttggttgcgggggagaggggagaatggagtagagtcccttggtacaagctcctctcccccctcttttcccaccaactcctatttccctaccaaccaaggagcctccagaaggaaaggaggaagaaatgttttcttagggg

SEQ ID NO: 97034 - DNA, 2333 bp, Artificial Sequence
  derived and/or modified sequence
ccagggtgagcgcgagccacctccctccctccctccgccatggatcccagcaactggagcagcttcatcttccagggtcacgcccagaaccccctgcaggtcggggctgagctccagtcccgcttctttgcctcccagggctgcgcccagagtccattccaggccgcgccggcgcccccgcccacgccccaggccccggcggccgagcccctccaggtggacttgctcccggtgctcgccgccgcccaggagtccgccgcggctgctgcggccgctgccgccgctgctgccgccgtcgctgccgcgcccccggcccctgccgccgcctctacggtggacacagcggccctgaagcagcctccggcgccccctccgccacccccgccagtgtcggcgcccgcggccgaggccgcgccccccgcctccgccgccactatcgccgcggcggcggccaccgccgtcgtagccccaacctcgacggtcgccgtggccccggtcgcgtctgccttggagaagaagacaaagagcaaggggccctacatctgcgctctgtgcgccaaggagttcaagaacggctacaatctccggaggcacgaagccatccacacgggagccaaggccggccgggtcccctcgggtgctatgaagatgccgaccatggtgcccctgagcctcctgagcgtgccccagctgagcggagccggcgggggagggggagaggcgggtgccggcggcggcgctgccgcagtggccgccggtggcgtggtgaccacgaccgcctcggggaagcgcatccggaagaaccatgcctgcgagatgtgtggcaaggccttccgcgacgtctaccacctgaaccgacacaagctgtcgcactcggacgagaagccctaccagtgcccggtgtgccagcagcgcttcaagcgcaaggaccgcatgagctaccacgtgcgctcacatgacggcgctgtgcacaagccctacaactgctcccactgtggcaagagcttctcccggccggatcacctcaacagtcacgtcagacaagtgcactcaacagaacggcccttcaaatgtgagaaatgtgaggcagctttcgccacgaaggatcggctgcgggcgcacacagtacgacacgaggagaaagtgccatgtcacgtgtgtggcaagatgctgagctcggcttatatttcggaccacatgaaggtgcacagccagggtcctcaccatgtctgtgagctctgcaacaaaggtactggtgaggtttgtccaatggcggcggcagcggcagcggcggcagcggcagcagcggcagcagtagcagcccctcccacagctgtgggctccctctcgggggcggagggggtgcctgtgagctctcagccacttccctcccaaccctggtgagctccaagttggttgcgggggagaggggagaatggagtagagtcccttggtacaagctcctctcccccctcttttcccaccaactcctatttccctaccaaccaaggagcctccagaaggaaaggaggaagaaatgttttcttaggggaattcgctaggttttaacgatttgtttctcctgctcctcttctgtcagacctgaccccacacaaacctgtcccctcggttgtgttgaagtcccctggacagtgggcaggggtggcagaggacacgagcagccactgcccgtaccccctctcctctctgtaagcccatgccctgtcttcccagggacttgtgagcctcttccctcgacggtcctcttctctccttccagtcctctccccctgctgtctgcagcccctccccggggagttggtgctttcttttccttttttttttttttccagggggagggaggagaggaaggagggggatcagagctgtcccaaagagggaaagcggtgaggtttgaggaggggcagaagcagggccggcaaaggttgtaccttcataaggtggtatggggggttggggtcaggccctgaacatcgtcctacttgagaatctgtcaggggaaaaagtcaaggggagcaggaggaagagccaggagggccagaggcagagaagagatggagtcttaggggccagggtgagcgaggggtccagggcctagaggtgcttcctgggggcgggggaatgcagccagtgtccccctcccctcttccaccccagctccagccctggtcttgtcttttcatccctcttccccacgacagaagaagttgtggccctggccatgtcatcgtgttcctgtgtcccctgcatgtaccccaccctccaccccttccttttgcgcggaccccattacaataaattttaaataaaat

SEQ ID NO: 97035 - DNA, 759 bp, Artificial Sequence
  derived and/or modified sequence
atgaagatgcccaccatggtgcccctgagcctgctgagcgtgccccagctttccggtgccggcggaggaggcggagaagctggagccggggggggagctgcagctgtggcagctggcggcgttgttactaccaccgcttctggcaaacggatccggaaaaatcacgcgtgtgagatgtgcggaaaggccttcagggacgtgtaccacctgaatcgtcacaagctgtctcatagcgacgaaaagccttatcaatgccccgtgtgccaacaaagattcaagaggaaagataggatgagctatcacgtgcggagccataggcggtgtgcgaaaccgtacaattgctcccattgtggcaaatccttttccagaccagaccatctgaatagccacgtgcgccaggtccacagtacagagcgaccctttaagtgcgagaagtgcgaggccgccttcgccacaaaagatagactgcgcgcgcatactgtgcgccatgaggaaaaagtgccgtgccatgtttgcggcaaaatgcttagtagtgcttacatcagcgaccatatgaaagtccacagtcagggaccccatcacgtgtgtgagctatgcaataaaggtacgggggaggtatgtcccatggcagcggctgccgcagctgccgcagcagccgccgctgcagcagtggctgccccaccgaccgccgtcggcagcctgagcggagccgaaggcgtgcccgtcagttctcagcctctgccttcgcaaccatggtag

SEQ ID NO: 97036 - DNA, 1365 bp, Artificial Sequence
  derived and/or modified sequence
atggaccccagcaactggagcagcttcatcttccagggccacgcccagaatccgttgcaggtgggagccgagctgcagtcacgattttttgcgagccaaggctgtgctcaatccccttttcaggccgcgcccgccccccctcctaccccccaggcgcccgctgccgagccgctgcaggttgatcttcttccggtgttagccgctgctcaggagtccgcggccgctgctgccgcagcagccgctgctgctgctgcagttgccgccgccccgcccgcacctgcggcggcttccacggtggacacagccgcactaaagcagcctcccgcgcctccacctccccctcctcccgtgtccgcccctgccgccgaagctgcaccccccgcctcagctgccaccattgccgcagctgctgctactgcagtagtggcgccaacctctacagtagcagtggcccctgtcgcctcagctcttgaaaaaaaaactaagtccaaaggtccgtatatctgcgcgctttgcgcaaaggaattcaagaatggttataatctccgccgacacgaggccatacacaccggagcgaaggcaggccgggttccatcaggcgctatgaaaatgccgacaatggtgcctctgtcacttctgtccgtcccccaactgtcgggcgctggcggcggagggggtgaggcgggcgccgggggcggagccgccgctgtggccgctggcggggtggtgaccacaaccgcctcgggcaagagaattagaaagaaccatgcctgcgaaatgtgcgggaaggcgttcagagatgtctaccatctgaaccgccacaagctgtcccactcagacgagaaaccataccagtgcccggtctgtcagcagcggttcaaaagaaaagatcggatgagctaccacgtcagatcacatgatggggccgtgcacaaaccctataattgctcacattgcggcaagtcattcagtagacctgatcacctgaactcccatgttcgtcaagtacacagcacagagcgcccgtttaaatgcgagaagtgcgaggccgcgttcgctacaaaggaccgcctgcgtgcccacacggtgagacatgaagagaaagtgccttgtcatgtatgcgggaagatgttgtcatccgcatatatctcagatcacatgaaagtgcattcacaggggccacaccatgtgtgtgagctatgtaataagggcacgggcgaggtctgtcctatggcggctgccgcagcagcagccgcagctgcagcagcggctgcagtcgcagccccacccactgccgtgggctcgttgtccggcgctgaaggtgtgcctgtgtcctcccagcctcttcccagccagccttggtag

SEQ ID NO: 97037 - DNA, 759 bp, Artificial Sequence
  derived and/or modified sequence
atgaagatgccgacaatggtgcccttgtccctactgtccgtcccacagttatcaggtgccggtggagggggtggggaagctggggcaggcggaggcgctgctgcggtggccgctggaggggtggttacaaccactgcatccggaaagcgaattaggaaaaaccatgcttgtgagatgtgtggaaaggcatttagagatgtgtatcatttgaaccgacataaattgtctcattccgacgagaagccctatcagtgcccggtgtgccagcagcgcttcaagagaaaagaccgaatgagctaccacgtcagatcccaccggagatgtgctaaaccatacaactgcagccattgcggaaaatcattcagccgaccagaccatctcaacagccatgtgcggcaagtgcatagcacagagcggccattcaaatgcgaaaaatgcgaagccgcttttgcgaccaaggacaggctccgcgcacacaccgtcagacacgaagagaaagtgccttgtcacgtatgtgggaaaatgcttagcagtgcatatattagcgaccatatgaaggtccactctcaggggccacatcacgtatgcgaactctgtaataagggtaccggcgaggtgtgcccaatggccgcagccgctgctgcagctgcagccgcagccgctgccgcagtggcagccccacctaccgccgtgggctcgctgtccggagccgaaggcgtcccagtttcatctcagcccttaccctcacagccatggtag

SEQ ID NO: 97038 - DNA, 1365 bp, Artificial Sequence
  derived and/or modified sequence
atggatcccagtaattggtcaagctttattttccagggtcacgctcagaacccgctccaggtaggcgcagaactgcaatcccgattcttcgcctcccagggatgcgcccagtctcctttccaagctgcaccagctcctcctcctacacctcaagccccagcagcggagccattacaggtcgacctcctccccgtcttggccgcagcccaagaaagtgctgctgcagccgcagctgccgctgccgctgctgccgctgtcgctgcggcaccacctgcacctgctgctgcttctacggtagataccgcggctctgaaacagccgccagcaccacccccaccgccaccaccagtcagcgcccctgccgctgaagccgctcctccagctagtgccgcaaccatcgcagccgctgctgcaacagccgtagtagcgccaaccagtacggtcgctgttgccccagtcgcaagcgcactggagaaaaaaaccaaatcaaaaggtccctatatttgtgccctctgcgcgaaggagttcaagaacggttataacttgagaagacacgaagccatccataccggtgcgaaggcaggcagggttccttcaggtgccatgaagatgcctacgatggtaccactttctctgctgtccgtaccccaactgtcaggggcagggggaggcggaggcgaggctggcgctgggggaggtgcagccgcagtggccgctggaggtgttgtcactacgacagcgagtggaaagaggatccgcaaaaaccatgcttgcgagatgtgtgggaaggcttttcgcgatgtttatcatttgaacaggcacaagctgagccacagcgatgagaagccttaccagtgtccagtctgtcagcagaggttcaaacggaaagatcgcatgtcctaccacgttaggagccacgatggagcggtgcacaagccatacaattgctctcactgtggaaagtcattttcacgccctgatcacctgaactctcacgtccggcaggttcactccaccgagcggccttttaagtgcgagaagtgcgaggcggcttttgccaccaaagaccgcctccgagcccatacagtacgccacgaggagaaagtgccttgtcacgtgtgcggcaaaatgctctctagcgcttatatcagtgaccacatgaaggttcatagtcagggtccacatcacgtttgcgagctgtgcaacaagggcaccggagaagtctgtcctatggctgccgcagcggctgcagccgcagctgctgccgcagcggctgtggctgctccccctactgctgtgggctcactttccggggcagagggcgtgcccgtctcctctcagcctttgccttctcagccatggtag

SEQ ID NO: 97039 - DNA, 759 bp, Artificial Sequence
  derived and/or modified sequence
atgaagatgcccaccatggtgcccctgagcctgctgagcgtgccccagctgagcggcgccggcggcggcggcggcgaggccggcgccggcggcggcgccgccgccgtggccgccggcggcgtggtgaccaccaccgccagcggcaagagaatcagaaagaaccacgcctgcgagatgtgcggcaaggccttcagagacgtgtaccacctgaacagacacaagctgagccacagcgacgagaagccctaccagtgccccgtgtgccagcagagattcaagagaaaggacagaatgagctaccacgtgagaagccacagaagatgcgccaagccctacaactgcagccactgcggcaagagcttcagcagacccgaccacctgaacagccacgtgagacaggtgcacagcaccgagagacccttcaagtgcgagaagtgcgaggccgccttcgccaccaaggacagactgagagcccacaccgtgagacacgaggagaaggtgccctgccacgtgtgcggcaagatgctgagcagcgcctacatcagcgaccacatgaaggtgcacagccagggcccccaccacgtgtgcgagctgtgcaacaagggcaccggcgaggtgtgccccatggccgccgccgccgccgccgccgccgccgccgccgccgccgccgtggccgccccccccaccgccgtgggcagcctgagcggcgccgagggcgtgcccgtgagcagccagcccctgcccagccagccctggtag

SEQ ID NO: 97040 - DNA, 1365 bp, Artificial Sequence
  derived and/or modified sequence
atggaccccagcaactggagcagcttcatcttccagggccacgcccagaaccccctgcaggtgggcgccgagctgcagagcagattcttcgccagccagggctgcgcccagagccccttccaggccgcccccgcccccccccccaccccccaggcccccgccgccgagcccctgcaggtggacctgctgcccgtgctggccgccgcccaggagagcgccgccgccgccgccgccgccgccgccgccgccgccgccgtggccgccgccccccccgcccccgccgccgccagcaccgtggacaccgccgccctgaagcagccccccgcccccccccccccccccccccccgtgagcgcccccgccgccgaggccgccccccccgccagcgccgccaccatcgccgccgccgccgccaccgccgtggtggcccccaccagcaccgtggccgtggcccccgtggccagcgccctggagaagaagaccaagagcaagggcccctacatctgcgccctgtgcgccaaggagttcaagaacggctacaacctgagaagacacgaggccatccacaccggcgccaaggccggcagagtgcccagcggcgccatgaagatgcccaccatggtgcccctgagcctgctgagcgtgccccagctgagcggcgccggcggcggcggcggcgaggccggcgccggcggcggcgccgccgccgtggccgccggcggcgtggtgaccaccaccgccagcggcaagagaatcagaaagaaccacgcctgcgagatgtgcggcaaggccttcagagacgtgtaccacctgaacagacacaagctgagccacagcgacgagaagccctaccagtgccccgtgtgccagcagagattcaagagaaaggacagaatgagctaccacgtgagaagccacgacggcgccgtgcacaagccctacaactgcagccactgcggcaagagcttcagcagacccgaccacctgaacagccacgtgagacaggtgcacagcaccgagagacccttcaagtgcgagaagtgcgaggccgccttcgccaccaaggacagactgagagcccacaccgtgagacacgaggagaaggtgccctgccacgtgtgcggcaagatgctgagcagcgcctacatcagcgaccacatgaaggtgcacagccagggcccccaccacgtgtgcgagctgtgcaacaagggcaccggcgaggtgtgccccatggccgccgccgccgccgccgccgccgccgccgccgccgccgccgtggccgccccccccaccgccgtgggcagcctgagcggcgccgagggcgtgcccgtgagcagccagcccctgcccagccagccctggtag

SEQ ID NO: 97041 - DNA, 1114 bp, Artificial Sequence
  derived and/or modified sequence
acgcgcgcctccaggagagacgcctccttcttaagtccccggcccctcccgccaacggtcaccgggattcctggaagagacggggatttgggggaaacggagagggttctgcgaggagacgggaccagtgagacaggcaggaccgggtggaggcgtctctacgagcaggagggcaaggaagatggggcaagacgcggggaggctgcagaggaggagcagggtggggtttggagagaatggagcctgcagaaaggagcggcagaaactggcgctggaaggctcaaaaaaggggccctggaaaggacggagcggggacaggaaagggaattccaaggggcaggaggagctgggcagaggagcccgtgtaaacacagagtggcccatgcccaggatgagggactggaaggagagaagaggaccgtcgagggaagaggctcacaagtccctgggaagacagggcatgggcttacagagaggagagggggtacgggcagtggctgctcgtgtcctctgccacccctgcccactgtccaggggacttcaacacaaccgaggggacaggtttgtgtggggtcaggtctgacagaagaggagcaggagaaacaaatcgttaaaacctagcgaattcccctaagaaaacatttcttcctcctttccttctggaggctccttggttggtagggaaataggagttggtgggaaaagaggggggagaggagcttgtaccaagggactctactccattctcccctctcccccgcaaccaacttggagctcaccagggttgggagggaagtggctgagagctcacaggcaccccctccgcccccgagagggagcccacagctgtgggaggggctgctactgctgccgctgctgccgctgccgccgctgccgctgccgccgccattggacaaacctcaccagtacctgcacaggagaaacaccacggatcacagcgcgatctgaatggcaagagccttgccctcaccccacaccttcccagcctgcttcccctgggacacagccgttgctcacttcctatctggaccccagaggcctcagcctgcatcctcacccagacagagcagttctcaaggatcctccctgtgcc

SEQ ID NO: 97042 - protein, 24 aa, Artificial Sequence
  derived and/or modified sequence
MKGSNRNKDHSAEGEGVGKRPKRK

SEQ ID NO: 97043 - protein, 381 aa, Artificial Sequence
  derived and/or modified sequence
MESGSTAASEEARSLRECELYVQKHNIQALLKDSIVQLCTARPERPMAFLREYFERLEKEEAKQIQNLQKAGTRTDSREDEISPPPPNPVVKGRRRRGAISAEVYTEEDAASYVRKVIPKDYKTMAALAKAIEKNVLFSHLDDNERSDIFDAMFSVSFIAGETVIQQGDEGDNFYVIDQGETDVYVNNEWATSVGEGGSFGELALIYGTPRAATVKAKTNVKLWGIDRDSYRRILMGSTLRKRKMYEEFLSKVSILESLDKWERLTVADALEPVQFEDGQKIVVQGEPGDEFFIILEGSAAVLQRRSENEEFVEVGRLGPSDYFGEIALLMNRPRAATVVARGPLKCVKLDRPRFERVLGPCSDILKRNIQQYNSFVSLSV

SEQ ID NO: 97044 - DNA, 1146 bp, Artificial Sequence
  derived and/or modified sequence
atggaaagcggcagcaccgcagcttctgaagaggcccgatccctgagggagtgcgagctctacgtgcagaagcataacatccaggctttactcaaagatagcatcgttcagctctgcaccgcacggcccgaaagaccaatggcatttcttagggaatatttcgagagactagaaaaagaggaagctaagcaaatccaaaatttacagaaggctggtacacggaccgactcacgagaggatgagatatcccccccaccacccaaccccgtggtgaaggggaggaggagacggggcgccatctctgctgaggtatatacagaggaagatgctgcttcgtatgttcggaaagtgatcccgaaagattacaagacgatggcggcgctggctaaggctatcgaaaagaacgtcctgttcagccacctggatgacaacgagcggtcggatattttcgatgctatgttctcagttagctttattgcaggcgagacagtgatacagcaaggggatgaaggcgataatttctatgtgatcgaccagggtgagacagacgtctatgtgaataacgaatgggcgacctccgttggagaggggggaagcttcggcgagctcgccctgatctacggcacaccccgtgctgctacagttaaggctaaaacaaacgtcaaactgtgggggatcgaccgggattcttatagacggatcctgatgggatctaccctcaggaaaagaaaaatgtacgaagagtttctgtccaaagttagcatcttggagtccctcgataaatgggagcgcctcaccgtggctgacgcactggaacccgttcaattcgaagatgggcagaagatcgttgtgcagggagagcctggcgacgaattttttataattctggagggtagcgcagccgttctacagagaaggagcgaaaacgaggagttcgtggaggtggggcggttagggccctcagattacttcggggaaattgccctcctcatgaataggcctcgggccgccaccgtagtggcaagaggtccgctgaaatgtgttaagctggacaggccaagattcgagagggttttgggtccctgcagcgacatcctgaaaaggaatatccagcaatataactcgtttgtcagcttaagcgtgtag

SEQ ID NO: 97045 - DNA, 1146 bp, Artificial Sequence
  derived and/or modified sequence
atggaaagcgggagtaccgcggcgtctgaggaggcgagaagccttagagaatgcgagctgtacgtacaaaagcacaatatccaggcgctgctgaaagatagtatcgtccagctgtgtacggctcgcccagagagaccaatggcttttctgagagaatattttgagaggttagagaaggaggaggccaagcaaatacagaacctccaaaaagccgggacacgcacagactcccgggaagacgagatctccccacctcctccaaaccccgtcgtgaagggacggcgacggcggggcgccatttccgcagaggtttatacagaggaggacgcagcttcttacgtacgcaaagttattcctaaggactataaaaccatggcggccttggccaaagccatcgagaaaaacgtgctgtttagtcacctggatgataatgagcggagtgacatctttgacgctatgttttcagtttcctttatcgccggcgaaaccgtgattcagcagggcgacgagggtgacaacttctacgtgatcgatcagggcgaaacagacgtgtatgtgaacaacgagtgggcgactagcgttggcgaaggaggctcctttggcgagttggcactcatctacggaactccccgcgcagccaccgtgaaggcgaagaccaatgtgaaactctgggggattgatagggacagttatcgtaggatcctgatgggctctaccctgcggaaacggaagatgtatgaggagttcctttccaaagtgtccatcctggagtccctagacaagtgggagcgactgactgtcgctgacgcactcgaacccgtccagttcgaggatggacagaaaattgtggtacagggagaaccaggggatgaattcttcatcatactggaaggctccgccgcagttctccagcggcggtcagagaacgaggagtttgtcgaagtagggagattggggccttccgactacttcggcgaaattgcgttgctcatgaaccggccacgggccgctaccgtcgtggccagggggcctctgaagtgcgtgaaactcgatcggccccggttcgagcgggtgctggggccatgctcagatattttaaaaaggaacattcagcagtacaatagctttgtttctttgtccgtgtag

SEQ ID NO: 97046 - DNA, 1146 bp, Artificial Sequence
  derived and/or modified sequence
atggaatcagggagcactgcagcgtctgaggaggcgcgcagtttaagagagtgcgagctgtatgtgcagaaacataacatccaggccctcctgaaggattctatagtccagctgtgcaccgcacggcctgagagacctatggcattcctaagagagtacttcgagcgcctggagaaggaagaagccaaacagattcagaatcttcagaaagccggcacgcgtaccgactcgcgcgaagacgagatttcccctccccctcctaatcctgtggtgaaggggagacggcgtagaggggctatctctgcggaggtttatacagaggaagacgcagcctcctacgtgcgtaaggttatcccgaaagactataagaccatggcggctctcgctaaagccatcgaaaagaacgtactattctctcacctggatgataacgaacgaagtgatattttcgatgccatgttctccgtgagctttatagcaggcgagaccgtgatacagcagggcgatgagggcgataatttctacgtcattgatcaaggcgaaaccgacgtgtacgtaaacaatgagtgggccaccagtgtgggtgagggcggctcatttggggaattggcgcttatttacggtacgccgcgtgccgccaccgtcaaagccaaaaccaatgtgaaactgtggggcatagatcgggactcctataggaggatcttgatgggcagtacactgcggaagcgtaagatgtacgaggagtttctatccaaggtgtcaatactggagtcccttgacaaatgggagagactgaccgtcgctgatgctttggagccagtacaatttgaggacggccagaagatcgtcgtccagggggagcctggagatgaattcttcatcatcctggagggctctgccgctgttctccaaaggagatcagagaacgaagaatttgtagaagtaggcagactaggtccctcggattacttcggtgaaatcgcattattgatgaaccgacctagagcagcaacagtggttgccagagggcctctcaaatgtgtgaagctagatagaccccggtttgagagggtgcttggaccatgctctgacatcctcaaacgcaatattcaacagtataattcctttgtctccctgtctgtatag

SEQ ID NO: 97047 - DNA, 1146 bp, Artificial Sequence
  derived and/or modified sequence
atggaaagtggtagtacagccgccagcgaagaggctcgctccttgagggagtgcgagctgtacgtccagaaacataatattcaggctctacttaaggatagcatcgtgcagttgtgcacggccagacccgagcgtccaatggccttcctgcgggagtattttgagcgcttagagaaggaggaggccaagcagatccagaaccttcaaaaagccggcactcgcacagactctcgggaggatgagatctctccaccccccccaaatccagtcgttaaaggcaggaggcggagaggagccatttctgctgaggtctacactgaggaagacgccgcctcttacgtcaggaaagtgatccctaaggattacaaaaccatggcggcgctggcaaaggcaattgaaaagaacgtgttgttctcacacctggatgataacgaacggagcgacattttcgacgccatgttcagcgtgtccttcatcgctggtgaaactgtaattcagcagggggatgagggtgacaacttctatgtcatagatcagggcgagaccgacgtatacgtgaataacgagtgggccacctctgtaggcgagggcggctcgttcggggaactggccttgatatatggcacaccccgcgctgctacagtcaaggctaaaactaacgttaagctgtggggcattgaccgtgatagctaccgacggattctaatgggatctaccctgcgaaaaaggaagatgtacgaggagtttttgagcaaagtgagtatcttagagagccttgataaatgggagcggctcactgtcgccgatgccttagagccggtccagtttgaggacggccagaaaattgtggttcaaggcgaacctggcgacgaattttttatcattctggagggaagtgccgccgtgttgcagaggcgctctgaaaatgaagagtttgttgaggtgggccggctgggcccatccgactattttggagaaatagccctgctcatgaataggcctcgcgccgcaaccgttgtggcgcgaggccctttaaagtgcgtgaagctagaccgcccccgcttcgagagagtgttagggccatgttccgacattctgaagaggaatatccaacagtataactccttcgtgtctctatcagtatag

SEQ ID NO: 97048 - DNA, 1146 bp, Artificial Sequence
  derived and/or modified sequence
atggaatccggaagcaccgccgcgtctgaggaggctcgttccctaagggagtgcgaactgtacgtgcagaagcataatattcaggctctgctgaaagattccattgttcaactgtgcactgcacggcccgagcgccctatggccttcctgcgtgagtactttgagcggttggagaaggaggaggccaaacagattcagaatctgcagaaggccggaactcgtacagatagccgcgaggatgagattagcccgcctccaccaaaccctgtggtgaagggcagaagacgccgaggcgccatttccgccgaagtctataccgaagaagatgcagcaagctatgtgcgaaaggtgatcccaaaagactataagaccatggccgcgctggcgaaggccatcgaaaagaacgtgttattcagccatctggacgataacgagcgctcagacattttcgacgccatgttctccgtctcatttatcgccggagagacagttatccagcaaggagacgagggtgataacttctatgttatcgatcagggcgaaactgatgtatacgtgaacaatgagtgggcaacctctgtgggagaagggggttcattcggtgagttggcgctaatctatgggaccccccgggctgcaacggtgaaggcaaagacgaacgtcaaactctggggtatcgatagggacagctaccggagaatccttatgggatcaaccctccgcaaacgcaaaatgtatgaggagttcctctcgaaggtctccattctcgagagtctggacaagtgggagcgtctgaccgttgctgatgccttggagcctgtacagtttgaagatggtcagaagatcgtcgtacagggggagccaggtgatgaattctttatcatcttagaaggctccgcggccgtgttgcagcgccgctcagaaaatgaggagtttgttgaagtggggaggctgggaccaagcgattactttggagagatcgcacttcttatgaacaggcccagggccgctacagtcgtggccagggggccactcaaatgcgtgaaactggacaggccccggtttgagcgtgtgttagggccatgctctgatatcctcaaacgaaatatccagcagtacaactccttcgttagcctctcagtctag

SEQ ID NO: 97049 - DNA, 1146 bp, Artificial Sequence
  derived and/or modified sequence
atggagagcggcagcacagctgccagcgaggaggcccggagcctgagagaatgtgagctgtatgtgcagaagcacaacatccaggccctgctgaaggacagcatcgtgcagctgtgcacagcccggcctgagcggcccatggccttcctgcgggagtactttgagcggctggagaaggaggaggccaagcagatccagaacctgcagaaggccggcaccaggacagacagcagagaagatgagatcagccccccaccacccaaccctgtggtgaagggcagaagaagaagaggagccatctctgctgaggtgtacacagaggaggatgctgccagctatgtgaggaaggtgatccccaaggactacaagaccatggccgccctggccaaggccatcgagaagaatgtgctcttcagccacctggatgacaatgaaagaagtgacatctttgatgccatgttttctgtgtccttcatcgccggggagaccgtcatccagcagggagatgaaggagacaacttctacgtgattgaccagggcgagacagatgtgtatgtgaacaatgagtgggccacctctgtgggggagggcggcagctttggagagctggccctgatctacggcaccccccgggccgccaccgtgaaggccaagaccaacgtgaagctgtggggcatcgaccgggacagctaccgccgcatcctgatgggcagcaccctgaggaagaggaagatgtatgaggagttcctgagcaaggtgtccatcctggagagcctggacaagtgggagcggctgactgtggctgatgccctggagcctgtgcagtttgaagatggccagaagatcgtggtgcagggcgagcctggagatgagttcttcatcatcctggagggcagcgctgctgtgctgcagaggagaagtgaaaatgaggagtttgtggaggtgggccgcctgggccccagcgactactttggagaaattgccctgctgatgaaccggccccgggccgccaccgtggtggcccggggccccctgaagtgtgtgaagctggaccggcccaggtttgagcgggtgctgggcccctgcagcgacatcctgaagaggaacatccagcagtacaacagctttgtgtccctgtctgtgtag

SEQ ID NO: 97050 - DNA, 1146 bp, Artificial Sequence
  derived and/or modified sequence
atggagagcggcagcaccgccgccagcgaggaggcccggagcctgcgagaatgcgagctgtatgtccaaaaacacaatatacaggctctgctgaaggactctatcgtgcagttatgcaccgctcgacccgaacgaccaatggccttcctccgggaatactttgaacggctcgaaaaggaagaagccaaacagattcaaaatctgcagaaggccggtactcgtaccgacagccgggaggatgaaatctctccacctcctccgaacccagtcgtgaagggacggcgccggaggggggccatcagtgccgaagtgtacaccgaagaggatgctgctagctacgtcagaaaggttataccaaaagattacaagacaatggctgcactggcaaaagccattgaaaaaaacgtgttgttcagtcatctggacgataatgagagatctgatatttttgacgccatgttctccgtgagcttcattgccggagagaccgtcatacagcagggggatgaaggggataacttttacgtcatcgaccagggagagaccgacgtttacgttaacaacgaatgggcaacttccgtcggagagggcggatcgtttggcgagttagccttgatttatgggacacccagggctgccaccgtcaaggccaagacaaatgtgaaactatggggcattgaccgcgattcctatcggaggatccttatggggtccacattgaggaaacgaaagatgtatgaggagtttctgtccaaagtgagtattctggagagcctggacaagtgggagaggcttaccgtcgctgatgccctcgagcccgtacagtttgaggacggacaaaaaatcgtcgttcagggggaacctggcgatgaatttttcattattctggagggctccgcagcagtactccagagacggagtgaaaacgaagaattcgtcgaggtcggtcggctgggaccttctgactacttcggcgaaatagctttgttgatgaataggcctcgagccgccaccgtggtggccagaggtccattgaaatgtgtaaaacttgaccgacctagatttgagcgcgtgctgggtccatgctctgacatactcaagcggaacatccagcagtacaacagcttcgtctccctcagtgtgtag

SEQ ID NO: 97051 - DNA, 1146 bp, Artificial Sequence
  derived and/or modified sequence
atggagagcggcagcaccgccgccagcgaggaggcccggagcctgcgggagtgtgagttatacgtgcagaaacacaacattcaggcccttctgaaggattccatcgtacagctttgcacagcaaggcccgagcgacccatggccttcctcagagagtatttcgagagattagagaaggaggaggccaaacagattcaaaacctgcagaaggctggcacacggaccgactcgagagaggatgaaatctccccacctccgcctaatcctgtcgtcaagggacggaggagacgaggagcgattagtgctgaagtgtacacggaggaagacgccgccagttatgtacgaaaagtgatcccaaaagactacaagacaatggccgctctggctaaggctatcgaaaagaatgtgctgttttcccatctggacgacaatgaacgctcagacatcttcgatgccatgttttcggtgtccttcatagccggcgagactgtaatccaacagggagacgagggagacaatttttacgtcatcgatcagggggaaaccgacgtctatgtgaacaacgaatgggccacttccgtgggggaaggggggtcttttggagaactggctcttatttatggcacacctcgagccgctactgtgaaggcaaaaacaaacgtaaagctctgggggatcgaccgggatagctacagaaggatcttgatgggttcaacccttcgtaagaggaagatgtacgaagagttcctcagcaaagtgagcattctagaatcactggacaagtgggagagactcaccgtggccgacgctttagaaccagtgcagttcgaggatgggcagaaaatcgttgtccaaggcgaaccaggcgatgagttcttcatcatcctcgaggggagtgcagctgtgctacaaaggcgttctgaaaatgaggagttcgtcgaagtcggaagactaggtccgtctgattactttggcgagattgcactgttgatgaatcgaccaagggcggctacagttgtggccaggggccccttgaagtgtgttaaactcgacaggcctagatttgaacgtgtgcttggcccatgcagcgatattttgaagagaaatattcagcagtataactccttcgtcagcctctccgtgtag

SEQ ID NO: 97052 - DNA, 1146 bp, Artificial Sequence
  derived and/or modified sequence
atggagagcggcagcaccgccgccagcgaggaggcccggagcctgagggagtgtgagctttatgtacaaaagcacaacatccaggcgctgctgaaagactctatcgtgcagctttgtactgcacggcccgagcgccctatggcgttcttgagagagtatttcgaaagactagagaaggaggaggctaagcagattcagaatctccagaaggccggtacaagaacagactccagagaggatgaaatttccccgccccctccgaatcccgtggtgaagggacgaagacgtcgcggtgcaatctccgctgaagtctatactgaggaggacgctgcatcctatgtgaggaaggtgattcccaaggattacaaaaccatggcagccctggccaaagctattgaaaagaatgtgctgttctcacacctggatgacaatgaacggtcagatatcttcgatgctatgtttagcgtgagctttatagccggggagaccgtcatccagcagggcgacgaaggcgataacttttacgtgattgatcagggagagacggatgtttacgtgaataatgaatgggctacatcagtcggcgaaggcggatcgttcggcgagctcgcgctgatctatggaacgcctcgcgccgccacagtcaaagccaagaccaatgtgaagctatgggggatcgatcgcgacagttaccgtagaattctaatggggagcacactgcgcaaacggaagatgtacgaagaatttctctccaaggtttcaattttggagtcattggataaatgggagcgactcactgtggccgatgccttggaacccgtgcagttcgaggacggccagaaaatcgtcgtacagggcgaacctggggatgagttcttcattatcttagaagggtcagctgcagtgcttcagcgcaggagtgagaatgaagagttcgtggaggtaggtcgcctcggcccctccgattatttcggagagatcgccctgctaatgaatcgcccaagggctgcaactgtggtggcgcgaggccctttgaagtgcgtgaaattggaccggccgagattcgaacgcgttctgggtccctgttctgatattctgaagcgtaatatacagcagtataattccttcgtgagtctctctgtttag

SEQ ID NO: 97053 - DNA, 1146 bp, Artificial Sequence
  derived and/or modified sequence
atggagagcggcagcaccgccgccagcgaggaggcccggagcctgagagaatgtgagttatacgtccagaaacacaacattcaggctctgcttaaggactctatagtacagctctgcacagcccgccctgagagacctatggccttcttgagagagtacttcgaacggctggagaaggaggaagctaaacaaatacagaacctgcaaaaagctggtacccggacagattctagagaagatgagatctctccacctccaccaaacccggtggtcaaggggagacggcgtagaggcgctatctcagccgaggtgtataccgaggaggatgccgcatcatatgtgaggaaggttattcctaaggactataagacaatggccgcactcgccaaagccattgaaaagaatgtcctgttttctcatctcgatgacaatgaaaggtcagacatcttcgatgctatgttttccgtgtctttcatcgcaggagaaactgttatccaacagggtgatgagggagataatttttatgtcattgaccagggggaaacggacgtctacgtaaataatgaatgggcaacgagcgtcggagaaggaggttctttcggggaactcgcgttaatttatggtacccccagagcagctactgtgaaagcaaagacgaatgttaagttgtggggcattgacagagacagctaccgccgcatcttaatggggagcacactgagaaagagaaagatgtacgaagaattcctgagcaaagtctctattctcgagtccctggacaagtgggagagactgacagtagcagatgctctagaacccgtgcaatttgaagacggccagaagattgtggttcagggtgagcccggcgacgagttttttatcatcctggaggggagcgccgccgttctgcagcgtcgaagcgaaaacgaggaattcgtggaggtggggcgactcgggccaagcgattactttggcgaaattgccctcctcatgaatcgccccagggcagcgactgttgttgcaagagggcctctgaaatgtgtgaaattggacagacctagattcgagagggtgcttgggccatgcagtgacatacttaaacggaacatccagcagtacaattccttcgtctctctttcggtgtag

SEQ ID NO: 97054 - DNA, 1146 bp, Artificial Sequence
  derived and/or modified sequence
atggagagcggcagcaccgccgccagcgaggaggcccggagcctgagagagtgtgaattatacgtacagaagcataatatccaagctctcctgaaggactccattgtacagttgtgcactgcaaggccagagagacccatggcgttccttagagaatatttcgagaggctcgaaaaagaggaggctaagcagatccaaaatttacagaaggccggtacccgcacagactcccgagaggatgaaatcagcccacctccaccaaaccccgtcgtgaaggggcgccgaaggagaggggcaatttcggccgaggtatacacagaggaggacgcggctagctatgtgcgcaaggtcattccaaaggactacaagactatggcggccctggccaaagccattgagaaaaatgtgctcttttcacacctggatgacaatgaacgaagcgacatctttgatgcaatgttctccgtatcattcatcgcgggggaaacggtgattcagcagggcgatgaaggtgacaacttctacgtaatcgaccagggcgagaccgatgtgtacgtcaataacgagtgggcgacctccgtgggagagggcgggtcattcggagagctggcattgatttatggcacccccagagcagcaacagtcaaggcgaaaaccaacgtgaaactgtggggcattgatcgcgatagctaccgtaggatcctaatgggatccacactgcggaagcggaaaatgtacgaagagtttctctccaaggtgagtattctggagagcctggataaatgggagcgcttaacagtagctgacgctctcgagcctgtccaattcgaggatgggcagaaaatagtagtgcagggggagcctggggacgagttctttattatcctcgagggttctgccgcggtactgcagcgtcggtccgaaaacgaagaatttgtagaagtggggcgtctgggtccttcagactattttggcgagattgcgctcctgatgaacagaccgcgggccgcgaccgtggtggctcgcgggccacttaagtgtgtcaaactggaccggccccgttttgaacgcgtcttagggccttgttctgacatcttgaaacggaacatacagcagtacaatagcttcgtatccctatcggtctag

SEQ ID NO: 97055 - DNA, 1146 bp, Artificial Sequence
  derived and/or modified sequence
atggaatccggctctacagcggcttctgaagaagcacgctcgttaagggagtgcgagctttacgtacagaagcacaacattcaggccttactaaaagacagcatagttcagctttgcacggcacgtccggagcgaccaatggctttcttaagagagtatttcgaacgtctcgagaaggaagaagccaaacagattcagaatctgcagaaggctgggacacgcaccgactcacgtgaggatgaaatcagtcctccaccacctaatcctgttgtcaaggggagaaggcggcgaggtgctattagtgctgaagtttatacggaggaagatgccgcttcctatgtccgtaaagttatcccgaaggactacaaaacaatggcagctcttgctaaggcaatagagaagaacgttctcttctctcacctggacgataatgagagatcagacatcttcgacgccatgttctctgtgtctttcatagcgggtgagactgtcatccagcagggggacgagggcgataatttttacgtgatagaccagggggagaccgacgtttacgtcaataatgagtgggccacctccgtaggagaaggcggtagcttcggggaattggctctcatatacggcacgccgagagccgctacagtaaaagcaaaaacaaacgttaaactctgggggattgatagggattcctacaggcgcattttgatgggatccaccctgaggaagcgcaaaatgtacgaggaatttctcagcaaggtgagcatccttgagagtctcgataaatgggaaaggctgactgtcgccgacgctctggagcccgttcaattcgaggacggacagaaaattgttgtgcagggggaacctggtgacgaattcttcatcatcctggagggcagtgccgcagtcctgcagcgcagatccgagaacgaagaatttgtagaggttggcagactgggtcctagtgactatttcggcgaaatcgccttgctaatgaatcgaccccgtgctgccaccgttgttgctagggggcctttaaagtgcgtgaagcttgacaggcctcgcttcgagagagtcctaggcccttgttccgacatcctcaagaggaacatccagcagtacaatagctttgtgagtctcagcgtatag

SEQ ID NO: 97056 - DNA, 1146 bp, Artificial Sequence
  derived and/or modified sequence
atggaatccggaagtacagcggcttccgaagaagctaggtctctcagggagtgcgaactttacgtccagaaacataatatccaggccctactaaaagacagtattgtgcagctctgcaccgcacggcctgaacgcccaatggccttcttacgagagtattttgagagattggaaaaagaagaagcaaagcagatacaaaaccttcagaaagcaggcacgagaactgactctcgggaggatgagatttccccgcctccacctaatcctgtggtaaaaggccgaaggcgcagaggagctatctccgcagaagtatacaccgaggaagacgccgcaagttatgtcaggaaggtgatccctaaagattacaaaaccatggccgctctagccaaggccatcgagaagaacgtcctcttttcccacttggacgataatgagagaagtgatatcttcgacgccatgttctcagtgagcttcattgccggtgaaacagtgatccaacaaggcgacgagggcgataacttctacgtgatagaccagggtgaaactgacgtctatgttaataatgagtgggctacctccgttggtgaagggggatcatttggagaattggccctaatctatggtacccctagggccgcaacagttaaggcaaagactaacgttaagctctggggaattgaccgagattcttatcggaggatcttaatgggatctactctgaggaagcgcaaaatgtacgaggagttcctgtccaaagtttcgattctggaaagccttgacaaatgggagagactgaccgtggcggacgcactggaaccggtgcagttcgaagatgggcagaaaattgtggtgcagggagaaccgggagacgagttctttattatactcgaaggcagcgccgctgtgcttcaacgcagatctgaaaacgaggaatttgtggaggttggcaggctgggcccaagtgactacttcggcgagatcgcactgctgatgaacaggccacgagcggctacggtggtcgctcggggacctctcaagtgtgtgaaactggacaggcctaggtttgagagggtcctgggaccatgcagcgacattctgaagcgcaatatccagcaatataacagctttgtgtcattgtcggtgtag

SEQ ID NO: 97057 - DNA, 1146 bp, Artificial Sequence
  derived and/or modified sequence
atggaaagcggctccacagctgccagcgaggaggccaggtctctgagggagtgtgagttgtatgtgcagaagcacaacattcaagcactgcttaaggactctatcgtgcagttgtgcactgccaggccagaaaggcctatggctttcctcagggagtatttcgagcggctggagaaggaggaagcaaagcagattcaaaacctacagaaggctggaacacgcactgacagtagagaagacgagatctccccccctccaccaaatccggtcgtgaaggggaggaggaggaggggcgcaattagtgctgaggtttacaccgaagaggacgccgcaagctacgtgcgcaaagtgatacctaaagattacaagactatggccgctcttgcaaaagctattgagaaaaacgtacttttcagccaccttgatgataatgaaagaagcgacattttcgacgctatgttttcagtgtcgttcattgccggagagaccgtgatacagcagggcgatgaaggggacaatttctacgtgattgatcagggggagaccgatgtttacgtaaacaacgagtgggctactagcgtaggtgaggggggaagcttcggcgaactggcactgatatacggcacaccacgcgctgcgacggttaaagcgaagactaacgttaaactgtgggggatagatcgcgacagctatcggagaattctcatggggtcgactctcaggaagagaaagatgtatgaggagtttctgagtaaggtgagtatcctggagtcactggataaatgggagagactcacagtggccgacgccttggaacctgtgcagttcgaagatggtcagaagattgtggtgcagggagagcctggcgacgaattttttatcatcctggagggctccgccgctgtcctccagagacgcagtgaaaatgaggaattcgtggaggttggcaggttggggccatccgactatttcggagagattgccttattaatgaatcggccaagggcagccacagtagtggcgagagggcctttgaaatgtgtcaaactagatcgtcccaggttcgaacgggtgctgggcccatgctcagatattctcaagaggaatatacaacaatataactcgttcgtgagtcttagtgtgtag

SEQ ID NO: 97058 - DNA, 1146 bp, Artificial Sequence
  derived and/or modified sequence
atggaaagcggctcaacggcggcatcagaggaagccaggagtctgcgggaatgcgagctgtacgttcagaagcacaatatccaggcattgttaaaggactccattgttcagttatgcactgctcgcccagagcggcctatggcctttcttcgcgagtacttcgagagactggagaaggaagaagccaagcagatccagaatctccaaaaagccggtacccggactgatagcagagaagacgaaatatcccccccacccccaaacccggtcgttaaaggcaggagacgcagaggggcaattagtgcggaggtctacacagaagaggacgccgctagctacgtgcgtaaagttatcccaaaggactacaaaacaatggctgctctggctaaggccatagaaaaaaatgtgctgttttcacatctggacgataatgaacgaagcgacatcttcgatgcaatgttcagcgtctcctttatcgccggtgagacagtcatccagcagggtgatgagggtgataacttctacgtaatcgatcaaggcgagaccgacgtgtacgtgaacaatgaatgggcaacatctgtgggggaaggcggatctttcggcgaacttgcactgatttacggaactcccagggctgctacagtaaaggccaagactaatgtcaaactctgggggatcgacagagattcctacaggaggattctcatggggagcaccttgagaaagcggaagatgtatgaggaattcctcagtaaggtctctatcctcgaaagccttgacaaatgggaacgtctgaccgttgcagacgcactggagcctgttcagttcgaagatggccagaagatcgtggttcagggggaacccggtgacgaattctttattattttggaggggtctgcggcagtactgcagcggagaagtgagaacgaggaatttgttgaggtgggaagattggggccatctgattactttggggagatcgccctgctgatgaacagacccagagccgcaacggtggtcgcgagaggtcctctgaagtgtgttaagctggatagaccccgtttcgaaagggtcctgggcccatgcagcgatattctgaagaggaacatccaacagtataacagcttcgtgtccctgagcgtgtag

SEQ ID NO: 97059 - DNA, 1146 bp, Artificial Sequence
  derived and/or modified sequence
atggagagtggttcgaccgctgccagcgaagaggctcggagtctaagggaatgtgagctgtacgtccagaagcacaatatacaggctctgctgaaggatagcatagtacagctatgtactgctagaccagaacgacctatggccttcctgagagagtactttgagagattggaaaaagaagaggcaaagcagattcagaatttacaaaaggcaggaacccgcacggattctagggaggatgaaatttctccaccccctcccaatcccgtggttaaggggaggcggaggagaggagccatctcagctgaagtgtatacagaggaggacgctgcatcctatgtgcggaaggtcattccgaaggattacaagaccatggcggcactagccaaagcaattgagaaaaacgtactcttctctcacttggatgacaatgagaggagcgacatctttgacgcaatgttttcggtcagcttcatagcgggagagactgttatccaacagggcgatgaaggcgataatttttatgtaattgatcaaggagagaccgacgtttatgtgaataacgagtgggcaacatcagtcggtgagggcggttctttcggagagctggctcttatttacgggaccccgagggcagctaccgtgaaagccaaaacaaatgtgaagttgtggggaatcgaccgggacagttacaggcgaatcctcatgggcagtacactgagaaagaggaagatgtacgaagagttcctttccaaggtgagtatattggaatcactcgataaatgggaaagactgaccgtcgctgatgccctggagcccgttcaatttgaagatggacaaaagatcgtagttcagggggaacctggggacgagtttttcattatcttagaagggagcgcagccgtcctgcagcgtagatccgagaacgaagagttcgtggaggtcgggagactgggaccctcagattattttggagagatcgcactgctgatgaatcgtcccagagccgctacggtggtcgcacggggtccactgaagtgcgtgaagctggacagaccacgctttgaaagggttctgggaccatgttcagacattctcaaacgcaacattcagcaatataacagctttgtgagcctctctgtgtag

SEQ ID NO: 97060 - DNA, 4256 bp, Artificial Sequence
  derived and/or modified sequence
ggtggagctgtcgcctagccgctatcgcagagtggagcggggctgggagcaaagcgctgagggagctcggtacgccgccgcctcgcacccgcagcctcgcgcccgccgccgcccgtccccagagaaccatggagtctggcagtaccgccgccagtgaggaggcacgcagccttcgagaatgtgagctctacgtccagaagcataacattcaagcgctgctcaaagattctattgtgcagttgtgcactgctcgacctgagagacccatggcattcctcagggaatactttgagaggttggagaaggaggaggcaaaacagattcagaatctgcagaaagcaggcactcgtacagactcaagggaggatgagatttctcctcctccacccaacccagtggttaaaggtaggaggcgacgaggtgctatcagcgctgaggtctacacggaggaagatgcggcatcctatgttagaaaggttataccaaaagattacaagacaatggccgctttagccaaagccattgaaaagaatgtgctgttttcacatcttgatgataatgagagaagtgatatttttgatgccatgttttcggtctcctttatcgcaggagagactgtgattcagcaaggtgatgaaggggataacttctatgtgattgatcaaggagagacggatgtctatgttaacaatgaatgggcaaccagtgttggggaaggagggagctttggagaacttgctttgatttatggaacaccgagagcagccactgtcaaagcaaagacaaatgtgaaattgtggggcatcgaccgagacagctatagaagaatcctcatgggaagcacactgagaaagcggaagatgtatgaggaattccttagtaaagtctctattttagagtctctggacaagtgggaacgtcttacggtagctgatgcattggaaccagtgcagtttgaagatgggcagaagattgtggtgcagggagaaccaggggatgagttcttcattattttagaggggtcagctgctgtgctacaacgtcggtcagaaaatgaagagtttgttgaagtgggaagattggggccttctgattattttggtgaaattgcactactgatgaatcgtcctcgtgctgccacagttgttgctcgtggccccttgaagtgcgttaagctggaccgacctagatttgaacgtgttcttggcccatgctcagacatcctcaaacgaaacatccagcagtacaacagttttgtgtcactgtctgtctgaaatctgcctcctgtgcctcccttttctcctctccccaatccatgcttcactcatgcaaactgctttattttccctacttgcagcgccaagtggccactggcatcgcagcttcctgtctgtttatatattgaaagttgcttttattgcaccattttcaatttggagcattaactaaatgctcatacacagttaaataaatagaaagagttctatggagactttgctgttactgcttctctttgtgcagtgttagtattcaccctgggcagtgagtgccatgctttttggtgagggcagatcccagcacctattgaattaccatagagtaatgatgtaacagtgcaagattttttttttaagtgacataattgtccagttataagcgtatttagactgtggccatatatgctgtatttctttgtagaataaatggtttctcattaaactctaaagattagggaaaatggatatagaaaatcttagtatagtagaaagacatctgcctgtaattaaactagtttaagggtggaaaaatgcccatttttgctaattatcaatgggatatgattggttcagtttttttttttccagagttgttgtttgccaagctaatctgcctggttttatttatatcttgttattaatgtttcttctccaattctgaaatacttttgagtatggctatctatacctgccttttaagtttgaaactaactcatagattgcaaatattggttagtatttaactacatctgcctcggctcacaaattccgattagacctttatccagctagtgccaaataattgatcagatgctgaattgagaataagaatttgaggtctacattcttggttgttaatttagagcgtttggttaaagtatgtccttcagctgactccagtataatctcctctgctcattaaactgattccaggagattggatttgctgtgactagatacagatggagcaaatgtcctaacagagaaatagaggtgatgctgctaaagggagaaatgccaggcggacaaagttcagtgtcgggaattttccccgtgacattcactggggcatgagattttggaagaagttttttactttggtttagtctttttttccttcctttttattcagctagaatttctggtgggttgatggtagggtataatgtgtctgtgttgcttcaaattggtctgaaaggctatcctgctgaaagtcctgctttcctatctagcatttatttctctggcaaacttttctttcttttcttttttaaagtaaacttgtgtattgagtcttaactgtatttcagtattttccagccttatgtgttacattattccaatgatacccaacagtttatttttattatttttttaaacaaaatttcacagttctgtaatgtaggcacttttattttcattgtgatttatatataaggtaatgtagggttatatttgggagtgactgcaagcatttttccatctgtgtgcaactaactgactctgttattgatcccttctcctgccctttcccaggtaatttaaattggtcatggtagatttttttcatagatttgaaaaacttttaggttgttaccaagtatgaagtataaatctggggaagaggttttatttacattttagggtgggtaagaaagccaccttgttacaaattttttaatttccaaaataatctatattaaatgagggtttctgatctgtactttgtgtttagctacctttttatatttaaaaaattaaaaatgaaaattacgttcttacaagcttaaagcttgatttgatctttgtttaaatgccaaaatgtacttaaatgagttacttagaatgccataaaattgcagtttcatgtatgtatataatcatgctcatgtatatttagttacgtataatgctttctgagtgagttttactcttaaatcatttggttaaatcatttggcttgctgtttactcccttctgtagtttttaattaaaaactttaaagataagtctacattaaacaatgatcacatctaaagctttatctttgtgtaatctaagtatatgtgagaaatcagaattggcataatttgtcttagttgatattcaaggctttaaaagtcattattcctgggcttggtaagtgaatttatgagatttactgctctagaaagtatagatggccaaaggaccgttttgtattgcttcctgattaccagtctgattataccatgtgtgctaatatactttttttgttatagattgtcttaatggtaggtcaagtaataaaaagagatgaaataatttaaattcttaaatgaatcagtttttcttccctttctcctttccgtctttcctctctctgtccttccccgaaagtctactcgggtgggcaaaaatgaaaagggggaaagtgaattatgggatcggtgttttgaaagagcaatgtttattttcagtgcttttcagtttgtcaaagagtggatctcaaaatcttgcttaaagggtaattgagatgtagcagatttatttacttagtcatggaaagaaaaaaattcagtcaaaagctaaagatttccttttgattgaagacagattggttctgtggccttggaactttcccagacttaatggggaaacatcatttctagattagcatactctttggtttaaatttaatatatacatttaatgttacttagggatacttttatattttgcatatataaagcctcatatataaagccttatttctgatgctcttagatttctgaggagtgagatgattaagttgtattcattagtgtattggtatttcttcacatccagtgaaattggagatatgttgtatgttagaagagcattctttaaattgtgttgctttgaacatgtgtaccttttctagattcagtaatcccttccccccgtcctctggagtatgaaacctttagagtcacaataaaatgtaactaaagaaaa

SEQ ID NO: 97061 - DNA, 3644 bp, Artificial Sequence
  derived and/or modified sequence
agggagggggtggaaaggagggagaaaaggcagaggcgtcaagggaggccggagggagagtggggtggacagaggagcggagggacgagagggaagcgcacgatagctgcgcggagagagagcgaagagcaggcggaggaacaaaggcgacccaagacacccagagagggacagagaaccatggagtctggcagtaccgccgccagtgaggaggcacgcagccttcgagaatgtgagctctacgtccagaagcataacattcaagcgctgctcaaagattctattgtgcagttgtgcactgctcgacctgagagacccatggcattcctcagggaatactttgagaggttggagaaggaggaggcaaaacagattcagaatctgcagaaagcaggcactcgtacagactcaagggaggatgagatttctcctcctccacccaacccagtggttaaaggtaggaggcgacgaggtgctatcagcgctgaggtctacacggaggaagatgcggcatcctatgttagaaaggttataccaaaagattacaagacaatggccgctttagccaaagccattgaaaagaatgtgctgttttcacatcttgatgataatgagagaagtgatatttttgatgccatgttttcggtctcctttatcgcaggagagactgtgattcagcaaggtgatgaaggggataacttctatgtgattgatcaaggagagacggatgtctatgttaacaatgaatgggcaaccagtgttggggaaggagggagctttggagaacttgctttgatttatggaacaccgagagcagccactgtcaaagcaaagacaaatgtgaaattgtggggcatcgaccgagacagctatagaagaatcctcatgggaagcacactgagaaagcggaagatgtatgaggaattccttagtaaagtctctattttagagtctctggacaagtgggaacgtcttacggtagctgatgcattggaaccagtgcagtttgaagatgggcagaagattgtggtgcagggagaaccaggggatgagttcttcattattttagaggggtcagctgctgtgctacaacgtcggtcagaaaatgaagagtttgttgaagtgggaagattggggccttctgattattttggtgaaattgcactactgatgaatcgtcctcgtgctgccacagttgttgctcgtggccccttgaagtgcgttaagctggaccgacctagatttgaacgtgttcttggcccatgctcagacatcctcaaacgaaacatccagcagtacaacagttttgtgtcactgtctgtctgaaatctgcctcctgtgcctcccttttctcctctccccaatccatgcttcactcatgcaaactgctttattttccctacttgcagcgccaagtggccactggcatcgcagcttcctgtctgtttatatattgaaagttgcttttattgcaccattttcaatttggagcattaactaaatgctcatacacagttaaataaatagaaagagttctatggagactttgctgttactgcttctctttgtgcagtgttagtattcaccctgggcagtgagtgccatgctttttggtgagggcagatcccagcacctattgaattaccatagagtaatgatgtaacagtgcaagattttttttttaagtgacataattgtccagttataagcgtatttagactgtggccatatatgctgtatttctttgtagaataaatggtttctcattaaactctaaagattagggaaaatggatatagaaaatcttagtatagtagaaagacatctgcctgtaattaaactagtttaagggtggaaaaatgcccatttttgctaattatcaatgggatatgattggttcagtttttttttttccagagttgttgtttgccaagctaatctgcctggttttatttatatcttgttattaatgtttcttctccaattctgaaatacttttgagtatggctatctatacctgccttttaagtttgaaactaactcatagattgcaaatattggttagtatttaactacatctgcctcggctcacaaattccgattagacctttatccagctagtgccaaataattgatcagatgctgaattgagaataagaatttgaggtctacattcttggttgttaatttagagcgtttggttaaagtatgtccttcagctgactccagtataatctcctctgctcattaaactgattccaggagattggatttgctgtgactagatacagatggagcaaatgtcctaacagagaaatagaggtgatgctgctaaagggagaaatgccaggcggacaaagttcagtgtcgggaattttccccgtgacattcactggggcatgagattttggaagaagttttttactttggtttagtctttttttccttcctttttattcagctagaatttctggtgggttgatggtagggtataatgtgtctgtgttgcttcaaattggtctgaaaggctatcctgctgaaagtcctgctttcctatctagcatttatttctctggcaaacttttctttcttttcttttttaaagtaaacttgtgtattgagtcttaactgtatttcagtattttccagccttatgtgttacattattccaatgatacccaacagtttatttttattatttttttaaacaaaatttcacagttctgtaatgtaggcacttttattttcattgtgatttatatataaggtaatgtagggttatatttgggagtgactgcaagcatttttccatctgtgtgcaactaactgactctgttattgatcccttctcctgccctttcccaggtaatttaaattggtcatggtagatttttttcatagatttgaaaaacttttaggttgttaccaagtatgaagtataaatctggggaagaggttttatttacattttagggtgggtaagaaagccaccttgttacaaattttttaatttccaaaataatctatattaaatgagggtttctgatctgtactttgtgtttagctacctttttatatttaaaaaattaaaaatgaaaattacgttcttacaagcttaaagcttgatttgatctttgtttaaatgccaaaatgtacttaaatgagttacttagaatgccataaaattgcagtttcatgtatgtatataatcatgctcatgtatatttagttacgtataatgctttctgagtgagttttactcttaaatcatttggttaaatcatttggcttgctgtttactcccttctgtagtttttaattaaaaactttaaagataagtctacattaaacaatgatcacatctaaagctttatctttgtgtaatctaagtatatgtgagaaatcagaattggcataatttgtcttagttgatattcaaggctttaaaagtcattattcctgggcttggtaagtgaatttatgagatttactgctctagaaagtatagatggccaaaggaccgttttgtattgcttcctgattaccagtctgattataccatgtgtgctaatatactttttttgttatagattgtcttaatggtaggtcaagtaataaaaagagatgaaataatttaaattctt

SEQ ID NO: 97062 - DNA, 3617 bp, Artificial Sequence
  derived and/or modified sequence
gattggctgcggccaggccgtttccggtggagctgtcgcctagccgctatcgcagagtggagcggggctgggagcaaagcgctgagggagctcggtacgccgccgcctcgcacccgcagcctcgcgcccgccgccgcccgtccccagagaaccatggagtctggcagtaccgccgccagtgaggaggcacgcagccttcgagaatgtgagctctacgtccagaagcataacattcaagcgctgctcaaagattctattgtgcagttgtgcactgctcgacctgagagacccatggcattcctcagggaatactttgagaggttggagaaggaggaggcaaaacagattcagaatctgcagaaagcaggcactcgtacagactcaagggaggatgagatttctcctcctccacccaacccagtggttaaaggtaggaggcgacgaggtgctatcagcgctgaggtctacacggaggaagatgcggcatcctatgttagaaaggttataccaaaagattacaagacaatggccgctttagccaaagccattgaaaagaatgtgctgttttcacatcttgatgataatgagagaagtgatatttttgatgccatgttttcggtctcctttatcgcaggagagactgtgattcagcaaggtgatgaaggggataacttctatgtgattgatcaaggagagacggatgtctatgttaacaatgaatgggcaaccagtgttggggaaggagggagctttggagaacttgctttgatttatggaacaccgagagcagccactgtcaaagcaaagacaaatgtgaaattgtggggcatcgaccgagacagctatagaagaatcctcatgggaagcacactgagaaagcggaagatgtatgaggaattccttagtaaagtctctattttagagtctctggacaagtgggaacgtcttacggtagctgatgcattggaaccagtgcagtttgaagatgggcagaagattgtggtgcagggagaaccaggggatgagttcttcattattttagaggggtcagctgctgtgctacaacgtcggtcagaaaatgaagagtttgttgaagtgggaagattggggccttctgattattttggtgaaattgcactactgatgaatcgtcctcgtgctgccacagttgttgctcgtggccccttgaagtgcgttaagctggaccgacctagatttgaacgtgttcttggcccatgctcagacatcctcaaacgaaacatccagcagtacaacagttttgtgtcactgtctgtctgaaatctgcctcctgtgcctcccttttctcctctccccaatccatgcttcactcatgcaaactgctttattttccctacttgcagcgccaagtggccactggcatcgcagcttcctgtctgtttatatattgaaagttgcttttattgcaccattttcaatttggagcattaactaaatgctcatacacagttaaataaatagaaagagttctatggagactttgctgttactgcttctctttgtgcagtgttagtattcaccctgggcagtgagtgccatgctttttggtgagggcagatcccagcacctattgaattaccatagagtaatgatgtaacagtgcaagattttttttttaagtgacataattgtccagttataagcgtatttagactgtggccatatatgctgtatttctttgtagaataaatggtttctcattaaactctaaagattagggaaaatggatatagaaaatcttagtatagtagaaagacatctgcctgtaattaaactagtttaagggtggaaaaatgcccatttttgctaattatcaatgggatatgattggttcagtttttttttttccagagttgttgtttgccaagctaatctgcctggttttatttatatcttgttattaatgtttcttctccaattctgaaatacttttgagtatggctatctatacctgccttttaagtttgaaactaactcatagattgcaaatattggttagtatttaactacatctgcctcggctcacaaattccgattagacctttatccagctagtgccaaataattgatcagatgctgaattgagaataagaatttgaggtctacattcttggttgttaatttagagcgtttggttaaagtatgtccttcagctgactccagtataatctcctctgctcattaaactgattccaggagattggatttgctgtgactagatacagatggagcaaatgtcctaacagagaaatagaggtgatgctgctaaagggagaaatgccaggcggacaaagttcagtgtcgggaattttccccgtgacattcactggggcatgagattttggaagaagttttttactttggtttagtctttttttccttcctttttattcagctagaatttctggtgggttgatggtagggtataatgtgtctgtgttgcttcaaattggtctgaaaggctatcctgctgaaagtcctgctttcctatctagcatttatttctctggcaaacttttctttcttttcttttttaaagtaaacttgtgtattgagtcttaactgtatttcagtattttccagccttatgtgttacattattccaatgatacccaacagtttatttttattatttttttaaacaaaatttcacagttctgtaatgtaggcacttttattttcattgtgatttatatataaggtaatgtagggttatatttgggagtgactgcaagcatttttccatctgtgtgcaactaactgactctgttattgatcccttctcctgccctttcccaggtaatttaaattggtcatggtagatttttttcatagatttgaaaaacttttaggttgttaccaagtatgaagtataaatctggggaagaggttttatttacattttagggtgggtaagaaagccaccttgttacaaattttttaatttccaaaataatctatattaaatgagggtttctgatctgtactttgtgtttagctacctttttatatttaaaaaattaaaaatgaaaattacgttcttacaagcttaaagcttgatttgatctttgtttaaatgccaaaatgtacttaaatgagttacttagaatgccataaaattgcagtttcatgtatgtatataatcatgctcatgtatatttagttacgtataatgctttctgagtgagttttactcttaaatcatttggttaaatcatttggcttgctgtttactcccttctgtagtttttaattaaaaactttaaagataagtctacattaaacaatgatcacatctaaagctttatctttgtgtaatctaagtatatgtgagaaatcagaattggcataatttgtcttagttgatattcaaggctttaaaagtcattattcctgggcttggtaagtgaatttatgagatttactgctctagaaagtatagatggccaaaggaccgttttgtattgcttcctgattaccagtctgattataccatgtgtgctaatatactttttttgttatagattgtcttaatggtaggtcaagtaataaaaagagatgaaataatttaaattctt

SEQ ID NO: 97063 - DNA, 3648 bp, Artificial Sequence
  derived and/or modified sequence
gattggctgcggccaggccgtttccggtggagctgtcgcctagccgctatcgcagagtggagcggggctgggagcaaagcgctgagggagctcggtacgccgccgcctcgcacccgcagcctcgcgcccgccgccgcccgtccccaggtgagtggggtcggccgggggctcaggcgagagaaccatggagtctggcagtaccgccgccagtgaggaggcacgcagccttcgagaatgtgagctctacgtccagaagcataacattcaagcgctgctcaaagattctattgtgcagttgtgcactgctcgacctgagagacccatggcattcctcagggaatactttgagaggttggagaaggaggaggcaaaacagattcagaatctgcagaaagcaggcactcgtacagactcaagggaggatgagatttctcctcctccacccaacccagtggttaaaggtaggaggcgacgaggtgctatcagcgctgaggtctacacggaggaagatgcggcatcctatgttagaaaggttataccaaaagattacaagacaatggccgctttagccaaagccattgaaaagaatgtgctgttttcacatcttgatgataatgagagaagtgatatttttgatgccatgttttcggtctcctttatcgcaggagagactgtgattcagcaaggtgatgaaggggataacttctatgtgattgatcaaggagagacggatgtctatgttaacaatgaatgggcaaccagtgttggggaaggagggagctttggagaacttgctttgatttatggaacaccgagagcagccactgtcaaagcaaagacaaatgtgaaattgtggggcatcgaccgagacagctatagaagaatcctcatgggaagcacactgagaaagcggaagatgtatgaggaattccttagtaaagtctctattttagagtctctggacaagtgggaacgtcttacggtagctgatgcattggaaccagtgcagtttgaagatgggcagaagattgtggtgcagggagaaccaggggatgagttcttcattattttagaggggtcagctgctgtgctacaacgtcggtcagaaaatgaagagtttgttgaagtgggaagattggggccttctgattattttggtgaaattgcactactgatgaatcgtcctcgtgctgccacagttgttgctcgtggccccttgaagtgcgttaagctggaccgacctagatttgaacgtgttcttggcccatgctcagacatcctcaaacgaaacatccagcagtacaacagttttgtgtcactgtctgtctgaaatctgcctcctgtgcctcccttttctcctctccccaatccatgcttcactcatgcaaactgctttattttccctacttgcagcgccaagtggccactggcatcgcagcttcctgtctgtttatatattgaaagttgcttttattgcaccattttcaatttggagcattaactaaatgctcatacacagttaaataaatagaaagagttctatggagactttgctgttactgcttctctttgtgcagtgttagtattcaccctgggcagtgagtgccatgctttttggtgagggcagatcccagcacctattgaattaccatagagtaatgatgtaacagtgcaagattttttttttaagtgacataattgtccagttataagcgtatttagactgtggccatatatgctgtatttctttgtagaataaatggtttctcattaaactctaaagattagggaaaatggatatagaaaatcttagtatagtagaaagacatctgcctgtaattaaactagtttaagggtggaaaaatgcccatttttgctaattatcaatgggatatgattggttcagtttttttttttccagagttgttgtttgccaagctaatctgcctggttttatttatatcttgttattaatgtttcttctccaattctgaaatacttttgagtatggctatctatacctgccttttaagtttgaaactaactcatagattgcaaatattggttagtatttaactacatctgcctcggctcacaaattccgattagacctttatccagctagtgccaaataattgatcagatgctgaattgagaataagaatttgaggtctacattcttggttgttaatttagagcgtttggttaaagtatgtccttcagctgactccagtataatctcctctgctcattaaactgattccaggagattggatttgctgtgactagatacagatggagcaaatgtcctaacagagaaatagaggtgatgctgctaaagggagaaatgccaggcggacaaagttcagtgtcgggaattttccccgtgacattcactggggcatgagattttggaagaagttttttactttggtttagtctttttttccttcctttttattcagctagaatttctggtgggttgatggtagggtataatgtgtctgtgttgcttcaaattggtctgaaaggctatcctgctgaaagtcctgctttcctatctagcatttatttctctggcaaacttttctttcttttcttttttaaagtaaacttgtgtattgagtcttaactgtatttcagtattttccagccttatgtgttacattattccaatgatacccaacagtttatttttattatttttttaaacaaaatttcacagttctgtaatgtaggcacttttattttcattgtgatttatatataaggtaatgtagggttatatttgggagtgactgcaagcatttttccatctgtgtgcaactaactgactctgttattgatcccttctcctgccctttcccaggtaatttaaattggtcatggtagatttttttcatagatttgaaaaacttttaggttgttaccaagtatgaagtataaatctggggaagaggttttatttacattttagggtgggtaagaaagccaccttgttacaaattttttaatttccaaaataatctatattaaatgagggtttctgatctgtactttgtgtttagctacctttttatatttaaaaaattaaaaatgaaaattacgttcttacaagcttaaagcttgatttgatctttgtttaaatgccaaaatgtacttaaatgagttacttagaatgccataaaattgcagtttcatgtatgtatataatcatgctcatgtatatttagttacgtataatgctttctgagtgagttttactcttaaatcatttggttaaatcatttggcttgctgtttactcccttctgtagtttttaattaaaaactttaaagataagtctacattaaacaatgatcacatctaaagctttatctttgtgtaatctaagtatatgtgagaaatcagaattggcataatttgtcttagttgatattcaaggctttaaaagtcattattcctgggcttggtaagtgaatttatgagatttactgctctagaaagtatagatggccaaaggaccgttttgtattgcttcctgattaccagtctgattataccatgtgtgctaatatactttttttgttatagattgtcttaatggtaggtcaagtaataaaaagagatgaaataatttaaattctt

SEQ ID NO: 97064 - DNA, 3693 bp, Artificial Sequence
  derived and/or modified sequence
atcgcagagtggagcggggctgggagcaaagcgctgagggagctcggtacgccgccgcctcgcacccgcagcctcgcgcccgccgccgcccgtccccagttgacttttgtgccctggtaattctgtatcctgtttaccgtttacctacttcccacgtcatcatgatttcttttgagggagaactgaatgaaattcccttaagggcctgacttcagcacccgtctctgcagagagaaccatggagtctggcagtaccgccgccagtgaggaggcacgcagccttcgagaatgtgagctctacgtccagaagcataacattcaagcgctgctcaaagattctattgtgcagttgtgcactgctcgacctgagagacccatggcattcctcagggaatactttgagaggttggagaaggaggaggcaaaacagattcagaatctgcagaaagcaggcactcgtacagactcaagggaggatgagatttctcctcctccacccaacccagtggttaaaggtaggaggcgacgaggtgctatcagcgctgaggtctacacggaggaagatgcggcatcctatgttagaaaggttataccaaaagattacaagacaatggccgctttagccaaagccattgaaaagaatgtgctgttttcacatcttgatgataatgagagaagtgatatttttgatgccatgttttcggtctcctttatcgcaggagagactgtgattcagcaaggtgatgaaggggataacttctatgtgattgatcaaggagagacggatgtctatgttaacaatgaatgggcaaccagtgttggggaaggagggagctttggagaacttgctttgatttatggaacaccgagagcagccactgtcaaagcaaagacaaatgtgaaattgtggggcatcgaccgagacagctatagaagaatcctcatgggaagcacactgagaaagcggaagatgtatgaggaattccttagtaaagtctctattttagagtctctggacaagtgggaacgtcttacggtagctgatgcattggaaccagtgcagtttgaagatgggcagaagattgtggtgcagggagaaccaggggatgagttcttcattattttagaggggtcagctgctgtgctacaacgtcggtcagaaaatgaagagtttgttgaagtgggaagattggggccttctgattattttggtgaaattgcactactgatgaatcgtcctcgtgctgccacagttgttgctcgtggccccttgaagtgcgttaagctggaccgacctagatttgaacgtgttcttggcccatgctcagacatcctcaaacgaaacatccagcagtacaacagttttgtgtcactgtctgtctgaaatctgcctcctgtgcctcccttttctcctctccccaatccatgcttcactcatgcaaactgctttattttccctacttgcagcgccaagtggccactggcatcgcagcttcctgtctgtttatatattgaaagttgcttttattgcaccattttcaatttggagcattaactaaatgctcatacacagttaaataaatagaaagagttctatggagactttgctgttactgcttctctttgtgcagtgttagtattcaccctgggcagtgagtgccatgctttttggtgagggcagatcccagcacctattgaattaccatagagtaatgatgtaacagtgcaagattttttttttaagtgacataattgtccagttataagcgtatttagactgtggccatatatgctgtatttctttgtagaataaatggtttctcattaaactctaaagattagggaaaatggatatagaaaatcttagtatagtagaaagacatctgcctgtaattaaactagtttaagggtggaaaaatgcccatttttgctaattatcaatgggatatgattggttcagtttttttttttccagagttgttgtttgccaagctaatctgcctggttttatttatatcttgttattaatgtttcttctccaattctgaaatacttttgagtatggctatctatacctgccttttaagtttgaaactaactcatagattgcaaatattggttagtatttaactacatctgcctcggctcacaaattccgattagacctttatccagctagtgccaaataattgatcagatgctgaattgagaataagaatttgaggtctacattcttggttgttaatttagagcgtttggttaaagtatgtccttcagctgactccagtataatctcctctgctcattaaactgattccaggagattggatttgctgtgactagatacagatggagcaaatgtcctaacagagaaatagaggtgatgctgctaaagggagaaatgccaggcggacaaagttcagtgtcgggaattttccccgtgacattcactggggcatgagattttggaagaagttttttactttggtttagtctttttttccttcctttttattcagctagaatttctggtgggttgatggtagggtataatgtgtctgtgttgcttcaaattggtctgaaaggctatcctgctgaaagtcctgctttcctatctagcatttatttctctggcaaacttttctttcttttcttttttaaagtaaacttgtgtattgagtcttaactgtatttcagtattttccagccttatgtgttacattattccaatgatacccaacagtttatttttattatttttttaaacaaaatttcacagttctgtaatgtaggcacttttattttcattgtgatttatatataaggtaatgtagggttatatttgggagtgactgcaagcatttttccatctgtgtgcaactaactgactctgttattgatcccttctcctgccctttcccaggtaatttaaattggtcatggtagatttttttcatagatttgaaaaacttttaggttgttaccaagtatgaagtataaatctggggaagaggttttatttacattttagggtgggtaagaaagccaccttgttacaaattttttaatttccaaaataatctatattaaatgagggtttctgatctgtactttgtgtttagctacctttttatatttaaaaaattaaaaatgaaaattacgttcttacaagcttaaagcttgatttgatctttgtttaaatgccaaaatgtacttaaatgagttacttagaatgccataaaattgcagtttcatgtatgtatataatcatgctcatgtatatttagttacgtataatgctttctgagtgagttttactcttaaatcatttggttaaatcatttggcttgctgtttactcccttctgtagtttttaattaaaaactttaaagataagtctacattaaacaatgatcacatctaaagctttatctttgtgtaatctaagtatatgtgagaaatcagaattggcataatttgtcttagttgatattcaaggctttaaaagtcattattcctgggcttggtaagtgaatttatgagatttactgctctagaaagtatagatggccaaaggaccgttttgtattgcttcctgattaccagtctgattataccatgtgtgctaatatactttttttgttatagattgtcttaatggtaggtcaagtaataaaaagagatgaaataatt

SEQ ID NO: 97065 - DNA, 1146 bp, Artificial Sequence
  derived and/or modified sequence
atggagagcggcagcaccgccgccagcgaggaggccagaagcctgagagagtgcgagctgtacgtgcagaagcacaacatccaggccctgctgaaggacagcatcgtgcagctgtgcaccgccagacccgagagacccatggccttcctgagagagtacttcgagagactggagaaggaggaggccaagcagatccagaacctgcagaaggccggcaccagaaccgacagcagagaggacgagatcagcccccccccccccaaccccgtggtgaagggcagaagaagaagaggcgccatcagcgccgaggtgtacaccgaggaggacgccgccagctacgtgagaaaggtgatccccaaggactacaagaccatggccgccctggccaaggccatcgagaagaacgtgctgttcagccacctggacgacaacgagagaagcgacatcttcgacgccatgttcagcgtgagcttcatcgccggcgagaccgtgatccagcagggcgacgagggcgacaacttctacgtgatcgaccagggcgagaccgacgtgtacgtgaacaacgagtgggccaccagcgtgggcgagggcggcagcttcggcgagctggccctgatctacggcacccccagagccgccaccgtgaaggccaagaccaacgtgaagctgtggggcatcgacagagacagctacagaagaatcctgatgggcagcaccctgagaaagagaaagatgtacgaggagttcctgagcaaggtgagcatcctggagagcctggacaagtgggagagactgaccgtggccgacgccctggagcccgtgcagttcgaggacggccagaagatcgtggtgcagggcgagcccggcgacgagttcttcatcatcctggagggcagcgccgccgtgctgcagagaagaagcgagaacgaggagttcgtggaggtgggcagactgggccccagcgactacttcggcgagatcgccctgctgatgaacagacccagagccgccaccgtggtggccagaggccccctgaagtgcgtgaagctggacagacccagattcgagagagtgctgggcccctgcagcgacatcctgaagagaaacatccagcagtacaacagcttcgtgagcctgagcgtgtag

SEQ ID NO: 97066 - protein, 583 aa, Artificial Sequence
  derived and/or modified sequence
MATARTFGPEREAEPAKEARVVGSELVDTYTVYIIQVTDGSHEWTVKHRYSDFHDLHEKLVAERKIDKNLLPPKKIIGKNSRSLVEKREKDLEVYLQKLLAAFPGVTPRVLAHFLHFHFYEINGITAALAEELFEKGEQLLGAGEVFAIGPLQLYAVTEQLQQGKPTCASGDAKTDLGHILDFTCRLKYLKVSGTEGPFGTSNIQEQLLPFDLSIFKSLHQVEISHCDAKHIRGLVASKPTLATLSVRFSATSMKEVLVPEASEFDEWEPEGTTLEGPVTAVIPTWQALTTLDLSHNSVSEIDESVKLIPKIEFLDLSHNGLLVVDNLQHLYNLVHLDLSYNKLSSLEGLHTKLGNIKTLNLAGNLLESLSGLHKLYSLVNLDLRDNRIEQMEEVRSIGSLPCLEHVSLLNNPLSIIPDYRTKVLAQFGERASEVCLDDTVTTEKELDTVEVLKAIQKAKEVKSKLSNPEKKGGEDSRLSAAPCIRPSSSPPTVAPASASLPQPILSNQGNRVCILLLVEPHSPAWAPWLGWGWGRGASTCFQQGQTQGGQCLLQAGPRGGTHGRGAWPDASCCLLGEDSQLL

SEQ ID NO: 97067 - DNA, 1752 bp, Artificial Sequence
  derived and/or modified sequence
atggccaccgccagaaccttcggccccgagagagaggccgagcccgccaaggaggccagagtggtgggcagcgagctggtggacacctacaccgtgtacatcatccaggtgaccgacggcagccacgagtggaccgtgaagcacagatacagcgacttccacgacctgcacgagaagctggtggccgagagaaagatcgacaagaacctgctgccccccaagaagatcatcggcaagaacagcagaagcctggtggagaagagagagaaggacctggaggtgtacctgcagaagctgctggccgccttccccggcgtgacccccagagtgctggcccacttcctgcacttccacttctacgagatcaacggcatcaccgccgccctggccgaggagctgttcgagaagggcgagcagctgctgggcgccggcgaggtgttcgccatcggccccctgcagctgtacgccgtgaccgagcagctgcagcagggcaagcccacctgcgccagcggcgacgccaagaccgacctgggccacatcctggacttcacctgcagactgaagtacctgaaggtgagcggcaccgagggccccttcggcaccagcaacatccaggagcagctgctgcccttcgacctgagcatcttcaagagcctgcaccaggtggagatcagccactgcgacgccaagcacatcagaggcctggtggccagcaagcccaccctggccaccctgagcgtgagattcagcgccaccagcatgaaggaggtgctggtgcccgaggccagcgagttcgacgagtgggagcccgagggcaccaccctggagggccccgtgaccgccgtgatccccacctggcaggccctgaccaccctggacctgagccacaacagcgtgagcgagatcgacgagagcgtgaagctgatccccaagatcgagttcctggacctgagccacaacggcctgctggtggtggacaacctgcagcacctgtacaacctggtgcacctggacctgagctacaacaagctgagcagcctggagggcctgcacaccaagctgggcaacatcaagaccctgaacctggccggcaacctgctggagagcctgagcggcctgcacaagctgtacagcctggtgaacctggacctgagagacaacagaatcgagcagatggaggaggtgagaagcatcggcagcctgccctgcctggagcacgtgagcctgctgaacaaccccctgagcatcatccccgactacagaaccaaggtgctggcccagttcggcgagagagccagcgaggtgtgcctggacgacaccgtgaccaccgagaaggagctggacaccgtggaggtgctgaaggccatccagaaggccaaggaggtgaagagcaagctgagcaaccccgagaagaagggcggcgaggacagcagactgagcgccgccccctgcatcagacccagcagcagcccccccaccgtggcccccgccagcgccagcctgccccagcccatcctgagcaaccagggcaacagagtgtgcatcctgctgctggtggagccccacagccccgcctgggccccctggctgggctggggctggggcagaggcgccagcacctgcttccagcagggccagacccagggcggccagtgcctgctgcaggccggccccagaggcggcacccacggcagaggcgcctggcccgacgccagctgctgcctgctgggcgaggacagccagctgctgtag

SEQ ID NO: 97068 - DNA, 1752 bp, Artificial Sequence
  derived and/or modified sequence
atggcgacggcccggacctttggtcctgagcgagaagccgagcccgctaaggaagctagagttgtggggagtgagttggtcgatacctatactgtgtacattattcaagtcaccgatggaagccacgagtggacggtaaagcaccgttatagtgactttcacgatttacacgaaaagctggtggccgaaaggaaaattgataaaaatctacttcctccaaaaaagattatcgggaagaattctcgtagcctagtggagaagcgggagaaggatttggaggtttaccttcaaaagctcctggccgcttttccaggcgtcacccctagagttcttgcacatttcctgcatttccatttttatgagattaacggcattaccgccgccctggcggaggaactcttcgaaaagggcgagcaactgctgggggccggagaggtgttcgccataggccccttgcagctctatgcagttactgaacagctccaacaagggaaacccacttgtgcctcaggtgatgctaagaccgatctcggtcacatcctggatttcacgtgtaggttgaagtatctgaaggtcagcggtactgaggggcccttcgggaccagcaatatccaagagcagcttcttcctttcgacctgagcattttcaaatccctacaccaggtagaaatttcacactgtgacgctaagcacattagaggattagtggcttccaaaccgactctggccacattgagcgttaggttttcagctacctctatgaaggaggtgctggtccctgaggcctcagagttcgacgaatgggaaccagaaggaaccaccctcgaaggacctgtcaccgccgtcatccctacttggcaggctttaaccacccttgacttgtcacataattcggtctccgagattgacgagtcagtgaagctgattccgaaaatcgagtttctggatctgagccataatggactactcgtcgtcgataatctgcaacatttatacaacctcgtccatctggacctgagctataacaaactctcaagccttgaaggcctacataccaagctcggaaatatcaagaccctcaacctcgccggcaacctgctagaaagcctgtctggactgcacaaactgtactctcttgtgaaccttgaccttagggacaaccggatcgaacagatggaagaggttcgatctatcggttcgctgccatgcctcgaacacgtgtcgctcctgaacaaccccctctccattatcccagactataggactaaggtgctggcacaatttggggaaagggccagcgaggtgtgtctggatgacacagttaccactgagaaagagttggatacagtggaagtgctgaaggccattcagaaggcaaaggaggttaagtccaaattgtctaatcctgagaaaaaggggggcgaggattctaggctcagcgctgccccctgtatcaggccgagtagctccccaccaaccgtagcaccagcttcagcaagcttgccccaaccaatactgtctaatcaggggaacagggtctgtattctgcttctggtagagcctcattcaccagcttgggccccctggttgggctggggctggggtcggggagcaagcacttgctttcagcaaggccaaactcagggggggcagtgtctacttcaggccggccctcgtgggggaacacatggtcgtggggcatggccggacgcctcctgttgcctattgggcgaagattcacagctcctgtag

SEQ ID NO: 97069 - DNA, 1752 bp, Artificial Sequence
  derived and/or modified sequence
atggccacagcccggacctttggacctgagcgggaggccgagcccgccaaggaggcccgggtggtgggcagcgagctggtggacacctacacagtgtacatcatccaggtgacagatggcagccatgagtggacagtgaagcaccgctacagcgacttccatgacctgcacgagaagctggtggccgagaggaagattgacaagaacctgctgccccccaagaagatcatcggcaagaacagccgcagcctggtggagaagcgggagaaggacctggaggtgtacctgcagaagctgctggccgccttccctggggtgaccccccgggtgctggcccacttcctgcacttccacttctatgagatcaatggcatcacagctgccctggccgaggagctgtttgagaagggggagcagctgctgggcgctggggaggtgtttgccatcggccccctgcagctgtatgctgtgacagagcagctgcagcagggcaagcccacctgtgccagcggagatgccaagacagacctgggccacatcctggacttcacctgccgcctgaagtacctgaaggtgtctggaacagagggccccttcggcaccagcaacatccaggagcagctgctgccctttgacctgagcatcttcaagagcctgcaccaggtggagatcagccactgtgatgccaagcacatccggggcctggtggccagcaagcccaccctggccaccctgtctgtgcgcttcagcgccacctccatgaaggaggtgctggtgcctgaggccagcgagtttgatgagtgggagcctgagggcaccaccctggagggccctgtgacagctgtgatccccacctggcaggccctgaccaccctggacctgagccacaacagcgtgtctgaaattgatgaatctgtgaagctgatccccaagattgagttcctggacctgagccacaacggcctgctggtggtggacaacctgcagcacctgtacaacctggtgcacctggacctgagctacaacaagctgagcagcctggagggcctgcacaccaagctgggcaacatcaagaccctgaacctggccggcaacctgctggagagcctgagcggcctgcacaagctgtacagcctggtgaacctggacctgcgggacaacagaattgagcagatggaggaggtgcgcagcatcggcagcctgccctgcctggagcacgtgtccctgctgaacaaccccctgagcatcatcccagactaccgcaccaaggtgctggcccagtttggagagcgggccagcgaggtgtgcctggatgacacagtgaccacagagaaggagctggacacagtggaggtgctgaaggccatccagaaggccaaggaggtgaagagcaagctgagcaaccctgagaagaagggaggagaggacagccggctgtctgctgccccctgcatccggcccagcagcagccccccaacagtggccccagccagcgccagcctgccccagcccatcctgagcaaccagggcaacagagtgtgcatcctgctgctggtggagccccacagccctgcctgggccccctggctgggctggggctggggccgcggggccagcacctgcttccagcagggccagacccagggcggccagtgcctgctgcaggccggcccccggggcggcacccacggccgcggggcctggccagatgccagctgctgcctgctgggggaggacagccagctgctgtag

SEQ ID NO: 97070 - DNA, 3168 bp, Artificial Sequence
  derived and/or modified sequence
cggcggtggcggcggagacccgaacatggcgaccgcgcgcaccttcgggcccgagcgggaagccgagccggccaaggaagcgcgcgtcgtgggctcggagcttgtggacacttatacggtttacatcatccaggtcactgatggcagccatgagtggacagtaaagcaccgctacagcgacttccatgacctgcatgaaaagctcgttgcagagagaaagattgataaaaatctgcttccgcccaaaaagataattgggaaaaactcaagaagcttggtggagaagagggagaaggatctggaggtctacctccagaagctcctggctgccttccctggcgtgacccccagagtactggcccacttcttgcattttcacttctatgagataaatggcatcaccgcggcactggctgaagagctctttgagaaaggagaacagctcctgggggccggcgaggtctttgccattggacccctgcagctgtatgccgtcacggagcagctgcagcagggaaagcccacgtgcgccagtggggatgccaagaccgacctcgggcacatcctggacttcacctgtcgccttaagtaccttaaggtttctggcacagaaggaccttttgggaccagcaacattcaggagcagctcctgccgttcgacctatcaatattcaagtccctgcatcaggtggagataagtcactgtgatgctaagcacatcagagggctggtcgcatcgaagcccaccttagccacgctgagtgtccgcttctcagcaacctcgatgaaggaagtccttgttcctgaagcctcagaatttgatgagtgggagcctgaaggcacaaccctagaaggccctgtgactgccgtcatccccacttggcaggcattgaccacgcttgacctgagccacaacagcgtctccgagatcgacgagtctgtgaaactgatcccaaagattgagttcctggacctgagtcacaatggattgctggttgtggacaatctgcagcacctgtataaccttgtgcatctggacctgtcctacaacaagctctcctccttggaagggcttcacaccaagctggggaacatcaagaccttaaacctggcaggcaacctcctagagagtctgagtggcctgcacaagctctactcactggtcaacctggatctccgggacaacaggatcgaacagatggaggaggtccggagcataggcagcctcccgtgtctggagcacgtgtctctgctgaacaaccctctgagcatcatccccgactaccggaccaaggtgctggctcagttcggagagagggcctcagaggtctgtctggatgacacagtgaccacagagaaggagctggacactgtggaagtgctgaaagcaattcagaaagccaaggaggtcaagtccaaactgagcaacccagagaagaagggtggtgaagactcccggctctcagctgccccctgcatcagacccagcagctcccctcccactgtggctcccgcatctgcctccctgccccagcccatcctctctaaccaaggtaatcgtgtatgtatcttgcttctagtggagccacacagccctgcctgggccccctggctgggctggggttgggggagaggtgccagcacctgcttccaacagggtcagacacagggagggcagtgccttctgcaggctggtcctcgcggggggacacatggcaggggtgcctggcctgatgccagctgttgcttgcttggtgaggactcccaattgctctgatgcccacatccagctcctctaggagaccgcagggtgtctgacaggccctgaggctgccctctgaacaggctcggggctgttggctcatgggacccattccctcaccggcagcacaagcaggttggctcctggttacaggaagccgggcttgtgactttactgtctggagcccgaatccctgtgcagggaaaagcttgcttttatcactgcctcatctctgtggggtgacccagccccagaacaccatgtttgtggggccaagatgggccatctctgtccctgtggacccatggaagaccaggcccattcgtctgcccactatcttagcgttttcaaagggctttcacctctgaacccaggcatcctcggagatgagtgagtgaagcaggtctcatgagcgtgtctgctggcccggcccccacggaagaggggagggtgtgccgtcccgagtggagccgaggctcgggacacgcaggaaaggacgccgcctgcccgggctcctggagacgcagaacttggtgtgaggtcttgggaaaacagttcaacccgatgttttaagagccagaaaaacattcccaccccttgacctggtaaccccactggtggggattttctcttagagggataagataccgggaaggggaggtgaaatgctcaccactgccaaaacacgggctgcaactgcaacatcggaggatgagagggagagtcggctgtggtgcagaatgctcagcagccctcccagcagggacaggaagactgggcaggaagaggggagaagcattcaagttaaggcaaaaggcccaacgcagagcagcacactgaggtcacacctgtgagatgtggaagagaattcctgagcgtggagcgatggggttaggtgccaggatgattgcccattttgcttctgtcagactcttgactaaggatttctggttgcattttattacataaaagccagggaggttatatcacggtgagaaagcttccctgacgctgcctcctgtagcgcagccaagcgagcctgtggaggtaccatatgactgtaggcctctggggacagggagctgcatctgcttctcaaggccagggacacagccatttctgccagcatctgttgatcagtgagtgagtgagtgggcaggtagagcaggagccagtgaagagcaggccctggatgggtggggatgcaccatgtccccaggctgcagctgcaggcagccccccacattgtcggagaagcctctgcaccagctcagccccctcctcactccccttgtgccctggggacactctgcagaggggcactctgcagtctgtccccgccatcgctggacttctggacatggcctccagatttgcacctcttaaataaaactgcagtggatgtc

SEQ ID NO: 97071 - DNA, 1752 bp, Artificial Sequence
  derived and/or modified sequence
atggccaccgcccggaccttcggccccgagcgggaggccgagcccgccaaggaggcacgcgtggtcgggtccgagctcgtcgatacttacactgtgtatattatccaggttacagatggctcgcacgagtggacagtgaaacaccgttattccgatttccacgatctacatgagaaactggtggccgaacggaaaattgacaaaaacctgctgccccccaaaaagataattgggaagaattctaggagtctggttgagaaaagggaaaaagatctggaggtgtaccttcagaaactcctggccgcctttcccggcgtgactcccagggtactggctcatttcctgcacttccacttctatgagatcaacggaatcacagctgctctagctgaggaactgtttgaaaaaggcgaacagctgctgggggccggagaagtcttcgctatcggtccgctgcagttgtacgctgttactgaacagctgcagcagggcaagcctacatgcgcctccggtgacgcgaaaactgatttggggcatattctggactttacctgtagactgaaatacctgaaggtgtcgggaactgaaggtcctttcggcaccagtaacattcaggagcagctgctgcctttcgatctgtcgatcttcaagtccttgcatcaggttgaaatctcccactgcgacgcaaaacacatccgagggctggtggccagcaagccaactctcgctacactgtctgtaagattcagtgcaacaagtatgaaagaggtcctggtccctgaggcctcagagttcgacgagtgggaaccggaagggacaaccctagagggcccggttacagccgtgatccccacttggcaagcgctcacaacacttgacctctcccacaattcagtgtccgagatcgacgagagtgttaagctgattcctaaaatcgagttccttgacctctctcacaacggcctattagtcgtagataacctgcagcacctgtacaatctggtgcatcttgacctttcttataataagctgagcagtttagagggacttcacaccaagctgggtaacatcaagaccctaaatctggccgggaacctcctggaaagcctgtccgggcttcacaagctttattccctggttaatctcgatttacgggataatagaatcgaacagatggaggaggtgcgatcgatcggctctttaccttgtctggagcacgtatctcttctgaataacccactctccatcattcctgactaccggacaaaagtgttagctcagtttggcgaaagggccagcgaagtctgcctggacgacactgtcacgaccgaaaaggaactcgataccgtcgaggtgttgaaagcaatccagaaagctaaggaagtgaaaagcaaactaagcaacccagaaaaaaagggcggcgaggacagtaggctgagcgcagcgccatgtatccgtccctcaagctctcccccaactgttgcacccgccagcgcaagcctaccccaaccaattctatcaaatcaggggaaccgcgtgtgtatcctcttactggtggagccccacagcccggcgtgggccccctggctcggctgggggtggggccgcggcgcaagtacttgtttccagcagggtcagacccaaggcggccagtgtctcctccaggcgggtccacgggggggtacacatggaaggggggcatggcccgacgccagctgctgcctcttaggagaagattctcagctactctag

SEQ ID NO: 97072 - DNA, 1752 bp, Artificial Sequence
  derived and/or modified sequence
atggcaacggccaggaccttcggtcctgaaagagaggcagaacctgccaaagaggcacgcgtcgtggggtcggagctggtggacacgtataccgtgtacatcatacaggtaactgacgggtcccacgaatggacagttaagcacaggtactccgactttcacgatctgcatgaaaaactcgtggcagaaagaaagatcgataagaacctgcttccacctaaaaaaattatcgggaagaactcccgctcgttagtggaaaagcgcgagaaagacctggaggtatacctgcaaaagctcctcgctgcattccccggtgttacacccagggtgctagctcattttctgcatttccatttctatgagattaatggcattaccgcagctctggctgaggaattgttcgagaaaggggaacaattgttgggggctggcgaggttttcgcaatcgggcctttgcagctctatgctgtgaccgaacagctgcagcagggaaaacccacatgtgcttccggcgatgctaaaaccgacttgggtcatattttagattttacatgccgactcaaataccttaaggtgtctgggacagaaggcccttttgggactagcaatattcaggagcaactgcttcccttcgacttgtccattttcaaatcactccatcaggtggaaatctcacactgcgacgctaagcatatccgaggcctggtcgcatctaaacccaccctcgccactctgtctgtacgatttagcgcgactagcatgaaggaggtgttagtgcccgaggcatctgagttcgatgaatgggagccagaaggaaccactcttgaagggccagtcactgctgtcattcctacatggcaggctctgacgaccctggatcttagtcacaacagtgtgagcgaaatcgatgaatctgtgaagctgatcccaaagattgagtttcttgacctgtcccacaacggattgctggtggtggataatctccaacacctgtataatttggtgcacctggacttgtcatataataagttaagtagcctggaaggacttcacaccaagttaggtaacatcaaaaccctgaacctggcgggaaaccttctcgaatctctctcaggcctccataaactgtacagcctggttaacctggacctccgcgacaatagaatagagcaaatggaggaagttagaagcatagggtcactcccttgtctagaacatgttagcctgcttaacaatcccctttctataatccccgactaccgcactaaagtccttgcacagtttggtgaaagggccagcgaagtgtgcctcgatgatactgtaaccacagaaaaggaactggacacggtcgaggtcctaaaagccatccagaaggcaaaggaggtgaaatcgaagctcagcaacccagaaaagaaaggcggtgaggactcgcgtcttagcgccgcaccctgtatcagaccaagctcctcacctccgactgtcgcccctgcttctgcaagcctcccacagccaattctcagtaaccagggaaatcgcgtctgtatcttgctgctggtggagcctcattcaccggcttgggccccatggcttggatgggggtggggacgtggggcaagcacatgtttccaacagggccagacacaagggggtcagtgcctgctgcaggccggaccccgaggcggaacccacgggaggggagcttggcccgacgcatcttgctgcctgctaggggaagattcacagcttctttag

SEQ ID NO: 97073 - protein, 208 aa, Artificial Sequence
  derived and/or modified sequence
MGNAQERPSETIDRERKRLVETLQADSGLLLDALLARGVLTGPEYEALDALPDAERRVRRLLLLVQGKGEAACQELLRCAQRTAGAPDPAWDWQHVGPGYRDRSYDPPCPGHWTPEAPGSGTTCPGLPRASDPDEAGGPEGSEAVQSGTPEEPEPELEAEASKEAEPEPEPEPELEPEAEAEPEPELEPEPDPEPEPDFEERDESEDS

SEQ ID NO: 97074 - DNA, 627 bp, Artificial Sequence
  derived and/or modified sequence
atgggcaacgcccaggagagacccagcgagaccatcgacagagagagaaagagactggtggagaccctgcaggccgacagcggcctgctgctggacgccctgctggccagaggcgtgctgaccggccccgagtacgaggccctggacgccctgcccgacgccgagagaagagtgagaagactgctgctgctggtgcagggcaagggcgaggccgcctgccaggagctgctgagatgcgcccagagaaccgccggcgcccccgaccccgcctgggactggcagcacgtgggccccggctacagagacagaagctacgaccccccctgccccggccactggacccccgaggcccccggcagcggcaccacctgccccggcctgcccagagccagcgaccccgacgaggccggcggccccgagggcagcgaggccgtgcagagcggcacccccgaggagcccgagcccgagctggaggccgaggccagcaaggaggccgagcccgagcccgagcccgagcccgagctggagcccgaggccgaggccgagcccgagcccgagctggagcccgagcccgaccccgagcccgagcccgacttcgaggagagagacgagagcgaggacagctag

SEQ ID NO: 97075 - DNA, 627 bp, Artificial Sequence
  derived and/or modified sequence
atggggaacgcccaggaaagacccagtgagactatagaccgagaaagaaaacgtctcgttgagacactgcaggcggattctggcctgttactggatgcgttactggcacgtggggtccttaccgggccggaatacgaagccctggatgcgctccctgatgctgaaaggcgagtgcgcaggttgctgctgttagtccaggggaaaggagaggcggcttgtcaggaacttctgcgctgtgctcagcgtaccgcaggcgcccccgatcccgcttgggattggcagcacgtgggacccggataccgcgatcgcagttacgatcctccatgtcctggccattggacccccgaggcaccaggtagcggcaccacctgtcctggcctcccccgggcaagcgatcccgatgaggcaggtgggccggagggaagcgaggctgtacaaagcgggacaccagaggaaccagagcccgagctcgaggcagaggcatccaaggaagccgagcctgagcctgaacctgagcccgaactggaaccagaggcagaggcagagccggaaccggaacttgagcccgagccagatcctgagccagagcctgattttgaagaaagagacgaaagcgaagatagctag

SEQ ID NO: 97076 - DNA, 627 bp, Artificial Sequence
  derived and/or modified sequence
atggggaatgctcaggagagaccttccgagacgattgacagagagcgtaagcgattggtagaaacactacaggccgactccgggctgctcctggacgccctgttggctcgtggcgtcctcactggccctgagtacgaagcattggatgctctgcccgatgccgagcgacgcgttagacggctgcttttactggtgcaaggaaaaggggaggccgcctgtcaagagctactaagatgtgctcagcgcaccgctggagcgccagatcctgcatgggactggcagcacgttggcccgggctaccgtgataggtcttatgacccgccttgccctggtcactggacccccgaagctcccggttctggaacaacctgccctggtctgcctcgagcctctgacccagacgaggcgggaggccccgagggaagcgaggcagtccagtcaggtactccagaggagccggagcccgagttagaggccgaggcaagcaaggaggccgagcccgagccggagcctgaacctgagctcgaaccagaggccgaagctgaacctgaacccgaactggaacctgagcctgaccccgaaccagaacctgacttcgaggaacgcgatgaatccgaagattcctag

SEQ ID NO: 97077 - DNA, 627 bp, Artificial Sequence
  derived and/or modified sequence
atgggaaatgcccaggagcggcccagcgagaccatcgaccgggagaggaagaggctggtggagaccctgcaggccgacagcggcctgctgctggatgccctgctggcccggggcgtgctgactggaccagaatatgaggccctggatgccctgcctgatgctgagcggcgggtgcggcggctgctgctgctggtgcagggcaagggggaggccgcctgccaggagctgctgcgctgtgcccagaggacagctggggccccagaccctgcctgggactggcagcacgtgggccctggctacagagacaggagctatgaccccccctgccccggccactggaccccagaggcccctggcagcggcaccacctgccccggcctgccccgggccagtgaccctgatgaggccggcggccctgagggcagcgaggccgtgcagagcggcaccccagaggagcctgagcctgagctggaggccgaggccagcaaggaggccgagcctgagcctgagcctgagcctgagctggagcctgaggccgaggccgagcctgagcctgagctggagcctgagccagaccctgagcctgagccagactttgaggagagagatgaaagtgaggacagctag

SEQ ID NO: 97078 - DNA, 627 bp, Artificial Sequence
  derived and/or modified sequence
atgggcaacgcccaggagcggcccagcgagaccatcgaccgggagcgtaagagacttgtcgaaacactgcaagctgactcgggtctgcttctggacgcactgcttgccagaggggtcctaactggaccagagtacgaggcattagatgcccttccagacgccgaaagacgcgtcaggcggctcctattgctggtgcaaggcaagggggaagctgcttgtcaggaattgctgagatgtgcccagaggaccgccggagcccccgaccctgcttgggattggcaacatgtgggtcccggctacagagaccggtcatatgatccaccttgccccggccactggactccagaggcccccggctcagggactacatgtcccgggctcccccgcgcctccgatcctgacgaggcaggcggtcctgaaggcagtgaagcagtgcagtctgggacaccggaagagccggagcccgaattggaagcagaggctagcaaggaagccgagcccgagccagagccggaacccgagctggagccagaggctgaggccgagcccgagcccgaactggaacctgagccagatcctgagcccgaacccgacttcgaggagcgcgatgagtcagaggatagctag

SEQ ID NO: 97079 - DNA, 627 bp, Artificial Sequence
  derived and/or modified sequence
atgggcaacgcccaggagcggcccagcgagaccatcgaccgggagcggaagcgcctcgtcgagaccctccaagccgactccggcctcctcctggatgctctgctggcccgtggagtgcttacgggccccgagtatgaagctcttgatgccctgccggacgccgaacgccgcgtcagacgacttctgctcttagtacagggcaaaggggaagccgcttgccaggaactcttgcggtgtgcccagaggacagccggggcccccgatcccgcctgggactggcagcacgttggtccaggctatcgggatcgaagctatgacccaccctgtcccggccactggactcctgaggctccggggtcgggaacaacctgtcccggacttccgcgagcaagcgaccctgacgaggctggcggccctgaggggagtgaggcagtgcagagcggtactcctgaggagccggagccagagctagaggctgaggccagtaaagaagcagaacctgagcccgaaccagaacccgagctggagccagaggccgaggcagagcctgagcccgagctcgagccggaacctgatccagaacccgagccagatttcgaggaacgggacgaatcagaggactcctag

SEQ ID NO: 97080 - DNA, 627 bp, Artificial Sequence
  derived and/or modified sequence
atgggtaacgcccaagagcggccttctgaaacaattgaccgtgaacgcaaaagactcgtagagacactccaggcagattccggcctactgctcgatgcactattggccagaggtgttttaacaggccctgagtatgaggcacttgatgctctgccagatgccgaaaggagggtccggcgtctgctgctgttggtgcagggaaagggtgaggcagcgtgccaggagttactgaggtgtgcccagaggaccgcaggggcacctgaccctgcctgggactggcagcacgtgggacccggttaccgggacaggagctatgatcccccatgccccggtcactggacgccagaggccccaggcagcgggacaacttgccctggcctccccagggctagcgatccagacgaggcagggggtccggaaggatctgaggccgttcagtctggaacacccgaggaacctgaacccgaacttgaggctgaggcctcgaaagaggccgagcctgaaccagagcccgagcccgagctggaacccgaagccgaggcagagcccgagcccgaattggagccagagccagaccctgaacccgaacccgactttgaggagcgcgatgagtcagaggacagctag

SEQ ID NO: 97081 - DNA, 627 bp, Artificial Sequence
  derived and/or modified sequence
atgggcaatgcccaggagcgcccttccgagacaatcgatcgcgagagaaagagactggtggagaccctgcaggccgacagtggccttctcctggatgctctcctagctcggggagttctaactggccctgagtacgaagccctggacgccttgcctgacgctgaaagacgggtgagacggctgctgttgttggtgcagggaaaaggggaggcagcctgtcaagaacttcttagatgtgcacagaggactgccggagcccctgatcctgcatgggattggcagcacgtcggccctggttaccgggatcgaagctatgaccctccatgtcccggacattggacacctgaggcccctggaagtggcaccacctgccctgggcttccaagggcctccgatccggatgaggctggcggtccagagggatctgaggctgtccagagtggcaccccagaggaaccagagcccgagttggaagcagaggcctcaaaagaagccgaaccagagcctgaacccgagcccgagttggagcctgaggcagaagcagagccagagccagagcttgagccagagcccgacccagagcctgagccggactttgaagagagggacgaatcagaggattcttag

SEQ ID NO: 97082 - DNA, 510 bp, Artificial Sequence
  derived and/or modified sequence
atgaaggagctgagcgtgctgagcctgatctgcagctgcttctacacccagccccaccccaacaccgtgtaccagtacggcgacatggaggtgaagcagctggacaagagagccagcggccagagcttcgaggtgatcctgaagagccccagcgacctgagccccgagagccccatgctgagcagcccccccaagaagaaggacaccagcctggaggagctgcagaagagactggaggccgccgaggagagaagaaagacccaggaggcccaggtgctgaagcagctggccgagagaagagagcacgagagagaggtgctgcacaaggccctggaggagaacaacaacttcagcagacaggccgaggagaagctgaactacaagatggagctgagcaaggagatcagagaggcccacctggccgccctgagagagagactgagagagaaggagctgcacgccgccgaggtgagaagaaacaaggagcagagagaggagatgagcggctag

SEQ ID NO: 97083 - DNA, 510 bp, Artificial Sequence
  derived and/or modified sequence
atgaaagagctgagcgttctgtcccttatctgcagctgtttttacactcagccacatccgaatacagtttaccaatatggtgacatggaagtcaagcagcttgacaagagagctagcggccagtccttcgaggtcattctgaagagtcccagcgatctctcacccgagtctcctatgctatcatctcctcccaaaaagaaagatacttcgctggaagagcttcagaagcggttggaggccgcagaagagaggcggaaaacacaggaggcacaggttttgaagcagctggccgagagacgcgagcacgagcgagaggtgctgcataaggctctcgaggagaataacaatttctctcgccaggcggaagagaaattaaattacaaaatggaattgagtaaggaaatccgtgaggcccacctggccgcgctccgcgagcgtctgagagagaaagaactgcacgcagccgaagtgcgtaggaataaggagcaacgggaagaaatgtctggttag

SEQ ID NO: 97084 - DNA, 510 bp, Artificial Sequence
  derived and/or modified sequence
atgaaggagctgtctgtgctgagcctcatctgcagctgcttctacacccagccccaccccaacacagtgtaccagtacggggacatggaggtgaagcagctggacaagagggccagcggccagagctttgaagtcatcctgaagagccccagcgacctgagccctgagagccccatgctgagcagcccccccaagaagaaggacaccagcctggaggagctgcagaagaggctggaggccgctgaggagaggaggaagacccaggaggcccaggtgctgaagcagctggccgagcggcgggagcacgagcgggaggtgctgcacaaggccctggaggagaacaacaacttcagccggcaggccgaggagaagctgaactacaagatggagctgagcaaggagatccgggaggcccacctggccgccctgcgggagcggctgcgggagaaggagctgcacgccgctgaggtgagaagaaacaaggagcagcgggaggagatgagcggctag

SEQ ID NO: 97085 - DNA, 510 bp, Artificial Sequence
  derived and/or modified sequence
atgaaggagctgagcgtgctgagcctgatctgcagctgcttctacacacaacctcaccccaacaccgtttatcaatacggcgacatggaggtcaagcagctggacaagcgagccagcgggcagagttttgaggttatcctgaagagcccttccgatctgtcacctgagagccctatgttatcctccccgcccaagaaaaaagacacaagtctcgaagaactacagaaacggcttgaagctgccgaagagcggagaaaaacccaggaagctcaggtcctgaagcagctcgcggagcgacgggagcatgaacgcgaagtactccacaaggcacttgaggaaaataacaactttagccggcaagctgaggagaagttgaattacaaaatggagttgtcaaaggagataagagaagctcaccttgcagccctaagagagagactgcgggagaaagaactgcatgcagctgaggtgaggcgaaacaaggaacagagagaggagatgtccggttag

SEQ ID NO: 97086 - DNA, 510 bp, Artificial Sequence
  derived and/or modified sequence
atgaaagaactctccgtcctgtctttaatatgttcctgtttctatacccagccacaccctaacactgtttaccagtacggggatatggaggttaagcaactagataagcgagcctccggccaatccttcgaagtaattctaaaaagtccgagtgacctgagcccagagtcgcctatgttgagttctccaccaaaaaagaaagatacttctctggaggaactccagaaaagactggaggctgccgaagaacgccgaaagactcaggaggctcaggtccttaaacagttagccgagcgcagggaacatgagagagaggtgctccacaaggccctcgaagagaataacaacttcagccgccaggccgaagagaagctcaattataagatggagctttctaaggagatcagagaagcccacctcgccgcactacgcgagcggctcagagagaaggagctgcatgcggctgaggtccggcgaaacaaggagcagagagaggaaatgtctggttag

SEQ ID NO: 97087 - DNA, 1382 bp, Artificial Sequence
  derived and/or modified sequence
gagaggcaggaggacaccgagttccccgtgttggcctccaggtcctgtgcttgcggagccgtccggcggctgggatcgagccccgacaatgggcaacgcgcaggagcggccgtcagagactatcgaccgcgagcggaaacgcctggtcgagacgctgcaggcggactcgggactgctgttggacgcgctgctggcgcggggcgtgctcaccgggccagagtacgaggcattggatgcactgcctgatgccgagcgcagggtgcgccgcctactgctgctggtgcagggcaagggcgaggccgcctgccaggagctgctacgctgtgcccagcgtaccgcgggcgcgccggaccccgcttgggactggcagcacgtgggtccgggctaccgggaccgcagctatgaccctccatgcccaggccactggacgccggaggcacccggctcggggaccacatgccccgggttgcccagagcttcagaccctgacgaggccgggggccctgagggctccgaggcggtgcaatccgggaccccggaggagccagagccagagctggaagctgaggcctctaaagaggctgaaccggagccggagccagagccagagctggaacccgaggctgaagcagaaccagagccggaactggagccagaaccggacccagagcccgagcccgacttcgaggaaagggacgagtccgaagattcctgaaggccagagctctgacaggcggtgccccgcccatgctggataggacctgggatgctgctggagctgaatcggatgccaccaaggctcggtccagcccagtaccgctggaagtgaataaactccggagggtcggacgggacctgggctctctccacgattctggctgtttgcccaggaacttagggtgggtacctctgagtcccagggacctgggcaggcccaagcccaccacgagcatcatccagtcctcagccctaatctgcccttaggagtccaggctgcaccctggagatcccaaacctagccccctagtgggacaaggacctgaccctcctgcccgcatacacaacccatttcccctggtgagccacttggcagcatatgtaggtaccagctcaaccccacgcaagttcctgagctgaacatggagcaaggggagggtgacttctctccacatagggagggcttagagctcacagccttgggaagtgagactagaagaggggagcagaaagggaccttgagtagacaaaggccacacacatcattgtcattactgttttaattgtctggcttctctctggactgggagctcagtgaggattctgaccagtgacttacacaaaaggcgctctatacatattataatatattcgcttactaaatg

SEQ ID NO: 97088 - DNA, 1885 bp, Artificial Sequence
  derived and/or modified sequence
agctgctgcacccacccccaccctgcccggccctttctgcaccgtcatctcctgccccgccgaggcttgacccgtgctgtccccctctcccttcctttgcccaccgattggagggacactctggaaaactcagttgaagaaagcggagagtctgcgtgtacacagtgcaatgatgtcagttaatgcactagtgagggcatgtgttgttcacggtacacagaagaaggaaccaccagcccttgggacacttaggcattggtgtagacaagggaacatttgagtcctggacgatggataggtccacggagcggagggaggagaaaaggattccagtcttagcgatcagcatcagcaaaggctccgaggtgccagaggcataagagtagatgccagtcctgggaaaggcaggggaggagaggagagccacggctgacgcttggggacagaaggaggagcctgaggaggagacaggacagagcgtctggagaggcaggaggacaccgagttccccgtgttggcctccaggtcctgtgcttgcggagccgtccggcggctgggatcgagccccgacaatgggcaacgcgcaggagcggccgtcagagactatcgaccgcgagcggaaacgcctggtcgagacgctgcaggcggactcgggactgctgttggacgcgctgctggcgcggggcgtgctcaccgggccagagtacgaggcattggatgcactgcctgatgccgagcgcagggtgcgccgcctactgctgctggtgcagggcaagggcgaggccgcctgccaggagctgctacgctgtgcccagcgtaccgcgggcgcgccggaccccgcttgggactggcagcacgtgggtccgggctaccgggaccgcagctatgaccctccatgcccaggccactggacgccggaggcacccggctcggggaccacatgccccgggttgcccagagcttcagaccctgacgaggccgggggccctgagggctccgaggcggtgcaatccgggaccccggaggagccagagccagagctggaagctgaggcctctaaagaggctgaaccggagccggagccagagccagagctggaacccgaggctgaagcagaaccagagccggaactggagccagaaccggacccagagcccgagcccgacttcgaggaaagggacgagtccgaagattcctgaaggccagagctctgacaggcggtgccccgcccatgctggataggacctgggatgctgctggagctgaatcggatgccaccaaggctcggtccagcccagtaccgctggaagtgaataaactccggagggtcggacgggacctgggctctctccacgattctggctgtttgcccaggaacttagggtgggtacctctgagtcccagggacctgggcaggcccaagcccaccacgagcatcatccagtcctcagccctaatctgcccttaggagtccaggctgcaccctggagatcccaaacctagccccctagtgggacaaggacctgaccctcctgcccgcatacacaacccatttcccctggtgagccacttggcagcatatgtaggtaccagctcaaccccacgcaagttcctgagctgaacatggagcaaggggagggtgacttctctccacatagggagggcttagagctcacagccttgggaagtgagactagaagaggggagcagaaagggaccttgagtagacaaaggccacacacatcattgtcattactgttttaattgtctggcttctctctggactgggagctcagtgaggattctgaccagtgacttacacaaaaggcgctctatacatattataatatattcgcttactaaatgaataaggactttccaactg

SEQ ID NO: 97089 - protein, 365 aa, Artificial Sequence
  derived and/or modified sequence
MFAEAAKTTRPCGMAEFKEKPEAPTEQLDVACGQENLPVGAWPPGAAPAPFQYTPDHVVGPGADIDPTQITFPGCICVKTPCLPGTCSCLRHGENYDDNSCLRDIGSGGKYAEPVFECNVLCRCSDHCRNRVVQKGLQFHFQVFKTHKKGWGLRTLEFIPKGRFVCEYAGEVLGFSEVQRRIHLQTKSDSNYIIAIREHVYNGQVMETFVDPTYIGNIGRFLNHSCEPNLLMIPVRIDSMVPKLALFAAKDIVPEEELSYDYSGRYLNLTVSEDKERLDHGKLRKPCYCGAKSCTAFLPFDSSLYCPVEKSNISCGNEKEPSMCGSAPSVFPSCKRLTLEVSLFSDKQLAPPYSGRQWLASFTSA

SEQ ID NO: 97090 - DNA, 1098 bp, Artificial Sequence
  derived and/or modified sequence
atgtttgctgaagccgctaaaaccaccagaccgtgcggcatggccgagtttaaggagaagccagaggcaccaactgagcagctcgacgtggcctgcggccaggaaaatcttcccgtaggggcttggcctcccggagccgcacccgcccctttccaatatacgccagaccacgtcgtcggcccaggggcagatatagaccctactcagatcacgttccctgggtgcatttgcgtgaagacaccctgcctgccaggtacgtgttcttgcctcaggcacggagaaaattatgatgataatagttgcctgagagacatcggctccggaggcaaatatgctgaaccagtcttcgaatgtaacgttctttgtaggtgctccgatcactgcagaaaccgggtggttcagaagggactgcaattccacttccaggtcttcaaaactcataagaaaggctggggcctgagaactctggaattcatccctaaagggaggttcgtttgcgaatacgcgggcgaagtgctcgggttcagcgaggttcagaggcgcatccacctgcagacaaaatccgactctaattacatcattgctatccgggaacatgtgtataatgggcaggtaatggagacgttcgttgatcccacatatatcgggaacatcgggcgcttccttaaccatagctgcgaaccgaaccttctcatgattcccgtgaggattgattctatggtgcccaagttggcactctttgccgcaaaggatatcgtgcccgaagaagaactttcttacgattacagcggacggtacctaaatctcaccgtgagcgaggataaggagcgtctggatcacggcaaactcagaaagccgtgttactgcggagccaaatcgtgcactgccttcctgccattcgattcctctctctattgtcctgtggaaaagagtaacatctcatgcgggaatgaaaaggagccatccatgtgtggaagtgcaccctccgtattcccctcgtgtaaacgactcactttggaggtgtctctttttagtgacaaacagttggctcccccctattccggcaggcaatggctggcatcttttactagcgcatag

SEQ ID NO: 97091 - DNA, 516 bp, Artificial Sequence
  derived and/or modified sequence
atgttcgctgaggccgccaagacgacgaggccctgcggcatggccgagttcaaggaaaagcctgaggctccgactgaacagttggacgtggcatgcgggcaggagaacctccccgtcggtgcttggccacccggcgcagctcccgctcctttccagtataccccagaccacgtggtcgggcccggtgcagacatcgatcctacacagatcacttttcctggttgcatttgcgtgaaaaccccatgcctgcccggcacctgttcctgtttacgccatggagagaattacgatgataacagctgcttgcgggatatcggctcagggggtaaatatgcagagccggttttcgaatgtaacgttctatgtcgctgttccgatcactgccggaacagagtggtgcaaaagggtctgcagttccatttccaggtgtttaagactcacaagaaggggtggggcctcagaaccctggagttcattcctaagggccgcaaggtggaacaccagctatggaagtag

SEQ ID NO: 97092 - DNA, 1098 bp, Artificial Sequence
  derived and/or modified sequence
atgtttgctgaggccgccaagaccacccggccctgtggcatggccgagttcaaggagaagccagaggcccccacagagcagctggatgtggcctgtggccaggagaacctgcctgtgggcgcctggcccccaggggccgccccagcccccttccagtacaccccagaccacgtggtgggccctggagctgacatcgaccccacccagatcaccttccctggctgcatctgtgtgaagaccccctgcctgcccggcacctgcagctgcctgcggcacggggagaactatgatgacaacagctgcctgcgggacatcggcagcggcggcaagtatgcagagcctgtgtttgaatgtaatgtgctgtgccgctgcagcgaccactgcaggaacagagtggtgcagaagggcctgcagttccacttccaggtgttcaagacccacaagaagggctggggcctgcggaccctggagttcatccccaagggccgctttgtgtgtgaatatgctggggaggtgctgggcttcagcgaggtgcagaggcgcatccacctgcagaccaagagtgacagcaactacatcatcgccatccgggagcacgtgtacaacggccaggtgatggagacctttgtggaccccacctacatcggcaacatcggccgcttcctgaaccacagctgtgagcccaacctgctgatgatccctgtgagaattgacagcatggtgcccaagctggccctgtttgctgccaaggacatcgtgcctgaggaggagctgtcctatgactacagcggccgctacctgaacctgactgtgtctgaggacaaggagcggctggaccacggcaagctgaggaagccctgctactgtggggccaagagctgcacagccttcctgccctttgacagcagcctgtactgccctgtggagaagagcaacatcagctgtggaaatgagaaggagcccagcatgtgtggcagcgcccccagcgtcttccccagctgcaagaggctgaccctggaggtgtccctcttcagtgacaagcagctggccccaccctacagcggccggcagtggctggccagcttcaccagcgcctag

SEQ ID NO: 97093 - DNA, 516 bp, Artificial Sequence
  derived and/or modified sequence
atgtttgctgaggccgccaagaccacccggccctgtggcatggccgagttcaaggagaagccagaggcccccacagagcagctggatgtggcctgtggccaggagaacctgcctgtgggcgcctggcccccaggggccgccccagcccccttccagtacaccccagaccacgtggtgggccctggagctgacatcgaccccacccagatcaccttccctggctgcatctgtgtgaagaccccctgcctgcccggcacctgcagctgcctgcggcacggggagaactatgatgacaacagctgcctgcgggacatcggcagcggcggcaagtatgcagagcctgtgtttgaatgtaatgtgctgtgccgctgcagcgaccactgcaggaacagagtggtgcagaagggcctgcagttccacttccaggtgttcaagacccacaagaagggctggggcctgcggaccctggagttcatccccaagggcaggaaggtggagcaccagctgtggaagtag

SEQ ID NO: 97094 - DNA, 1098 bp, Artificial Sequence
  derived and/or modified sequence
atgttcgccgaggccgccaagaccacccggccctgcggcatggccgaattcaaggagaagccagaggccccgacggagcagttggacgtggcctgcgggcaggagaacctgccagttggtgcttggccgccaggagccgcccctgcaccattccagtatacccctgaccacgtcgttgggcccggggctgacatcgatccaactcagattactttccctggctgcatttgtgtgaagacaccctgccttcccggaacctgcagctgcttgaggcacggtgagaattacgatgataatagttgtctgagagacattggttccggcggtaagtacgccgagcccgtattcgagtgtaatgtgctgtgccgctgcagtgaccattgccggaaccgagtggtgcagaaaggtctccagttccacttccaggtgttcaagacccacaaaaaggggtggggcctgcggaccctggagtttatcccaaagggacgattcgtgtgtgaatacgctggagaggtactcgggttttcagaagtgcaacgcaggattcatttgcagaccaagagtgactcaaactatatcatcgctatccgtgagcatgtgtataacgggcaggtgatggagacattcgtggatcctacatatatcggtaacatagggcggttcttgaaccactcatgcgagccaaatctgctgatgatcccggtgcgaatcgattccatggtgcccaaactcgccctgtttgccgccaaggacattgtgccagaagaggaactgagctatgattactcaggcagatacctgaacctgaccgttagcgaagacaaagaacgtttggaccacgggaaactgcgtaaaccctgctattgtggagcaaaatcctgcaccgcctttcttccattcgacagttccctctattgccctgtggagaaatcaaatatttcctgcggaaatgaaaaggagccaagcatgtgcggtagcgctccaagcgtctttccctcttgtaagcgccttactctggaggtctcattgttttcagacaaacaacttgcccctccatactccggcagacagtggctggcaagctttacctccgcctag

SEQ ID NO: 97095 - DNA, 516 bp, Artificial Sequence
  derived and/or modified sequence
atgttcgccgaggccgccaagaccacccggccctgcggcatggccgaatttaaggaaaagcctgaggctcctaccgagcagcttgatgtggcctgcggacaggagaacctacccgtcggtgcgtggccacctggcgccgctccagcccctttccaatacaccccagaccacgtagtgggacctggcgcggacatcgacccaactcagataacatttccgggctgcatctgtgttaaaaccccatgccttcccggaacctgctcttgtctgcggcacggagaaaattatgatgacaattcctgtttgcgcgatatagggagcggcgggaaatacgccgagccagtgtttgaatgtaatgttctttgccgctgctctgatcactgtagaaaccgcgtggtacaaaaaggactccagttccattttcaggtgttcaagacccacaaaaaaggttggggcctgcggaccttggagttcattccaaaagggcgtaaggttgagcaccagctctggaagtag

SEQ ID NO: 97096 - DNA, 1098 bp, Artificial Sequence
  derived and/or modified sequence
atgttcgctgaggccgcaaagacaacacggccttgcgggatggcagaatttaaagagaagccagaggcccctacagagcagttggacgtggcatgtgggcaggagaatctcccagtcggagcatggccacctggcgctgcacctgccccatttcagtacacaccagatcatgtggtcggtccaggagcagatatcgacccaacccaaatcacattccctggctgcatctgtgtgaagaccccatgcctgcccggtacctgctcgtgcttgcggcatggcgagaactatgatgataatagttgcctcagagatatcgggtccgggggtaaatacgcggagcctgtgtttgagtgcaacgttctctgtcgatgctccgatcactgccggaacagggtggtgcaaaagggtctccagtttcacttccaggtctttaagacccataagaagggttggggactgcggacgctagagttcattcccaaaggacgctttgtatgtgaatacgccggagaggtcttgggattttcagaagtacagcggagaatccatttgcaaaccaagtctgatagcaactatatcatagccatacgggagcacgtgtacaacggtcaggtgatggaaacatttgtcgacccgacatatattgggaacatcggcagattcctcaaccacagttgcgagcccaatttactgatgatccccgtgaggatcgattctatggtgcccaagctagcactgttcgccgctaaggatatagtcccagaagaagagttatcatatgattattccggccgttatttgaatctcaccgtgtctgaagacaaagagagactggatcacgggaaactgcgaaaaccctgttattgcggcgctaaatcttgcactgccttcctgcccttcgatagctcactctactgccccgtggagaagagcaacatcagctgcggtaacgagaaggaacccagcatgtgtgggtccgcacccagcgtgttcccatcctgcaagcgtctgacactcgaggtcagtctcttcagtgataagcagctggctcctccttattccggaaggcagtggcttgcgagcttcacaagcgcatag

SEQ ID NO: 97097 - DNA, 516 bp, Artificial Sequence
  derived and/or modified sequence
atgttcgccgaagcagccaagactaccaggccttgtgggatggcagagttcaaagagaaacctgaggccccaaccgaacagctggacgtcgcttgtggacaagaaaatctgcccgtgggagcctggccacccggtgctgcccctgctcctttccagtatacacctgatcacgtggtggggccaggtgctgatattgaccctactcaaatcacattcccagggtgcatttgtgtcaagactccctgcctgccgggaacctgctcttgtctcaggcacggagagaattatgacgacaatagctgtctgagggatatcggtagcggagggaaatacgcagagccagtctttgaatgcaacgtcctttgtcgctgctctgaccattgtaggaacagggtggtacagaaaggtctccaattccactttcaggtattcaagacccacaaaaaggggtggggtcttaggacgctggagtttatccctaaagggcgtaaagttgagcaccagctttggaagtag

SEQ ID NO: 97098 - DNA, 1671 bp, Artificial Sequence
  derived and/or modified sequence
aggcgggtaaatgttcgcggaagcggcaaagacgacacggccttgtgggatggcggagtttaaggagaagcctgaggccccgactgagcagctggatgtcgcgtgcggccaggaaaacttgccggtgggcgcgtggcccccgggggccgcgccggcgcccttccagtacactcctgatcatgtagttggacctggagcagacattgatcccactcaaataacctttcccggatgcatttgtgtcaaaactccctgcctccctggcacttgctcctgtctccgccatggagagaactatgatgataactcatgccttagagatataggatctggaggaaagtatgcagagcctgtttttgaatgcaatgtcctgtgccgatgcagtgaccactgcagaaacagagtggtccagaaaggtctacagttccacttccaagtgttcaagacgcataaaaaaggctggggacttcgtaccttggaatttataccgaaaggaaggtttgtctgtgaatatgctggtgaggttttaggattctctgaagttcagagaagaattcacttacaaacaaaatccgactccaattacattatagccatcagggaacatgtttataatgggcaggtaatggaaacatttgttgaccctacttatataggaaatattggaagattccttaatcattcttgtgagccaaaccttttgatgattcctgtccgaattgactcaatggtacctaagttggcactttttgcagccaaagatattgtgccagaagaagaactctcttatgattattcaggaagatatcttaatctaacagtcagtgaagacaaagaaaggctagatcatgggaaactaaggaaaccttgttactgtggtgccaaatcatgtactgctttcctgccttttgacagttctctgtactgccccgtagaaaagtcgaacatcagttgtggaaatgagaaggaacccagcatgtgtggctcagccccttctgtgttcccctcctgcaagcgattgacccttgaggtgagtctgttcagtgataagcagcttgcccctccctatagtggaagacagtggttggctagctttacctctgcctagttacataagtttaactcaggaatgtggcagagactgcaagttgtccatcagtatcctttcccctttctgtaatagaattctccatttaacaaaagtacatgactacccagaatactcactttcctagttagatttgtcttagtgactgttctagttaataggatataagcaaaaatgacaagtccttaaatggagatatcctgcccttcacctcctctttcttcctgctggctggaatgtatacatgatgactggaactggagcagtcatcctagaccccaggatgaccctgggaaaggaagccattgcatagaaaaatcaacaaggttaaaaggagtctaggtgtctggtactgtagaacatcctgtcagtcgtgatctgacacctttgtactttcaggtgagaaatagtctctcccttgcttaagtcactgttattgtaagttttctagcactaacatcgaacctaataatgatccaagaaacccttgtggctgcatacctaaaccctgcttgccaaccaattttaacagtaataaagctgactttttgatttctgtctga

SEQ ID NO: 97099 - DNA, 1098 bp, Artificial Sequence
  derived and/or modified sequence
atgttcgccgaggccgccaagaccaccagaccctgcggcatggccgagttcaaggagaagcccgaggcccccaccgagcagctggacgtggcctgcggccaggagaacctgcccgtgggcgcctggccccccggcgccgcccccgcccccttccagtacacccccgaccacgtggtgggccccggcgccgacatcgaccccacccagatcaccttccccggctgcatctgcgtgaagaccccctgcctgcccggcacctgcagctgcctgagacacggcgagaactacgacgacaacagctgcctgagagacatcggcagcggcggcaagtacgccgagcccgtgttcgagtgcaacgtgctgtgcagatgcagcgaccactgcagaaacagagtggtgcagaagggcctgcagttccacttccaggtgttcaagacccacaagaagggctggggcctgagaaccctggagttcatccccaagggcagattcgtgtgcgagtacgccggcgaggtgctgggcttcagcgaggtgcagagaagaatccacctgcagaccaagagcgacagcaactacatcatcgccatcagagagcacgtgtacaacggccaggtgatggagaccttcgtggaccccacctacatcggcaacatcggcagattcctgaaccacagctgcgagcccaacctgctgatgatccccgtgagaatcgacagcatggtgcccaagctggccctgttcgccgccaaggacatcgtgcccgaggaggagctgagctacgactacagcggcagatacctgaacctgaccgtgagcgaggacaaggagagactggaccacggcaagctgagaaagccctgctactgcggcgccaagagctgcaccgccttcctgcccttcgacagcagcctgtactgccccgtggagaagagcaacatcagctgcggcaacgagaaggagcccagcatgtgcggcagcgcccccagcgtgttccccagctgcaagagactgaccctggaggtgagcctgttcagcgacaagcagctggcccccccctacagcggcagacagtggctggccagcttcaccagcgcctag

SEQ ID NO: 97100 - DNA, 516 bp, Artificial Sequence
  derived and/or modified sequence
atgttcgccgaggccgccaagaccaccagaccctgcggcatggccgagttcaaggagaagcccgaggcccccaccgagcagctggacgtggcctgcggccaggagaacctgcccgtgggcgcctggccccccggcgccgcccccgcccccttccagtacacccccgaccacgtggtgggccccggcgccgacatcgaccccacccagatcaccttccccggctgcatctgcgtgaagaccccctgcctgcccggcacctgcagctgcctgagacacggcgagaactacgacgacaacagctgcctgagagacatcggcagcggcggcaagtacgccgagcccgtgttcgagtgcaacgtgctgtgcagatgcagcgaccactgcagaaacagagtggtgcagaagggcctgcagttccacttccaggtgttcaagacccacaagaagggctggggcctgagaaccctggagttcatccccaagggcagaaaggtggagcaccagctgtggaagtag

SEQ ID NO: 97101 - protein, 332 aa, Artificial Sequence
  derived and/or modified sequence
MEWTAARARPLVMTLNSLGFSFGHGLTAAVAYGVRDWTLLQLVVSVPFFLCFLYSWWLAESARWLLTTGRLDWGLQELWRVAAINGKGAVQDTLTPEVLLSAMREELSMGQPPASLGTLLRMPGLRFRTCISTLCWFAFGFTFFGLALDLQALGSNIFLLQMFIGVVDIPAKMGALLLLSHLGRRPTLAASLLLAGLCILANTLVPHEMGALRSALAVLGLGGVGAAFTCITIYSSELFPTVLRMTAVGLGQMAARGGAILGPLVRLLGVHGPWLPLLVYGTVPVLSGLAALLLPETQSLPLPDTIQDVQNQAVKKATHGTLGNSVLKSTQF

SEQ ID NO: 97102 - protein, 445 aa, Artificial Sequence
  derived and/or modified sequence
MAFSELLDLVGGLGRFQVLQTMALMVSIMWLCTQSMLENFSAAVPSHRCWAPLLDNSTAQASILGSLSPEALLAISIPPGPNQRPHQCRRFRQPQWQLLDPNATATSWSEADTEPCVDGWVYDRSIFTSTIVAKWNLVCDSHALKPMAQSIYLAGILVGAAACGPASDRWLAESARWLLTTGRLDWGLQELWRVAAINGKGAVQDTLTPEVLLSAMREELSMGQPPASLGTLLRMPGLRFRTCISTLCWFAFGFTFFGLALDLQALGSNIFLLQMFIGVVDIPAKMGALLLLSHLGRRPTLAASLLLAGLCILANTLVPHEMGALRSALAVLGLGGVGAAFTCITIYSSELFPTVLRMTAVGLGQMAARGGAILGPLVRLLGVHGPWLPLLVYGTVPVLSGLAALLLPETQSLPLPDTIQDVQNQAVKKATHGTLGNSVLKSTQF

SEQ ID NO: 97103 - DNA, 1338 bp, Artificial Sequence
  derived and/or modified sequence
atggccttttctgagctgctggacctggtgggtggcctggggcgcttccaggttctccagactatggcccttatggtgagcattatgtggttatgcacacagagcatgctcgagaacttttcagccgctgttccctcacacaggtgttgggcaccgctcctcgataatagtactgcacaggccagcattctggggagtctgtctccagaggctctgctggctatctcgatcccaccagggccgaaccaacggccccaccaatgtcgaagattcagacagccacaatggcagctgctggatcctaacgctacggctacctcatggtcagaagcagatacagagccatgtgtggatgggtgggtttacgacagatcgattttcacgagcacgattgtggcgaagtggaatctggtttgcgactcccatgctctgaaaccgatggctcaaagtatatatctggccggaatcctggtcggcgctgcggcgtgcggaccggcgagcgaccgctggttagccgagagcgcacggtggctgctcactacaggacggctcgattgggggttgcaggaactgtggcgcgtcgccgctattaacggcaagggagccgttcaggacaccctgactccagaggtcttgctgtcagcgatgagagaagaactgtccatggggcagccccccgcaagtctcggcaccttgctgaggatgcctggattgaggtttagaacttgtatatccactctttgctggttcgccttcggtttcaccttctttggactcgccctggatctgcaggccctaggctcaaacatctttttgttacagatgtttattggggtggtcgatatccccgcgaagatgggcgccctgctcttactgagccatctggggagacgtcctaccttggcagccagcctacttttagccggactgtgtatcctcgccaacacccttgtcccacatgagatgggagctcttaggagtgcactcgccgtccttggtttaggcggggtcggtgccgcatttacttgcattaccatttatagctcagagctgttccctacagtactgaggatgacagccgtgggtctggggcagatggcagcaagagggggtgccatcctcggacctttggtgcgcctcttaggggttcacggcccatggctgcctctgctcgtgtatgggacggttccagttctgagcggtctcgctgccttacttctgcctgagactcagtcgctgccgctccctgacaccatacaggatgtgcagaatcaggccgtgaaaaaagcgacccacgggacgctcggcaacagcgttctaaaaagtacgcaattctag

SEQ ID NO: 97104 - DNA, 1338 bp, Artificial Sequence
  derived and/or modified sequence
atggccttcagcgagctgctggacctggtgggcggcctgggccgcttccaggtgctgcagaccatggccctgatggtgtccatcatgtggctgtgcacccagagcatgctggagaacttctctgctgctgtgcccagccaccgctgctgggcccccctgctggacaacagcacagcccaggccagcatcctgggcagcctgagccctgaggccctgctggccatcagcatccccccaggccccaaccagaggccccaccagtgccgccgcttccggcagccccagtggcagctgctggaccccaatgccacagccacctcctggagcgaggccgacacagagccctgtgtggatggctgggtgtatgacaggagcatcttcaccagcaccatcgtggccaagtggaacctggtgtgtgacagccacgccctgaagcccatggcccagagcatctacctggccggcatcctggtgggcgctgctgcctgtggccctgccagtgaccgctggctggccgagagcgcccgctggctgctgaccaccggccgcctggactggggcctgcaggagctgtggagggtggccgccatcaacgggaaaggagctgtgcaggacaccctgaccccagaggtgctgctgagcgccatgagggaggagctgtccatgggccagcccccagccagcctgggcaccctgctgaggatgcctggcctgcgcttccgcacctgcatcagcaccctgtgctggtttgccttcggcttcaccttcttcggcctggccctggacctgcaggccctgggcagcaacatcttcctgctgcagatgtttattggagtggtggacatcccagccaagatgggcgccctgctgctgctgagccacctgggcagaagacccaccctggccgccagcctgctgctggccggcctgtgcatcctggccaacaccctggtgccccatgagatgggcgccctgcggagcgccctggccgtgctgggcctgggcggcgtgggcgccgccttcacctgcatcaccatctacagcagcgagctgttccccaccgtgctgaggatgacagctgtgggcctgggccagatggccgcccggggcggggccatcctgggccccctggtgcggctgctgggcgtgcacggcccctggctgcccctgctggtgtatggaacagtgcctgtgctgagcggcctggccgccctgctgctgcctgagacccagagcctgcccctgcctgacaccatccaggatgtgcagaaccaggccgtgaagaaggccacccacggcaccctgggcaacagcgtgctgaagagcacccagttctag

SEQ ID NO: 97105 - DNA, 1338 bp, Artificial Sequence
  derived and/or modified sequence
atggccttcagcgagctgctggacctggtgggcggcctgggccggttccaggtgcttcaaacaatggcactgatggtgagcatcatgtggctgtgtacccagtcgatgttggagaatttttccgctgctgtgccctcacaccggtgttgggcacctcttctcgataattccactgcccaagcttcaattctgggttctctgtcccccgaagcacttttggccatcagtatcccccccggcccaaaccagaggcctcatcaatgtcggaggttccgacagcctcagtggcagttactagaccccaatgctaccgccacctcctggagcgaggccgacaccgagccttgcgttgacgggtgggtctacgatcggtctatttttacttcaaccattgttgcaaagtggaatttggtctgcgactcccatgccttgaaacctatggcccagtcaatctacctggccggcattcttgttggggctgccgcgtgcggaccagcttccgaccgctggttggctgagtcagctagatggctcctgaccactggtcggctcgactggggacttcaagaactgtggcgggtggccgcaatcaatgggaaaggggccgtgcaggacaccctaacaccagaggtattgttgtcagctatgagggaggagctgtcaatgggacagccccccgcgtcactcgggactctgcttaggatgccaggtctgaggttccgaacctgtatctctacactgtgctggtttgccttcggtttcaccttcttcggcttggcgctagatctgcaggctctgggctctaatatctttctgttgcaaatgttcataggagtggtggacattccagccaagatgggcgctctcctattgctctcccacctagggaggaggccgacgctggctgcgtccctgttgctggctggcctatgcatccttgctaatacgttagtcccccacgagatgggcgcccttagatccgctctggccgtactcggactgggaggggtaggagctgcctttacctgcattacaatctattccagcgaactatttccgacggttctgcggatgaccgcggttggccttgggcagatggccgctaggggcggagccatccttggcccactggttcggctgctcggggtccacggcccttggctgcccctgctggtgtacggaacggtgcccgtcctgagtggactagcggccctgctgctgccggaaacacagagcctgcccctccccgatacgatccaggacgtgcaaaatcaagctgtcaaaaaggcgactcacggaacattgggaaactcagttcttaaaagcactcagttttag

SEQ ID NO: 97106 - DNA, 1338 bp, Artificial Sequence
  derived and/or modified sequence
atggcttttagcgaactgctggatcttgtaggaggtctgggacgcttccaagttctacagacaatggcccttatggtcagtatcatgtggttgtgtacacagtccatgctcgaaaatttctccgccgctgtgccttctcacagatgctgggcacctctcttagacaattccaccgcccaggcctcgatccttgggtctctgtcccctgaggccctccttgccatcagcatcccaccgggaccaaatcagcgccctcaccagtgtaggcgctttaggcagccgcagtggcagttgctggacccgaatgcaacagctacttcttggagcgaagcagatacagagccctgcgttgacggctgggtgtacgataggtccatttttacttcaacaatcgtggctaaatggaacctcgtctgtgacagccacgcgctgaagccaatggcacagtccatctatttggccggtatactcgttggagctgccgcttgcggccctgcaagcgaccgctggctcgccgagtccgctcgctggcttctaaccaccgggagactggattggggactgcaagagctctggagggtagccgctattaatggcaagggagcggtgcaggatacccttaccccggaagtccttctcagcgcaatgagggaagagttaagcatgggccagcctcctgctagtctgggcacactattgagaatgccaggcctgagatttcgcacctgcatcagtacgctctgctggtttgccttcggattcacattttttggcctggctctggatctgcaggctttagggtctaatatctttctgctgcaaatgtttatcggcgtggtcgacattcccgcaaagatgggggctttgctcttacttagtcacttgggtcggcgaccgacgttggctgcctccttgctattggccggactgtgtattcttgctaatacgttggtcccacacgagatgggtgccttacgaagcgctctggctgttctcggcctggggggtgtgggtgcagccttcacctgtataactatttactcctctgagctcttccccaccgtactccgaatgacagccgtcggattgggtcagatggcggctaggggcggagctattctggggccactcgtgagactcctgggcgttcacggcccatggctcccactgctcgtttatggtaccgtccctgtgctgagcggtctagctgccctattgcttcctgaaacccagagtctgcctttaccggatacaattcaggatgtccagaaccaagccgtcaagaaggcgacccacggcaccctgggtaacagcgtcctgaagtcaactcagttttag

SEQ ID NO: 97107 - DNA, 2882 bp, Artificial Sequence
  derived and/or modified sequence
ccacagcaggtgagtggaggcaggagccacgggtggggccaggccacacagcctgggaggcgcaggggctgggcagctgccagtgacccaagcccacacagagacttgcacagctgccccagccccaaattagggggatcccctggcccaccttctcttggctcagccactctgggaggtgggcacacaggggcaccgaagggagcaggcagccctggcatcccacagccgccaggagaaaaacttaggcctccccaagacctggcacagagcaggccggccctggcccccaagcagaggaggctgcacctccctcgcgtctgtgcctgcctcaacgcgggttaaactttgaccaaggaaatgattgctaaactcgattccataagtgtcaccggtcacactttaattccagtctaaaattaaagtcttcagtctccacattccctactttccaaattcagctttcccgggaggtctggagcagctgcctctctggggagatgctggaggtctcggaatcacctcacgcggcctcagggcccagttggagccaccccaagtgacaccagcaggcagatgaccagagagcctgagcctccggccccgagtctgtgaagcctagccgctgggctggagaagccactgtgggcaccaccgtgggggaaacaggcccgttgccctggcctctttgccctgggccagcctttgtgaagtgggcccctcttctgggccccttgagtaggttccatggcattttctgaactcctggacctcgtgggtggcctgggcaggttccaggttctccagacgatggctctgatggtctccatcatgtggctgtgtacccagagcatgctggagaacttctcggccgccgtgcccagccaccgctgctgggcacccctcctggacaacagcacggctcaggccagcatcctagggagcttgagtcctgaggccctcctggctatttccatcccgccgggccccaaccagaggccccaccagtgccgccgcttccgccagccacagtggcagctcttggaccccaatgccacggccaccagctggagcgaggccgacacggagccgtgtgtggatggctgggtctatgaccgcagcatcttcacctccacaatcgtggccaagtggaacctcgtgtgtgactctcatgctctgaagcccatggcccagtccatctacctggctgggattctggtgggagctgctgcgtgcggccctgcctcagacaggtggctggcagagtcggcacgatggctcctcaccacaggcaggctggattggggcctgcaggagctgtggagggtggctgccatcaacggaaagggggcagtgcaggacaccctgacccctgaggtcttgctttcagccatgcgggaggagctgagcatgggccagcctcctgccagcctgggcaccctgctccgcatgcccggactgcgcttccggacctgtatctccacgttgtgctggttcgcctttggcttcaccttcttcggcctggccctggacctgcaggccctgggcagcaacatcttcctgctccaaatgttcattggtgtcgtggacatcccagccaagatgggcgccctgctgctgctgagccacctgggccgccgccccacgctggccgcatccctgttgctggcagggctctgcattctggccaacacgctggtgccccacgaaatgggggctctgcgctcagccttggccgtgctggggctgggcggggtgggggctgccttcacctgcatcaccatctacagcagcgagctcttccccactgtgctcaggatgacggcagtgggcttgggccagatggcagcccgtggaggagccatcctggggcctctggtccggctgctgggtgtccatggcccctggctgcccttgctggtgtatgggacggtgccagtgctgagtggcctggccgcactgcttctgcccgagacccagagcttgccgctgcccgacaccatccaagatgtgcagaaccaggcagtaaagaaggcaacacatggcacgctggggaactctgtcctaaaatccacacagttttagcctcctggggaacctgcgatgggacggtcagaggaagagacttcttctgttctctggagaaggcaggaggaaagcaaagacctccatttccagaggcccagaggctgccctctgaggtccccactctcccccagggctgcccctccaggtgagccctgcccctctcacagtccaaggggcccccttcaatactgaaggggaaaaggacagtttgattggcaggaggtgacccagtgcaccatcaccctgccctgccctcgtggcttcggagagcagaggggtcaggcccaggggaacgagctggccttgccaaccctctgcttgactccgcactgccacttgtccccccacacccgtccacctgcccagagctcagagctaaccaccatccatggtcaagacctctcctagctccacacaagcagtagagtctcagctccacagctttacccagaagccctgtaagcctggcccctggcccctccccatgtccctccaggcctcagccacctgcccgccacatcctctgcctgctgtccccttcccaccctcatccctgaccgactccacttaacccccaaacccagccccccttccaggggtccagggccagcctgagatgcccgtgaaactcctacccacagttacagccacaagcctgcctcctcccaccctgccagcctatgagttcccagagggttggggcagtcccatgaccccatgtcccagctccccacacagcgctgggccagagaggcattggtgcgagggattgaataaagaaacaaatgaatggc

SEQ ID NO: 97108 - DNA, 1338 bp, Artificial Sequence
  derived and/or modified sequence
atggccttcagcgagctgctggacctggtgggcggcctgggcagattccaggtgctgcagaccatggccctgatggtgagcatcatgtggctgtgcacccagagcatgctggagaacttcagcgccgccgtgcccagccacagatgctgggcccccctgctggacaacagcaccgcccaggccagcatcctgggcagcctgagccccgaggccctgctggccatcagcatcccccccggccccaaccagagaccccaccagtgcagaagattcagacagccccagtggcagctgctggaccccaacgccaccgccaccagctggagcgaggccgacaccgagccctgcgtggacggctgggtgtacgacagaagcatcttcaccagcaccatcgtggccaagtggaacctggtgtgcgacagccacgccctgaagcccatggcccagagcatctacctggccggcatcctggtgggcgccgccgcctgcggccccgccagcgacagatggctggccgagagcgccagatggctgctgaccaccggcagactggactggggcctgcaggagctgtggagagtggccgccatcaacggcaagggcgccgtgcaggacaccctgacccccgaggtgctgctgagcgccatgagagaggagctgagcatgggccagccccccgccagcctgggcaccctgctgagaatgcccggcctgagattcagaacctgcatcagcaccctgtgctggttcgccttcggcttcaccttcttcggcctggccctggacctgcaggccctgggcagcaacatcttcctgctgcagatgttcatcggcgtggtggacatccccgccaagatgggcgccctgctgctgctgagccacctgggcagaagacccaccctggccgccagcctgctgctggccggcctgtgcatcctggccaacaccctggtgccccacgagatgggcgccctgagaagcgccctggccgtgctgggcctgggcggcgtgggcgccgccttcacctgcatcaccatctacagcagcgagctgttccccaccgtgctgagaatgaccgccgtgggcctgggccagatggccgccagaggcggcgccatcctgggccccctggtgagactgctgggcgtgcacggcccctggctgcccctgctggtgtacggcaccgtgcccgtgctgagcggcctggccgccctgctgctgcccgagacccagagcctgcccctgcccgacaccatccaggacgtgcagaaccaggccgtgaagaaggccacccacggcaccctgggcaacagcgtgctgaagagcacccagttctag

SEQ ID NO: 97109 - DNA, 333 bp, Artificial Sequence
  derived and/or modified sequence
atgacttaccctccccacagggccttctctagatcagatgtgccataccccctgctgtcctcgccggtacaatggcctctttctctggtggtcggcgacaccagtacaaggtggccacagcaaccatctgcactggagtcggattgcccaggcccttctcacccatgcttagcggggctgttgggaccaatgcacccagtagacatccccctgtccaccgccctgcacagcaagcatcagagaaggttgacccaatgcgtcttgatggttcagagtccatctaagcagagatccctgtatcttttaaacaaaaagatcccacatgacgcctag

SEQ ID NO: 97110 - protein, 234 aa, Artificial Sequence
  derived and/or modified sequence
MNNKFDALKDDDSGDHDQNEENSTQKDGEKEKTERDKNQSSSKRKAVVPGPAEHPLQYNYTFWYSRRTPGRPTSSQSYEQNIKQIGTFASVEQFWRFYSHMVRPGDLTGHSDFHLFKEGIKPMWEDDANKNGGKWIIRLRKGLASRCWENLILAMLGEQFMVGEEICGAVVSVRFQEDIISIWNKTASDQATTARIRDTLRRVLNLPPNTIMEYKTHTDSIKDNSSFRNTKITL

SEQ ID NO: 97111 - DNA, 3448 bp, Artificial Sequence
  derived and/or modified sequence
gaagtcactccctgaggcagtggcgacagcggcggcgagaggatgaacaacaagttcgacgctttgaaagatgatgacagtggggaccatgatcagaatgaagaaaacagcacacagaaagatggtgagaaggaaaaaacggaacgagacaagaatcagagcagtagcaagagaaaggctgttgtccctggaccggcagagcatcccctgcagtacaactacactttttggtactccaggagaacccccggccgtcccacgagctcacagagctatgaacagaatatcaaacagattggcacctttgcctctgtggagcagttctggaggttttatagccacatggtacgtcctggggacctgacaggccacagtgacttccatctcttcaaagaaggaattaaacccatgtgggaggatgatgcaaataaaaatggtggcaagtggattattcggctgcggaagggcttggcctcccgttgctgggagaatctcattttggccatgctgggggaacagttcatggttggggaggagatctgtggggctgtggtgtctgtccgctttcaggaagacattatttcaatatggaataagactgccagtgaccaagcaaccacagcccgaatccgggacacacttcggcgagtgcttaacctacctcccaacaccattatggaatacaaaactcacaccgacagcatcaaggacaattcaagctttcgaaatacaaaaatcacattgtgagagtacacaagctggcaataatccttttctgtatgtgtgtgtttgtccgaaatggatgggaggcctccagccagtccttccattgctcactgaagggacgtccctgagccgtgcgctctccttttgcactcattcctggaggacggattccgctagacaccctccagcatcgctgactttataaagcggaaaaacggaaaacgtgactttgtaatagacaaacattgttttttaatggggttccatgggggggcgttcagcctttctgtttgctgtgtgctgtccagatgcctcttgggcgtcctgttgttctcttcccgtgttgtacgaagggtaccgtggccacgtgtacatgccagagctgttgatgagagttaccagtattatgaatgtctgtgcatccaggaaaagtgttctgttggagagtcccaaaatagctgtaaatgctctcttctagctctgccattaaattattgggacattttgtttctttctctcccctcctccaagcccaccactttctgaagctgtgttactgatgtgatgactgtccaggattttgtatcatcccctgccttatgccctccggtctcctctcctgtgggactctctccttcttaggcacagctgcacttagaattgtaatccagtggctctcactggtttcactgaggcagcttagagggaatgccttagtaaactgaactggagcagaatctagtttgattaggagctagattataatctaggttccaagtacagaatttggagctaaggactgtgactgaaatcattttcccatatgagcagaccctgtgtgtcaggcctgtttcccatatgagcagagcctgtgtgcaagtctgtttctggcatgtccctcattgaggaagggaagcaaaagctggttattgccaggcctattaacacttaatatgcaaattctatcatcctgaaactggggcatctgaggaaaaggtgaccttgctggatggctttatttgcatggctctgcctgtctgcagtggttgagtcctcatcacctggtatgtgtatgagcaaatgtgtgctgattgtgatgcccaggcagaaacctcttgaagactgctgcaggcatgctttaaaaatgaccagtcactcatcagagaagctgggtgatctgactccagaaggactgaagtcagagaagtcacaagagcacctaggattcaaataaatagcgtcagagtcctatagcaacctccaagtagcaccgtcttacttggctcttgtgagcaaagactgcagtaccttaaattaaggcctctctttaaaacatatgtggaagactaggggatccttggccacctggtctcagagaaatcatatgagagtaacaggcatttccttattgtatttgtactacactcttcctacttttccattcctgaacaccctctaattaccactgttttggggatgctttttttctgaaagaacggggagtacaggggccaaaagggaggtgcttctattacagggcaagttagatcagataagaagatctagcagtgatttaaactccaggaatatgaagagtgcattctggtgtccagacagttgtgaagggctcggcaaatataagagcaccattggctacatggagagcaaaggctgtctttgaagaccccagggaggtcttcacttttgcctaaattcagatttgccgtgaaaattccaaagagagcagatatttggatttgccctcctttgggcatctacctgactgttgtgtgtgtgggaaagtcagtgtgtatgtgtagagtgtgcttaggagtgagtgagtggtcaggcctcctggctaggtgtgttgtccatagttttgttgttgttgttgttgttgttcagagttttgaatcttacgttttctagagctgctcatgttttcccttcctttttgtcgttgtagtatttgacagttgtcttttccatcaaaaacatactggccctaggctggttagagcaaggggttatgcctgttaggcagcatcttacgcccagtgttctcccagatattctgcctaacaggtttaagtaggagattaaatagtcagtttatctaaaccctctatttttccaaactagcttgagaggtcttttcatctatttttactccatgggcctctgatatgctgagatgtggcacggttatgattatggtatcaccgttacagaggcaaagggataaaggtctaccagggccaacgtaaccagaatgtgaggagagtgaagagtcggtctccgctttgcacagtaccagaatgtgaggttgccactggagagtggagagtcggtctccactttgcacagttggagctgttctcctctaactcctttgctgggttttctgtttgaaattggcccctactcctctccagccctttactgggttttctgtttgaaattggcccctactcctctccagtgtctgctttttgaatccttctgttcgtgtgtgtgtgtgtgtgtgtgtgtgttccctatgatactggcagtggcaataattttccacccagagagaagcttgtggtccacaatgctcgaagaatgaatttccaagtatttgccagtggaaacggagcagaggctatgacaagagtgatttagtgttgcactttcagagcaattatctactgcagtaataaattgaaaatatcagcaagaa

SEQ ID NO: 97112 - DNA, 705 bp, Artificial Sequence
  derived and/or modified sequence
atgaacaacaagttcgatgcgctgaaggacgatgattccggcgatcacgatcagaacgaggagaattctactcagaaggatggggagaaagagaagaccgaacgggacaagaaccagtcaagtagcaagaggaaggcagtggttcctgggccggcggaacatcctctgcagtacaattacactttctggtactccagaagaacaccaggtaggcccacatcctcacagtcttacgaacaaaacatcaaacagatcggcactttcgcgtctgtcgaacaattctggcgcttctactcccatatggtgcggccaggggacctgaccggccacagcgactttcacctttttaaggaggggataaaaccgatgtgggaagacgacgcaaacaagaatggcgggaagtggatcattaggcttagaaaagggctcgcttcccgctgctgggaaaacctgatcctcgccatgctgggggagcaatttatggtgggagaagaaatttgtggcgcagtcgtctctgtgagattccaagaggatattatctcaatctggaataaaacggccagcgatcaggctaccaccgcacgcatacgcgatactctccgtagagtcctgaatctgcccccgaacactatcatggaatataagacgcatactgatagtattaaggacaatagctctttccgcaatactaagatcactctttag

SEQ ID NO: 97113 - DNA, 705 bp, Artificial Sequence
  derived and/or modified sequence
atgaacaacaagtttgatgccctgaaggatgatgattctggggaccatgaccagaatgaggagaacagcacccagaaggatggagagaaggagaagacagagcgggacaagaaccagagcagcagcaagaggaaggctgtggtgcccggccctgctgagcaccccctgcagtacaactacaccttctggtacagcaggaggaccccaggccggcccaccagcagccagagctatgagcagaacatcaagcagatcggcacctttgcctctgtggagcagttctggaggttctacagccacatggtgcggcctggggacctgaccggccacagcgacttccacctgttcaaggagggcatcaagcccatgtgggaggatgatgccaacaagaatggaggcaagtggatcatccggctgaggaagggcctggccagccgctgctgggagaacctgatcctggccatgctgggggagcagttcatggtgggggaggagatctgtggggctgtggtgtctgtgcgcttccaggaggacatcatcagcatctggaacaagacagccagtgaccaggccaccacagcccgcatccgggacaccctgcggcgggtgctgaacctgccccccaacaccatcatggagtacaagacccacacagacagcatcaaggacaacagcagcttcaggaacaccaagatcaccctgtag

SEQ ID NO: 97114 - DNA, 705 bp, Artificial Sequence
  derived and/or modified sequence
atgaacaacaagttcgacgccctgaaggacgacgacagcggcgaccacgaccaaaacgaagagaattctacacaaaaagacggggaaaaggaaaagacagagcgggataagaatcagagcagtagtaagcgaaaagcggtcgtcccaggccccgctgagcacccactgcagtacaattatactttctggtactctcgcaggacacctgggcgccctacctcttctcagtcctatgagcaaaacattaaacagatcggcacctttgcctccgttgaacagttttggcgcttttactcacatatggtccggcccggggacctgaccggccactccgatttccacctgttcaaagaggggattaaacctatgtgggaggacgatgccaacaagaacggcgggaaatggatcatacgactgcggaaagggttggcctcaaggtgttgggagaatctcattctggcaatgcttggcgagcaattcatggtaggcgaagagatctgtggagccgttgtctccgtgagattccaggaagatatcatttctatctggaataagaccgcttcggaccaggctacaacagctaggattcgggatactttgcgcagagtacttaacctgcctccaaatacgattatggagtacaaaacacacacagattccattaaagataacagcagcttccggaatactaagatcaccttgtag

SEQ ID NO: 97115 - DNA, 705 bp, Artificial Sequence
  derived and/or modified sequence
atgaataataagtttgacgctttgaaggacgacgattccggcgaccacgaccagaatgaggagaattccacacagaaagatggggagaaagagaagactgagcgcgacaagaaccagtccagcagcaagaggaaggcagtggtacccggtcctgccgaacaccccctgcaatacaactatacgttctggtatagccggagaaccccagggagaccaacctcctcccagtcatacgagcagaacataaagcagatcgggacctttgcctctgtcgagcagttctggcggttttatagccatatggtgcgccctggggacctcactggccactcagacttccacctgttcaaggaggggatcaagccgatgtgggaagacgacgcaaacaagaatggaggaaaatggatcatccgtttgagaaagggtctggcttcgaggtgctgggagaacctgatcctggcgatgctgggtgaacagtttatggtcggtgaggagatctgtggtgctgtcgtgtccgtccggtttcaagaagacattatcagtatttggaataagactgcgagtgaccaggccacaaccgctcgcatccgggacacgcttaggcgagtccttaacttgccaccaaacactataatggagtataagacccacactgacagtattaaagacaattctagtttccgcaacacaaaaatcacgctgtag

SEQ ID NO: 97116 - DNA, 705 bp, Artificial Sequence
  derived and/or modified sequence
atgaacaacaagttcgacgccctgaaggacgacgacagcggcgaccacgaccagaacgaggagaacagcacccagaaggacggcgagaaggagaagaccgagagagacaagaaccagagcagcagcaagagaaaggccgtggtgcccggccccgccgagcaccccctgcagtacaactacaccttctggtacagcagaagaacccccggcagacccaccagcagccagagctacgagcagaacatcaagcagatcggcaccttcgccagcgtggagcagttctggagattctacagccacatggtgagacccggcgacctgaccggccacagcgacttccacctgttcaaggagggcatcaagcccatgtgggaggacgacgccaacaagaacggcggcaagtggatcatcagactgagaaagggcctggccagcagatgctgggagaacctgatcctggccatgctgggcgagcagttcatggtgggcgaggagatctgcggcgccgtggtgagcgtgagattccaggaggacatcatcagcatctggaacaagaccgccagcgaccaggccaccaccgccagaatcagagacaccctgagaagagtgctgaacctgccccccaacaccatcatggagtacaagacccacaccgacagcatcaaggacaacagcagcttcagaaacaccaagatcaccctgtag

SEQ ID NO: 97117 - protein, 188 aa, Artificial Sequence
  derived and/or modified sequence
MNNKFDALKDDDSGDHDQNEENSTQKDGEKEKTERDKNQSSSKRKVEQFWRFYSHMVRPGDLTGHSDFHLFKEGIKPMWEDDANKNGGKWIIRLRKGLASRCWENLILAMLGEQFMVGEEICGAVVSVRFQEDIISIWNKTASDQATTARIRDTLRRVLNLPPNTIMEYKTHTDSIKYVLGGYGRTCP

SEQ ID NO: 97118 - DNA, 1372 bp, Artificial Sequence
  derived and/or modified sequence
actccctgaggcagtggcgacagcggcggcgagaggatgaacaacaagttcgacgctttgaaagatgatgacagtggggaccatgatcagaatgaagaaaacagcacacagaaagatggtgagaaggaaaaaacggaacgagacaagaatcagagcagtagcaagagaaaggtggagcagttctggaggttttatagccacatggtacgtcctggggacctgacaggccacagtgacttccatctcttcaaagaaggaattaaacccatgtgggaggatgatgcaaataaaaatggtggcaagtggattattcggctgcggaagggcttggcctcccgttgctgggagaatctcattttggccatgctgggggaacagttcatggttggggaggagatctgtggggctgtggtgtctgtccgctttcaggaagacattatttcaatatggaataagactgccagtgaccaagcaaccacagcccgaatccgggacacacttcggcgagtgcttaacctacctcccaacaccattatggaatacaaaactcacaccgacagcatcaagtacgtgttggggggttatgggaggacgtgtccctaagcttagtataagtagatctgtagttgggcccagaggaatatggccggacaggagacttacttgtggagaagggacagaccaggccttccctctagggcttctggctacttgctgcagttctttgtcagcgaggctccctgccacctatactaccaggtgctttgtagcagagagagcccatctgcagaaacccagttgtactacctgggcttgcttaatttctacaggctgtcttgtctttcatatgctaaccactatcttaaaatgaaagacaagtgcttttctttttcttgctgttttttaagataatttcaccctgcccaccctcaccccacttctgcatgtctttttaacttgttagcttcagtctattttctttgtcctgggatactgactacttatcaggaatgactccatttccttgtgtatagagctgactcttagaagaagggggatagtgtgtgtgtgagagagcagaatcaaagggaagcatgaaggccacagggaaaataagcttggcaatctccctaggactcagggaaatagagctctctgtccacagtgagaatcactgttaggcttgctcctcagtgattgagtgtcagaagtaagctcaggctattgtgaaaaagtgtggggagtggctgtcagattgtctcaaagctggagggagagctagccagctaagagttaggactcttaggtttagttctctcatatggccccataccaatatgtgcctttgacaagtgtctttgcaactttgctt

SEQ ID NO: 97119 - DNA, 567 bp, Artificial Sequence
  derived and/or modified sequence
atgaataataagtttgacgctctcaaggatgacgactccggggatcacgatcagaacgaggaaaactcgacccagaaagacggcgagaaggagaaaactgagcgtgacaagaaccagagctctagcaagcgtaaagtggagcagttttggagattctacagccacatggtgagaccaggtgacttgaccgggcacagtgacttccacttattcaaggaaggaatcaaaccaatgtgggaggacgatgcaaacaaaaacggcgggaagtggataattaggctcaggaagggtctggcaagccggtgttgggagaatctgatcctggcaatgctgggcgagcaatttatggtcggggaggagatctgtggcgcagtagtgtccgtcaggttccaggaggacatcatttctatatggaataagactgccagtgatcaagcaacgacagcccggatcagggatacactacgtcgggtactaaatctgccaccaaacaccattatggagtataaaacacataccgacagcattaagtatgtgcttggggggtacggaagaacatgcccttag

SEQ ID NO: 97120 - DNA, 567 bp, Artificial Sequence
  derived and/or modified sequence
atgaacaacaagtttgatgccctgaaggatgatgattctggggaccatgaccagaatgaggagaacagcacccagaaggatggagagaaggagaagacagagcgggacaagaaccagagcagcagcaagaggaaggtggagcagttctggaggttctacagccacatggtgcggcctggggacctgaccggccacagcgacttccacctgttcaaggagggcatcaagcccatgtgggaggatgatgccaacaagaatggaggcaagtggatcatccggctgaggaagggcctggccagccgctgctgggagaacctgatcctggccatgctgggggagcagttcatggtgggggaggagatctgtggggctgtggtgtctgtgcgcttccaggaggacatcatcagcatctggaacaagacagccagtgaccaggccaccacagcccgcatccgggacaccctgcggcgggtgctgaacctgccccccaacaccatcatggagtacaagacccacacagacagcatcaagtatgtgctgggcggctacggccgcacctgcccctag

SEQ ID NO: 97121 - DNA, 567 bp, Artificial Sequence
  derived and/or modified sequence
atgaacaacaagttcgacgccctgaaggacgacgacagcggcgaccacgatcagaatgaggagaatagcacacagaaagatggggaaaaggagaagacggaacgcgataagaatcagtcctcttcgaagcgtaaagtcgaacagttctggagattttacagccatatggtgcggcctggagacttgacaggccactccgatttccatctctttaaggaagggattaaacccatgtgggaggatgacgccaacaagaatggggggaaatggatcattagattgcggaaaggcctggccagcaggtgttgggaaaacctaattctcgccatgcttggggagcagttcatggttggagaggaaatttgtggagccgtagtgagcgttcggttccaggaagacataatctccatttggaacaaaacagcctctgaccaagccactactgcaagaatccgagacacacttcgcagggtgctcaatctccccccgaacacaatcatggaatacaagactcacactgacagtatcaaatatgtgctggggggatacgggagaacatgtccatag

SEQ ID NO: 97122 - DNA, 567 bp, Artificial Sequence
  derived and/or modified sequence
atgaataacaaattcgatgcccttaaagacgatgatagtggagaccatgaccaaaacgaagagaatagcacccagaaagacggggaaaaggaaaaaaccgagcgtgacaaaaatcaatcaagttcgaaacggaaagtggagcagttttggcgcttctatagccatatggtgcgcccaggagacttgacaggccactcggattttcatttattcaaagagggcatcaagcctatgtgggaagacgatgctaataaaaacgggggaaagtggataatccgacttcgcaagggtctcgctagtagatgttgggagaaccttatcttagcgatgctgggcgagcagttcatggtgggcgaggaaatctgcggcgcagttgtctccgttagattccaggaggatattatcagcatctggaacaagaccgcaagcgaccaggcgaccacagcaaggattcgtgacaccttgaggcgtgtgttaaacctcccacctaataccatcatggaatacaagactcatacagatagcattaaatacgttcttggagggtatggtcggacgtgcccctag

SEQ ID NO: 97123 - DNA, 567 bp, Artificial Sequence
  derived and/or modified sequence
atgaacaacaagttcgacgccctgaaggacgacgacagcggcgaccacgaccagaacgaggagaacagcacccagaaggacggcgagaaggagaagaccgagagagacaagaaccagagcagcagcaagagaaaggtggagcagttctggagattctacagccacatggtgagacccggcgacctgaccggccacagcgacttccacctgttcaaggagggcatcaagcccatgtgggaggacgacgccaacaagaacggcggcaagtggatcatcagactgagaaagggcctggccagcagatgctgggagaacctgatcctggccatgctgggcgagcagttcatggtgggcgaggagatctgcggcgccgtggtgagcgtgagattccaggaggacatcatcagcatctggaacaagaccgccagcgaccaggccaccaccgccagaatcagagacaccctgagaagagtgctgaacctgccccccaacaccatcatggagtacaagacccacaccgacagcatcaagtacgtgctgggcggctacggcagaacctgcccctag

SEQ ID NO: 97124 - DNA, 254 bp, Artificial Sequence
  derived and/or modified sequence
cacctagaaccatccagggctgaaaagtcccctccaaaccacgtgatgaggaacttgaggcaagtcaccagcccctgatcatttcgcctaaaagagcaaggactagagttcctgacctccaggccagtccctgatccctgacctaatgttatcgcggaatgatgatatatgtatctacgggggcctggggctgggcgggctcctgcttctggcagtggtccttctgtccgcctgcctgtgttggctgcatcgaa

SEQ ID NO: 97125 - DNA, 259 bp, Artificial Sequence
  derived and/or modified sequence
cctatgttctggggattagcaatgaggaacttgaggcaagtcaccagcccctgatcatttcgcctaaaagagcaaggactagagttcctgacctccaggccagtccctgatccctgacctaatgttatcgcggaatgatgatatatgtatctacgggggcctggggctgggcgggctcctgcttctggcagtggtccttctgtccgcctgcctgtgttggctgcatcgaagagaacactgcctggccctggagccactg

SEQ ID NO: 97126 - protein, 282 aa, Artificial Sequence
  derived and/or modified sequence
MKGQQKTAETEEGTVQIQEGAVATGEDPTSVAIASIQSAATFPDPNVKYVFRTENGGQVMYRVIQVSEGQLDGQTEGTGAISGYPATQSMTQAVIQGAFTSDDAVDTEGTAAETHYTYFPSTAVGDGAGGQFFVMMSPQEVLQGGSQRSIAPRTHPYSPKSEAPRTTRDEKRRAQHNEVERRRRDKINNWIVQLSKIIPDCSMESTKSGQSKGGILSKACDYIQELRQSNHRLSEELQGLDQLQLDNDVLRQQVEDLKNKNLLLRAQLRHHGLEVVIKNDSN

SEQ ID NO: 97127 - protein, 310 aa, Artificial Sequence
  derived and/or modified sequence
MKGQQKTAETEEGTVQIQEGAVATGEDPTSVAIASIQSAATFPDPNVKYVFRTENGGQVMYRVIQVSEGQLDGQTEGTGAISGYPATQSMTQAVIQGAFTSDDAVDTEGTAAETHYTYFPSTAVGDGAGGTTSGSTAAVVTTQGSEALLGQATPPGTGQFFVMMSPQEVLQGGSQRSIAPRTHPYSPKSEAPRTTRDEKRRAQHNEVERRRRDKINNWIVQLSKIIPDCSMESTKSGQSKGGILSKACDYIQELRQSNHRLSEELQGLDQLQLDNDVLRQQVEDLKNKNLLLRAQLRHHGLEVVIKNDSN

SEQ ID NO: 97128 - protein, 251 aa, Artificial Sequence
  derived and/or modified sequence
MYRVIQVSEGQLDGQTEGTGAISGYPATQSMTQAVIQGAFTSDDAVDTEGTAAETHYTYFPSTAVGDGAGGTTSGSTAAVVTTQGSEALLGQATPPGTGQFFVMMSPQEVLQGGSQRSIAPRTHPYSPKSEAPRTTRDEKRRAQHNEVERRRRDKINNWIVQLSKIIPDCSMESTKSGQSKGGILSKACDYIQELRQSNHRLSEELQGLDQLQLDNDVLRQQVEDLKNKNLLLRAQLRHHGLEVVIKNDSN

SEQ ID NO: 97129 - DNA, 1831 bp, Artificial Sequence
  derived and/or modified sequence
aacatggccgcgggctggaagtgcgcatgagcagctgtctatggagatacctaggccgggagagggagaacacagttggagaaaatcggcagctgagacggccttggccggacttagcactcaggcctgtgaatcaggagatacaaagacctccaaaaaaggaccagttcctcggatgtgccccctcacagagagatgaaggggcagcagaaaacagctgaaacggaagaggggacagtgcagattcaggaaggtgcagtggctactggggaagacccaaccagtgtggctattgccagcatccagtcagctgccaccttccctgaccccaacgtcaagtacgtcttccgaactgagaatgggggccaggtgatgtacagggtgatccaggtgtctgaggggcagctggatggccaaactgagggaactggcgccatcagtggctaccctgccactcaatccatgacccaggcggtgatccagggtgctttcaccagtgatgatgcagttgacacggaggggacagctgctgagacgcactatacttacttccccagcacggcagtgggagatggggcagggggtaccacatcggggagtacagctgctgttgttactacccagggctcagaggcactgctggggcaggcgacccctcctggcactggtcaattctttgtgatgatgtcaccacaagaagtactgcagggaggaagccagcgctcaattgcccctaggactcacccttattccccgaagtcagaagctccccggacgactcgggatgagaaacgcagggctcagcataatgaagtggagcgtcgccgccgagacaagatcaacaactggatcgtgcagctctccaagataatcccagactgctctatggagagcaccaagtctggccagagtaaaggtgggattctatccaaagcttgtgattatatccaggagcttcggcagagtaaccaccgcttgtctgaagaactgcagggacttgaccaactgcagctggacaatgacgtgcttcgacaacaggtggaagatcttaaaaacaagaatctgctgcttcgagctcagttgcggcaccacggattagaggtcgtcatcaagaatgacagcaactaactatggggattcaggggctttgggcccaagaactgcagatagcccaggagcaacagcctaatcccgtgcccctttccttcactgccccacttctggcatgggacagggggaagttcagaaggtgtgtccttgaactgaggccctgtgatatggcggcctgcagtggtgtgaaacacacaatgtggacgtgcactgacagccttgcccacccccaccatgcagcccctgggcccttgtgctcctctcgcacaatgcatgtgctgtctccatgctggatactggacacactaaactctggggcttgtcctgtgcttgcttagagtgcccagcagaggtttgctgacaggtgatgctctggcttgccccaggactctggcacttccattggttcttcctttccctggagctgaggtttagatgtgcaacctgtggctcaggggagcaagcttacacaagaagtgagggaaggatgtttagcagtggctggtgcccatgaagaggagattggccagtgagaagctgaggcctatgcagacatctctggagccagagagaacaacaggcaggggcccacttggggccttcccccttgtgggggtcgttttttttttttcttttcttttttttttttttttttttttttttttaagataaaattgttcaaagccaaaaaaaaaaaaaaaaaaaaaaaaaaaaaaaaaaa

SEQ ID NO: 97130 - DNA, 849 bp, Artificial Sequence
  derived and/or modified sequence
atgaagggccagcagaagaccgccgagaccgaggagggcaccgtgcagatccaggagggcgccgtggccaccggcgaggaccccaccagcgtggccatcgccagcatccagagcgccgccaccttccccgaccccaacgtgaagtacgtgttcagaaccgagaacggcggccaggtgatgtacagagtgatccaggtgagcgagggccagctggacggccagaccgagggcaccggcgccatcagcggctaccccgccacccagagcatgacccaggccgtgatccagggcgccttcaccagcgacgacgccgtggacaccgagggcaccgccgccgagacccactacacctacttccccagcaccgccgtgggcgacggcgccggcggccagttcttcgtgatgatgagcccccaggaggtgctgcagggcggcagccagagaagcatcgcccccagaacccacccctacagccccaagagcgaggcccccagaaccaccagagacgagaagagaagagcccagcacaacgaggtggagagaagaagaagagacaagatcaacaactggatcgtgcagctgagcaagatcatccccgactgcagcatggagagcaccaagagcggccagagcaagggcggcatcctgagcaaggcctgcgactacatccaggagctgagacagagcaaccacagactgagcgaggagctgcagggcctggaccagctgcagctggacaacgacgtgctgagacagcaggtggaggacctgaagaacaagaacctgctgctgagagcccagctgagacaccacggcctggaggtggtgatcaagaacgacagcaactag

SEQ ID NO: 97131 - DNA, 933 bp, Artificial Sequence
  derived and/or modified sequence
atgaagggccagcagaagaccgccgagaccgaggagggcaccgtgcagatccaggagggcgccgtggccaccggcgaggaccccaccagcgtggccatcgccagcatccagagcgccgccaccttccccgaccccaacgtgaagtacgtgttcagaaccgagaacggcggccaggtgatgtacagagtgatccaggtgagcgagggccagctggacggccagaccgagggcaccggcgccatcagcggctaccccgccacccagagcatgacccaggccgtgatccagggcgccttcaccagcgacgacgccgtggacaccgagggcaccgccgccgagacccactacacctacttccccagcaccgccgtgggcgacggcgccggcggcaccaccagcggcagcaccgccgccgtggtgaccacccagggcagcgaggccctgctgggccaggccaccccccccggcaccggccagttcttcgtgatgatgagcccccaggaggtgctgcagggcggcagccagagaagcatcgcccccagaacccacccctacagccccaagagcgaggcccccagaaccaccagagacgagaagagaagagcccagcacaacgaggtggagagaagaagaagagacaagatcaacaactggatcgtgcagctgagcaagatcatccccgactgcagcatggagagcaccaagagcggccagagcaagggcggcatcctgagcaaggcctgcgactacatccaggagctgagacagagcaaccacagactgagcgaggagctgcagggcctggaccagctgcagctggacaacgacgtgctgagacagcaggtggaggacctgaagaacaagaacctgctgctgagagcccagctgagacaccacggcctggaggtggtgatcaagaacgacagcaactag

SEQ ID NO: 97132 - DNA, 849 bp, Artificial Sequence
  derived and/or modified sequence
atgaagggacagcaaaaaacagccgagaccgaggaagggactgttcagatacaggaaggcgctgtcgctacaggagaggaccctaccagcgtggctatcgcatcaatccagtccgccgctacatttccggatcccaatgtgaaatatgtgtttagaactgaaaacggtgggcaggttatgtatagggtgatacaggttagtgaggggcaactagatggccagactgaggggacgggcgctattagtgggtacccggccacccagtcaatgacacaggcagtcatccaaggcgcctttacaagcgatgacgcagtcgatactgagggaacagccgccgagacccactacacatatttcccttctacagcggtcggagatggtgcgggcggccaattttttgtgatgatgagccctcaggaggtactgcagggcggctctcagcggagcatcgctccccggacacatccatactcccctaagtccgaggctcctagaaccacacgagacgagaagcggcgagcacagcacaatgaagtcgagagacggcgacgggacaagatcaataactggatagtgcagcttagcaagatcatcccggactgctccatggagagtaccaagtcagggcagagtaagggggggatattaagcaaggcctgcgactatattcaggaattgaggcaatccaaccaccgcttgtccgaggagcttcaagggctcgaccaactgcagctggataacgatgtgctacggcagcaggtcgaggacctcaaaaacaagaacttattgttgcgggcccagctacgccatcacggtctcgaggttgtgataaagaacgactcaaattag

SEQ ID NO: 97133 - DNA, 933 bp, Artificial Sequence
  derived and/or modified sequence
atgaagggtcagcaaaaaactgctgagaccgaagaaggtactgtccagatccaagagggtgctgtcgctaccggtgaagacccaaccagcgtggccatcgccagtatacagtctgccgcgacctttcctgaccccaatgtaaaatatgtgttcagaaccgaaaatggcggtcaggtcatgtacagagtcattcaggtcagtgaaggtcaattggacgggcagaccgaaggaaccggggctattagcggatatcccgccactcaaagcatgacccaggctgtgattcaaggagcgtttacctcagatgacgcggtagatactgagggtactgctgcagaaacacactacacatattttccgtctaccgctgtgggggatggcgccggtgggaccacatcggggagcacagccgcggtcgtcacaacacaggggagtgaagctttgctcggacaggccaccccacccggaacaggacagttttttgtcatgatgtcccctcaggaggtgttacaggggggttcccagagatctattgccccaagaacccacccatactcgcccaaaagcgaggcccctcggacaacacgggacgagaagcgacgcgcccaacataatgaggtagagcggcggaggcgcgacaagattaataactggatcgtgcagctgagcaagataatccccgattgcagcatggaatccactaagtctggacagagcaaagggggcattctgtctaaggcttgcgattacattcaagagctgcgacagagtaaccacaggctgtccgaagagctccagggactcgatcagcttcagctggacaacgatgttttacggcagcaggttgaggatcttaagaataaaaatttacttcttagagctcagctacgacaccacgggttggaagtcgtgataaaaaatgactcaaattag

SEQ ID NO: 97134 - DNA, 933 bp, Artificial Sequence
  derived and/or modified sequence
atgaaaggccagcagaaaacagctgagaccgaggaaggtactgtccagatccaggaaggggctgtagccacaggggaagacccgacaagcgttgcaattgcatctatccagtccgccgcgactttccccgatcccaacgttaaatatgtcttcagaacggaaaatggcggacaagtaatgtaccgtgtcattcaggtgtccgaggggcagctggacggccagacggaaggcaccggggccatcagcgggtaccccgccactcaatctatgacccaagccgttatccaaggagcctttacttctgatgatgccgtggacaccgagggtacagccgccgagactcactatacatattttccctccactgctgtcggcgacggcgccgggggcactactagcggttcaaccgccgcagtcgtgacaacgcaggggagtgaagcacttttgggccaggccacaccccctggcacgggacagtttttcgtcatgatgtctcctcaggaggtattgcaaggtgggtcacagaggagcatcgctcctcggacccacccttacagcccaaaaagtgaggccccgcggaccacaagggatgagaagcgcagggcccaacacaacgaagtggagcgcaggcggcgagacaaaattaataactggatcgtacaactgagcaagatcatcccagattgttccatggagtctacaaagagcggccagagcaaggggggaatcctgagtaaggcatgtgactatattcaggaacttcggcagagcaaccatagactgtccgaagagctccaaggtctggaccaactccaactggacaatgatgtgctcaggcaacaggtggaagatctaaagaataagaacctgctactgcgcgcacagctgcggcaccacggactcgaggttgtgattaaaaatgactctaactag

SEQ ID NO: 97135 - DNA, 849 bp, Artificial Sequence
  derived and/or modified sequence
atgaagggccagcagaagacagctgagacagaggagggcaccgtgcagatccaggagggcgctgtggccaccggggaggaccccacctctgtggccatcgccagcatccagagcgctgccaccttcccagaccccaacgtgaagtatgtgttcagaacagaaaatggaggccaggtgatgtacagagtcatccaggtgtctgagggccagctggatggccagacagagggcaccggggccatcagcggctacccagccacccagagcatgacccaggccgtcatccagggcgccttcaccagtgatgatgctgtggacacagagggcacagctgctgagacccactacacctacttccccagcacagctgtgggagatggagctgggggccagttctttgtgatgatgagcccccaggaggtgctgcagggcggcagccagaggagcatcgcccccaggacccacccctacagccccaagtctgaggcccccaggaccaccagagatgagaagaggcgggcccagcacaatgaggtggagaggagaagaagagacaagatcaacaactggatcgtgcagctgagcaagatcatcccagactgcagcatggagagcaccaagagcggccagagcaagggcggcatcctgagcaaggcctgtgactacatccaggagctgcggcagagcaaccaccggctgtctgaggagctgcagggcctggaccagctgcagctggacaatgatgtgctgcggcagcaggtggaggacctgaagaacaagaacctgctgctgcgggcccagctgcggcaccacggcctggaggtggtgatcaagaatgacagcaactag

SEQ ID NO: 97136 - DNA, 933 bp, Artificial Sequence
  derived and/or modified sequence
atgaagggccagcagaagacagctgagacagaggagggcaccgtgcagatccaggagggcgctgtggccaccggggaggaccccacctctgtggccatcgccagcatccagagcgctgccaccttcccagaccccaacgtgaagtatgtgttcagaacagaaaatggaggccaggtgatgtacagagtcatccaggtgtctgagggccagctggatggccagacagagggcaccggggccatcagcggctacccagccacccagagcatgacccaggccgtcatccagggcgccttcaccagtgatgatgctgtggacacagagggcacagctgctgagacccactacacctacttccccagcacagctgtgggagatggagctgggggcaccaccagcggcagcacagctgctgtggtgaccacccagggcagcgaggccctgctgggccaggccaccccacctggcaccggccagttctttgtgatgatgagcccccaggaggtgctgcagggcggcagccagaggagcatcgcccccaggacccacccctacagccccaagtctgaggcccccaggaccaccagagatgagaagaggcgggcccagcacaatgaggtggagaggagaagaagagacaagatcaacaactggatcgtgcagctgagcaagatcatcccagactgcagcatggagagcaccaagagcggccagagcaagggcggcatcctgagcaaggcctgtgactacatccaggagctgcggcagagcaaccaccggctgtctgaggagctgcagggcctggaccagctgcagctggacaatgatgtgctgcggcagcaggtggaggacctgaagaacaagaacctgctgctgcgggcccagctgcggcaccacggcctggaggtggtgatcaagaatgacagcaactag

SEQ ID NO: 97137 - DNA, 849 bp, Artificial Sequence
  derived and/or modified sequence
atgaagggccagcagaagaccgccgagaccgaggagggcaccgtgcagatccaggagggtgccgttgctactggcgaggacccaacttcagtggctattgcctctatacagagcgccgccacatttccagaccctaacgtaaaatatgttttcagaacggagaatgggggccaggttatgtaccgggtaatacaggtctcagaggggcagctcgatgggcagacagagggcaccggggcaattagtggctatcctgcgactcagtccatgactcaggcagttatacagggtgctttcaccagcgatgatgcagtcgatactgaaggtacagcagcagagactcattacacttactttccaagtactgctgtgggggatggtgccggggggcagttttttgtgatgatgagccctcaggaagtgctccagggcggaagccagagaagcatcgccccaaggacccatccatactcccccaagagcgaggccccaagaactaccagggacgagaaaagaagggcgcaacataacgaagtcgagcgtagacgccgggataagattaataactggattgtgcaactctccaagattattcctgattgtagcatggagagtaccaagagcggccagtccaaaggaggcatcctgtccaaggcatgtgactacatacaggagctgcgccagagtaatcacaggttatcagaagagttgcaaggcctggatcagttacagctcgataatgacgttcttcgccagcaggtggaggatctaaagaataagaatctgctactccgtgcccagcttcggcaccatggtctggaagtcgtgatcaaaaatgactcaaactag

SEQ ID NO: 97138 - DNA, 933 bp, Artificial Sequence
  derived and/or modified sequence
atgaagggccagcagaagaccgccgagaccgaggagggcaccgtgcagattcaggagggtgctgttgcaactggagaggatcccactagtgtcgcgattgcctccatccagagcgctgccaccttcccggacccaaatgtgaagtatgtcttccgaacagagaatggagggcaggtgatgtaccgggtgattcaagtgtcagagggtcagctcgacgggcagaccgaaggcactggcgcaatttccggctaccctgccacccaaagcatgacccaggctgtcatccagggggcgttcacgtctgacgatgcagtggacaccgaaggcaccgcggccgaaacgcattacacatactttccctcgactgccgtcggggacggtgccggcggcacaacgtcaggttcaaccgcagccgtggttacaacacaggggagcgaagcattactcggacaggccacacctcctggaacaggccagtttttcgtgatgatgagcccccaggaagtcttgcaaggagggtcccagcgttccatcgcaccccgtactcacccctatagccccaagtcagaggccccacgcacaacacgcgacgaaaagcggagggcccagcataatgaagtggagaggcgaagacgcgacaagatcaataactggattgtgcagttatctaagataatcccagactgcagcatggaatccacgaagtctgggcaatccaaagggggcatcttaagcaaggcttgtgattatatccaggaattgcgacaaagtaaccataggctgagcgaggagcttcaggggctcgaccaactgcagttagacaacgatgtactgcgccagcaggtggaggatctcaagaacaaaaatctgcttcttcgcgcacagttacggcaccacggcctggaggtggtcattaagaatgatagtaactag

SEQ ID NO: 97139 - DNA, 933 bp, Artificial Sequence
  derived and/or modified sequence
atgaagggccagcagaagaccgccgagaccgaggagggcaccgtgcagattcaggagggagcggtggccacaggagaagatcccaccagtgtggcaattgccagcatacagtccgctgctaccttcccagatccaaacgtgaagtatgtctttcggactgagaatgggggacaagtaatgtatagagtcattcaagtgagcgaaggtcagctggatggtcagaccgagggcacgggggccattagcggctatcctgctacacagtccatgactcaggcagtaattcagggggcttttacatctgacgacgctgtggacactgaaggcaccgctgctgagacccactacacctacttccctagcaccgctgtgggggatggggcaggaggaaccacctcggggtctaccgcggcagttgttactacacagggcagtgaggcactgctagggcaggcaactccacccgggaccgggcagttcttcgtgatgatgtcacctcaggaggtgctgcaaggtggaagccagcggagcatcgccccacgaacacacccttatagccccaagagtgaggccccgcgcaccactcgtgacgagaagagacgagcacagcataatgaagtggagaggcgcaggagagataaaataaacaattggatcgtgcaattatccaagataatccctgattgctccatggagagcacgaagtctggccagagcaagggcgggatactgagtaaggcgtgcgactatattcaggagctgagacagtctaatcatcggttatccgaagaactgcaaggactggaccagcttcagctggataatgacgtgctgcgccagcaggtggaggaccttaaaaacaagaatctgctcctgcgtgctcagctgcgacatcacggactcgaggtcgttattaagaatgattcaaactag

SEQ ID NO: 97140 - DNA, 849 bp, Artificial Sequence
  derived and/or modified sequence
atgaagggacagcagaagaccgctgaaacggaggagggcacggtccaaattcaggagggtgcggttgctaccggggaggatcccacatcagtagccattgcaagcatacagtctgcagctacttttcccgatcccaacgtgaaatacgtttttagaactgagaacggtggacaagtgatgtacagggtgattcaggtgagcgagggccaattggacggccagaccgagggcactggggctatctcaggatatcctgccactcagtcgatgacccaagccgttattcagggagcatttacatccgatgatgccgtggacactgaagggaccgcagccgagacacactacacctacttcccgtcgactgctgtcggggacggcgcagggggtcagttttttgtgatgatgtccccccaagaagtccttcagggagggagtcagaggagtatcgctccccgtactcacccctactctcctaagtccgaggcccctcgtaccaccagagatgagaagcgcagagctcaacacaacgaggttgaacggaggagacgagacaagataaacaactggattgtgcagctttctaaaatcattccagattgctccatggagtccaccaaatccggccagtcgaaaggcggtattctgagtaaggcgtgtgattacattcaggagctgaggcagtccaaccataggctctcagaggagttacaggggctagaccagctccaattggacaacgacgtgttacggcaacaggtcgaggaccttaaaaacaagaaccttctgctgcgcgctcagcttcggcaccatgggttggaagtggtcatcaagaacgattccaactag

SEQ ID NO: 97141 - DNA, 933 bp, Artificial Sequence
  derived and/or modified sequence
atgaaagggcagcaaaagacagcagagaccgaagaagggactgtccagatacaggaaggggctgtggccacaggcgaggacccaaccagtgtagctattgcaagcatccagtctgccgcaaccttccccgatccaaacgtgaagtacgtcttccgcacagagaatggtggacaagtcatgtaccgggtgattcaggtcagtgagggccagctcgacggacaaacggaaggtactggagccatctcaggttatcccgcaacccagagcatgactcaggccgtgatccagggtgcatttaccagcgatgatgccgtggacactgaaggcacagctgcggagactcactatacttatttcccttccactgctgtcggtgacggcgctggaggaacaacctccgggtctacagcggcagtcgtgacaactcagggcagcgaggccttattaggccaggctaccccacccggaacaggacagttttttgtgatgatgtcacctcaggaggtgttacaagggggaagccagcgcagcattgctccacgtacccatccttatagccctaaatcggaagccccacgtacaactcgggacgaaaagaggcgcgctcagcacaacgaggtggaaaggagacgcagggataaaatcaataactggatcgtgcagctttccaagatcattcccgactgctcaatggagtcaaccaagagcggacagtcaaagggaggcattctgtccaaggcatgcgactacattcaggagctccggcaaagcaatcacagattgagtgaagaacttcaagggctggaccagcttcagctggacaatgacgtgcttcgtcagcaggtcgaggatctgaaaaataagaatcttctgttgcgcgctcagttgcggcatcatgggctggaggttgtgatcaaaaacgactcaaattag

SEQ ID NO: 97142 - DNA, 933 bp, Artificial Sequence
  derived and/or modified sequence
atgaaaggccagcagaagaccgccgagaccgaggaaggaaccgttcagatccaggagggcgcagtggcaactggggaggatccaacaagtgttgcaatcgcttccattcagtccgccgctacctttccagacccaaatgttaagtacgtcttcaggaccgaaaacggcggacaggttatgtatcgcgtcatccaggtgtctgaaggtcagctcgacgggcagactgaggggacaggcgcaattagcggctaccctgccacccagagcatgacacaggctgtcattcaaggggcattcacatctgacgacgcagtcgatacagaaggtacagccgctgaaacccactacacttatttccccagtacagccgtgggagacggcgcaggcggaacaactagtggatcgacggccgcagttgtgacaacccagggcagcgaggccttgctgggtcaggctacccctcccggaaccggccagttcttcgtcatgatgagcccccaggaggtgcttcaagggggttctcagaggtccatcgcacctcggactcatccttactctccaaagagtgaagcccctaggacaacccgggacgagaaacggagagctcagcataatgaggttgagcgtagaagacgcgacaaaattaataattggatcgtgcagctgagcaaaatcatccctgactgtagtatggagagtactaaaagcggtcagtctaaagggggaatcctgtcaaaggcttgtgattacatccaagaactcagacagtccaaccaccggctgtccgaagaactacagggcctcgatcagcttcagctagataatgatgttctgcggcagcaagtggaggatctcaagaacaaaaatctcctcctgcgcgctcagctgaggcaccacggactggaggtggtgataaaaaacgacagtaactag

SEQ ID NO: 97143 - DNA, 998 bp, Artificial Sequence
  derived and/or modified sequence
acttagcactcaggcctgtgaatcaggagatacaaagacctccaaaaaaggaccagttcctcggatgtgccccctcacagagagatgaaggggcagcagaaaacagctgaaacggaagaggggacagtgcagattcaggaaggtgcagtggctactggggaagacccaaccagtgtggctattgccagcatccagtcagctgccaccttccctgaccccaacgtcaagtacgtcttccgaactgagaatgggggccaggtgatgtacagggtgatccaggtgtctgaggggcagctggatggccaaactgagggaactggcgccatcagtggctaccctgccactcaatccatgacccaggcggtgatccagggtgctttcaccagtgatgatgcagttgacacggaggggacagctgctgagacgcactatacttacttccccagcacggcagtgggagatggggcagggggtcaattctttgtgatgatgtcaccacaagaagtactgcagggaggaagccagcgctcaattgcccctaggactcacccttattccccgaagtcagaagctccccggacgactcgggatgagaaacgcagggctcagcataatgaagtggagcgtcgccgccgagacaagatcaacaactggatcgtgcagctctccaagataatcccagactgctctatggagagcaccaagtctggccagagtaaaggtgggattctatccaaagcttgtgattatatccaggagcttcggcagagtaaccaccgcttgtctgaagaactgcagggacttgaccaactgcagctggacaatgacgtgcttcgacaacaggtggaagatcttaaaaacaagaatctgctgcttcgagctcagttgcggcaccacggattagaggtcgtcatcaagaatgacagcaactaactatggggattcaggggctttgggcccaagaactgcagatagcccaggagcaacagcctaatccc

SEQ ID NO: 97144 - DNA, 1717 bp, Artificial Sequence
  derived and/or modified sequence
tccattgaaaattttccttggataggaaaggacttagcactcaggcctgtgaatcaggagatacaaagacctccaaaaaaggaccagttcctcggatgtgccccctcacagagagatgaaggggcagcagaaaacagctgaaacggaagaggggacagtgcagattcaggaaggtgcagtggctactggggaagacccaaccagtgtggctattgccagcatccagtcagctgccaccttccctgaccccaacgtcaagtacgtcttccgaactgagaatgggggccaggtgatgtacagggtgatccaggtgtctgaggggcagctggatggccaaactgagggaactggcgccatcagtggctaccctgccactcaatccatgacccaggcggtgatccagggtgctttcaccagtgatgatgcagttgacacggaggggacagctgctgagacgcactatacttacttccccagcacggcagtgggagatggggcagggggtaccacatcggggagtacagctgctgttgttactacccagggctcagaggcactgctggggcaggcgacccctcctggcactggtcaattctttgtgatgatgtcaccacaagaagtactgcagggaggaagccagcgctcaattgcccctaggactcacccttattccccgaagtcagaagctccccggacgactcgggatgagaaacgcagggctcagcataatgaagtggagcgtcgccgccgagacaagatcaacaactggatcgtgcagctctccaagataatcccagactgctctatggagagcaccaagtctggccagagtaaaggtgggattctatccaaagcttgtgattatatccaggagcttcggcagagtaaccaccgcttgtctgaagaactgcagggacttgaccaactgcagctggacaatgacgtgcttcgacaacaggtggaagatcttaaaaacaagaatctgctgcttcgagctcagttgcggcaccacggattagaggtcgtcatcaagaatgacagcaactaactatggggattcaggggctttgggcccaagaactgcagatagcccaggagcaacagcctaatcccgtgcccctttccttcactgccccacttctggcatgggacagggggaagttcagaaggtgtgtccttgaactgaggccctgtgatatggcggcctgcagtggtgtgaaacacacaatgtggacgtgcactgacagccttgcccacccccaccatgcagcccctgggcccttgtgctcctctcgcacaatgcatgtgctgtctccatgctggatactggacacactaaactctggggcttgtcctgtgcttgcttagagtgcccagcagaggtttgctgacaggtgatgctctggcttgccccaggactctggcacttccattggttcttcctttccctggagctgaggtttagatgtgcaacctgtggctcaggggagcaagcttacacaagaagtgagggaaggatgtttagcagtggctggtgcccatgaagaggagattggccagtgagaagctgaggcctatgcagacatctctggagccagagagaacaacaggcaggggcccacttggggccttcccccttgtgggggtcgttttttttttttcttttcttttttttttttttttttttttttttttaagataaaattgttcaaagcca

SEQ ID NO: 97145 - DNA, 1807 bp, Artificial Sequence
  derived and/or modified sequence
gcccctcaccaacatggccgcgggctggaagtgcgcatgagcagctgtctatggagatacctaggccgggagagggagaacacagttggagaaaatcggcagctgagacggccttggccggacttagcactcaggcctgtgaatcaggagatacaaagacctccaaaaaaggaccagttcctcggatgtgccccctcacagagagatgaaggggcagcagaaaacagctgaaacggaagaggggacagtgcagattcaggaaggtgcagtggctactggggaagacccaaccagtgtggctattgccagcatccagtcagctgccaccttccctgaccccaacgtcaagtacgtcttccgaactgagaatgggggccaggtgatgtacagggtgatccaggtgtctgaggggcagctggatggccaaactgagggaactggcgccatcagtggctaccctgccactcaatccatgacccaggcggtgatccagggtgctttcaccagtgatgatgcagttgacacggaggggacagctgctgagacgcactatacttacttccccagcacggcagtgggagatggggcagggggtaccacatcggggagtacagctgctgttgttactacccagggctcagaggcactgctggggcaggcgacccctcctggcactggtcaattctttgtgatgatgtcaccacaagaagtactgcagggaggaagccagcgctcaattgcccctaggactcacccttattccccgaagtcagaagctccccggacgactcgggatgagaaacgcagggctcagcataatgaagtggagcgtcgccgccgagacaagatcaacaactggatcgtgcagctctccaagataatcccagactgctctatggagagcaccaagtctggccagagtaaaggtgggattctatccaaagcttgtgattatatccaggagcttcggcagagtaaccaccgcttgtctgaagaactgcagggacttgaccaactgcagctggacaatgacgtgcttcgacaacaggtggaagatcttaaaaacaagaatctgctgcttcgagctcagttgcggcaccacggattagaggtcgtcatcaagaatgacagcaactaactatggggattcaggggctttgggcccaagaactgcagatagcccaggagcaacagcctaatcccgtgcccctttccttcactgccccacttctggcatgggacagggggaagttcagaaggtgtgtccttgaactgaggccctgtgatatggcggcctgcagtggtgtgaaacacacaatgtggacgtgcactgacagccttgcccacccccaccatgcagcccctgggcccttgtgctcctctcgcacaatgcatgtgctgtctccatgctggatactggacacactaaactctggggcttgtcctgtgcttgcttagagtgcccagcagaggtttgctgacaggtgatgctctggcttgccccaggactctggcacttccattggttcttcctttccctggagctgaggtttagatgtgcaacctgtggctcaggggagcaagcttacacaagaagtgagggaaggatgtttagcagtggctggtgcccatgaagaggagattggccagtgagaagctgaggcctatgcagacatctctggagccagagagaacaacaggcaggggcccacttggggccttcccccttgtgggggtcgttttttttttttcttttcttttttttttttttttttttttttttttaagataaaattgttcaaagcca

SEQ ID NO: 97146 - DNA, 1765 bp, Artificial Sequence
  derived and/or modified sequence
aacatggccgcgggctggaagtgcgcatgagcagctgtctatggagatacctaggccgggagagggagaacacagttggagaaaatcggcagctgagacggccttggccggacttagcactcaggcctgtgaatcaggagatacaaagacctccaaaaaaggaccagttcctcggatgtgccccctcacagagagatgaaggggcagcagaaaacagctgaaacggaagaggggacagtgcagattcaggaaggtgcagtggctactggggaagacccaaccagtgtggctattgccagcatccagtcagctgccaccttccctgaccccaacgtcaagtgatgtacagggtgatccaggtgtctgaggggcagctggatggccaaactgagggaactggcgccatcagtggctaccctgccactcaatccatgacccaggcggtgatccagggtgctttcaccagtgatgatgcagttgacacggaggggacagctgctgagacgcactatacttacttccccagcacggcagtgggagatggggcagggggtaccacatcggggagtacagctgctgttgttactacccagggctcagaggcactgctggggcaggcgacccctcctggcactggtcaattctttgtgatgatgtcaccacaagaagtactgcagggaggaagccagcgctcaattgcccctaggactcacccttattccccgaagtcagaagctccccggacgactcgggatgagaaacgcagggctcagcataatgaagtggagcgtcgccgccgagacaagatcaacaactggatcgtgcagctctccaagataatcccagactgctctatggagagcaccaagtctggccagagtaaaggtgggattctatccaaagcttgtgattatatccaggagcttcggcagagtaaccaccgcttgtctgaagaactgcagggacttgaccaactgcagctggacaatgacgtgcttcgacaacaggtggaagatcttaaaaacaagaatctgctgcttcgagctcagttgcggcaccacggattagaggtcgtcatcaagaatgacagcaactaactatggggattcaggggctttgggcccaagaactgcagatagcccaggagcaacagcctaatcccgtgcccctttccttcactgccccacttctggcatgggacagggggaagttcagaaggtgtgtccttgaactgaggccctgtgatatggcggcctgcagtggtgtgaaacacacaatgtggacgtgcactgacagccttgcccacccccaccatgcagcccctgggcccttgtgctcctctcgcacaatgcatgtgctgtctccatgctggatactggacacactaaactctggggcttgtcctgtgcttgcttagagtgcccagcagaggtttgctgacaggtgatgctctggcttgccccaggactctggcacttccattggttcttcctttccctggagctgaggtttagatgtgcaacctgtggctcaggggagcaagcttacacaagaagtgagggaaggatgtttagcagtggctggtgcccatgaagaggagattggccagtgagaagctgaggcctatgcagacatctctggagccagagagaacaacaggcaggggcccacttggggccttcccccttgtgggggtcgttttttttttttcttttcttttttttttttttttttttttttttttaagataaaattgttcaaagcc

SEQ ID NO: 97147 - protein, 282 aa, Artificial Sequence
  derived and/or modified sequence
MRFARSKRGLRLKTVDSCFQDLKESRLVEDTFTIDEVSEVLNGLQAVVHSEVESELINTAYTNVLLLRQLFAQAEKWYLKLQTDISELENRELLEQVAEFEKAEITSSNKKPILDVTKPKLAPLNEGGTAELLNKEILRLQEENEKLKSRLKTIEIQATNALDEKSKLEKALQDLQLDQGNQKDFIKAQDLSNLENTVAALKSEFQKTLNDKTENQKSLEENLATAKHDLLRVQEQLHMAEKELEKKFQQTAAYRNMKEILTKKNDQIKDLRKRLAQYEPED

SEQ ID NO: 97148 - DNA, 849 bp, Artificial Sequence
  derived and/or modified sequence
atgcggtttgctcgaagtaaacgggggctgaggctgaagaccgttgattcctgttttcaggatttgaaagagagtcggcttgtggaagatacatttacgatcgacgaggtgagcgaggtgctaaatggtctgcaagccgtggttcactcggaagtagaatcagagctcatcaatactgcctataccaacgtgctgctgctgcggcagctgttcgcccaagccgaaaagtggtatttgaagctgcagaccgatatttctgagctcgaaaacagagagttactggagcaggttgccgaatttgagaaagccgagattacgtctagcaacaagaaacctatcttggacgtgaccaaaccaaaactggctcccctgaacgagggcgggaccgcagagctcctgaataaggaaatattgagactccaggaggaaaatgagaagttgaagtcccgattaaagacaatcgagatacaagccaccaacgcactcgacgaaaaatcgaaactcgagaaagcacttcaggacttgcaattggaccagggtaatcagaaagattttattaaggcgcaggacttgtctaacctcgagaacacagttgccgccctgaaatctgagtttcaaaaaacacttaatgacaaaaccgagaatcaaaaaagcctagaggagaatctcgcgacggcaaaacatgacctcctacgggtccaggagcaactacacatggcagagaaagaactcgagaagaagtttcagcagactgccgcctatcgcaatatgaaggagatccttactaagaaaaatgatcagatcaaagatctccgcaagcggctggcgcaatacgaaccagaggactag

SEQ ID NO: 97149 - DNA, 849 bp, Artificial Sequence
  derived and/or modified sequence
atgagatttgcccggagcaagaggggcctgcggctgaagacagtggacagctgcttccaggacctgaaggagagccggctggtggaggacaccttcaccattgatgaggtgtctgaggtgctgaatggcctgcaggccgtggtgcacagcgaggtggagagcgagctgatcaacacagcctacaccaacgtgctgctgctgcggcagctgtttgcccaggccgagaagtggtacctgaagctgcagacagacatcagcgagctggagaaccgggagctgctggagcaggtggccgagtttgagaaggccgagatcaccagcagcaacaagaagcccatcctggatgtgaccaagcccaagctggcccccctgaatgaaggaggaacagctgagctgctgaacaaggagatcctgcggctgcaggaggagaatgagaagctgaagagccggctgaagaccatcgagatccaggccaccaatgccctggatgagaagagcaagctggagaaggccctgcaggacctgcagctggaccagggcaaccagaaggacttcatcaaggcccaggacctgagcaacctggagaacacagtggccgccctgaagtctgagttccagaagaccctgaatgacaagacagagaaccagaagagcctggaggagaacctggccacagccaagcatgacctgctgcgggtgcaggagcagctgcacatggccgagaaggagctggagaagaagttccagcagacagctgcctacagaaacatgaaggagatcctgaccaagaagaatgaccagatcaaggacctgaggaagaggctggcccagtatgagccagaagattag

SEQ ID NO: 97150 - DNA, 849 bp, Artificial Sequence
  derived and/or modified sequence
atgcggttcgcccggagcaagcggggcctgcggctgaagaccgtggacagttgctttcaagatctcaaggaatcaagactggtcgaggatacatttaccattgacgaggtgtctgaggtcctgaacggtctgcaagccgtagtccattctgaggtggaatcggagctcatcaataccgcttatacgaatgtcttgttgttaagacagttgttcgcccaggcggagaagtggtatctgaaactgcagacggacatctccgaactcgagaatagagagctgctggaacaggtggccgaattcgagaaagcggaaattacctcttccaataaaaaacctatcctggacgtcacgaagcctaaattagcccccttgaacgagggaggcactgctgaactcctcaacaaggagattctgcggctacaagaagaaaacgagaaattaaagagcaggcttaaaaccatcgaaatccaggctacaaatgcgctggatgaaaagtctaagttagaaaaggctctgcaggacctgcagctcgaccagggcaaccagaaagacttcattaaagctcaggacctgtccaacctcgaaaacactgtcgccgcccttaaatccgaattccagaaaactctgaatgacaaaaccgagaaccagaagtcactggaggagaatctcgccaccgccaagcacgacctgttacgggttcaggagcagcttcatatggccgaaaaggagctagagaaaaagttccaacagaccgcagcctataggaatatgaaggagatcctcaccaaaaagaacgatcaaattaaggatctccgcaagagactggctcagtacgagccagaggactag

SEQ ID NO: 97151 - DNA, 849 bp, Artificial Sequence
  derived and/or modified sequence
atgcggttcgcacgttcaaaaaggggattaaggctgaaaacggtcgactcatgctttcaggatctaaaagagagcagactcgtggaagatacttttacaattgatgaagtctccgaggtgctcaatggcctgcaagccgtggttcactcggaggtcgagagcgaactaattaataccgcctacacaaatgttctcctcctgaggcaactattcgcccaggccgagaagtggtatctcaagctacagacagatatttcagaactggaaaaccgagagctgctagaacaggtcgccgaattcgaaaaagcagaaatcacatctagtaataagaagccaattttggacgtgacaaaacccaagcttgccccactgaatgagggcggaactgcagagctcttgaacaaggaaattctgaggcttcaagaagaaaacgaaaagctgaaatctcggttgaagacaattgaaattcaggccacaaacgcactggacgagaaatctaaactggaaaaagcgctccaggacctacagctggaccagggtaatcagaaggattttattaaagcacaggatctatcaaatctggagaacacggtggctgctctgaaatccgagttccagaagactctgaacgataagactgaaaaccagaaatccctggaggaaaacctggctaccgccaagcacgacctgctccgtgtgcaggagcagctgcacatggcagagaaggaactggaaaagaaatttcagcagacagcggcataccgtaatatgaaggaaattcttacaaaaaaaaacgaccaaatcaaagacctgcgcaagcgcctggcccaatacgaaccggaggactag

SEQ ID NO: 97152 - DNA, 849 bp, Artificial Sequence
  derived and/or modified sequence
atgagattcgccagaagcaagagaggcctgagactgaagaccgtggacagctgcttccaggacctgaaggagagcagactggtggaggacaccttcaccatcgacgaggtgagcgaggtgctgaacggcctgcaggccgtggtgcacagcgaggtggagagcgagctgatcaacaccgcctacaccaacgtgctgctgctgagacagctgttcgcccaggccgagaagtggtacctgaagctgcagaccgacatcagcgagctggagaacagagagctgctggagcaggtggccgagttcgagaaggccgagatcaccagcagcaacaagaagcccatcctggacgtgaccaagcccaagctggcccccctgaacgagggcggcaccgccgagctgctgaacaaggagatcctgagactgcaggaggagaacgagaagctgaagagcagactgaagaccatcgagatccaggccaccaacgccctggacgagaagagcaagctggagaaggccctgcaggacctgcagctggaccagggcaaccagaaggacttcatcaaggcccaggacctgagcaacctggagaacaccgtggccgccctgaagagcgagttccagaagaccctgaacgacaagaccgagaaccagaagagcctggaggagaacctggccaccgccaagcacgacctgctgagagtgcaggagcagctgcacatggccgagaaggagctggagaagaagttccagcagaccgccgcctacagaaacatgaaggagatcctgaccaagaagaacgaccagatcaaggacctgagaaagagactggcccagtacgagcccgaggactag

SEQ ID NO: 97153 - protein, 256 aa, Artificial Sequence
  derived and/or modified sequence
MRNQDPGKMGRQRKSIKLYPTHPLVTFPRSWAKFQEKALLVEDTFTIDEVSEVLNGLQAVVHSEVESELINTAYTNVLLLRQLFAQAEKWYLKLQTDISELENRELLEQVAEFEKAEITSSNKKPILDVTKPKLAPLNEGGTAELLNKEILRLQEENEKLKSRLKTIEIQATNALDEKSKLEKALQDLQLDQGNQKDFIKAQDLSNLENTVAALKSEFQKTLNDKTENQKSLEENLATAKHDLLRVQEQLHMAEKI

SEQ ID NO: 97154 - DNA, 771 bp, Artificial Sequence
  derived and/or modified sequence
atgagaaaccaggatccggggaaaatgggcaggcaaaggaaaagcatcaagttgtaccctactcatccattggtcactttccctcgaagttgggccaagttccaagagaaagccctcctggttgaggacactttcacaatcgacgaagtgtccgaagtgctgaacggcctgcaggcagtagttcatagtgaagtggaaagtgaactaataaacaccgcctacaccaatgttctgctactccgacagctgtttgcccaagctgagaagtggtatctgaagctccaaaccgacatcagcgagctggagaacagggaactcctggagcaagtggccgaattcgaaaaggccgaaatcacatcaagtaataagaagcctatcttggacgtgactaagccaaaattagcaccactgaatgaaggaggaactgccgaactgcttaacaaggaaatactgaggctccaggaagagaatgagaaattaaaatccaggctcaaaacaattgaaatccaggccacaaatgcactggatgagaagagtaaacttgagaaagcgctgcaggaccttcaattggaccagggtaatcagaaagactttatcaaagcacaggacctgagtaatcttgagaacacagtagctgctctgaagtctgaattccaaaaaacactcaacgataagacggaaaaccaaaaaagcctggaggaaaacttggccaccgccaagcacgatctcctgagggtgcaggagcagctgcacatggccgaaaaaatttag

SEQ ID NO: 97155 - DNA, 771 bp, Artificial Sequence
  derived and/or modified sequence
atgaggaaccaggaccccgggaagatgggccggcagaggaagagcatcaagctgtaccccacccaccccctggtgaccttccccaggtcctgggccaagttccaggagaaggccctgctggtggaggacaccttcaccattgatgaggtgtctgaggtgctgaatggcctgcaggccgtggtgcacagcgaggtggagagcgagctgatcaacacagcctacaccaacgtgctgctgctgcggcagctgtttgcccaggccgagaagtggtacctgaagctgcagacagacatcagcgagctggagaaccgggagctgctggagcaggtggccgagtttgagaaggccgagatcaccagcagcaacaagaagcccatcctggatgtgaccaagcccaagctggcccccctgaatgaaggaggaacagctgagctgctgaacaaggagatcctgcggctgcaggaggagaatgagaagctgaagagccggctgaagaccatcgagatccaggccaccaatgccctggatgagaagagcaagctggagaaggccctgcaggacctgcagctggaccagggcaaccagaaggacttcatcaaggcccaggacctgagcaacctggagaacacagtggccgccctgaagtctgagttccagaagaccctgaatgacaagacagagaaccagaagagcctggaggagaacctggccacagccaagcatgacctgctgcgggtgcaggagcagctgcacatggccgagaagatctag

SEQ ID NO: 97156 - DNA, 1272 bp, Artificial Sequence
  derived and/or modified sequence
agatgcatgagtgtccttaccaaaaggaagtccttgtttctaggacaggtctgtcttcgggcctgtgggtccatagaatcatcacagaaaaaatgatttcaggaggtctcccccgctttctgctcccaaggccgactctgactgagcctcggaggagagaaggaagccatttctgggaggccaaaacgtccgtcttccaggctcttgctgtaagtcagcccacttttacagatgaggaaccaagacccagggaagatgggaaggcagagaaaatccatcaagttgtaccctacccaccctttggtgacttttccaagaagctgggctaagttccaggagaaagctctgctggtggaggacaccttcaccatagatgaagtctctgaagtcctcaatggattacaagctgtggttcatagtgaggtggaatctgagctcatcaacactgcctataccaatgtgttacttctgcgacagctgtttgcacaagctgagaagtggtatcttaagctacagacagacatctctgaacttgaaaaccgagaattattagaacaagttgcagaatttgaaaaagcagagattacatcttcaaacaaaaagcccatcttagatgtcacaaagccaaaacttgctccacttaatgaaggtggaacagcagaactcctaaacaaggaaattttaagacttcaagaagagaatgagaaattgaagtcaaggttgaagaccattgaaatacaggctacaaatgcactggatgaaaagtcaaaactagaaaaagcactgcaagatttacagcttgatcaaggaaatcaaaaggattttataaaggcccaagacttaagtaacttagaaaacactgtcgctgccttaaagagtgagtttcagaagacacttaatgacaagacagaaaaccagaagtcactggaggagaatctggcgacagccaagcacgatctactcagggttcaggagcagctgcacatggctgaaaagatatgaacctgaagattaaaactgaagatttcctctggaagctaccacatgcaaacatacaagcagtctcacctcaggcatgtattttgaaaagcattttgtcatatcccctctccttatttttctaatatttagactttgaatatttagaactagagttcctattttcagctagttgaaaacagagaaaacctagtgattctgtctggtcatcccacacacctctctactgagtgctccagagtcttagctcacatgcactgagaattctttaca

SEQ ID NO: 97157 - DNA, 771 bp, Artificial Sequence
  derived and/or modified sequence
atgcggaaccaggaccccggcaagatgggccggcagcggaagagcattaaactctatcccacacatcccctggtcactttcccccgctcttgggccaagtttcaagagaaggctctattggtcgaggacacgttcacaattgacgaggtgtcagaagtattaaatggattgcaggccgttgtgcatagcgaggtcgaatccgaactaattaacaccgcctatacaaacgttctgttactgcgccagcttttcgctcaagcggaaaagtggtacctcaagctccagaccgacatctcagaacttgagaatcgagagctactggagcaagtggctgaattcgaaaaggctgaaataacttctagcaataaaaaacccatattggacgtgaccaaacccaaattggcgccactcaacgagggcgggacagcagagctgttaaacaaggaaatactccgcctccaggaggaaaacgaaaaactcaagagtaggttgaagacaattgagatccaggctactaacgcgctagacgagaaaagtaaacttgagaaggcactgcaggacctgcaattggatcagggcaaccaaaaagatttcattaaggcccaggacctctcaaatttggagaacactgtagccgctcttaaatcagaattccagaaaacattgaacgacaagactgagaatcaaaagtcccttgaggaaaacctcgccacagcaaagcacgatctcctcagagtgcaggagcagttgcatatggccgagaagatctag

SEQ ID NO: 97158 - DNA, 771 bp, Artificial Sequence
  derived and/or modified sequence
atgcggaatcaagaccctggaaaaatgggcagacagaggaaatccatcaaactgtatcctacccaccctttggtgacttttccgaggagctgggcaaaatttcaggaaaaagctcttctggtggaagacaccttcaccatcgatgaggtaagtgaggttctcaacgggctgcaggccgtggtgcacagcgaggttgagtcagagctaattaatacggcgtacaccaacgtgctcctgttaaggcagctgtttgcccaggcggaaaagtggtacctcaaactgcaaaccgatatctcagagctggagaacagggagctactggagcaggtggcagaattcgagaaggctgagatcacctcctcaaacaagaagcctattctcgatgtcactaaaccaaaattggcacctctaaacgaaggagggaccgctgagttgttaaataaagagatactgcgacttcaggaagagaacgagaaactcaaaagtcgcctgaagaccattgagatccaggctacaaatgccctggatgagaaatccaagctggagaaggctctgcaagacctgcagctggaccaaggcaaccagaaagactttataaaagcccaggatctgtccaacctggaaaatactgtggctgcccttaagtcagagtttcagaagacactcaacgacaaaacagaaaatcagaagtcactggaggagaatctcgccactgccaagcatgacctgcttcgcgtgcaagaacagctgcacatggctgagaaaatatag

SEQ ID NO: 97159 - DNA, 771 bp, Artificial Sequence
  derived and/or modified sequence
atgagaaaccaggaccccggcaagatgggcagacagagaaagagcatcaagctgtaccccacccaccccctggtgaccttccccagaagctgggccaagttccaggagaaggccctgctggtggaggacaccttcaccatcgacgaggtgagcgaggtgctgaacggcctgcaggccgtggtgcacagcgaggtggagagcgagctgatcaacaccgcctacaccaacgtgctgctgctgagacagctgttcgcccaggccgagaagtggtacctgaagctgcagaccgacatcagcgagctggagaacagagagctgctggagcaggtggccgagttcgagaaggccgagatcaccagcagcaacaagaagcccatcctggacgtgaccaagcccaagctggcccccctgaacgagggcggcaccgccgagctgctgaacaaggagatcctgagactgcaggaggagaacgagaagctgaagagcagactgaagaccatcgagatccaggccaccaacgccctggacgagaagagcaagctggagaaggccctgcaggacctgcagctggaccagggcaaccagaaggacttcatcaaggcccaggacctgagcaacctggagaacaccgtggccgccctgaagagcgagttccagaagaccctgaacgacaagaccgagaaccagaagagcctggaggagaacctggccaccgccaagcacgacctgctgagagtgcaggagcagctgcacatggccgagaagatctag

SEQ ID NO: 97160 - protein, 851 aa, Artificial Sequence
  derived and/or modified sequence
MSSKQEIMSDQRFRRVAKDPRFWEMPEKDRKVKIDKRFRAMFHDKKFKLNYAVDKRGRPISHSTTEDLKRFYDLSDSDSNLSGEDSKALSQKKIKKKKTQTKKEIDSKNLVEKKKETKKANHKGSENKTDLDNSIGIKKMKTSCKFKIDSNISPKKDSKEFTQKNKKEKKNIVQHTTDSSLEEKQRTLDSGTSEIVKSPRIECSKTRREMQSVVQLIMTRDSDGYENSTDGEMCDKDALEEDSESVSEIGSDEESENEITSVGRASGDDDGSEDDEEEDEDEEEDEDEDSEDDDKSDSGPDLARGKGNIETSSEDEDDTADLFPEESGFEHAWRELDKDAPRADEITRRLAVCNMDWDRLKAKDLLALFNSFKPKGGVIFSVKIYPSEFGKERMKEEQVQGPVELLSIPEDAPEKDWTSREKLRDYQFKRLKYYYAVVDCDSPETASKIYEDCDGLEFESSCSFIDLRFIPDDITFDDEPKDVASEVNLTAYKPKYFTSAAMGTSTVEITWDETDHERITMLNRKFKKEELLDMDFQAYLASSSEDEEEIEEELQGDDGVNVEEDGKTKKSQKDDEEQIAKYRQLLQVIQEKEKKGKENDMEMEIKWVPGLKESAEEMVKNKLEGKDKLTPWEQFLEKKKEKKRLKRKQKALAEEASEEELPSDVDLNDPYFAEEVKQIGINKKSVKSAKDGTSPEEEIEIERQKAEMALLMMDEDEDSKKHFNYNKIVEHQNLSKKKKKQLMKKKELIEDDFEVNVNDARFQAMYTSHLFNLDPSDPNFKKTKAMEKILEEKARQRERKEQELTQAIKKKESEIEKESQRKSIDPALSMLIKSIKTKTEQFQARKKQKVK

SEQ ID NO: 97161 - protein, 110 aa, Artificial Sequence
  derived and/or modified sequence
MSSKQEIMSDQRFRRVAKDPRFWEMPEKDRKVKIDKRFRAMFHDKKFKLNYAVDKRGRPISHSTTEDLKRFYDLSDSDSNLSGEDSKALSQKKIKKKKTQTKKKKKKKKK

SEQ ID NO: 97162 - DNA, 138 bp, Artificial Sequence
  derived and/or modified sequence
aacatgaacagtggaacaatcagtgaaccaatacaagggttaaataagctagcaattaaaagctgtatcactggtctaaagatagaagatcaagtagaaaatcagcgcaagaggaaagatatacgaaaactaatggcc

SEQ ID NO: 97163 - DNA, 2556 bp, Artificial Sequence
  derived and/or modified sequence
atgagcagcaaacaggaaattatgagcgaccagcggtttaggcgggtagctaaggatccacgcttctgggagatgccagagaaggaccggaaggtaaagatcgacaagcgtttcagggcgatgttccatgacaagaagtttaagctgaattacgccgtggacaaaaggggtaggccaatcagccacagtacgaccgaggatttgaagcgcttctacgatctgagcgattctgattctaacctgtctggtgaagactctaaggcactctctcagaaaaaaatcaagaagaagaagactcagacgaagaaggagatcgattccaagaacctggtcgaaaaaaagaaggagactaagaaggctaaccataaaggctcggagaacaagacggaccttgacaatagtataggcattaaaaagatgaagacctcctgtaagttcaaaatcgattctaacataagtccgaaaaaagattctaaggaattcacacagaagaacaaaaaggaaaagaaaaatatcgtccagcataccacagacagctctctggaagaaaagcagcgcacacttgactccggaactagtgaaatcgtgaagtctccgaggatcgaatgctctaagactcgacgcgagatgcagtcagtcgtgcagctgataatgacaagagactctgatggatacgagaatagcaccgatggcgagatgtgtgacaaggacgccctggaggaagacagcgagtccgtgtctgaaatcgggtcagatgaagagtccgaaaacgagattacctccgtgggacgcgcttcaggggacgacgatggttcagaagatgacgaggaggaggatgaagacgaagaagaagacgaggacgaggacagcgaggatgacgacaagtctgatagtgggccggatttagctagaggtaagggcaacatagagacgagcagcgaggacgaggatgatacagccgatctctttcccgaggaatcagggttcgagcacgcctggcgggagctggataaggacgctcctagagccgacgagattacccgccgcctcgctgtctgcaatatggattgggacagactgaaggccaaggacttgttggctctattcaacagttttaaacctaagggcggcgttatcttctcagtgaagatataccctagcgaattcggtaaagagaggatgaaggaggagcaggtccaggggccagttgagcttctgtctatccccgaggatgcgcctgagaaagactggacttcgagagagaaactgagggactaccagttcaaacgtctgaagtactattatgctgtcgtcgactgtgatagccccgaaactgcctctaagatttatgaggactgcgacgggctggaattcgagagctcttgttcttttatcgacctgcgatttatccctgatgacattacctttgacgatgaaccaaaggacgtggctagtgaggtgaatttgaccgcctacaagcctaagtatttcactagcgcagccatgggaacatctactgtggaaattacctgggacgagacagaccacgagagaataacgatgctcaataggaagttcaaaaaagaagagctgctcgatatggactttcaggcgtatctcgcaagttcatctgaggacgaggaagaaatagaggaggaactccaaggagatgatggggtaaacgtggaagaggacggcaaaacaaagaagtcacagaaagatgatgaggagcagatagcaaagtacagacagttgttgcaagttattcaggagaaggagaaaaagggcaaagagaacgacatggaaatggagattaagtgggtgccggggctaaaagaatcggccgaagaaatggttaaaaataagctagaggggaaagataagcttaccccgtgggagcagttcttagagaagaagaaggagaaaaaacgcctgaaacgtaagcagaaggccctggcagaggaggcctccgaggaggaactgccctccgatgtggatcttaacgacccctactttgcagaagaggtgaaacaaatcggcatcaacaaaaagtccgtcaaaagcgccaaagacggaacctcccctgaagaggagattgagattgaaagacaaaaggcagagatggccctgctgatgatggacgaagatgaggattcaaaaaaacactttaactataataagatagtagagcaccagaatctctctaagaaaaaaaagaagcagctgatgaagaagaaagaacttattgaggatgatttcgaggtcaacgtgaacgacgctcggttccaggctatgtatacaagccacctgttcaatctcgacccttcagatcccaacttcaagaaaacgaaggcaatggagaagattctggaggagaaagccagacaaagagagcgcaaggagcaagaactcacccaggcaatcaagaagaaagaatctgagatcgaaaaggaatctcaaaggaagagcatcgatccggccctatccatgctcatcaaatccatcaagactaaaacagaacagttccaggcccggaagaagcagaaagtaaagtag

SEQ ID NO: 97164 - DNA, 333 bp, Artificial Sequence
  derived and/or modified sequence
atgtcaagtaagcaagagatcatgagcgatcagagatttagacgcgttgctaaggatccgcgcttttgggaaatgccagagaaagaccggaaagtcaaaatagacaagcggtttcgcgccatgttccacgacaaaaaatttaaactgaactatgccgtggataaacgaggacgcccaatctctcatagtacaaccgaagatcttaagcgcttttacgatctgagcgatagtgattccaatcttagtggtgaggactctaaggcactgagccagaaaaagattaagaaaaagaagacccaaacaaaaaaaaaaaaaaagaagaaaaaaaaatag

SEQ ID NO: 97165 - DNA, 2556 bp, Artificial Sequence
  derived and/or modified sequence
atgagcagcaagcaggagatcatgtctgaccagcgcttccggcgggtggccaaggacccccgcttctgggagatgcctgagaaggacaggaaggtgaagattgacaagcgcttccgggccatgtttcatgacaagaagttcaagctgaactatgctgtggacaagaggggccggcccatcagccacagcaccacagaggacctgaagcgcttctatgacctgagtgacagcgacagcaacctgagcggggaggacagcaaggccctgagccagaagaagatcaagaagaagaagacccagaccaagaaggagattgacagcaagaacctggtggagaagaagaaggagaccaagaaggccaaccacaagggcagcgagaacaagacagacctggacaacagcatcggcatcaagaagatgaagaccagctgcaagttcaagattgacagcaacatcagccccaagaaggacagcaaggagttcacccagaagaacaagaaggagaagaagaacatcgtgcagcacaccacagacagcagcctggaggagaagcagaggaccctggacagcggcaccagcgagatcgtgaagagccccagaattgagtgcagcaagacccggcgggagatgcagagcgtggtgcagctgatcatgacccgggacagtgatggctatgagaacagcacagatggagagatgtgtgacaaggatgccctggaggaggacagcgagagcgtgtctgaaattggaagtgatgaggagagtgaaaatgagatcacctctgtgggccgggccagcggagatgatgatggctctgaagatgatgaggaggaggatgaagatgaggaggaggatgaagatgaggacagtgaagatgatgacaagagtgacagcggccctgacctggcccggggcaagggcaacatcgagaccagcagtgaagatgaagatgacacagctgacctcttccctgaggagagcggctttgaacatgcctggagggagctggacaaggatgcccccagggcagatgagatcacccggcggctggccgtgtgcaacatggactgggaccggctgaaggccaaggacctgctggccctcttcaacagcttcaagcccaagggcggcgtcatcttctctgtgaagatctaccccagcgagtttgggaaggagaggatgaaggaggagcaggtgcagggccctgtggagctgctgagcatcccagaagatgcccctgagaaggactggaccagccgggagaagctgcgggactaccagttcaagaggctgaagtactactatgctgtggtggactgtgacagccctgagacagccagcaagatctatgaggactgtgatggcctggagtttgagagcagctgcagcttcatcgacctgcgcttcatcccagatgacatcacctttgatgatgagcccaaggatgtggccagcgaggtgaacctgacagcctacaagcccaagtacttcaccagcgctgccatgggcaccagcacagtggagatcacctgggatgaaacagaccacgagcgcatcaccatgctgaacaggaagttcaagaaggaggagctgctggacatggacttccaggcctacctggccagcagcagtgaagatgaggaggagattgaggaggagctgcagggagatgatggagtgaatgtggaggaggatggcaagaccaagaagagccagaaggatgatgaggagcagatcgccaagtaccggcagctgctgcaggtgatccaggagaaggagaagaagggcaaggaaaatgacatggagatggagatcaagtgggtgcccggcctgaaggagagcgctgaggagatggtgaagaacaagctggagggcaaggacaagctgaccccctgggagcagttcctggagaagaagaaggagaagaagaggctgaagaggaagcagaaggccctggccgaggaggccagcgaggaggagctgcccagtgatgtggacctgaatgacccctactttgctgaggaggtgaagcagatcggcatcaacaagaagtctgtgaagagcgccaaggatggcaccagccctgaggaggagattgaaattgagcggcagaaggccgagatggccctgctgatgatggatgaagatgaggacagcaagaagcacttcaactacaacaagatcgtggagcaccagaacctgagcaagaagaagaagaagcagctgatgaagaagaaggagctgattgaagatgactttgaggtgaatgtgaatgatgcccgcttccaggccatgtacaccagccacctgttcaacctggaccccagcgaccccaacttcaagaagaccaaggccatggagaagatcctggaggagaaggcccggcagcgggagaggaaggagcaggagctgacccaggccatcaagaagaaggagagcgagattgagaaggagagccagaggaagagcattgatcctgccctgtccatgctgatcaagagcatcaagaccaagacagagcagttccaggccaggaagaagcagaaggtgaagtag

SEQ ID NO: 97166 - DNA, 333 bp, Artificial Sequence
  derived and/or modified sequence
atgagcagcaagcaggagatcatgtctgaccagcgcttccggcgggtggccaaggacccccgcttctgggagatgcctgagaaggacaggaaggtgaagattgacaagcgcttccgggccatgtttcatgacaagaagttcaagctgaactatgctgtggacaagaggggccggcccatcagccacagcaccacagaggacctgaagcgcttctatgacctgagtgacagcgacagcaacctgagcggggaggacagcaaggccctgagccagaagaagatcaagaagaagaagacccagaccaagaagaagaagaagaagaagaagaagtag

SEQ ID NO: 97167 - DNA, 2556 bp, Artificial Sequence
  derived and/or modified sequence
atgagcagcaagcaggagatcatgagcgaccagcggttccggcgggtggctaaggatccccgcttctgggagatgcctgagaaagatcgaaaagtgaaaatagacaagaggttccgagccatgtttcatgacaagaaattcaagctaaactatgcagtggacaagcgcggccgtccaatctcacacagtaccacagaggacctaaagcggttctacgatctgtcggattccgattcaaatctgagcggcgaggattccaaagccctgagccaaaagaagataaaaaagaagaaaactcagacgaagaaggaaatcgattctaagaatctggttgagaaaaaaaaggaaactaaaaaagctaatcacaaggggtccgaaaataaaacggacctcgacaatagcatcgggataaaaaagatgaagacatcctgcaagtttaaaatagatagcaacattagccctaaaaaagactcaaaggagtttacacagaagaacaagaaggagaagaaaaacatcgtccagcacacaaccgatagttcgctagaggagaagcagaggaccttagatagtgggacgagcgagattgtaaagagtccacggatcgagtgctccaagaccagacgggagatgcagagcgtggtccaactaattatgacccgggacagcgatggatatgaaaatagtaccgacggcgagatgtgtgataaggatgcactcgaggaggacagtgaatctgtctctgagatcggaagcgacgaggaatcagaaaacgagattacatcagtggggagagccagcggcgatgatgatggtagcgaagacgatgaagaggaggacgaagacgaggaggaggatgaggatgaagattccgaggacgatgataaatcagactctgggcccgacctggcacgaggtaaagggaacatcgagacctcctcagaggatgaagacgacactgccgacctcttccctgaggagagcgggtttgagcacgcctggcgggagctggataaggatgccccgcgggccgatgagatcactaggcggctcgcggtgtgtaatatggattgggacaggcttaaggcaaaagatcttctggccctgtttaactcctttaagcctaaaggcggcgtaattttctcagtcaagatctatccttcagaattcggcaaagagcggatgaaggaggaacaggtacaggggccagtagaattactgagcatcccagaggacgcacctgagaaggactggactagtagagaaaaactccgggactatcagtttaagagacttaaatattactacgctgtagtggattgtgatagtcccgaaaccgcctctaaaatttatgaagactgcgacggccttgagttcgagagctcatgttcttttatcgatctccgtttcatacccgacgatattacattcgatgatgaaccaaaagatgttgcctccgaggttaaccttactgcgtacaaaccaaaatattttacaagcgcagctatgggaacatccaccgttgaaattacctgggatgagacagatcatgagcggatcactatgctcaatagaaaattcaaaaaggaagagctgctggatatggattttcaagcgtatttggccagctcaagcgaggacgaggaagagattgaggaggaactgcagggcgatgatggcgttaacgtggaggaggacggtaaaactaaaaaatcacagaaggatgacgaagaacagattgctaaataccgtcaactgctgcaggtgatccaagagaaggagaagaagggcaaagaaaatgatatggagatggagatcaagtgggtgccagggctgaaggaaagtgctgaagagatggtcaagaacaagcttgaggggaaggataagctgaccccctgggaacagtttttagaaaagaagaaggagaaaaagcgtctcaagcgaaaacagaaagctttggcagaggaagcgagcgaggaagaactgccaagtgatgtggatctcaatgatccatatttcgctgaggaggtgaaacaaatcggcatcaacaaaaagagtgtgaagtctgcaaaggatggcacatcccccgaggaggaaatcgagattgaacggcagaaagctgaaatggcactgttgatgatggatgaagacgaggattctaagaagcatttcaactacaacaaaattgtggagcaccagaatttgagcaaaaagaagaagaaacagctcatgaaaaaaaaggaactgatcgaggatgatttcgaggtgaatgttaacgatgcgaggtttcaggcaatgtacacaagccatctctttaatctcgaccctagcgatccaaattttaaaaagaccaaggccatggagaagatcttagaggaaaaagccaggcagcgcgaaagaaaagaacaggagctgacacaggctatcaagaaaaaagaatccgagatagagaaggagtctcagcggaagtccatcgatcctgcactcagtatgcttattaaaagtattaagactaagaccgagcaattccaagcccgcaagaagcagaaagtgaagtag

SEQ ID NO: 97168 - DNA, 333 bp, Artificial Sequence
  derived and/or modified sequence
atgagcagcaagcaggagatcatgagcgaccagcggttccggcgggtcgccaaggaccccaggttttgggagatgcccgagaaggatcggaaggtaaaaatcgataaaagatttagagccatgttccatgacaaaaaattcaagttgaattatgcagtcgataaaaggggtcgccccatcagccacagcactactgaagacctgaagcgtttttatgatctatccgattccgacagcaacttatctggagaagatagtaaggctctctcccagaaaaagatcaagaagaaaaagacccaaaccaagaagaaaaaaaagaaaaaaaagaaatag

SEQ ID NO: 97169 - DNA, 2556 bp, Artificial Sequence
  derived and/or modified sequence
atgagctccaagcaggagatcatgtccgaccagagatttagaagagtagcaaaggacccacgattttgggagatgcctgaaaaagataggaaggtgaagatagacaagcggtttcgagcaatgttccacgataagaagtttaagctgaattacgcagtcgataagaggggcaggcctatatcccatagtactaccgaagacctgaagaggttttatgatctaagtgattctgatagcaacttgtcgggggaagactctaaggccctcagtcagaagaaaatcaagaaaaaaaaaacccagaccaaaaaggagattgattccaagaatctcgtagagaaaaagaaggagacaaaaaaggccaaccacaaaggatctgagaataaaacagacctcgacaattccattggaatcaagaaaatgaagacaagttgtaagtttaaaatcgattctaatatttctccaaagaaggatagcaaggagtttacccagaaaaataagaaagaaaagaagaatatcgtacagcacactaccgacagctccctggaggagaagcagcgaaccctggatagtggcacaagcgaaatcgtgaagtccccccgtattgagtgttccaagactcgcagagagatgcagtctgttgtgcagctgatcatgacacgcgatagcgatggctatgaaaattccaccgacggtgaaatgtgcgataaggacgcactcgaggaagattcagaaagcgtatcagagatcgggtctgatgaagaaagcgaaaatgagataacaagtgtgggcagggccagcggcgacgacgacggatctgaagacgacgaggaggaggacgaggatgaggaggaggacgaggatgaagactctgaggacgatgacaagagtgactctggtccggacttagcccgaggaaaaggaaatattgagacctcaagcgaagatgaggacgacaccgctgacctgttcccagaggaaagcgggttcgaacatgcgtggagagagctagacaaagatgccccacgggcagatgaaatcactagacgccttgccgtctgcaatatggactgggaccgtctcaaagcgaaagatctgctagcattattcaatagctttaaaccgaaagggggagtgatcttcagcgtgaaaatttatccctccgaatttggaaaggaacgaatgaaagaggaacaagttcagggcccagttgagctactgtctattccagaagatgccccagaaaaggattggacctcacgcgagaagctccgtgattaccaatttaagaggctaaaatattattacgctgtcgtcgactgcgactccccagaaacggcatcaaaaatttacgaagactgcgatgggctggaatttgagagctcctgtagttttatcgacctccggtttatcccagacgacattaccttcgacgatgagccaaaggatgtggcctccgaggtaaacctgacagcttacaaacctaaatacttcaccagtgctgccatggggacctctactgtggagattacctgggatgagaccgaccatgaaagaatcaccatgctgaacagaaagttcaagaaggaggaattgctagacatggactttcaggcgtatctcgcctctagcagcgaggacgaggaggaaattgaagaagaacttcaaggagatgacggcgttaacgttgaggaggacgggaaaactaaaaaatcccagaaggacgacgaggaacagatcgcgaagtaccgccagctgctgcaagtgatccaagaaaaggagaaaaagggtaaagaaaacgatatggaaatggaaattaaatgggttcccggactgaaggaatctgcagaagagatggtcaaaaacaaactcgagggcaaggacaagctcacaccatgggagcagttcttggagaaaaagaaggaaaaaaaaaggctcaaaagaaagcagaaggccttggcggaagaggcaagcgaagaggaactccccagtgatgtcgatctgaatgacccgtattttgcagaagaggtgaagcagatcgggattaataaaaagagcgttaagtcagccaaggatggcacatcccctgaggaggagattgagattgagcgccaaaaagcagagatggccctattgatgatggacgaagatgaagattccaaaaagcattttaactataataaaattgtggagcaccagaatctctctaagaagaaaaagaaacagctgatgaaaaagaaggagctaattgaagacgattttgaagtaaatgtgaatgacgctcgatttcaagccatgtatacatctcacctttttaatttggatccctctgacccaaactttaaaaaaaccaaagccatggagaagatcctcgaggaaaaggctcgccagagagaacgcaaagaacaggagcttacacaggccattaaaaaaaaagagagtgagattgaaaaggaatcccagcgaaagagcatcgacccggctctttcaatgctcatcaagtccatcaagactaagactgagcagttccaggctaggaagaaacagaaagttaagtag

SEQ ID NO: 97170 - DNA, 333 bp, Artificial Sequence
  derived and/or modified sequence
atgtcctccaagcaggagatcatgtccgatcagcgcttcaggcgagtggctaaagaccctcgcttctgggagatgcccgagaaggatcgcaaagtaaaaatcgataaaagattccgcgcaatgttccacgataaaaaattcaagctgaattacgccgtggacaagcggggaaggcccatctcacattccacaacggaagacctgaaacgattctacgacttatcagatagtgattctaacttatccggggaggactccaaggccttaagccagaagaagattaagaagaagaagacccagaccaagaaaaaaaagaagaagaaaaagaagtag

SEQ ID NO: 97171 - DNA, 3216 bp, Artificial Sequence
  derived and/or modified sequence
gcggacggtgagtggggatggactggagttgaagagctcgagatgaagggcttgagggcgtgtgttatttgttttcttcaagcatttggtcgagattaagaattaaaaatgtcatccaaacaagaaataatgagtgaccagcggtttagacgggttgcaaaggacccgagattttgggaaatgccagaaaaggatcgaaaagtcaaaattgacaagagatttcgagccatgtttcatgacaagaagttcaagttgaactatgccgtggataaaagagggcgccccattagccatagcactacagaggatttgaagcgtttttacgacctttcagattctgattccaatctctctggtgaagatagcaaagcattgagtcaaaagaaaataaagaagaaaaaaacccagactaaaaaagaaatcgattcaaaaaatctagttgagaaaaagaaagaaaccaagaaggctaatcacaagggttctgaaaataaaactgatttagataattctataggaattaaaaaaatgaaaacctcatgtaaatttaagatagattcaaacataagtccgaagaaggatagcaaagaatttacacaaaaaaataagaaagagaaaaaaaacattgttcaacatactacagactcttctctcgaagaaaaacaaaggacattagactcaggcacctctgaaattgtgaaatctcccagaatcgagtgttctaagacaagaagagaaatgcaatcagtggttcaactcataatgacaagagacagtgatggttatgaaaactcaacagatggtgaaatgtgtgacaaagatgctctggaggaagattcagaaagcgttagtgaaataggaagtgatgaggaatctgaaaatgaaattacaagtgttggtagagcttcaggtgatgacgatggaagtgaagatgatgaagaggaggatgaagatgaagaggaggatgaagatgaggatagtgaggatgatgataaaagtgacagtggccctgatcttgcaaggggtaaaggaaatatagaaactagttctgaagatgaagatgatacggcagatttgtttccagaagaatctggttttgagcatgcttggagagaattagataaagatgctcctcgtgctgatgagattacacgtcgattagcagtttgtaacatggactgggatagattaaaggcaaaagatttgctggctctgttcaattcatttaaacccaaaggaggtgtaatattttccgtcaagatatatccttcagaatttggaaaggagaggatgaaggaagagcaagttcaaggaccagtagagctattaagtattcctgaagatgccccagaaaaagactggacgtctagagaaaaattgagagattatcaattcaaacgactgaagtactattatgcagtagtagactgtgattctccggaaacagctagtaaaatttatgaggattgtgatggcctggaatttgaaagtagttgttctttcatagatctaaggtttataccagatgatattacttttgatgatgagcctaaggatgtagcctcagaagtgaatttaacagcatataaaccaaaatatttcacttctgctgcaatgggaacatcaacggtggaaatcacttgggatgagactgatcatgaaagaattacaatgctcaacaggaagtttaaaaaggaagagcttttggacatggattttcaagcctacttagcttcctctagtgaagatgaagaggagatagaagaggagctacaaggtgatgatggagtcaatgtagaagaagatgggaaaacaaagaaaagtcagaaggatgatgaagaacaaattgctaaatacaggcagctcttgcaggttattcaagaaaaagaaaagaaaggcaaagaaaatgatatggaaatggaaattaaatgggttccaggtcttaaagaaagtgcagaagagatggtcaaaaacaaattggaaggaaaggataaactgaccccttgggaacaatttttagagaagaagaaagagaaaaaaagactgaaaaggaaacagaaggctcttgctgaagaggccagtgaagaggaacttccctctgatgttgatttgaatgacccatactttgctgaagaagttaaacaaataggtataaataaaaaatcggtaaaatctgcaaaagatggcacatctccagaagaagaaattgaaatagaaagacaaaaggctgaaatggctttgcttatgatggatgaggacgaggacagtaagaaacacttcaattacaacaagattgtggagcaccagaatctgagcaaaaagaagaaaaagcagctcatgaaaaagaaggaattaatagaggatgactttgaggtaaatgttaacgatgcacggtttcaggcaatgtacacttcccacttgttcaatttggacccctcagatcccaatttcaagaaaacaaaagctatggaaaaaatccttgaggagaaggcccggcaaagagaacggaaagaacaagaacttactcaggcaataaagaaaaaagagagtgagattgaaaaggaatcacaaaggaagtccattgatcctgctttgtcaatgttgattaaatctataaaaaccaaaacagagcagtttcaagcaagaaaaaagcaaaaagtcaaataactggatgttacttatttttgaactgaatacatcttttcctaaaatgtacaaaaataataggagggaatatttattgggaacaaagctatctttcaagaacatgaataaaatctttttctggacatagtaaaatttttctccataaataattgtacttaattgtggatgactgacaaatttttattgtatattcctacagatcagtcataattaaattacctgcattatagggtttataaaatttttatattttacaatgttcagttctaactagtggaaagttactctagctttttaaaaggctgtttacaattctgtgtaaaaatagagcagtatctactcaagtttgtgtaaatgttagggataatttgaaaaatatatatatttaatacattaatttctctggaagcaggaggcatgtttaaataactattaaaataatttatttttctagccataaaggatggaagtcaagaactttttgttgtttagtcatgttaagtatagtttatgaaattaacttgtaaataaaagtgtaaaatattttcatta

SEQ ID NO: 97172 - DNA, 330 bp, Artificial Sequence
  derived and/or modified sequence
atgtcatccaaacaagaaataatgagtgaccagcggtttagacgggttgcaaaggacccgagattttgggaaatgccagaaaaggatcgaaaagtcaaaattgacaagagatttcgagccatgtttcatgacaagaagttcaagttgaactatgccgtggataaaagagggcgccccattagccatagcactacagaggatttgaagcgtttttacgacctttcagattctgattccaatctctctggtgaagatagcaaagcattgagtcaaaagaaaataaagaagaaaaaaacccagactaaaaaaaaaaaaaaaaaaaaaaaaaaa

SEQ ID NO: 97173 - DNA, 2556 bp, Artificial Sequence
  derived and/or modified sequence
atgagcagcaagcaggagatcatgagcgaccagagattcagaagagtggccaaggaccccagattctgggagatgcccgagaaggacagaaaggtgaagatcgacaagagattcagagccatgttccacgacaagaagttcaagctgaactacgccgtggacaagagaggcagacccatcagccacagcaccaccgaggacctgaagagattctacgacctgagcgacagcgacagcaacctgagcggcgaggacagcaaggccctgagccagaagaagatcaagaagaagaagacccagaccaagaaggagatcgacagcaagaacctggtggagaagaagaaggagaccaagaaggccaaccacaagggcagcgagaacaagaccgacctggacaacagcatcggcatcaagaagatgaagaccagctgcaagttcaagatcgacagcaacatcagccccaagaaggacagcaaggagttcacccagaagaacaagaaggagaagaagaacatcgtgcagcacaccaccgacagcagcctggaggagaagcagagaaccctggacagcggcaccagcgagatcgtgaagagccccagaatcgagtgcagcaagaccagaagagagatgcagagcgtggtgcagctgatcatgaccagagacagcgacggctacgagaacagcaccgacggcgagatgtgcgacaaggacgccctggaggaggacagcgagagcgtgagcgagatcggcagcgacgaggagagcgagaacgagatcaccagcgtgggcagagccagcggcgacgacgacggcagcgaggacgacgaggaggaggacgaggacgaggaggaggacgaggacgaggacagcgaggacgacgacaagagcgacagcggccccgacctggccagaggcaagggcaacatcgagaccagcagcgaggacgaggacgacaccgccgacctgttccccgaggagagcggcttcgagcacgcctggagagagctggacaaggacgcccccagagccgacgagatcaccagaagactggccgtgtgcaacatggactgggacagactgaaggccaaggacctgctggccctgttcaacagcttcaagcccaagggcggcgtgatcttcagcgtgaagatctaccccagcgagttcggcaaggagagaatgaaggaggagcaggtgcagggccccgtggagctgctgagcatccccgaggacgcccccgagaaggactggaccagcagagagaagctgagagactaccagttcaagagactgaagtactactacgccgtggtggactgcgacagccccgagaccgccagcaagatctacgaggactgcgacggcctggagttcgagagcagctgcagcttcatcgacctgagattcatccccgacgacatcaccttcgacgacgagcccaaggacgtggccagcgaggtgaacctgaccgcctacaagcccaagtacttcaccagcgccgccatgggcaccagcaccgtggagatcacctgggacgagaccgaccacgagagaatcaccatgctgaacagaaagttcaagaaggaggagctgctggacatggacttccaggcctacctggccagcagcagcgaggacgaggaggagatcgaggaggagctgcagggcgacgacggcgtgaacgtggaggaggacggcaagaccaagaagagccagaaggacgacgaggagcagatcgccaagtacagacagctgctgcaggtgatccaggagaaggagaagaagggcaaggagaacgacatggagatggagatcaagtgggtgcccggcctgaaggagagcgccgaggagatggtgaagaacaagctggagggcaaggacaagctgaccccctgggagcagttcctggagaagaagaaggagaagaagagactgaagagaaagcagaaggccctggccgaggaggccagcgaggaggagctgcccagcgacgtggacctgaacgacccctacttcgccgaggaggtgaagcagatcggcatcaacaagaagagcgtgaagagcgccaaggacggcaccagccccgaggaggagatcgagatcgagagacagaaggccgagatggccctgctgatgatggacgaggacgaggacagcaagaagcacttcaactacaacaagatcgtggagcaccagaacctgagcaagaagaagaagaagcagctgatgaagaagaaggagctgatcgaggacgacttcgaggtgaacgtgaacgacgccagattccaggccatgtacaccagccacctgttcaacctggaccccagcgaccccaacttcaagaagaccaaggccatggagaagatcctggaggagaaggccagacagagagagagaaaggagcaggagctgacccaggccatcaagaagaaggagagcgagatcgagaaggagagccagagaaagagcatcgaccccgccctgagcatgctgatcaagagcatcaagaccaagaccgagcagttccaggccagaaagaagcagaaggtgaagtag

SEQ ID NO: 97174 - DNA, 333 bp, Artificial Sequence
  derived and/or modified sequence
atgagcagcaagcaggagatcatgagcgaccagagattcagaagagtggccaaggaccccagattctgggagatgcccgagaaggacagaaaggtgaagatcgacaagagattcagagccatgttccacgacaagaagttcaagctgaactacgccgtggacaagagaggcagacccatcagccacagcaccaccgaggacctgaagagattctacgacctgagcgacagcgacagcaacctgagcggcgaggacagcaaggccctgagccagaagaagatcaagaagaagaagacccagaccaagaagaagaagaagaagaagaagaagtag

SEQ ID NO: 97175 - DNA, 1017 bp, Artificial Sequence
  derived and/or modified sequence
atgtcaagtaaaatggtcatctcagagccaggcttaaactgggacatctcccctaagaacggacttaagactttcttctcccgcgagaactataaggaccacagcatggccccctcactcaaagagcttagagttttaagtaaccgcagaatcggggaaaatctgaatgcatcagcatccagcgttgagaatgaaccagcagtgagcagcgcaactcaagccaaagaaaaagtaaaaacaaccatcggcatggtgcttttacccaagccccgggtgccttaccctagatttagtcgttttagccaacgcgaacagcgctcttacgttgacctgctcgtgaaatacgccaaaatccctgcgaactctaaagctgttggaatcaacaagaatgactacttgcagtacctcgatatgaagaagcacgtcaatgaagaggttacagagttcttgaaattcttgcaaaattccgccaaaaaatgtgcccaagattacaatatgctatccgatgatgcccggctgttcaccgaaaagatactccgtgcctgtatagagcaggttaaaaagtattctgagttttacaccctccacgaagtgacgtccctgatgggtttctttccattcagggttgaaatgggattgaagctggagaagacacttctggcactgggctccgtcaagtatgtcaagactgtgttcccatccatgccgattaaactgcagctttccaaggacgacatcgccaccatagagacctccgaacagaccgcagaagccatgcactacgacattagtaaggaccccaatgccgagaaactggtgagtaggtatcatcctcaaatcgcccttactagtcagtctctttttaccctgctgaacaatcacggccccacgtataaggagcagtgggagataccagtttgtatccaggtgatccctgtcgccggctccaaacccgtgaaggtgatttacattaattcaccattaccacagaaaaaaatgactatgagggagagatag

SEQ ID NO: 97176 - DNA, 438 bp, Artificial Sequence
  derived and/or modified sequence
atgtcatcaaagatggtgatctcagagcccggtctcaattgggacattagccccaaaaacggactcaagacttttttctccagagagaattataaagatcattctatggcaccttctctgaaggaactgagagtactcagcaacagacggatcggagaaaacttgaatgccagtgcatcctccgtggagaatgagccagctgtctctagcgccacacaggcaaaggaaaaggtcaaaactaccatcgggatggttttgctgccgaaaccccgagtcccttacccaaggttctctcgattctcgcagagggagcagcgtagttacgtcgacctcctggtcaagtacgctaaaatcccagccaactccaaagccgtcggcatcaacaagaatgactacctgcaatacctggatatgaagaaacacgtcaacgaagagtag

SEQ ID NO: 97177 - DNA, 300 bp, Artificial Sequence
  derived and/or modified sequence
atgagctctaaaatggttatctccgagcccggactcaactgggacatctcaccaaagaacggacttaagacattctttagccgcgagaattacaaagaccacagcatggctccatctctgaaggagctacgagtgctttctaatagacggatcggcgaaaacctaaatgccagcgccagttccgtggagaatgagccagcagtttcatcagcaacccaggcgaaagagaaagtgaaaacaaccattggtatggtcctgctcccaaagccaagagttccctatccgaggttttcacgatag

SEQ ID NO: 97178 - DNA, 285 bp, Artificial Sequence
  derived and/or modified sequence
atgtccagcaagatggtgatcagtgagcccgggctgaattgggacatctctcctaagaatggcctgaagaccttttttagccgggaaaattacaaggatcattccatggccccatctctaaaagagctgcgagtgctatcgaaccgaaggatcggggagaatcttaatgccagcgccagctcagtggagaacgaacctgcggtgtcatccgccacgcaggcgaaggaaaaggtcaaaactaccattggcatggtgctattgcctaaaccccgcgtcccctactag

SEQ ID NO: 97179 - DNA, 1017 bp, Artificial Sequence
  derived and/or modified sequence
atgagcagcaagatggtgatcagcgagcccggcctgaactgggacatcagccccaagaatggcctgaagaccttcttcagccgggagaactacaaggaccacagcatggcccccagcctgaaggagctgcgggtgctgagcaacagaagaattggagagaacctgaatgccagcgccagctctgtggagaatgaacctgctgtgagcagcgccacccaggccaaggagaaggtgaagaccaccatcggcatggtgctgctgcccaagccccgggtgccctacccccgcttcagccgcttcagccagcgggagcagaggagctatgtggacctgctggtgaagtatgccaagatcccagccaacagcaaggctgtgggcatcaacaagaatgactacctgcagtacctggacatgaagaagcacgtgaatgaggaggtgacagagttcctgaagttcctgcagaacagcgccaagaagtgtgcccaggactacaacatgctgagtgatgatgcccggctcttcacagagaagatcctgcgggcctgcatcgagcaggtgaagaagtacagcgagttctacaccctgcacgaggtgaccagcctgatgggcttcttccccttccgggtggagatgggcctgaagctggagaagaccctgctggccctgggctctgtgaagtatgtgaagacagtgttccccagcatgcccatcaagctgcagctgagcaaggatgacatcgccaccatcgagaccagcgagcagacagctgaggccatgcactatgacatcagcaaggaccccaatgctgagaagctggtgagccgctaccacccccagatcgccctgaccagccagagcctcttcaccctgctgaacaaccacggccccacctacaaggagcagtgggagatccctgtgtgcatccaggtgattcctgtggccggcagcaagcctgtgaaggtgatctacatcaacagccccctgccccagaagaagatgaccatgagggagaggtag

SEQ ID NO: 97180 - DNA, 438 bp, Artificial Sequence
  derived and/or modified sequence
atgagcagcaagatggtgatcagcgagcccggcctgaactgggacatcagccccaagaatggcctgaagaccttcttcagccgggagaactacaaggaccacagcatggcccccagcctgaaggagctgcgggtgctgagcaacagaagaattggagagaacctgaatgccagcgccagctctgtggagaatgaacctgctgtgagcagcgccacccaggccaaggagaaggtgaagaccaccatcggcatggtgctgctgcccaagccccgggtgccctacccccgcttcagccgcttcagccagcgggagcagaggagctatgtggacctgctggtgaagtatgccaagatcccagccaacagcaaggctgtgggcatcaacaagaatgactacctgcagtacctggacatgaagaagcacgtgaatgaggagtag

SEQ ID NO: 97181 - DNA, 300 bp, Artificial Sequence
  derived and/or modified sequence
atgagcagcaagatggtgatcagcgagcccggcctgaactgggacatcagccccaagaatggcctgaagaccttcttcagccgggagaactacaaggaccacagcatggcccccagcctgaaggagctgcgggtgctgagcaacagaagaattggagagaacctgaatgccagcgccagctctgtggagaatgaacctgctgtgagcagcgccacccaggccaaggagaaggtgaagaccaccatcggcatggtgctgctgcccaagccccgggtgccctacccccgcttcagcaggtag

SEQ ID NO: 97182 - DNA, 285 bp, Artificial Sequence
  derived and/or modified sequence
atgagcagcaagatggtgatcagcgagcccggcctgaactgggacatcagccccaagaatggcctgaagaccttcttcagccgggagaactacaaggaccacagcatggcccccagcctgaaggagctgcgggtgctgagcaacagaagaattggagagaacctgaatgccagcgccagctctgtggagaatgaacctgctgtgagcagcgccacccaggccaaggagaaggtgaagaccaccatcggcatggtgctgctgcccaagccccgggtgccctactag

SEQ ID NO: 97183 - DNA, 1017 bp, Artificial Sequence
  derived and/or modified sequence
atgagcagcaagatggtgatcagcgagcccggcctgaactgggacattagccccaagaatggcttaaaaaccttcttttcccgagagaactacaaagaccattccatggcgcccagccttaaggaactgagggtgcttagcaacagaagaattggcgaaaacctgaacgcgtccgcttcttctgttgaaaacgaaccagccgtaagctcagccacgcaagctaaggagaaggtgaagaccactatagggatggtgctgctgcccaaaccgcgggtgccttacccccggttttctcgcttctcacagcgggagcagcggagctacgtggacctgctagtgaagtacgcaaagattcccgccaatagcaaagctgtcggaattaataaaaatgattacctccaatacctggacatgaagaagcacgtcaatgaggaggtcaccgagttccttaagtttctccagaattccgctaaaaaatgcgctcaagattataacatgctatctgatgacgcacggctgttcaccgagaagattcttagagcgtgcattgagcaggtgaaaaagtactctgagttttacactctccatgaagtgacatcgctcatgggcttcttcccgtttcgggttgaaatgggactgaaactggagaaaaccttactggctctgggcagtgtcaagtacgtgaagacagtgtttccaagtatgcccataaagctgcagctctctaaagacgacatcgctaccatagaaacttccgagcagactgctgaggcaatgcactatgacatctctaaggacccaaatgcagagaaactcgtttcaagataccatccccaaattgctctcactagtcaatccctcttcacattactgaacaaccacgggccaacgtataaagagcagtgggaaattccggtttgtatccaagtcattccagtggcaggctccaagcccgttaaggtgatttatattaactcaccgcttcctcagaagaagatgaccatgcgggagcggtag

SEQ ID NO: 97184 - DNA, 438 bp, Artificial Sequence
  derived and/or modified sequence
atgagcagcaagatggtgatcagcgagcccggcctgaactgggacattagcccaaagaatggattgaaaaccttcttctcacgggagaactataaagaccacagcatggcaccttctctgaaggaactgagggttctctccaatcggcgcatcggcgagaacctgaatgccagcgcatcatcggtggagaacgagcccgcagttagctccgcgacacaggcgaaggagaaagttaagacaacgatcgggatggtgttactcccaaagccccgggtgccgtaccctcggttctctcgtttcagccaacgggagcaacgctcatacgtggacttgctcgtcaaatacgccaaaatcccggcaaattctaaggccgtcgggattaataagaacgattacctgcaatacttggacatgaaaaagcatgtgaatgaagaatag

SEQ ID NO: 97185 - DNA, 300 bp, Artificial Sequence
  derived and/or modified sequence
atgagcagcaagatggtgatcagcgagcccggcctgaactgggacatcagccccaagaacggtctgaaaaccttctttagtcgggagaattataaagatcactccatggcgccgtccctgaaagagctcagggttctgtcgaataggcgaataggtgagaacctcaatgcatcagctagctcagtagagaacgagccagccgtctcctcagccacccaggcaaaagaaaaagtgaagaccaccatcggtatggtcctgctccccaaacccagggtgccttatcccagattcagtagatag

SEQ ID NO: 97186 - DNA, 285 bp, Artificial Sequence
  derived and/or modified sequence
atgagcagcaagatggtgatcagcgagcccggcctgaactgggacatttctcccaagaatggactcaagacctttttttcccgagagaactacaaggaccacagcatggctccatctctgaaagagctgagggtgcttagcaatagacgaatcggagagaaccttaacgcatcagccagttccgttgagaacgagcctgcagtgagctcagccacccaggctaaagagaaggtgaagaccactatcggcatggtcttgctgcctaagcccagagtgccttactag

SEQ ID NO: 97187 - DNA, 1470 bp, Artificial Sequence
  derived and/or modified sequence
aggggcgggaggagggaacatggcggccgggccaggaccctttgctcctggctctgcgcggctcctacccctgctttgcttgcccttttacctgcttttctggaaccttgtttcccctctctttgcgtcccctttccctcagccgtttcttttgccttcctcgactattcccccccagctccacactgggtcgaagtgtgagaggtagattaagtgggagccggtcgggcccgttcggtgtcgagagaccgactcctaaatttgattaggttctcgcaggtcactttatcagtctgcctggggtcacaggagaagtactgaacatgagagatcaagcctgatttgtagtcctgatgatgtctctgagtaagttctggagggatcctgcctcttggagccttcgcagccaggcagctgtgaactgtgagctagagtgaagcagaaatctaggaagatgagctccaagatggtcataagtgaaccaggactgaattgggatatttcccccaaaaatggccttaagacatttttctctcgagaaaattataaagatcattccatggctccaagtttaaaagaactacgtgttttatccaacagacgtataggagaaaatttgaatgcctcagcaagttctgtagaaaatgagccggcagttagttcagcaactcaagcaaaggaaaaagttaaaaccacaattggaatggttcttcttccaaaaccaagagttccttatcctcgtttctctcgtttctcacagagagagcagaggagttatgtggacttgttggttaaatacgcaaagattcctgcaaattccaaagctgttggaataaataaaaatgactacttgcagtacttggatatgaaaaaacatgtgaacgaagaagttactgagttcctaaagtttttgcagaattctgcaaagaaatgtgcgcaggattataatatgctttctgatgatgcccgtctcttcacagagaaaattttaagagcttgcattgaacaagtgaaaaagtattcagaattctatactctccacgaggtcaccagcttaatgggattcttcccattcagagtagagatgggattaaagttagaaaaaactcttctcgcattgggcagtgtaaaatatgtgaaaacagtatttccctcaatgcctataaagttgcagctgtcaaaggacgatatagctaccattgaaacgtcagaacaaacagctgaagctatgcattatgatattagtaaagatccaaatgcagagaagcttgtttccagatatcaccctcagatagctctaactagtcagtcattatttaccttattaaataatcatggaccaacgtacaaggaacagtgggaaattccagtgtgtattcaagtaatacctgttgcaggttcaaaaccagttaaagtaatatatattaattcaccacttccccaaaagaaaatgactatgagagagagaaa

SEQ ID NO: 97188 - DNA, 559 bp, Artificial Sequence
  derived and/or modified sequence
aaatatggtcttttttgggcgcgcgcgacaatctgagtaagttctggagggatcctgcctcttggagccttcgcagccaggcagctgtgaactgtgagctagagtgaagcagaaatctaggaagatgagctccaagatggtcataagtgaaccaggactgaattgggatatttcccccaaaaatggccttaagacatttttctctcgagaaaattataaagatcattccatggctccaagtttaaaagaactacgtgttttatccaacagacgtataggagaaaatttgaatgcctcagcaagttctgtagaaaatgagccggcagttagttcagcaactcaagcaaaggaaaaagttaaaaccacaattggaatggttcttcttccaaaaccaagagttccttatcctcgtttctctcgtttctcacagagagagcagaggagttatgtggacttgttggttaaatacgcaaagattcctgcaaattccaaagctgttggaataaataaaaatgactacttgcagtacttggatatgaaaaaacatgtgaacgaagaa

SEQ ID NO: 97189 - DNA, 584 bp, Artificial Sequence
  derived and/or modified sequence
aaatatggtcttttttgggcgcgcgcgacaatgtgaggagtggggtggagcgtgtgtggtgtgtggctgcggcctgggcaagagccgccgcggaccatgaggttctcgcaggtcactttatcagtctgcctggggtcacaggagaagtactgaacatgagagatcaagcctgatttgtagtcctgatgatgtctctgagtaagttctggagggatcctgcctcttggagccttcgcagccaggcagctgtgaactgtgagctagagtgaagcagaaatctaggaagatgagctccaagatggtcataagtgaaccaggactgaattgggatatttcccccaaaaatggccttaagacatttttctctcgagaaaattataaagatcattccatggctccaagtttaaaagaactacgtgttttatccaacagacgtataggagaaaatttgaatgcctcagcaagttctgtagaaaatgagccggcagttagttcagcaactcaagcaaaggaaaaagttaaaaccacaattggaatggttcttcttccaaaaccaagagttccttatcctcgtttctctcgtt

SEQ ID NO: 97190 - DNA, 568 bp, Artificial Sequence
  derived and/or modified sequence
cacatcctttaaatatggtcttttttgggcgcgcgcgacaatgtgaggagtggggtggagcgtgtgtggtgtgtggctgcggcctgggcaagagccgccgcggaccatgaggtcactttatcagtctgcctggggtcacaggagaagtactgaacatgagagatcaagcctgatttgtagtcctgatgatgtctctgagtaagttctggagggatcctgcctcttggagccttcgcagccaggcagctgtgaactgtgagctagagtgaagcagaaatctaggaagatgagctccaagatggtcataagtgaaccaggactgaattgggatatttcccccaaaaatggccttaagacatttttctctcgagaaaattataaagatcattccatggctccaagtttaaaagaactacgtgttttatccaacagacgtataggagaaaatttgaatgcctcagcaagttctgtagaaaatgagccggcagttagttcagcaactcaagcaaaggaaaaagttaaaaccacaattggaatggttcttcttccaaaaccaagagttccttat

SEQ ID NO: 97191 - DNA, 1017 bp, Artificial Sequence
  derived and/or modified sequence
atgtctagtaagatggtgatctctgagccaggacttaattgggatatctctcccaaaaatgggctgaagaccttctttagtagagagaattacaaagatcactccatggcaccctccttgaaggagctacgtgtgctttccaacagacgtattggcgagaatctgaatgctagcgcctccagcgtggagaacgagcctgctgttagcagtgccacacaagctaaggaaaaggtgaaaacaactatagggatggtgctactgccgaaacccagggttccttaccccaggttctctagatttagtcaacgcgagcagcgctcctatgtggacctgctggtgaagtacgctaaaatccccgcaaattctaaggcggttgggattaacaagaacgactacctgcagtatctggacatgaagaaacacgtgaatgaggaggtaacagagttccttaaatttcttcagaactccgccaagaaatgtgcacaagactacaacatgctgagcgacgatgctcgactgttcaccgagaagatattgcgagcctgcattgagcaggttaaaaaatacagcgagttctatacacttcacgaagtgacaagtctcatggggttcttccccttcagagttgaaatgggactgaagttagagaagactttactggcattggggtctgtgaagtatgtgaaaaccgtgttcccttctatgcccatcaaactccagttgtctaaggacgatatcgctaccatcgagaccagcgaacagaccgctgaagccatgcattatgacatctctaaagatccaaacgctgagaaactggtttcgagataccacccacagatcgctctcaccagccagtctctattcaccctcctcaataaccacggcccaacatataaagagcaatgggagatccccgtatgtattcaagtcattcctgtagctgggtccaaacctgtcaaggtgatctacattaattcacctctgccccagaagaaaatgaccatgcgtgagagatag

SEQ ID NO: 97192 - DNA, 438 bp, Artificial Sequence
  derived and/or modified sequence
atgtcatcgaagatggtaattagtgagccgggactgaattgggacatctcccccaagaatggattgaaaacattcttcagcagagagaattataaagaccacagtatggctccgagtctgaaggagcttagagtgctctctaacagacgtattggtgagaatctgaatgcatccgcgagtagcgtcgagaatgagccggcagtatcgtctgccactcaggcaaaagagaaggtgaaaaccactataggtatggtccttctgcctaaaccaagagttccttacccccgattctctcggttctctcagcgtgagcagaggagttacgtcgatcttctggtaaagtacgcaaagatcccagcaaactcaaaagccgtgggaatcaataaaaacgactatcttcagtatctggatatgaaaaagcacgtcaacgaggagtag

SEQ ID NO: 97193 - DNA, 300 bp, Artificial Sequence
  derived and/or modified sequence
atgtcatctaaaatggtgatatccgagccaggtctcaactgggatatatccccaaaaaatggactgaagactttcttctcacgcgaaaattacaaggaccacagcatggccccttcgctcaaggagttacgcgttctgagtaataggcggatcggggaaaatttgaacgcctctgccagcagtgtagagaatgagccagccgtgtcttctgctacccaggcaaaagaaaaggtgaagacaactattggtatggtcctgcttcccaagcctcgggtaccctacccaagattttcccggtag

SEQ ID NO: 97194 - DNA, 285 bp, Artificial Sequence
  derived and/or modified sequence
atgagctctaagatggtcatcagcgagcctggtctcaattgggacatctctcccaagaacgggctgaagaccttttttagccgggagaattacaaagatcacagtatggcaccgagtttgaaggaactgagagttctttccaacaggcgcatcggtgaaaatctgaatgcaagcgccagctccgtagaaaatgagccagccgtatcgagcgccacacaggctaaggagaaagtgaaaacgacaataggcatggtcctcctgccaaaacccagagtaccctactag

SEQ ID NO: 97195 - DNA, 1017 bp, Artificial Sequence
  derived and/or modified sequence
atgagcagcaagatggtgatcagcgagcccggcctgaactgggacatcagccccaagaacggcctgaagaccttcttcagcagagagaactacaaggaccacagcatggcccccagcctgaaggagctgagagtgctgagcaacagaagaatcggcgagaacctgaacgccagcgccagcagcgtggagaacgagcccgccgtgagcagcgccacccaggccaaggagaaggtgaagaccaccatcggcatggtgctgctgcccaagcccagagtgccctaccccagattcagcagattcagccagagagagcagagaagctacgtggacctgctggtgaagtacgccaagatccccgccaacagcaaggccgtgggcatcaacaagaacgactacctgcagtacctggacatgaagaagcacgtgaacgaggaggtgaccgagttcctgaagttcctgcagaacagcgccaagaagtgcgcccaggactacaacatgctgagcgacgacgccagactgttcaccgagaagatcctgagagcctgcatcgagcaggtgaagaagtacagcgagttctacaccctgcacgaggtgaccagcctgatgggcttcttccccttcagagtggagatgggcctgaagctggagaagaccctgctggccctgggcagcgtgaagtacgtgaagaccgtgttccccagcatgcccatcaagctgcagctgagcaaggacgacatcgccaccatcgagaccagcgagcagaccgccgaggccatgcactacgacatcagcaaggaccccaacgccgagaagctggtgagcagataccacccccagatcgccctgaccagccagagcctgttcaccctgctgaacaaccacggccccacctacaaggagcagtgggagatccccgtgtgcatccaggtgatccccgtggccggcagcaagcccgtgaaggtgatctacatcaacagccccctgccccagaagaagatgaccatgagagagagatag

SEQ ID NO: 97196 - DNA, 438 bp, Artificial Sequence
  derived and/or modified sequence
atgagcagcaagatggtgatcagcgagcccggcctgaactgggacatcagccccaagaacggcctgaagaccttcttcagcagagagaactacaaggaccacagcatggcccccagcctgaaggagctgagagtgctgagcaacagaagaatcggcgagaacctgaacgccagcgccagcagcgtggagaacgagcccgccgtgagcagcgccacccaggccaaggagaaggtgaagaccaccatcggcatggtgctgctgcccaagcccagagtgccctaccccagattcagcagattcagccagagagagcagagaagctacgtggacctgctggtgaagtacgccaagatccccgccaacagcaaggccgtgggcatcaacaagaacgactacctgcagtacctggacatgaagaagcacgtgaacgaggagtag

SEQ ID NO: 97197 - DNA, 300 bp, Artificial Sequence
  derived and/or modified sequence
atgagcagcaagatggtgatcagcgagcccggcctgaactgggacatcagccccaagaacggcctgaagaccttcttcagcagagagaactacaaggaccacagcatggcccccagcctgaaggagctgagagtgctgagcaacagaagaatcggcgagaacctgaacgccagcgccagcagcgtggagaacgagcccgccgtgagcagcgccacccaggccaaggagaaggtgaagaccaccatcggcatggtgctgctgcccaagcccagagtgccctaccccagattcagcagatag

SEQ ID NO: 97198 - DNA, 285 bp, Artificial Sequence
  derived and/or modified sequence
atgagcagcaagatggtgatcagcgagcccggcctgaactgggacatcagccccaagaacggcctgaagaccttcttcagcagagagaactacaaggaccacagcatggcccccagcctgaaggagctgagagtgctgagcaacagaagaatcggcgagaacctgaacgccagcgccagcagcgtggagaacgagcccgccgtgagcagcgccacccaggccaaggagaaggtgaagaccaccatcggcatggtgctgctgcccaagcccagagtgccctactag

SEQ ID NO: 97199 - protein, 263 aa, Artificial Sequence
  derived and/or modified sequence
MFYFHCPPQLEGTATFGNHSSGDFDDGFLRRKQRRNRTTFTLQQLEALEAVFAQTHYPDVFTREELAMKINLTEARVQVWFQNRRAKWRKTERGASDQEPGAKEPMAEVTPPPVRNINSPPPGDQARSKKEALEAQQSLGRTVGPAGPFFPSCLPGTLLNTATYAQALSHVASLKGGPLCSCCVPDPMGLSFLPTYGCQSNRTASVATLRMKAREHSEAVLQSANLLPSTSSSPGPVAKPAPPDGSQEKTSPTKEQSEAEKSV

SEQ ID NO: 97200 - protein, 268 aa, Artificial Sequence
  derived and/or modified sequence
MVLMSCDQRLISLLLVGTATFGNHSSGDFDDGFLRRKQRRNRTTFTLQQLEALEAVFAQTHYPDVFTREELAMKINLTEARVQVWFQNRRAKWRKTERGASDQEPGAKEPMAEVTPPPVRNINSPPPGDQARSKKEALEAQQSLGRTVGPAGPFFPSCLPGTLLNTATYAQALSHVASLKGGPLCSCCVPDPMGLSFLPTYGCQSNRTASVATLRMKAREHSEAVLQSANLLPSTSSSPGPVAKPAPPDGSQEKTSPTKEQSEAEKSV

SEQ ID NO: 97201 - DNA, 792 bp, Artificial Sequence
  derived and/or modified sequence
atgttctattttcattgtcctccccaactggaaggaaccgccacatttggtaatcactcttccggggactttgacgatggcttcctgcgcagaaagcagcgccggaaccggacgactttcactctccaacaactggaggcattggaggccgtgtttgcacaaacccactaccccgatgtttttacacgggaagaactggccatgaaaatcaatctgacagaggcgagagtccaggtatggtttcagaaccgtagggcaaagtggagaaagactgagagaggagcttcagaccaggagcctggcgcaaaagagcccatggctgaagttacaccaccccctgtgaggaatatcaattctcccccaccaggagaccaagccagatcaaagaaggaggccctggaggctcagcagagtctgggaaggacagtcgggccagccgggcccttttttccttcatgtctacccggaacactactgaatactgcaacttacgctcaggctttaagccatgttgcatctcttaagggcggcccattgtgtagctgctgtgtgccggaccctatggggctgtcattcctgcctacctacggctgccagtcgaatagaacggcttcagttgccacgctccgcatgaaggcacgagagcactctgaggcagtgctgcagagcgcaaacctgctcccttccacatcctcaagccctggcccagtggccaagcccgccccaccagacggatcacaggaaaagaccagcccaaccaaagagcagtccgaagcagagaaaagtgtgtag

SEQ ID NO: 97202 - DNA, 807 bp, Artificial Sequence
  derived and/or modified sequence
atggttttgatgtcctgcgaccaaaggctgatcagccttttactagtgggtactgcaacgtttggtaatcactccagtggagactttgatgacggctttttgcggcggaaacaacgaagaaataggacaacatttaccctgcagcaactggaggctctggaggcagtcttcgctcagacacattaccctgacgttttcactagggaagagcttgccatgaaaatcaatttaaccgaggctcgggtccaggtgtggttccagaaccgccgggccaagtggagaaaaaccgagcggggagcttcagaccaggagcccggggccaaagagcctatggctgaggttacccccccaccagtcaggaatatcaattcgcctccgcccggcgatcaagctcggagtaagaaggaagccctggaggcacagcagagcctcgggcgtaccgttgggcctgcgggccctttctttccttcatgtctgcctggtacacttctgaacacagccacttatgctcaggccctaagccacgtggcctctctgaaggggggtccactgtgcagttgttgcgtgccagaccccatgggactcagcttcttacctacgtacggttgccaatcgaaccgaaccgcatccgtagctacactgcggatgaaagcgcgtgagcactccgaagccgtcttacagtctgccaatctgctgccatccacatcaagtagcccaggcccagttgccaaacctgctccacctgacggcagccaggaaaaaacatccccgaccaaggaacaatccgaggctgagaagtccgtgtag

SEQ ID NO: 97203 - DNA, 792 bp, Artificial Sequence
  derived and/or modified sequence
atgttctacttccactgccccccccagctggagggcacagccaccttcggcaaccacagcagcggggactttgatgatggcttcctgcggaggaagcagaggaggaacagaaccaccttcaccctgcagcagctggaggccctggaggccgtgtttgcccagacccactacccagatgtgttcacccgggaggagctggccatgaagatcaacctgacagaggcccgggtgcaggtgtggttccagaacagaagagccaagtggaggaagacagagcggggggccagtgaccaggagcccggggccaaggagcccatggccgaggtgaccccacctcctgtgaggaacatcaacagccccccacctggggaccaggcccggagcaagaaggaggccctggaggcccagcagagcctgggccgcacagtgggccctgctggccccttcttccccagctgcctgcccggcaccctgctgaacacagccacctacgcccaggccctgagccacgtggccagcctgaagggcggccccctgtgcagctgctgcgtgcctgaccccatgggcctgtccttcctgcccacctacggctgccagagcaacagaacagcctctgtggccaccctgaggatgaaggcccgggagcacagcgaggccgtgctgcagagcgccaacctgctgcccagcaccagcagcagccctggccctgtggccaagccagcccccccagatggcagccaggagaagaccagccccaccaaggagcagagcgaggccgagaagtctgtgtag

SEQ ID NO: 97204 - DNA, 807 bp, Artificial Sequence
  derived and/or modified sequence
atggtgctgatgagctgtgaccagaggctcatcagcctgctgctggtgggcacagccacctttggaaaccacagcagcggggactttgatgatggcttcctgcggaggaagcagaggaggaacagaaccaccttcaccctgcagcagctggaggccctggaggccgtgtttgcccagacccactacccagatgtgttcacccgggaggagctggccatgaagatcaacctgacagaggcccgggtgcaggtgtggttccagaacagaagagccaagtggaggaagacagagcggggggccagtgaccaggagcccggggccaaggagcccatggccgaggtgaccccacctcctgtgaggaacatcaacagccccccacctggggaccaggcccggagcaagaaggaggccctggaggcccagcagagcctgggccgcacagtgggccctgctggccccttcttccccagctgcctgcccggcaccctgctgaacacagccacctacgcccaggccctgagccacgtggccagcctgaagggcggccccctgtgcagctgctgcgtgcctgaccccatgggcctgtccttcctgcccacctacggctgccagagcaacagaacagcctctgtggccaccctgaggatgaaggcccgggagcacagcgaggccgtgctgcagagcgccaacctgctgcccagcaccagcagcagccctggccctgtggccaagccagcccccccagatggcagccaggagaagaccagccccaccaaggagcagagcgaggccgagaagtctgtgtag

SEQ ID NO: 97205 - DNA, 792 bp, Artificial Sequence
  derived and/or modified sequence
atgttctacttccactgccccccccagctggagggcaccgccaccttcggaaatcactcgtcaggggattttgacgatggtttccttcgacgaaaacagcggcgtaaccgcacaaccttcaccctacagcagcttgaggccctggaagccgttttcgcccagacacactatcccgatgttttcacccgggaagaattggcaatgaagataaacctgaccgaggctagggtgcaggtatggtttcagaatcggagggcgaaatggcgcaaaactgaaaggggcgcctctgatcaagaacctggcgctaaggagccaatggcagaagtaacccctccacccgtgagaaacatcaactctccccctcctggggaccaggcccggagtaaaaaggaagcccttgaagcccagcaatctttgggaaggacagtgggcccagcaggcccgttcttcccatcttgtctacctggcaccctgctgaatacagctacatacgctcaagcactcagtcacgtcgcctctctgaaaggcggccctctgtgttcctgttgtgtccctgatccaatgggcctgtctttcctaccgacctatggttgtcaatctaaccgaactgcgagcgtagcaacgcttcgcatgaaggccagagagcactctgaggccgtgctgcagtccgctaatcttctcccctctaccagttcctctcccgggcctgtcgctaagccagcgccacccgatggctctcaggaaaagacaagtcccactaaggagcagtcagaagctgagaaaagcgtgtag

SEQ ID NO: 97206 - DNA, 807 bp, Artificial Sequence
  derived and/or modified sequence
atggtgctgatgagctgcgaccagcggctgatcagcctgctgctggtcggaacagccacgttcggaaatcacagctctggcgatttcgacgatggatttctgaggcggaaacagaggcgcaatcggacgacattcacactgcaacagctcgaagcccttgaagcagtgttcgcacagacccactatcccgatgttttcaccagggaggagctcgccatgaagataaacctgaccgaagcgcgtgtgcaggtgtggttccagaacaggagggctaagtggcggaagaccgagcggggagcctctgaccaggagccaggagctaaggagcccatggctgaggtcacccctccacccgtccgaaatattaattccccacctcctggagatcaagctaggagtaagaaagaggctctggaagctcagcagagtcttgggaggaccgtcggtccggcaggcccgttcttcccttcatgcctgccaggcacacttctgaacaccgcgacttacgcacaggcactgtcccatgtggcttcgttgaagggcggtcccctttgctcatgttgcgtgcccgatcctatgggattatctttcctgcccacctatggctgtcagagcaatcgtaccgcttcagtggcgaccctccgcatgaaagcccgggaacacagcgaggctgtcctccagtctgccaacctgcttccatcaacctccagttccccaggcccagttgcaaagccagcaccccctgacggctcacaggagaaaacttctcctaccaaagagcaaagcgaggcagaaaagagcgtatag

SEQ ID NO: 97207 - DNA, 792 bp, Artificial Sequence
  derived and/or modified sequence
atgttttattttcactgtccccctcagctggagggaacagcaacatttggaaaccacagcagcggtgactttgacgacgggttcctgcgccgaaaacagcggaggaatcggacgacattcacacttcaacagctcgaggctttagaagccgtcttcgcacagactcactatcctgacgtgttcacaagagaggaattggccatgaaaattaacctaacagaagcaagggtgcaagtttggttccagaaccgtcgcgcaaagtggaggaaaactgagcgtggagcatcagaccaagagcctggcgctaaggagccaatggcagaagttactccccctcccgtgcgcaacataaattctcctccccctggcgaccaggctcggtcgaagaaggaggcgctggaagctcagcaaagtctaggccgtaccgtggggccagccggtcctttctttccttcctgtttaccaggtactcttctcaacaccgccacctacgctcaggcactgagtcacgtcgcctcattaaaagggggacccttatgcagctgctgtgttccagatccgatgggactgtccttcctgccgacgtatggatgccagagtaatcgtaccgcttcggttgccacgctcagaatgaaggcccgtgagcattccgaggccgtgttacaaagcgccaatttattgccatcaacctcttcgagtcctggccctgttgcgaagcctgccccaccagacggtagtcaggaaaaaacgtcccccaccaaagagcagagcgaggccgaaaagtcagtgtag

SEQ ID NO: 97208 - DNA, 807 bp, Artificial Sequence
  derived and/or modified sequence
atggtcctgatgagctgcgaccagcgactcatcagtctccttctggtcgggaccgctacatttgggaatcactccagtggcgatttcgacgacggattcctcagacggaaacagcggaggaacaggaccacgttcacattacagcagcttgaggctctggaggccgtgtttgcccagacacactaccccgatgtctttacacgagaggaactcgcaatgaagatcaacctaactgaagcaagggtgcaggtttggttccagaatagacgtgctaagtggagaaagacagagcgcggtgcttctgaccaagagccgggtgccaaggaaccaatggctgaggtaacacctcccccagttcggaatatcaattcaccccctccaggagatcaggcgaggtctaagaaggaggcactggaggcccagcagagtctcggacgcactgtaggacctgcgggtccattcttccctagttgcctcccgggtacactgctgaacacggcaacctatgctcaggcactctcccacgtggctagcctcaagggtgggccactgtgctcatgttgtgttcccgaccccatgggcctgtcctttctcccgacctacggctgtcagagcaaccggaccgcctccgtggcaactttacgtatgaaagctagggagcacagtgaagctgttcttcagtctgcgaatttgctaccctccactagctcatcgccgggacctgtggctaagcccgctccgccagatggcagccaagagaagacctctcccacgaaagaacagtccgaagctgaaaagagcgtctag

SEQ ID NO: 97209 - DNA, 792 bp, Artificial Sequence
  derived and/or modified sequence
atgttctacttccactgccccccccagctggagggcaccgccaccttcggcaaccacagcagcggcgacttcgacgacggcttcctgagaagaaagcagagaagaaacagaaccaccttcaccctgcagcagctggaggccctggaggccgtgttcgcccagacccactaccccgacgtgttcaccagagaggagctggccatgaagatcaacctgaccgaggccagagtgcaggtgtggttccagaacagaagagccaagtggagaaagaccgagagaggcgccagcgaccaggagcccggcgccaaggagcccatggccgaggtgacccccccccccgtgagaaacatcaacagccccccccccggcgaccaggccagaagcaagaaggaggccctggaggcccagcagagcctgggcagaaccgtgggccccgccggccccttcttccccagctgcctgcccggcaccctgctgaacaccgccacctacgcccaggccctgagccacgtggccagcctgaagggcggccccctgtgcagctgctgcgtgcccgaccccatgggcctgagcttcctgcccacctacggctgccagagcaacagaaccgccagcgtggccaccctgagaatgaaggccagagagcacagcgaggccgtgctgcagagcgccaacctgctgcccagcaccagcagcagccccggccccgtggccaagcccgccccccccgacggcagccaggagaagaccagccccaccaaggagcagagcgaggccgagaagagcgtgtag

SEQ ID NO: 97210 - DNA, 807 bp, Artificial Sequence
  derived and/or modified sequence
atggtgctgatgagctgcgaccagagactgatcagcctgctgctggtgggcaccgccaccttcggcaaccacagcagcggcgacttcgacgacggcttcctgagaagaaagcagagaagaaacagaaccaccttcaccctgcagcagctggaggccctggaggccgtgttcgcccagacccactaccccgacgtgttcaccagagaggagctggccatgaagatcaacctgaccgaggccagagtgcaggtgtggttccagaacagaagagccaagtggagaaagaccgagagaggcgccagcgaccaggagcccggcgccaaggagcccatggccgaggtgacccccccccccgtgagaaacatcaacagccccccccccggcgaccaggccagaagcaagaaggaggccctggaggcccagcagagcctgggcagaaccgtgggccccgccggccccttcttccccagctgcctgcccggcaccctgctgaacaccgccacctacgcccaggccctgagccacgtggccagcctgaagggcggccccctgtgcagctgctgcgtgcccgaccccatgggcctgagcttcctgcccacctacggctgccagagcaacagaaccgccagcgtggccaccctgagaatgaaggccagagagcacagcgaggccgtgctgcagagcgccaacctgctgcccagcaccagcagcagccccggccccgtggccaagcccgccccccccgacggcagccaggagaagaccagccccaccaaggagcagagcgaggccgagaagagcgtgtag

SEQ ID NO: 97211 - DNA, 3216 bp, Artificial Sequence
  derived and/or modified sequence
gccgaggtatgctcggctcctgacccactcgccgggccccgagcgccgggccttggggctcggctgccttcctggcctgagctgcagctcgcagatggccttgcgcgctagccggacctggctgcggtggcccgggtgcagggcttctggctgggaccccagagagccagaaactacgctgcggggtttggtgctggggccagggtgagggcacggccgtccgggaggtggacacacccgaaggactgccctgtggggttgctgcttgcgacggggctgccgccttccctcctgtcccccgcagtgagatgagggcgttgggagggactttccaggaggggagcgccgggtgcgccctagggctgggcgggagcgctggcagagggagacttgaagctctatcgctgtttgctttgcagccaggcaggagcaacgcgcgcgggtccgttctgctgccaccctcccaggtctcggccgtccagccgatctgacagccggcgatgttttatttccactgcccgccacagctagagggcactgcaacctttggcaatcactcttcgggggattttgatgacgggtttctgcgtagaaaacagcgccggaaccggacgacgttcactcttcagcagctggaagctctcgaggccgtttttgcccaaacacactatccagatgtcttcaccagagaagagctcgccatgaaaataaacctcacagaagccagagtgcaggtttggttccagaacagaagggccaaatggaggaagacagagagaggggcctcagaccaggagccaggagccaaggagcccatggcagaggtgacacctcctccagtgagaaacatcaactccccgccccctggggaccaagcccggagtaagaaggaggcgctggaggcccagcagagcctggggcgaacggtaggtcctgcagggcctttcttcccctcctgcttgccggggactctcctgaacacggccacctacgcccaggccttgtcccatgtggcttccctcaaagggggcccactgtgctcttgctgcgtcccagaccccatgggactctccttccttcccacctatggctgccagagtaaccgcacggccagcgtggccaccctgcgcatgaaggcccgcgagcactcagaagctgtcctgcagtcagccaacctcctgccttccaccagcagcagccccggccctgtcgccaagccggcgcccccagatggcagccaggaaaagacctctcccaccaaggaacagagcgaggcagagaagagtgtatgagggtccacagtgccccgcccggcctgccctcccccgcccctccttctcccagcctcagcccctacagaaaactctccaaatagcaaggagaagcctgcggccccagggcctctgcatggacccaggacgggcaagtgagacccacagctcccttggcacctggagcgtccctctggagtcccaccagtgcggcagtgttgtcctggcttctttggcaacagatcccgatggcacttggtggcagcagagccctctctgtgaggagcctccctgggatttccatccaggcccagagtctcggagggaggtagattcctcatccgtctcccttcctatttcctccctgggctgcctttgaaggtcttgtcaaccccaggaactgtggcatgggctgaagtttcatgaaaagaaaagggcctgtcccgcttacagtgtttaagaactggggaactggtggaaccccaagcgactcttgctcccctggaccaagatgagcagtaatgccctttctcttgttggagaatattggttgtgggcttcattacaaagtgagaagatgcagggtagggaggggccaacaggacacagcctgtcccagaggaccacggtggctctgacccaggagatctcactggcacatctggccggggggctgggctaatcacccaggccacctgctccatgaactgggggctgctgtcttgacactgtgggtgtggaactagtgtggcccctgtacctgaagcactcacctgcaagcccttcctctctcccagatagacctgtggattggtgggaagttaagcaactgaaaagcagctctctggtccaggagggcctgagggcccttggagagggaagaagcccttcaggaatgcctctgaagtaattatgcatacagatgaactacctttccccacatgcctggcacgtagagggggctcttcagtggtggtggttttttactggggaaaaaaaagtaggaaaggagacaggaacggcgtatgtgcagatatggagcatggggaagacagctttctcatggtgtggagagcattaattccaaagggccaaatttcacagagatttctgttttggtctagtgtggctgttttctctggtgaggatggtgacctagaggagatccaaggggaacgtgcaatagcataagctctgccgctttctggcaggggcgcccggcatgggaaaggttgcagtctttggtggcttttgctgatggtgtttccatgcggatggttattgccttcatgatggttattttggtttcagttattatcgtcaaaatgttttactttcacatttcctgtcccctttttaccttcccccactccatgacccccaaataatactcctgagtgtatcatgccttgtctatgatcactacgaagcatttgataaaacccactgtctcctttaaagaaaaaaatcaaatccttcttcctgctgtattttgcttgttgagtataaagatgaaacgatttgccaaaaagcggcaaagttgcttccgtttccctgtaattacgaatgtttggttgaaggatgtaagctcaagcccttatgtacactaactcttcaatctaattgtttgattaaactcgtatttcctccagaaaggtacataaataagtgaactgttgagcaaattaagaatacttaacagcattgcatctgaaaagtagttatgctgattaaattttgtgtccttgaggactttcaggaaattacttttgatcgtcaataacacaattaagtaaactacacacacattagcatgaataattgataagaaattatgtattaccacgaagcactgatttaataattcatgatgcgacactctagtgactgtgcaaaactggatcatatcgaaaagtctgcctgatgttactgaaaggaaagaaaa

SEQ ID NO: 97212 - DNA, 807 bp, Artificial Sequence
  derived and/or modified sequence
atggtgctgatgagctgtgaccaacggttgatcagtttgctcttggtaggcactgcaacctttggcaatcactcttcgggggattttgatgacgggtttctgcgtagaaaacagcgccggaaccggacgacgttcactcttcagcagctggaagctctcgaggccgtttttgcccaaacacactatccagatgtcttcaccagagaagagctcgccatgaaaataaacctcacagaagccagagtgcaggtttggttccagaacagaagggccaaatggaggaagacagagagaggggcctcagaccaggagccaggagccaaggagcccatggcagaggtgacacctcctccagtgagaaacatcaactccccgccccctggggaccaagcccggagtaagaaggaggcgctggaggcccagcagagcctggggcgaacggtaggtcctgcagggcctttcttcccctcctgcttgccggggactctcctgaacacggccacctacgcccaggccttgtcccatgtggcttccctcaaagggggcccactgtgctcttgctgcgtcccagaccccatgggactctccttccttcccacctatggctgccagagtaaccgcacggccagcgtggccaccctgcgcatgaaggcccgcgagcactcagaagctgtcctgcagtcagccaacctcctgccttccaccagcagcagccccggccctgtcgccaagccggcgcccccagatggcagccaggaaaagacctctcccaccaaggaacagagcgaggcagagaagagtgtatga

SEQ ID NO: 97213 - DNA, 2196 bp, Artificial Sequence
  derived and/or modified sequence
atgaaggaatctactctggaggcaataggttatatctgtcaagacatcgaccccgagcaactccaggataagtctaacgaaatcctgactgccatcatccaaggcatgaggaaggaggaaccatccaacaacgttaaacttgctgccaccaacgctttacttaactcattagaatttactaaagcaaatttcgacaaagaaagcgaaaggcactttataatgcaagtcgtatgtgaagcgactcaatgccccgatactagagtgagggttgccgccttacagaatctagtaaagattatgtccttatactaccagtatatggagacctacatggggcctgccctgttcgcgatcacaattgaggctatgaaatccgatatcgacgaggtggcgctgcagggtattgagttctggagcaatgtgtgtgatgaagagatggatctcgcaattgaagcatctgaagccgcggagcaaggacgtccccccgaacacacttctaagttttatgcgaagggtgcactgcagtatctggtcccaatcctaacccagacgttgaccaaacaggacgaaaacgacgatgacgacgactggaatccatgcaaggccgccggcgtgtgtctaatgctactggccacgtgctgtgaggacgacattgtgccccatgttcttccattcatcaaggaacacatcaaaaacccagactggcggtacagagacgcagctgtaatggccttcggctgtatactggaggggccagagcctagccagctgaagcccctcgtcattcaagccatgccgacgctcatcgaactgatgaaagacccatcagtggtagtgagagataccgctgcctggaccgttggccgcatttgtgaacttctccctgaagccgccatcaatgatgtatatctggctccactgcttcagtgtttgattgagggtctcagtgccgagccgcgtgtggctagtaacgtgtgctgggccttcagctccttagccgaggcagcatatgaagctgccgatgttgccgacgatcaggaggagcctgctacatactgcctgtcaagcagttttgaactgattgtgcagaagctcctcgagaccaccgaccgtcctgatggacaccagaacaacctgcggtcctccgcttacgagtccctgatggagattgtcaagaattctgctaaagactgttaccctgccgttcagaagactactctggtgatcatggaacgcctacagcaggttctgcagatggaaagccatatccagagtacctccgatagaatccagtttaatgacctacagtcactgctatgcgccacattgcagaacgtgctccgcaaggtgcagcaccaggacgccttgcagatcagcgacgtcgtgatggcgtccctgcttcgcatgttccagagcaccgcgggctccggcggtgtgcaggaagacgccctgatggccgtgtcgactttagtcgaggtcctcggcggtgaattcttgaagtatatggaagctttcaaaccatttcttggcatcggtttgaagaattacgctgaatatcaggtatgcttggccgccgtggggctggtgggcgatctctgcagagccctgcaatccaatatcatccctttctgtgacgaagtaatgcagctgcttttggagaatctagggaatgagaatgtgcaccggtccgttaagccacagatactttccgtgttcggtgacatagctctggccatcggaggggagttcaaaaagtatctcgaggtcgtcctgaatacactccagcaagccagtcaggctcaggtggataaatccgattacgatatggtagattatctgaacgagctcagagagtcctgtctggaggcgtacaccggcatcgtacagggtcttaaaggtgaccaggagaacgtccatcctgacgttatgctagtgcagccccgtgtagagtttatactgagcttcattgatcacattgctggcgacgaagatcacacagacggcgtggtggcctgtgccgcaggattgattggtgacctgtgcaccgcttttggcaaagacgtgctgaaattagtggaagctcggcccatgatccatgagctgcttacagagggccgtcgcagcaagaccaataaagctaaaaccctggccacttgggcaaccaaggaactgcgcaagctgaagaaccaagcttag

SEQ ID NO: 97214 - DNA, 1983 bp, Artificial Sequence
  derived and/or modified sequence
atgaaggaaagcactctggaggctatcggctatatctgccaagacattgaccctgaacagcttcaggataaatctaacgagattctgactgccattatacaaggtatgagaaaggaggaaccttctaacaatgttaaactggctgctaccaatgcgcttctcaactctctggagtttaccaaggctaatttcgataaggagagcgagaggcacttcattatgcaggtggtgtgcgaagctactcagtgtccggacaccagagtgcgtgttgccgcactccagaaccttgttaaaattatgtccctgtattatcaatacatggagacctacatgggaccagcgctgtttgcagatgagaacgatgacgacgacgactggaatccttgcaaggccgctggcgtgtgtctgatgttgctcgccacatgctgtgaagacgacattgtgccacatgtgcttccatttattaaagagcatattaaaaacccggactggcggtacagggatgctgcagttatggcttttggatgtatactcgagggccctgagccgagtcaactgaagcctctggttattcaagccatgcctacgctcatcgaactcatgaaggatccttctgtggtagtacgcgacactgccgcctggactgttggtagaatttgcgaattgctcccggaagccgcgatcaacgacgtgtatttggccccactcttgcagtgcctgatcgagggactctccgccgagccacgcgtggccagcaacgtctgttgggcgttcagctcccttgccgaagcggcgtacgaggccgccgatgttgctgacgaccaagaagagcctgccacttattgtttatcgagtagcttcgagctgatcgtgcagaaactgctggaaactactgacagacccgatggacaccaaaacaatttaagatctagcgcttacgaatccctcatggaaattgtgaaaaactcagcgaaggactgttatcctgctgtccagaagacgacgctggttattatggagcgtttgcagcaggtgctgcagatggagagccacatccagtcaacctctgacaggattcagttcaatgatttgcagagtctcttgtgtgcaacgctacaaaatgttctccggaaggtgcagcaccaggacgcccttcagatctccgacgtggtcatggcatcactacttcgtatgttccagtctactgccggatccgggggcgttcaggaggacgcacttatggctgtgagcacattggttgaggttctgggaggggaatttctcaagtacatggaggcgttcaagcctttcctggggatcggcctgaaaaactacgcagaatatcaggtctgcctcgctgctgtaggtctggtgggagacctctgccgggctctccagagtaatattatacctttctgtgacgaggtgatgcaattgcttctcgagaatctgggtaacgaaaatgtccacagatcagttaaaccccagatattaagcgtgttcggggatattgccttggctattgggggagagttcaaaaagtacctggaggtggtgttgaacactctccagcaggcgtcacaggcccaggtagataagtcagattatgatatggtggactatttaaatgaattgcgcgagtcttgtcttgaagcgtataccgggatcgttcaaggtctcaagggagaccaggagaatgtacaccccgatgtgatgctcgtgcagccccgcgtggaatttatcctgtcatttatcgaccatattgccggggacgaggaccatacggacggcgtggtggcttgtgccgctggactaatcggggatctgtgtacggcctttggaaaggatgtgctcaagctggtcgaggcgaggcctatgatccatgaactcctcacagaggggcgccggtccaagactaacaaagcgaagactctggccacctgggcgacgaaggaactgagaaagctgaagaaccaagcctag

SEQ ID NO: 97215 - DNA, 2196 bp, Artificial Sequence
  derived and/or modified sequence
atgaaagagtccacccttgaggctattggctacatctgtcaggacattgatcctgaacaactgcaggataagtcaaatgaaattctcacagctatcatacaggggatgaggaaggaagaaccaagcaataatgtgaaactcgccgcgacgaacgccctgctcaattcattggagttcacaaaggcgaactttgataaggaatctgagaggcacttcatcatgcaggtcgtttgcgaagccacacagtgcccggacacacgcgttagagtagctgcccttcagaacctcgttaagatcatgtctctctattatcagtacatggaaacctacatggggccagctttatttgccataactatcgaggcaatgaagagcgatattgatgaggtggccctccaggggatcgaattctggtcaaatgtgtgtgatgaggaaatggacctcgctatcgaagcctcagaagccgctgaacagggccgaccccccgagcacacttctaaattttatgctaaaggcgctctacaatatctggtccctattttaacgcagacccttacaaagcaggacgaaaacgatgatgatgatgactggaacccctgtaaggccgcaggcgtttgtctcatgctgctggctacatgttgcgaggacgatatcgtaccccatgtgttaccgtttattaaggaacacatcaagaacccagactggaggtatagggatgccgcagtgatggcgttcgggtgtatcttagagggacctgagccatcccagctgaagccattggtgattcaggctatgcctactctgattgagctgatgaaagatcctagcgtggtagttcgtgacacggccgcttggaccgttggtcgaatctgcgagctcctccccgaagcagcgatcaatgacgtgtatctcgcccccttgcttcaatgcctcatcgaagggttaagcgcagaacccagagtggcgagcaatgtttgctgggctttcagcagcctggccgaagccgcgtacgaggccgccgatgtggccgatgatcaagaggaaccagctacttactgtctcagctctagctttgaactcatagtgcagaagctgctggaaaccactgatagaccggacggccaccagaacaacttgagatctagcgcatacgagtcgctgatggagatcgtgaaaaattcagcgaaggactgctatcccgccgtgcagaaaacaaccctggtgatcatggaacgtctccagcaggtattacagatggaatcccacattcagtccacatcagatagaatccaatttaatgatctgcaatccctgctttgcgctacgctacagaatgtgttacgaaaagttcagcaccaggatgcactgcaaatctctgacgtagtgatggcatcactcctccggatgttccagtctacagccggcagcggcggcgtccaagaggatgctcttatggccgtgtctaccctcgtcgaagtgctggggggagagtttttgaaatacatggaggcatttaagcccttcttgggaatcgggctgaagaactatgccgaataccaggtctgcctcgccgctgtgggtctggtgggcgacctatgcagggctctccagtccaatataattccattttgtgacgaagtgatgcaattgttgctggagaatctggggaacgagaatgtccataggtctgtgaagccacagatcttaagtgtgttcggggacatcgccctggcaatcggcggcgagttcaaaaagtacctggaagtggtgctgaatacgttacaacaggcttcgcaggcgcaagtggataagagtgactacgatatggtggactacctaaatgagctccgagaatcctgccttgaggcctacactggcattgtgcagggattaaaaggcgaccaggaaaatgtgcatcctgacgtgatgctcgtgcagccccgcgttgagttcattctgtcgtttatcgaccatatcgcaggtgacgaggatcataccgacggggtggtcgcatgtgctgccggcctcataggtgacttgtgcactgcttttggcaaagatgtccttaagctggtggaagccagaccaatgatccacgagctgttgacagagggacgaaggagcaagacaaacaaggccaagactctggccacttgggcaactaaagaactgcggaagctgaaaaatcaggcctag

SEQ ID NO: 97216 - DNA, 2347 bp, Artificial Sequence
  derived and/or modified sequence
tgcttgtgcagagatcccagtaaaccagtggccagaactcattcctcagctggtggccaatgtcacaaaccccaacagcacagagcacatgaaggagtcgacattggaagccatcggttatatttgccaagatatagacccagagcagctacaagataaatccaatgagattctgactgccataatccaggggatgaggaaagaagagcctagtaataatgtgaagctagctgctacgaatgcactcctgaactcattggagttcaccaaagcaaactttgataaagagtctgaaaggcactttattatgcaggtggtctgtgaagccacacagtgtccagatacgagggtacgagtggctgctttacagaatctggtgaagataatgtccttatattatcagtacatggagacatatatgggtcctgctctttttgcagacgaaaatgatgatgacgatgactggaacccctgcaaagcagcaggggtgtgcctcatgcttctggccacctgctgtgaagatgacattgtcccacatgtcctccccttcattaaagaacacatcaagaacccagattggcggtaccgggatgcagcagtgatggcttttggttgtatcttggaaggaccagagcccagtcagctcaaaccactagttatacaggctatgcccaccctaatagaattaatgaaagaccccagtgtagttgttcgagatacagctgcatggactgtaggcagaatttgtgagctgcttcctgaagctgccatcaatgatgtctacttggctcccctgctacagtgtctgattgagggtctcagtgctgaacccagagtggcttcaaatgtgtgctgggctttctccagtctggctgaagctgcttatgaagctgcagacgttgctgatgatcaggaagaaccagctacttactgcttatcttcttcatttgaactcatagttcagaagctcctagagactacagacagacctgatggacaccagaacaacctgaggagttctgcatatgaatctctgatggaaattgtgaaaaacagtgccaaggattgttatcctgctgtccagaaaacgactttggtcatcatggaacgactgcaacaggttcttcagatggagtcacatatccagagcacatccgatagaatccagttcaatgaccttcagtctttactctgtgcaactcttcagaatgttcttcggaaagtgcaacatcaagatgctttgcagatctctgatgtggttatggcctccctgttaaggatgttccaaagcacagctgggtctgggggagtacaagaggatgccctgatggcagttagcacactggtggaagtgttgggtggtgaattcctcaagtacatggaggcctttaaacccttcctgggcattggattaaaaaattatgctgaataccaggtttgtttggcagctgtgggcttagtgggagacttgtgccgtgccctgcaatccaacatcatacctttctgtgacgaggtgatgcagctgcttctggaaaatttggggaatgagaacgtccacaggtctgtgaagccgcagattctgtcagtgtttggtgatattgcccttgctattggaggagagtttaaaaaatacttagaggttgtattgaatactcttcagcaggcctcccaagcccaggtggacaagtcagactatgacatggtggattatctgaatgagctaagggaaagctgcttggaagcctatactggaatcgtccagggattaaagggggatcaggagaacgtacacccggatgtgatgctggtacaacccagagtagaatttattctgtctttcattgaccacattgctggagatgaggatcacacagatggagtagtagcttgtgctgctggactaataggggacttatgtacagcatttgggaaggatgtactgaaattagtagaagctaggccaatgatccatgaattgttaactgaagggcggagatcgaagactaacaaagcaaaaacccttgctacatgggcaacaaaagaactgaggaaactgaagaaccaagcttgatctgttaccattgggatgataacctgaggacccccactggaaatctcccatcttttgaaaaacctggaagtgaggagtgtgcacggatgctgaatgtttgggaatgagaggatgagtgagtgaggcttgaaaacacaccacattgaaaatcctgccacagcagcagccgcagccgccaacagcagcgctgttagtgagctaagtaagcactgacttcgtagaaaaccataacatcggccatcttggaaaagagaaaaacaatggagttacttattt

SEQ ID NO: 97217 - DNA, 2196 bp, Artificial Sequence
  derived and/or modified sequence
atgaaggagagcaccctggaggccatcggctacatctgccaggacatcgaccctgagcagctgcaggacaagagcaatgagatcctgacagccatcatccagggcatgaggaaggaggagcccagcaacaacgtgaagctggccgccaccaatgccctgctgaacagcctggagttcaccaaggccaactttgacaaggagagcgagcggcacttcatcatgcaggtggtgtgtgaggccacccagtgcccagacaccagggtgcgggtggccgccctgcagaacctggtgaagatcatgagcctgtactaccagtacatggagacctacatgggccctgccctgtttgccatcaccatcgaggccatgaagagtgacattgatgaggtggccctgcagggcatcgagttctggagcaatgtgtgtgatgaggagatggacctggccatcgaggccagcgaggccgctgagcagggccggcccccagagcacaccagcaagttctacgccaagggggccctgcagtacctggtgcccatcctgacccagaccctgaccaagcaggatgaaaatgatgatgatgatgactggaacccctgcaaggctgctggggtgtgcctgatgctgctggccacctgctgtgaagatgacatcgtgccccacgtgctgcccttcatcaaggagcacatcaagaacccagactggagatacagagatgctgctgtgatggccttcggctgcatcctggagggccctgagcccagccagctgaagcccctggtgatccaggccatgcccaccctgattgagctgatgaaggaccccagcgtggtggtgcgggacacagctgcctggacagtgggccgcatctgtgagctgctgcctgaggccgccatcaatgatgtgtacctggcccccctgctgcagtgcctgattgagggcctgtctgctgagccccgggtggccagcaatgtgtgctgggccttcagcagcctggccgaggccgcctatgaagctgctgatgtggctgatgaccaggaggagcccgccacctactgcctgagcagcagctttgagctgattgtgcagaagctgctggagaccacagacagaccagatggccaccagaacaacctgcggagcagcgcctatgagagcctgatggagatcgtgaagaacagcgccaaggactgctacccagctgtgcagaagaccaccctggtgatcatggagcggctgcagcaggtgctgcagatggagagccacatccagagcaccagtgaccgcatccagttcaatgacctgcagagcctgctgtgtgccaccctgcagaatgtgctgaggaaggtgcagcaccaggatgccctgcagatcagtgatgtggtgatggccagcctgctgaggatgttccagagcacagctggcagcggcggcgtgcaggaggatgccctgatggctgtgtccaccctggtggaggtgctgggcggggagttcctgaagtacatggaggccttcaagcccttcctgggcatcggcctgaagaactatgcagagtaccaggtgtgcctggccgctgtgggcctggtgggggacctgtgccgggccctgcagagcaacatcatccccttctgtgatgaggtgatgcagctgctgctggagaacctgggcaatgaaaatgtgcacaggtctgtgaagccccagatcctgtctgtgtttggagacatcgccctggccatcggcggggagttcaagaagtacctggaggtggtgctgaacaccctgcagcaggccagccaggcccaggtggacaagagtgactatgacatggtggactacctgaatgagctgcgggagagctgcctggaggcctacacaggaattgtgcagggcctgaagggggaccaggagaatgtgcacccagatgtgatgctggtgcagccccgggtggagttcatcctgtccttcatcgaccacatcgctggagatgaggaccacacagatggagtggtggcctgtgccgccggcctgattggagacctgtgcacagccttcggcaaggatgtgctgaagctggtggaggcccggcccatgattcatgagctgctgacagagggccgccgcagcaagaccaacaaggccaagaccctggccacctgggccaccaaggagctgaggaagctgaagaaccaggcctag

SEQ ID NO: 97218 - DNA, 1983 bp, Artificial Sequence
  derived and/or modified sequence
atgaaggagagcaccctggaggccatcggctacatctgccaggacatcgaccctgagcagctgcaggacaagagcaatgagatcctgacagccatcatccagggcatgaggaaggaggagcccagcaacaacgtgaagctggccgccaccaatgccctgctgaacagcctggagttcaccaaggccaactttgacaaggagagcgagcggcacttcatcatgcaggtggtgtgtgaggccacccagtgcccagacaccagggtgcgggtggccgccctgcagaacctggtgaagatcatgagcctgtactaccagtacatggagacctacatgggccctgccctgtttgctgatgaaaatgatgatgatgatgactggaacccctgcaaggccgccggcgtgtgcctgatgctgctggccacctgctgtgaagatgacatcgtgccccacgtgctgcccttcatcaaggagcacatcaagaacccagactggagatacagagatgctgctgtgatggccttcggctgcatcctggagggccctgagcccagccagctgaagcccctggtgatccaggccatgcccaccctcatcgagctgatgaaggaccccagcgtggtggtgcgggacacagctgcctggacagtgggccgcatctgtgagctgctgcctgaggccgccatcaatgatgtgtacctggcccccctgctgcagtgcctgattgagggcctgtctgctgagccccgggtggccagcaatgtgtgctgggccttcagcagcctggccgaggccgcctatgaggccgcagatgtggctgatgaccaggaggagcccgccacctactgcctgagcagcagctttgagctgattgtgcagaagctgctggagaccacagacagaccagatggccaccagaacaacctgcggagcagcgcctatgagagcctgatggagatcgtgaagaacagcgccaaggactgctacccagctgtgcagaagaccaccctggtgatcatggagcggctgcagcaggtgctgcagatggagagccacatccagagcaccagtgaccgcatccagttcaatgacctgcagagcctgctgtgtgccaccctgcagaatgtgctgaggaaggtgcagcaccaggatgccctgcagatcagtgatgtggtgatggccagcctgctgaggatgttccagagcacagctggcagcggaggagtgcaggaggatgccctgatggctgtgtccaccctggtggaggtgctgggcggggagttcctgaagtacatggaggccttcaagcccttcctgggcatcggcctgaagaactatgcagagtaccaggtgtgcctggccgctgtgggcctggtgggggacctgtgccgggccctgcagagcaacatcatccccttctgtgatgaggtgatgcagctgctgctggagaacctgggcaatgaaaatgtgcacaggtctgtgaagccccagatcctgtctgtgtttggagacatcgccctggccatcggcggggagttcaagaagtacctggaggtggtgctgaacaccctgcagcaggccagccaggcccaggtggacaagagtgactatgacatggtggactacctgaatgagctgcgggagagctgcctggaggcctacacaggcatcgtgcagggcctgaagggggaccaggagaatgtgcacccagatgtgatgctggtgcagccccgggtggagttcatcctgtccttcatcgaccacatcgctggagatgaggaccacacagatggagtggtggcctgtgccgccggcctcatcggggacctgtgcacagccttcggcaaggatgtgctgaagctggtggaggcccggcccatgatccacgagctgctgacagagggcagaagaagcaagaccaacaaggccaagaccctggccacctgggccaccaaggagctgaggaagctgaagaaccaggcctag

SEQ ID NO: 97219 - DNA, 2196 bp, Artificial Sequence
  derived and/or modified sequence
atgaaggagagcaccctggaggccatcggctacatctgccaggacatagaccctgagcagcttcaagacaagtctaatgagattcttaccgcaatcattcagggcatgaggaaggaggaacctagtaataacgtcaaactggcagccactaacgctctgctgaatagcctggagttcaccaaggcgaatttcgataaggagtctgagaggcacttcataatgcaggtggtgtgcgaggcgacccaatgcccagatacccgcgtgagagttgccgcactgcagaacctggtgaaaattatgtctttgtactatcaatacatggaaacttatatgggtcctgccctgtttgcgatcaccatcgaggcaatgaaatcagatattgatgaggtggctcttcagggaatcgagttttggtctaacgtctgcgacgaggaaatggatctggccattgaagcgagcgaggcagcggagcaggggagacctcctgaacatacgagcaagttctacgccaaaggggcgctgcagtacctcgtgcccatcctcactcaaactctcaccaaacaagacgaaaatgatgatgacgacgactggaatccttgcaaggctgctggggtgtgtctgatgctgctggccacatgttgcgaggacgacatcgtgccacatgtgctccccttcataaaggagcatattaaaaacccagactggcggtacagggacgccgcagtgatggcttttggttgtatcctggaaggtcccgagccaagccagctgaagccactcgtcattcaagcgatgccgaccctgatcgagttgatgaaagatccctcggtagtagtgagggacacagcagcttggacagtgggtcgcatctgcgaacttctgcccgaagctgcaattaatgacgtatatctggctccactgttgcagtgcttaattgagggcctgagcgccgaaccaagggtggcttcaaatgtctgttgggccttcagttccctggcagaagctgcgtacgaggccgccgacgttgctgatgatcaggaggagcccgccacatactgtctctcaagtagctttgaattgattgtgcagaaactgctggagaccacagaccgcccagatggccatcagaataatctcagatccagcgcttacgaaagcctgatggagatcgtgaaaaatagcgccaaagactgctatccagccgtgcagaagacaacgctggtgatcatggaacgcctccagcaggtcctacagatggagtctcacattcagagcacttccgatagaatccagttcaacgacctccagtccctgctatgcgctactttgcagaacgtgctgagaaaggtccagcaccaggatgcccttcaaatctctgacgttgtgatggcctcccttctgagaatgttccagagcaccgctggcagtggaggggtgcaggaggacgctcttatggcggtaagcaccctggttgaggtattgggaggggagttcctcaaatacatggaggccttcaagccctttctggggattggactcaaaaattatgcagagtaccaggtttgtcttgcagcagttgggctcgttggggacctatgtcgagccctgcagtccaatatcatcccgttttgcgacgaagtgatgcaattgctgctagagaatctcggaaacgagaatgtgcatcggagtgtgaaaccccagatcctgtcagtatttggagacatcgcgttggccataggaggcgagtttaaaaagtatctggaggttgtcctgaacacgttgcagcaagcttcacaggcccaggtggataagtccgattacgacatggttgactatctgaacgaactcagggagtcctgcctggaagcctacacgggtatcgtgcaggggctgaagggcgatcaggagaacgtgcacccagacgtgatgctggtgcagccgcgagtggaattcatcctgagttttattgaccacattgctggtgatgaggatcacacagatggagtcgtggcttgtgccgctggccttatcggcgacttgtgtaccgccttcggcaaggacgttttaaaacttgtggaggcccgcccgatgatccatgaacttctcaccgaaggccgcaggagtaaaacaaacaaggccaaaaccctcgccacctgggccaccaaagagctacggaagctgaagaaccaggcatag

SEQ ID NO: 97220 - DNA, 1983 bp, Artificial Sequence
  derived and/or modified sequence
atgaaggagagcaccctggaggccatcggctacatctgccaggacatcgacccagaacagttacaggataaatcaaacgagattttgaccgcgatcattcaagggatgcggaaagaagagccttctaacaatgtgaagctggctgctaccaatgccctcctgaattccctcgagttcaccaaggctaattttgataaggaatccgaaaggcatttcattatgcaagtggtgtgcgaggcaacccaatgccctgacacaagagtgcgggtggccgccttacagaacctagtgaaaatcatgagcctatactaccagtacatggagacatacatggggcccgcactgttcgccgatgagaacgatgatgatgatgactggaatccttgcaaggccgctggtgtgtgcctgatgttgctggcaacgtgttgcgaggatgatatcgtgccccatgtgttaccttttatcaaagaacacatcaaaaatcccgactggcgataccgggatgctgcagtaatggcattcggctgcatcctagaaggaccggaaccctcccaactgaagcctttagttattcaagccatgccaactttgattgagctcatgaaggaccctagcgtggtggtgagggatacagcggcatggacggtgggtaggatttgcgaattgcttcccgaggccgcaatcaacgacgtgtatctggccccactcttgcagtgcctcatcgagggtctgtcagctgaaccaagagtagcgtccaacgtgtgctgggcattcagcagtttagccgaggctgcatatgaagccgctgacgtggccgatgaccaagaggagccagctacctattgtctctcaagttcatttgagctgattgtgcagaagttgctggagaccaccgaccgccctgatggccatcagaacaatctgaggtctagtgcctacgagagcctcatggagatcgtcaagaatagcgccaaagactgctatcccgctgtgcaaaagacaactctggtgatcatggagcggctgcagcaagtcctacagatggaatcacatattcagagcaccagcgacaggatacagtttaatgacttgcaaagcttgctgtgtgcaacactgcagaacgtactgcgaaaggtgcagcaccaagacgctttgcagatcagcgatgttgtgatggctagtctgcttaggatgttccagagcacagctgggtcagggggtgtccaagaagacgcgttgatggcagtgagcactctcgttgaagtacttgggggggagtttctcaaatatatggaagcctttaaacccttcctgggcattggcctgaagaattacgcagaataccaggtctgcctggccgcggtgggtctagtcggggacctgtgccgagcactgcaatcaaacataatccctttctgtgatgaggtgatgcagttgctgctggaaaatctcggcaacgaaaacgtgcaccgctctgtgaagccacagattttatctgtgtttggcgacattgcgcttgcaatcggcggcgagtttaagaaatacttagaagtggtcctgaacactctgcagcaggcgtctcaggctcaggtggacaaaagcgactacgatatggtcgactatctgaacgagctccgggagtcctgccttgaagcttacactgggatcgtccagggtttaaagggtgatcaggagaacgttcaccccgatgtcatgcttgtgcagccccgggtggaattcatcctttcctttattgatcacatcgcaggggacgaggaccatactgacggggtcgtggcctgcgcagctggactcatcggcgacctttgcacggcctttggaaaggatgtgttgaaattggtggaagctcgcccaatgatacacgagcttttgacagaaggacggagaagtaagaccaataaagccaagacactcgccacttgggctaccaaagagctacgaaagctgaaaaaccaagcctag

SEQ ID NO: 97221 - DNA, 2196 bp, Artificial Sequence
  derived and/or modified sequence
atgaaggagagcaccctggaggccatcggctacatctgccaggacatcgacccagaacaattgcaggataaatcaaacgagatcctcacagccataattcagggtatgaggaaagaggagccctcaaataatgttaagctcgctgcaactaatgccctgctgaattcccttgaattcacaaaagcaaattttgacaaggagagcgagcgtcattttatcatgcaagtggtttgcgaagccacccaatgtccagatactcgggtgcgcgtggcagccctgcagaatctggtgaagataatgagcctgtattaccaatacatggagacctacatgggtccggccctatttgcaataactattgaagccatgaagagcgacatcgatgaggtggctctgcagggcatcgagttctggtctaacgtatgcgatgaggaaatggatctcgccatagaagcttcagaggctgccgagcaaggccgacctcccgagcacacaagtaagttttatgccaaaggcgcactccaatacctggtacccatactcacgcagacgctgacaaagcaggacgagaatgatgacgacgacgattggaacccttgcaaggcagcgggcgtttgtttgatgctgctcgcgacttgttgcgaggatgatatcgtgccccacgtgttgccttttataaaggaacacattaagaaccctgattggcggtaccgtgacgctgccgtaatggctttcgggtgtatcttagagggaccagagcccagccagctcaagccactcgttatccaggcaatgccaactctaatcgaactgatgaaggacccatccgttgtggttagggatactgccgcctggacggtaggccgtatctgcgagctgcttcctgaggcagccataaacgatgtctatttggctccactactgcagtgccttatcgaaggcctgtccgcagaaccacgtgtagccagcaatgtgtgctgggccttctcttctcttgctgaggcagcttacgaagcggccgacgtcgccgacgaccaggaagaacccgctacatattgcctgtcaagctctttcgagttgattgttcagaaactgctcgagactacagatcgcccggacggtcatcaaaataatctgaggtcgagtgcatatgaaagcctaatggaaatcgtgaagaactcagccaaagattgctaccctgctgttcagaagacgaccctggtgattatggaaaggctgcagcaagttctgcagatggaatcacatatccagtccacatctgaccggatccagtttaacgatttgcaatcactcctctgtgccacgctgcagaatgtgctacggaaagtccaacatcaagatgcactgcagatctcagatgtggtgatggcgtcgctactgagaatgttccaaagtaccgccgggtccgggggcgtgcaggaggacgccttgatggccgtaagcacactggtggaagtgctagggggtgagttcctaaaatatatggaggcttttaagccattcttggggattggattgaagaattatgcggaataccaagtatgtctggccgcagtgggcctggtgggcgatctttgtagggctcttcagagcaatatcatcccattctgcgatgaagtaatgcaattgctcctcgagaacctgggcaatgaaaacgttcatagaagcgtcaaaccacagattctcagcgtttttggggacatcgccctggccatcgggggagaatttaaaaagtacctggaagtggtgctgaatacactccagcaagcttcacaggcacaggttgacaagtctgattatgatatggtcgattatctgaacgagctgcgagaaagttgtttggaggcctacaccggaatcgtgcaagggctcaaaggagatcaggaaaacgttcatcccgacgtgatgctggtgcaaccacgcgttgaatttattctgagttttatcgatcatattgctggcgacgaggatcacacggacggtgtcgtcgcctgtgctgctggtctcatcggagacttatgtaccgccttcgggaaggatgtgctcaagctggttgaagctcgaccgatgatccatgagttactgacagaggggagaagatctaagacgaataaagccaaaaccctggccacctgggccactaaggagttaaggaagctaaagaaccaagcatag

SEQ ID NO: 97222 - DNA, 2196 bp, Artificial Sequence
  derived and/or modified sequence
atgaaggaatcgaccctggaagccattgggtacatatgccaggacatagatcccgaacagctccaggataaatccaacgagatcctgactgcgataattcaaggcatgaggaaagaggaaccttccaacaacgtaaagctggcagctacgaatgctctgctgaacagtcttgagttcactaaagctaacttcgataaagagtccgagcgacacttcatcatgcaggtcgtttgcgaagcaactcaatgccccgatacaagagtgagggtcgccgctttgcagaacctggtaaaaatcatgtcattgtattaccaatatatggaaacatatatgggacccgctttattcgctataactatcgaagccatgaagtccgacattgatgaggttgccctgcagggaatcgaattctggtcaaatgtgtgtgacgaagagatggatcttgccatagaggccagcgaggccgctgaacaaggccgaccacccgagcatacgtccaagttttacgcaaagggggcactgcagtacttggtgcccatcctgactcaaacactaactaagcaagacgaaaatgacgatgacgacgattggaacccgtgtaaggccgctggcgtgtgcttaatgctcctcgctacttgctgtgaggacgatatagtgccccatgttcttccgtttatcaaggagcatattaaaaaccccgattggagataccgagacgccgctgtgatggctttcgggtgtattctcgagggacctgaacccagccaactgaaaccgttagtcatccaagccatgcccaccctgatcgagcttatgaaggacccaagcgtggtagtccgggacactgctgcctggacggttggccgtatctgcgaactactgcccgaggcagcaatcaacgatgtctacctggccccactgctgcagtgccttattgagggactgtccgctgaacccagagtggccagtaacgtttgctgggcattctcatccctcgccgaagccgcttacgaggcagcggacgtagccgacgaccaggaagagccagctacctactgcttaagcagctccttcgaactcatcgtgcagaagcttcttgaaacaacagaccgccctgatggacaccagaacaatctccggtcaagcgcctatgaatctttgatggagatagtgaaaaacagcgccaaagattgctacccagcagtacaaaagaccacactcgttatcatggaaaggctgcagcaggtactgcaaatggaaagccatatacagagtacatcagatcggatccagttcaacgatttacaaagtctcctctgcgctacactccagaacgtactgaggaaggttcaacaccaggatgcgctccagatctctgatgtagtgatggcttcactcttgcgcatgttccagtcgacggccggaagcgggggagtgcaggaggacgccctaatggctgtgtccactctcgttgaagtgctgggcggtgagttcctgaagtacatggaagccttcaagccgttcctcggaataggcctaaaaaattacgctgagtaccaagtttgccttgccgctgtgggattggtgggagacctctgccgggcactgcagagcaatattatccctttttgtgacgaagtcatgcaactgctactcgaaaacctcggcaatgaaaatgttcatagaagtgtgaagccgcagattctctcagtttttggcgatatcgccttggcaattggcggagaatttaagaaatatctggaggtggtgctaaacactttgcagcaggcaagccaggctcaggtagacaagtcagactacgacatggttgactacctgaacgaattgcgcgagagctgtctggaggcatacacgggtatcgtgcagggattgaagggcgaccaggagaatgttcacccagacgtgatgttggtgcaaccgagggttgagttcattctgtcgttcatcgaccacatcgccggagacgaagaccatactgacggggtggtggcatgtgctgccggacttattggagacctgtgtactgccttcgggaaggacgtcctgaagttggtggaggccagacccatgattcatgaactgctgaccgagggcagaagatctaagacaaacaaagccaaaactctagcaacatgggccactaaggaactgcggaagttaaaaaatcaggcttag

SEQ ID NO: 97223 - DNA, 1983 bp, Artificial Sequence
  derived and/or modified sequence
atgaaggagtccactcttgaggcaatcggttacatctgtcaagatatcgatcctgagcagctgcaggacaaatccaacgagattcttaccgcaattatccaaggcatgcggaaagaagaaccctccaacaatgtcaaactcgccgctactaatgccttactcaactctctggagtttacgaaggctaattttgataaggaaagcgagaggcactttataatgcaagtcgtatgtgaggcaactcagtgccctgacacacgcgtgagagtggcggctcttcagaacctagtgaagatcatgagtctgtactaccagtatatggaaacatatatgggccctgccctgttcgctgacgagaacgacgacgacgacgactggaacccttgcaaggctgccggagtttgcctgatgctccttgcaacatgttgcgaggatgatatcgtaccccacgtgctcccgttcatcaaggagcacataaagaatcctgactggaggtatcgagacgccgcagtgatggcctttggctgcatcttggaaggtccagagccaagccagctgaagcctttggtgatacaggccatgcccacgctcattgagctgatgaaagatccgtccgtggtcgtgagagatacagccgcttggacggtaggccgtatttgcgagctgttacctgaagctgctattaacgacgtgtacctggccccactgcttcagtgcttaattgagggcttatcagcagagccccgagtagcctcaaacgtgtgctgggctttctcgtcattggcggaggctgcttacgaagcagctgacgtcgctgacgatcaagaggaaccagccacctactgtctgagctctagctttgaactgatcgtgcaaaaactcctcgaaaccactgaccgccctgatgggcatcagaacaatttgaggtcatctgcgtacgaatctctcatggagatcgtgaagaactctgctaaggattgttaccccgctgttcaaaaaacaaccttagtgattatggaaaggttgcagcaggtacttcaaatggagagccatatccaatccacgtctgaccgaatacaatttaacgatttgcagtccctcctgtgtgccaccctgcagaatgtactccggaaggtgcagcatcaggatgccctgcagattagcgacgtggtgatggcttcccttctgaggatgtttcagtctactgctggatccggaggggtgcaggaggatgccttaatggctgtgagtaccctggtggaggtgctcggaggagaatttctgaagtacatggaagcctttaagccatttcttgggattgggctgaaaaactatgcagaatatcaggtgtgcttagctgctgtggggttggtcggcgatctgtgtcgggctctgcagtcaaacatcatacctttctgcgatgaggttatgcagttgctgttggaaaacttgggaaacgaaaatgtccataggtcagtaaaaccacagatcctgagcgtttttggggatatcgctctggccattggaggtgaattcaagaagtatctggaggtggtgctcaacacactgcaacaggcctcacaagcccaggtcgataaatccgactatgatatggtggattacctgaatgagctgagggagagctgtcttgaggcctacacaggcattgtgcagggactcaagggggatcaagaaaacgttcatccagatgtcatgttagtccagcctagagtcgagttcatcctctccttcattgatcacatagccggagatgaggaccacaccgatggagtcgtggcttgtgcagcaggactgatcggggacctgtgcaccgcattcgggaaagacgtccttaagctcgtggaagctcgacctatgattcacgagctgctgacggagggcaggagatctaagaccaacaaggcaaagacactggccacgtgggcgactaaagagctcagaaaactcaagaaccaggcgtag

SEQ ID NO: 97224 - DNA, 2196 bp, Artificial Sequence
  derived and/or modified sequence
atgaaggagtctaccctagaagccatcgggtatatttgtcaggacatagatcctgagcaactacaagataagagtaatgagatcctcacggcgattatacagggcatgcgcaaggaagagcctagtaataatgtaaaactcgcggcaaccaatgccctgctgaactctttggagttcacgaaggccaactttgacaaggagagcgaacgccactttatcatgcaggtggtttgtgaggccactcagtgccctgatacacgcgtgcgcgtagctgccctgcagaacttagtcaagatcatgagcctgtactaccaatacatggagacttatatggggcctgccttgttcgccattacaatcgaagccatgaagagcgacatagatgaggtggcactgcagggcattgagttctggagtaatgtgtgtgatgaagagatggatctggcaattgaagctagcgaggctgctgagcagggccgacccccagagcatactagtaagttctacgcaaaaggcgctctgcagtacttggtgccaattcttacgcaaactctcacaaagcaggacgagaatgacgatgacgacgattggaatccatgcaaagccgctggggtgtgcctaatgctgctggccacctgctgcgaagatgacatcgtgccacacgtgctgcccttcataaaggaacacatcaaaaatccagactggaggtatcgggatgctgctgtaatggcattcggctgcattctggaagggcctgagccctcacaattgaaaccactggtcatccaggccatgccaaccctgatcgagttaatgaaagatcccagcgtagtggtgcgtgacactgctgcctggacggtcgggagaatttgtgagctcttgccagaggccgctattaatgacgtctatcttgcacctctactacagtgcttgatagaagggttgtccgccgagcctagagtggcaagtaacgtatgctgggcgtttagcagtctcgccgaggccgcttatgaggcggcagatgttgcagacgaccaggaggagccagctacatactgtctgtccagctccttcgagcttatagtccagaagcttcttgagaccaccgataggccagacggtcatcagaataacctgagaagctcagcgtacgagtccctgatggagatcgtgaagaatagcgcaaaagactgctacccggctgtgcagaagaccaccttggtgatcatggaaaggctccagcaagtgcttcaaatggaatctcatattcagtccacatctgatcgcattcagttcaacgaccttcaatctctgctctgtgccaccctccagaacgtgctaagaaaggtacagcaccaggatgctctgcagatttccgacgtggtgatggcctcgctattgagaatgttccagtccacggcgggaagcggcggagtgcaggaggatgcgctgatggctgtctctacattggtagaggtccttgggggtgagtttctgaaatacatggaagcatttaaaccctttcttggaattggccttaaaaattacgcggagtatcaggtctgcttggcggcagtgggcctggtgggagacctttgccgcgcactgcaatcaaacataatcccattctgcgatgaggttatgcaattattattagagaatctcggaaatgaaaacgttcatcgaagcgtgaaaccacaaatcctgagtgtgttcggcgacattgcgttagccattggtggagaatttaaaaaatatcttgaagtcgttctgaatactctgcagcaggcgtcacaggcccaggttgacaagagtgattatgacatggtggattacctgaacgagctgagggaatcctgccttgaggcgtataccgggatcgttcagggactaaaaggcgaccaggagaacgtgcaccccgacgtcatgctggttcagccccgtgtggaattcatcctgagcttcattgatcatatcgcaggcgatgaggatcacacggacggcgtagtagcgtgcgccgctggcctaattggagatttatgcacggccttcggcaaagacgtgctgaagctcgtcgaggctaggccaatgattcacgaattactgaccgaaggacgacggtctaagacgaacaaggccaagactctggccacttgggccacaaaggagctcagaaaactaaagaatcaggcctag

SEQ ID NO: 97225 - DNA, 2196 bp, Artificial Sequence
  derived and/or modified sequence
atgaaggagagcaccctggaggccatcggctacatctgccaggacatcgaccccgagcagctgcaggacaagagcaacgagatcctgaccgccatcatccagggcatgagaaaggaggagcccagcaacaacgtgaagctggccgccaccaacgccctgctgaacagcctggagttcaccaaggccaacttcgacaaggagagcgagagacacttcatcatgcaggtggtgtgcgaggccacccagtgccccgacaccagagtgagagtggccgccctgcagaacctggtgaagatcatgagcctgtactaccagtacatggagacctacatgggccccgccctgttcgccatcaccatcgaggccatgaagagcgacatcgacgaggtggccctgcagggcatcgagttctggagcaacgtgtgcgacgaggagatggacctggccatcgaggccagcgaggccgccgagcagggcagaccccccgagcacaccagcaagttctacgccaagggcgccctgcagtacctggtgcccatcctgacccagaccctgaccaagcaggacgagaacgacgacgacgacgactggaacccctgcaaggccgccggcgtgtgcctgatgctgctggccacctgctgcgaggacgacatcgtgccccacgtgctgcccttcatcaaggagcacatcaagaaccccgactggagatacagagacgccgccgtgatggccttcggctgcatcctggagggccccgagcccagccagctgaagcccctggtgatccaggccatgcccaccctgatcgagctgatgaaggaccccagcgtggtggtgagagacaccgccgcctggaccgtgggcagaatctgcgagctgctgcccgaggccgccatcaacgacgtgtacctggcccccctgctgcagtgcctgatcgagggcctgagcgccgagcccagagtggccagcaacgtgtgctgggccttcagcagcctggccgaggccgcctacgaggccgccgacgtggccgacgaccaggaggagcccgccacctactgcctgagcagcagcttcgagctgatcgtgcagaagctgctggagaccaccgacagacccgacggccaccagaacaacctgagaagcagcgcctacgagagcctgatggagatcgtgaagaacagcgccaaggactgctaccccgccgtgcagaagaccaccctggtgatcatggagagactgcagcaggtgctgcagatggagagccacatccagagcaccagcgacagaatccagttcaacgacctgcagagcctgctgtgcgccaccctgcagaacgtgctgagaaaggtgcagcaccaggacgccctgcagatcagcgacgtggtgatggccagcctgctgagaatgttccagagcaccgccggcagcggcggcgtgcaggaggacgccctgatggccgtgagcaccctggtggaggtgctgggcggcgagttcctgaagtacatggaggccttcaagcccttcctgggcatcggcctgaagaactacgccgagtaccaggtgtgcctggccgccgtgggcctggtgggcgacctgtgcagagccctgcagagcaacatcatccccttctgcgacgaggtgatgcagctgctgctggagaacctgggcaacgagaacgtgcacagaagcgtgaagccccagatcctgagcgtgttcggcgacatcgccctggccatcggcggcgagttcaagaagtacctggaggtggtgctgaacaccctgcagcaggccagccaggcccaggtggacaagagcgactacgacatggtggactacctgaacgagctgagagagagctgcctggaggcctacaccggcatcgtgcagggcctgaagggcgaccaggagaacgtgcaccccgacgtgatgctggtgcagcccagagtggagttcatcctgagcttcatcgaccacatcgccggcgacgaggaccacaccgacggcgtggtggcctgcgccgccggcctgatcggcgacctgtgcaccgccttcggcaaggacgtgctgaagctggtggaggccagacccatgatccacgagctgctgaccgagggcagaagaagcaagaccaacaaggccaagaccctggccacctgggccaccaaggagctgagaaagctgaagaaccaggcctag

SEQ ID NO: 97226 - DNA, 1983 bp, Artificial Sequence
  derived and/or modified sequence
atgaaggagagcaccctggaggccatcggctacatctgccaggacatcgaccccgagcagctgcaggacaagagcaacgagatcctgaccgccatcatccagggcatgagaaaggaggagcccagcaacaacgtgaagctggccgccaccaacgccctgctgaacagcctggagttcaccaaggccaacttcgacaaggagagcgagagacacttcatcatgcaggtggtgtgcgaggccacccagtgccccgacaccagagtgagagtggccgccctgcagaacctggtgaagatcatgagcctgtactaccagtacatggagacctacatgggccccgccctgttcgccgacgagaacgacgacgacgacgactggaacccctgcaaggccgccggcgtgtgcctgatgctgctggccacctgctgcgaggacgacatcgtgccccacgtgctgcccttcatcaaggagcacatcaagaaccccgactggagatacagagacgccgccgtgatggccttcggctgcatcctggagggccccgagcccagccagctgaagcccctggtgatccaggccatgcccaccctgatcgagctgatgaaggaccccagcgtggtggtgagagacaccgccgcctggaccgtgggcagaatctgcgagctgctgcccgaggccgccatcaacgacgtgtacctggcccccctgctgcagtgcctgatcgagggcctgagcgccgagcccagagtggccagcaacgtgtgctgggccttcagcagcctggccgaggccgcctacgaggccgccgacgtggccgacgaccaggaggagcccgccacctactgcctgagcagcagcttcgagctgatcgtgcagaagctgctggagaccaccgacagacccgacggccaccagaacaacctgagaagcagcgcctacgagagcctgatggagatcgtgaagaacagcgccaaggactgctaccccgccgtgcagaagaccaccctggtgatcatggagagactgcagcaggtgctgcagatggagagccacatccagagcaccagcgacagaatccagttcaacgacctgcagagcctgctgtgcgccaccctgcagaacgtgctgagaaaggtgcagcaccaggacgccctgcagatcagcgacgtggtgatggccagcctgctgagaatgttccagagcaccgccggcagcggcggcgtgcaggaggacgccctgatggccgtgagcaccctggtggaggtgctgggcggcgagttcctgaagtacatggaggccttcaagcccttcctgggcatcggcctgaagaactacgccgagtaccaggtgtgcctggccgccgtgggcctggtgggcgacctgtgcagagccctgcagagcaacatcatccccttctgcgacgaggtgatgcagctgctgctggagaacctgggcaacgagaacgtgcacagaagcgtgaagccccagatcctgagcgtgttcggcgacatcgccctggccatcggcggcgagttcaagaagtacctggaggtggtgctgaacaccctgcagcaggccagccaggcccaggtggacaagagcgactacgacatggtggactacctgaacgagctgagagagagctgcctggaggcctacaccggcatcgtgcagggcctgaagggcgaccaggagaacgtgcaccccgacgtgatgctggtgcagcccagagtggagttcatcctgagcttcatcgaccacatcgccggcgacgaggaccacaccgacggcgtggtggcctgcgccgccggcctgatcggcgacctgtgcaccgccttcggcaaggacgtgctgaagctggtggaggccagacccatgatccacgagctgctgaccgagggcagaagaagcaagaccaacaaggccaagaccctggccacctgggccaccaaggagctgagaaagctgaagaaccaggcctag

SEQ ID NO: 97227 - protein, 504 aa, Artificial Sequence
  derived and/or modified sequence
MATSLHEGPTNQLDLLIRAVEASVHSSNAHCTDKTIEAAEALLHMESPTCLRDSRSPVEVFVPPCVSTPEFIHAAMRPDVITETVVEVSTEESEPMDTSPIPTSPDSHEPMKKKKGNTTYLWEFLLDLLQDKNTCPRYIKWTQREKGIFKLVDSKAVSKLWGKHKNKPDMNYETMGRALRYYYQRGILAKVEGQRLVYQFKDMPKNIVVIDDDKSETCNEDLAGTTDEKSLERVSLSAESLLKAASSVRSGKNSSPINCSRAEKGVARVVNITSPGHDASSRSPTTTASVSATAAPRTVRVAMQVPVVMTSLGQKISTVAVQSVNAGAPLITSTSPTTATSPKVVIQTIPTVMPASTENGDKITMQPAKIITIPATQLAQCQLQTKSNLTGSGSINIVGTPLAVRALTPVSIAHGTPVMRLSMPTQQASGQTPPRVISAVIKGPEVKSEAVAKKQEHDVKTLQLVEEKPADGNKTVTHVVVVSAPSAIALPVTMKTEGLVTCEK

SEQ ID NO: 97228 - DNA, 1515 bp, Artificial Sequence
  derived and/or modified sequence
atggccaccagcctgcacgagggccccaccaaccagctggacctgctgatcagagccgtggaggccagcgtgcacagcagcaacgcccactgcaccgacaagaccatcgaggccgccgaggccctgctgcacatggagagccccacctgcctgagagacagcagaagccccgtggaggtgttcgtgcccccctgcgtgagcacccccgagttcatccacgccgccatgagacccgacgtgatcaccgagaccgtggtggaggtgagcaccgaggagagcgagcccatggacaccagccccatccccaccagccccgacagccacgagcccatgaagaagaagaagggcaacaccacctacctgtgggagttcctgctggacctgctgcaggacaagaacacctgccccagatacatcaagtggacccagagagagaagggcatcttcaagctggtggacagcaaggccgtgagcaagctgtggggcaagcacaagaacaagcccgacatgaactacgagaccatgggcagagccctgagatactactaccagagaggcatcctggccaaggtggagggccagagactggtgtaccagttcaaggacatgcccaagaacatcgtggtgatcgacgacgacaagagcgagacctgcaacgaggacctggccggcaccaccgacgagaagagcctggagagagtgagcctgagcgccgagagcctgctgaaggccgccagcagcgtgagaagcggcaagaacagcagccccatcaactgcagcagagccgagaagggcgtggccagagtggtgaacatcaccagccccggccacgacgccagcagcagaagccccaccaccaccgccagcgtgagcgccaccgccgcccccagaaccgtgagagtggccatgcaggtgcccgtggtgatgaccagcctgggccagaagatcagcaccgtggccgtgcagagcgtgaacgccggcgcccccctgatcaccagcaccagccccaccaccgccaccagccccaaggtggtgatccagaccatccccaccgtgatgcccgccagcaccgagaacggcgacaagatcaccatgcagcccgccaagatcatcaccatccccgccacccagctggcccagtgccagctgcagaccaagagcaacctgaccggcagcggcagcatcaacatcgtgggcacccccctggccgtgagagccctgacccccgtgagcatcgcccacggcacccccgtgatgagactgagcatgcccacccagcaggccagcggccagaccccccccagagtgatcagcgccgtgatcaagggccccgaggtgaagagcgaggccgtggccaagaagcaggagcacgacgtgaagaccctgcagctggtggaggagaagcccgccgacggcaacaagaccgtgacccacgtggtggtggtgagcgcccccagcgccatcgccctgcccgtgaccatgaagaccgagggcctggtgacctgcgagaagtag

SEQ ID NO: 97229 - DNA, 1515 bp, Artificial Sequence
  derived and/or modified sequence
atggctacttcccttcatgaaggtccgactaaccagttagacctgcttatccgggccgtcgaggcatcggttcacagctcaaacgcccattgcacagacaagacaattgaggcagctgaagccctcctgcatatggagtctcctacatgcttgcgagactctcggtccccggtagaggtctttgtgccgccgtgtgtgagtacccccgagtttattcacgccgccatgcggccagacgtgattactgaaaccgtggtagaagtgagtacggaggagtccgagcctatggacacaagccccatcccaacctctcccgattcacatgaaccaatgaaaaagaaaaagggaaacacaacctatctgtgggaatttctcctggatctgctgcaggataagaatacttgcccacgctatatcaaatggactcagagggaaaagggcatcttcaagttggtcgactccaaggcagtgagcaaactctggggcaaacataagaataaacctgacatgaactacgaaaccatggggagagctttgcgatattattaccagagggggattttggcaaaggtggaagggcagcggcttgtctatcagttcaaggacatgccaaaaaatatcgtcgtgattgatgatgataagtccgaaacatgtaatgaggacttggctggaaccacagatgagaagtctctcgagagagtgagcttatctgcagaatccctgcttaaggccgcgtcttcggtgaggtccgggaaaaacagtagccctatcaactgttctagagcggaaaaaggagtggctagggtggttaacattacaagtccgggccacgacgcgtcttccagaagccctaccacgactgcttctgtgtctgccaccgcagcaccaagaacagtgcgcgtggccatgcaggtcccagtggtcatgacgtccctgggtcagaaaatctccaccgttgctgtgcagtccgtcaatgctggggcccccctgattacatctaccagtccgacaacagctacatcccccaaagtggtaattcagactatcccgacggtcatgcccgcatcaaccgagaacggtgataaaattaccatgcagcccgctaaaatcatcaccatacctgcgacacagctcgctcagtgccaacttcaaacgaagtccaacctgactgggtccggatccatcaacattgtgggcaccccccttgctgtgcgcgctctgactccagtctccattgcccacggaacaccagtgatgcggttgtccatgcctacgcagcaggccagcggacagacaccaccaagagtcatttccgccgtcattaagggtccggaggtaaagagcgaggccgtggctaagaagcaggagcacgacgtcaagaccttgcagctagtcgaagaaaagcctgcagacggcaacaagacagtaacccatgtcgtagtagtgtcagcgccttcggccattgccctgcccgtgactatgaaaactgaaggcctggtgacatgtgaaaaatag

SEQ ID NO: 97230 - DNA, 2781 bp, Artificial Sequence
  derived and/or modified sequence
atggcgacgtctctgcatgagggacccacgaaccagctggatctgctcattcgggccgtggaagcatcagttcacagcagtaatgcacactgtacagataagacaattgaagctgctgaagccctgcttcatatggaatctcctacctgcttgagggattcaagaagtcctgtggaagtgtttgttcctccttgtgtatcaactccagaattcatccatgctgctatgaggccagatgtcattacagaaactgtagtggaggtgtcaactgaagagtctgaacccatggatacctctcctattccaacatcaccagatagccatgaaccaatgaaaaagaaaaaaggaaacacaacctatttgtgggagtttcttttagatctacttcaagataaaaatacttgtcccaggtatattaaatggactcagagagaaaaaggcatattcaagctggtggattcaaaggctgtctctaagctttggggaaagcataagaacaaaccagacatgaactatgaaaccatgggacgagctttgagatactactaccaaaggggaattcttgcaaaggttgaaggacagaggcttgtatatcagttcaaggatatgccgaaaaacatagtggtcatagatgatgacaaaagtgaaacctgtaatgaagatttagcaggaactactgatgaaaaatcattagaacgagtgtcactgtctgcagaaagtctcctgaaagcagcatcctctgttcgcagtggaaaaaattcatcccctataaactgctccagagcagagaagggtgtagctagagttgtgaatatcacttcccctgggcacgatgcttcatccaggtctcctactaccactgcatctgtgtcagcaacagcagctccaaggacagttcgtgtggcaatgcaggtacctgttgtaatgacatcattgggtcagaaaatttcaactgtggcagttcagtcagttaatgcaggtgcaccattaataaccagcactagtccaacaacagcgacctctccaaaggtagtcattcagacaatccctactgtgatgccagcttctactgaaaatggagacaaaatcaccatgcagcctgccaaaattattaccatcccagctacacagcttgcacagtgtcaactgcagacaaagtcaaatctgactggatcaggaagcattaacattgttggaaccccattggctgtgagagcacttacccctgtttcaatagcccatggtacacctgtaatgagactatcaatgcctactcagcaggcatctggccagactcctcctcgagttatcagtgcagtcataaaggggccagaggttaaatcggaagcagtggcaaaaaagcaagaacatgatgtgaaaactttgcagctagtagaagaaaaaccagcagatggaaataagacagtgacccacgtagtggttgtcagtgcgccttcagctattgcccttcctgtaactatgaaaacagaaggactagtgacatgtgagaaataaaatagcagctccaccatggacttcaggctgttagtggcagtactgacataaacatttgcaagggaagtcatcaagaaaagtcaaagaagactttaaaacatttttaatgcatatacaaaaacaatcagacttactggaaataaattacctatcccatgtttcagtgggaaatgaactacatattgagatgctgacagaaaactgcctcttacagtaggaaacaactgaacccatcaataagaaaaaggatcgaaagggaccaagcagctcactacgatatcaagttacactaagacttggaacactaacattctgtaagaggttatatagttttcagtgggaggggttgggatgggtaatctcattgttacatatagcaatttttgatgcattttatatgcataccagcaattattactgtgttcgcacagttctcacttaactggtgctatgtgaagactctgctaatataggtattttagaatgtgaattgaagaatggatcccaaaaacttcagaaagaggatagcaaaaaaagatctagtgcgattttatatatatatatatatatatatacatacatatatatatatcatatagcttaagctgatttaaaacaaaggccttagactaattttcgattttctttcttgaaataagctaatggcttgtttgtgtaaagcttttttattaaaagaaaaattttaaaaatcttgtacctagcacagtattgttatagaatatacatgtaacattttatatggtagtttaagtctgtcagtttcttaattgtggacaaattaacagttggctctggccttttgctgtaacatgcctgtgtcactcacttagccttggcatttgtgcagacataccattttcagttctgctgtcacttggaagttcaggctcagcatgaatttttggcaggtagctctaatacctggagttttctttgtttttttttcttttttttagttgaagtttatgagggaaataccagtgttcagttttgaactataatagtttgtatattcaacatttgaagtatattctattttgttgtactcttgtttcaaagtgtattcaagtaggttttctgaaatatagaaatgaaatttatcttctgttttggtctctggtgatattttaaacaatatttaaaagtcagtatagaagtgttttagttaggaagtgataaaacatctctcttctccttcccaactactgcatgaagaaattctacttccattatattaatatttgg

SEQ ID NO: 97231 - DNA, 1515 bp, Artificial Sequence
  derived and/or modified sequence
atggccaccagcctgcacgagggccccaccaaccagctggacctgctgatccgggctgtggaggcctctgtgcacagcagcaatgcccactgcacagacaagaccatcgaggccgctgaggccctgctgcacatggagagccccacctgcctgcgggacagccgcagccctgtggaggtgtttgtgcccccctgtgtgtccaccccagagttcatccacgccgccatgaggccagatgtgatcacagagaccgtggtggaggtgtccacagaggagagcgagcccatggacaccagccccatccccaccagcccagacagccatgagcccatgaagaagaagaagggcaacaccacctacctgtgggagttcctgctggacctgctgcaggacaagaacacctgcccccgctacatcaagtggacccagcgggagaagggcatcttcaagctggtggacagcaaggctgtgtccaagctgtggggcaagcacaagaacaagccagacatgaactatgagaccatgggccgggccctgcgctactactaccagaggggcatcctggccaaggtggagggccagaggctggtgtaccagttcaaggacatgcccaagaacatcgtggtgattgatgatgacaagtctgagacctgcaatgaagacctggccggcaccacagatgagaagagcctggagcgggtgtccctgtctgctgagagcctgctgaaggccgccagctctgtgcgcagcggcaagaacagcagccccatcaactgcagcagagctgagaagggcgtggcccgggtggtgaacatcaccagccctggccatgatgccagcagccgcagccccaccaccacagcctctgtgtctgccacagctgcccccaggacagtgcgggtggccatgcaggtgcctgtggtgatgaccagcctgggccagaagatcagcacagtggccgtgcagagcgtgaatgctggggcccccctcatcaccagcaccagccccaccacagccaccagccccaaggtggtgatccagaccatccccaccgtgatgcctgccagcacagaaaatggagacaagatcaccatgcagcctgccaagatcatcaccatcccagccacccagctggcccagtgccagctgcagaccaagagcaacctgaccggcagcggcagcatcaacatcgtgggcacccccctggccgtgcgggccctgacccctgtgtccatcgcccacggcacccctgtgatgaggctgtccatgcccacccagcaggccagcggccagaccccacccagggtcatctctgctgtgatcaagggccctgaggtgaagtctgaggccgtggccaagaagcaggagcatgatgtgaagaccctgcagctggtggaggagaagccagcagatggcaacaagacagtgacccacgtggtggtggtgtctgcccccagcgccatcgccctgcctgtgaccatgaagacagagggcctggtgacctgtgagaagtag

SEQ ID NO: 97232 - DNA, 1515 bp, Artificial Sequence
  derived and/or modified sequence
atggccaccagcctgcacgagggccccaccaaccagctggacctgctcatcagggctgttgaagcatccgttcattcatccaatgcacactgtactgacaaaacgatcgaggccgccgaggccctgcttcacatggagagccccacatgcctgagggatagcagaagcccggtagaagtctttgtgcccccttgtgtctcaactcctgaattcatccatgcggccatgcgccccgacgtgattacagaaacagttgtggaagtctcaaccgaagaatccgaaccgatggacacttcaccaataccaacctcgccagattcccatgagcccatgaaaaagaaaaaaggaaataccacatacctgtgggaattcctactcgacctgctgcaggacaagaatacctgcccccgttatattaaatggacccagagagaaaagggaatcttcaagctcgtcgattccaaggccgttagcaaactctgggggaaacacaaaaacaagccggacatgaactatgagacaatgggcagggctctgaggtactactatcagcgggggatcttggccaaagtagagggtcagcggctcgtttaccaatttaaggatatgccaaagaacattgtggtgattgatgatgacaagtcagaaacctgcaatgaagatttggccggcacaactgacgaaaagtctctggagcgtgtgagtctctccgctgagtccctgctgaaagctgcctcatcggtgcgtagcggcaagaattcttctcctattaattgtagcagggccgagaagggggttgcccgagtcgtcaatataacttctcctgggcacgacgcatcatcacgaagccctactaccaccgcttcagtgagcgctactgctgctccacgcacagtccgtgtagctatgcaggtgccagtggtgatgacaagtctaggacaaaagatcagtacggttgctgtgcagagtgtgaatgccggagccccactgataacctccacttcaccgacaactgccaccagtcctaaagtcgtcatccagaccattcccaccgtcatgccagctagcacggagaacggagataagataacgatgcaacctgctaagattatcactattcctgccacccagctggcgcaatgccagctccaaaccaaatcaaaccttactggaagcggctccattaatatcgtcggaactccgctcgctgtcagggcactcacacccgtgtcaattgctcatggtacccccgtgatgaggctctctatgcccacccagcaggcctctggccagactcctccgcgggttatcagcgctgtgatcaaaggacccgaggtgaagtctgaggcagtggcaaagaaacaggaacacgacgtcaaaaccctacagctggttgaggagaaaccagccgatgggaataagacggtgacccacgtcgttgtggtgtccgctccctccgctatcgccttgcctgttaccatgaagacggaagggcttgtgacctgcgagaaatag

SEQ ID NO: 97233 - DNA, 1515 bp, Artificial Sequence
  derived and/or modified sequence
atggccactagcctccatgagggtcctactaaccaactggacctgctaatcagagccgtggaagctagcgtccatagcagcaatgcccattgcacagacaagactatcgaagccgcagaagctctcctccatatggagtcacctacctgcctgagggactctcggtctcctgtcgaggtctttgttccaccatgtgtcagcacacccgaattcatacacgcggcaatgcgtccagatgtcattaccgaaacggttgtggaggtgagcaccgaggagagcgaaccaatggatacctctcccattcctacctcccctgacagtcacgaacccatgaagaaaaagaaaggtaacacaacttacttatgggagttcttgttggatcttttgcaggataaaaatacctgtccacgatatatcaaatggacccaaagagagaagggtatctttaagttagtggactctaaggccgtcagcaaactctggggcaagcataagaacaagcccgatatgaactacgagacaatgggcagagccctcaggtactactaccagcgaggcatactcgctaaagtcgagggacagaggctcgtttatcagttcaaggacatgccaaaaaatatagtggtgatcgacgatgataagagcgagacctgtaacgaggaccttgccggaactaccgacgagaagtccctagagcgggtttccctgtcagctgaaagccttcttaaagccgcttcttcagttcgctctggcaaaaactccagtcctatcaactgttcgagggctgagaagggagtggcaagggttgtgaatataacctcccctggccacgatgcaagttctcgcagtcccaccactacagccagcgtcagcgccaccgcagcccctcggacggtgcgagtagccatgcaggttcccgttgtgatgacatccttgggccagaagattagtacagttgccgtacagagcgtgaatgctggcgctccactcattactagcacatcgcctactactgccacgagccccaaggtggtaatacaaacgatccctaccgtcatgccagcgtccacggagaacggggataagatcaccatgcagcccgcaaagatcattacaatccccgcaactcagctcgcccagtgccagttacaaacaaaatcgaacctgactggcagcggctctatcaatatagttggcacccctctcgccgtgagagcactcaccccagtgtccatagcgcacgggacacctgtgatgcgcctctcaatgcctactcagcaagcttctggacagactccgcctcgtgtaattagcgctgttattaaaggacccgaggtgaaatcagaggccgtggccaaaaaacaggaacatgacgtcaagaccttacagctcgtcgaagagaagcctgcagacgggaacaagacagtcacgcacgtggtggtggtgagcgccccaagcgccattgccctaccggtgaccatgaaaacagagggactcgtcacgtgtgagaagtag

SEQ ID NO: 97234 - DNA, 972 bp, Artificial Sequence
  derived and/or modified sequence
gatctcgaggaactttgtcctgtgtgcggagataaggtgagcggctaccactatggccttctgacctgcgaaagctgcaagggcttcttcaagcggacagttcaaaataacaagagatacacatgcatcgaaaaccaaaattgtcagatagacaagacgcagagaaagagatgtccttactgccgatttcagaagtgtctgtctgtcggcatgaagttggaagccgtgagggctgatcgcatgcgagggggtcggaacaaatttggcccaatgtataaaagagacagggctctgaagcaacaaaagaaagctctgatacgggcaaatgggctgaagctggaggccatgtcccaggtcattcaggcaatgcccagcgacctgacaatttctagcgctatccagaacatccactcagcctccaaggggcttcccctcaatcacgccgctctgccccctacagactacgatcgatctccgtttgtgacttctccgatttctatgactatgcccccgcacggatccctgcaggggtatcaaacctatggacattttccatctagggccatcaaatctgagtatcctgacccatatacgtctagccccgaaagcatcatgggctattcatatatggacagctaccagacttcgtcaccggcatcaatcccacatctcatcctcgaactgcttaagtgcgagccagacgaaccccaggtgcaggctaagataatggcttatttacagcaggaacaagcgaaccgttcaaagcacgagaagttgtcaacatttggcctcatgtgtaagatggccgaccagacccttttctccatcgtggagtgggccagaagtagcatcttcttccgggaactgaaagggttgaccttatccccttccctcgagtgttccggcagctggctcatggcaacctccacatcgtgtatccaggtgattcgactgcctcaaccccccgaatag

SEQ ID NO: 97235 - DNA, 1134 bp, Artificial Sequence
  derived and/or modified sequence
taagatctcgaagagctttgccccgtgtgcggtgacaaagtgtccggataccactacggtctactgacatgtgaaagctgtaagggctttttcaaaaggaccgtgcaaaataacaaaaggtatacctgtattgagaaccagaattgccagattgacaagacacagcgtaagaggtgcccatattgtaggtttcaaaaatgtctttctgtcggtatgaaactggaagcagtccgagcagatcgcatgcggggcgggcgaaacaaattcggtcctatgtacaagcgggacagggccctgaaacagcagaagaaggcgctgattcgcgcaaacggcctaaagctggaggctatgtcccaggtgattcaagcgatgccgtccgacttgaccatctcttccgctatacaaaacatccactctgcatccaagggtctgccactgaaccacgccgctttaccacctaccgactacgataggagcccttttgtgacttccccaatcagtatgaccatgccaccccacggatcgttgcagggctatcagacctacggacatttcccctcaagggccataaagagtgagtatccagatccctatacctctagtcctgaatcaattatggggtatagttacatggacagctaccagacttcaagcccagccagtataccccacctaatcttggagttacttaagtgcgaacctgatgagcctcaggtccaggctaagattatggcctatctgcagcaggagcaggccaacagatctaagcatgagaagctgtctaccttcgggctgatgtgcaagatggccgatcagacgctgttctccatagttgagtgggcccgcagtagcatcttcttcagggagctgaagggcctgactctttcgccaagcctggagtgttcgggaaccattctcgctcacggcaatttgcatttactgcatagctccgattctcctgcctccgcaagtagagtcgctgggatcacaggggtacaccacaatacccacttgatattcgtgttcctggtggaaatggggttttgccatgtcggccaagccggactcaagacccccgacctccgcgtcatttgcctgccgagacccccaaaagtgcttggactctgggcatag

SEQ ID NO: 97236 - DNA, 972 bp, Artificial Sequence
  derived and/or modified sequence
gacctggaggagctgtgccctgtgtgtggggacaaggtgtctggctaccactacggcctgctgacctgtgagagctgcaagggcttcttcaagaggacagtgcagaacaacaagcgctacacctgcatcgagaaccagaactgccagattgacaagacccagaggaagcgctgcccctactgccgcttccagaagtgcctgtctgtgggcatgaagctggaggccgtgcgggctgacaggatgagaggaggaagaaacaagtttggccccatgtacaagagggaccgggccctgaagcagcagaagaaggccctgatccgggccaacggcctgaagctggaggccatgagccaggtgatccaggccatgcccagcgacctgaccatcagcagcgccatccagaacatccacagcgccagcaagggcctgcccctgaaccacgccgccctgcccccaacagattatgacaggagcccctttgtgaccagccccatctccatgaccatgccaccccacggcagcctgcagggctaccagacctacggccacttccccagccgggccatcaagtctgagtacccagacccctacaccagcagccctgagagcatcatgggctacagctacatggacagctaccagaccagcagccctgccagcatcccccacctgatcctggagctgctgaagtgtgagccagatgagccccaggtgcaggccaagatcatggcctacctgcagcaggagcaggccaacagaagcaagcatgagaagctgagcaccttcggcctgatgtgcaagatggctgaccagaccctcttcagcatcgtggagtgggcccggagcagcatcttcttccgggagctgaagggcctgaccctgagccccagcctggagtgcagcggctcctggctgatggccaccagcaccagctgcatccaggtgatccggctgccccagcccccagagtag

SEQ ID NO: 97237 - DNA, 1134 bp, Artificial Sequence
  derived and/or modified sequence
tgagacctggaggagctgtgccctgtgtgtggggacaaggtgtctggctaccactacggcctgctgacctgtgagagctgcaagggcttcttcaagaggacagtgcagaacaacaagcgctacacctgcatcgagaaccagaactgccagattgacaagacccagaggaagcgctgcccctactgccgcttccagaagtgcctgtctgtgggcatgaagctggaggccgtgcgggctgacaggatgaggggcggcaggaacaagtttggccccatgtacaagagggaccgggccctgaagcagcagaagaaggccctgatccgggccaacggcctgaagctggaggccatgagccaggtgatccaggccatgcccagcgacctgaccatcagcagcgccatccagaacatccacagcgccagcaagggcctgcccctgaaccacgccgccctgcccccaacagattatgacaggagcccctttgtgaccagccccatctccatgaccatgcctcctcatggcagcctgcagggctaccagacctacggccacttccccagccgggccatcaagtctgagtacccagacccctacaccagcagccctgagagcatcatgggctacagctacatggacagctaccagaccagcagccctgccagcatcccccacctgatcctggagctgctgaagtgtgagccagatgagccccaggtgcaggccaagatcatggcctacctgcagcaggagcaggccaacagaagcaagcatgagaagctgagcaccttcggcctgatgtgcaagatggctgaccagaccctcttcagcatcgtggagtgggcccggagcagcatcttcttccgggagctgaagggcctgaccctgagccccagcctggagtgcagcggcaccatcctggcccacggcaacctgcacctgctgcacagcagtgacagccctgccagcgccagccgggtggccggcatcaccggggtgcaccacaacacccacctgatctttgtgttcctggtggagatgggcttctgccacgtgggccaggccggcctgaagaccccagacctgcgggtcatctgcctgcccaggcctcccaaggtgctgggcctgtgggcctag

SEQ ID NO: 97238 - DNA, 972 bp, Artificial Sequence
  derived and/or modified sequence
gacctggaggagctgtgccccgtgtgcggcgacaaggtgagcggctatcattacggactgttgacctgtgagtcctgcaaaggtttttttaagcggaccgtccagaataacaaacgctacacgtgcatcgagaaccagaactgccagatcgataaaacacaaaggaaaagatgtccgtattgtcggttccagaagtgcctgtccgtggggatgaaactggaggccgtgcgcgccgataggatgcggggtggacgcaacaagtttggtcccatgtacaagcgtgacagagctctgaagcaacagaaaaaagccctgatccgagctaacggcctgaagttggaagccatgtcccaggttattcaggcaatgccctctgatctcacaatatcctctgcgattcagaacattcacagtgccagcaaaggactcccacttaatcatgccgcccttccccccactgattacgacaggagtcccttcgtcacatcacctatctctatgaccatgcccccccacgggtcacttcagggttatcagacttatggacatttcccaagccgggccataaagtccgagtatcccgacccttatacgagctcccccgagagcataatgggttacagttatatggattcctaccagacctcttcccccgcttcaattccgcacctcattctcgagcttctgaagtgcgaacccgatgaaccgcaggttcaggccaagatcatggcctacctgcaacaggagcaggccaatagatcaaagcatgagaagctatcaactttcgggctgatgtgcaaaatggccgatcagacactgttttccatcgtggagtgggcccggtcaagcatttttttccgagagctaaaagggctgacactgtctcccagcctggagtgttcgggctcatggcttatggccacatccacttcttgcattcaggtcatccggctcccccagccgcccgagtag

SEQ ID NO: 97239 - DNA, 1134 bp, Artificial Sequence
  derived and/or modified sequence
tgagacctggaggagctgtgccccgtgtgcggcgacaaggtgagcggctaccactacgggctgctcacatgcgagtcgtgtaaagggttttttaagaggactgtgcagaacaacaaacggtatacatgcatcgagaatcaaaattgccaaattgacaagactcagaggaagcggtgcccttactgccggttccagaagtgcctctctgtcggcatgaagctggaggctgtgcgcgccgataggatgagagggggcagaaataagttcggtcccatgtataaaagggatagagctctaaaacaacaaaagaaggcgctgatcagggctaacggtcttaagctggaagctatgtcacaggtgatccaagcgatgccttccgacttaacgattagttccgctatccagaatatccactcagctagcaaaggcctgcccctgaaccacgccgcgctgccacctacagactatgaccgatcacctttcgtcacctcccccatttctatgaccatgccaccccacggatccctgcaagggtatcagacatacggtcatttcccatctcgtgctatcaaatctgaataccccgatccatatacttcctcccccgaaagcattatgggctactcatatatggattcctaccagaccagcagccctgcctccattccccacttgattttggagctgctcaagtgtgagccggacgaaccacaagtgcaagccaagatcatggcatatctgcagcaagagcaggctaatcgctcaaagcatgagaagctgtccaccttcggtctgatgtgcaagatggccgatcagactttgttctctatcgtcgagtgggcccgttcatctatcttctttcgagaactgaagggcctgaccctctccccttcgctcgagtgcagcggcactattctggctcatggcaatctccaccttctacattcgagtgactctccagccagtgcttcaagggtggctgggatcaccggggtgcaccataatactcacttaatttttgtctttttagtcgagatgggattctgccacgtgggccaggcagggctgaaaaccccagatctcagagttatctgcctgccacgcccaccaaaagtgctggggctttgggcttag

SEQ ID NO: 97240 - DNA, 972 bp, Artificial Sequence
  derived and/or modified sequence
gatctggaagagctttgtcccgtgtgtggagataaagtgtctgggtaccattatgggctcctcacctgtgaaagctgcaagggattttttaagcgaacagtccaaaataataaaaggtacacatgtatagaaaaccagaactgccaaattgacaaaacacagagaaagcgttgtccttactgtcgttttcaaaaatgtctaagtgttggaatgaagctagaagctgtaagggccgaccgaatgcgtggaggaaggaataagtttgggccaatgtacaagagagacagggccctgaagcaacagaaaaaagccctcatccgagccaatggacttaagctagaagccatgtctcaggtgatccaagctatgccctctgacctgaccatttcctctgcaattcaaaacatccactctgcctccaaaggcctacctctgaaccatgctgccttgcctcctacagactatgacagaagtccctttgtaacatcccccattagcatgacaatgccccctcacggcagcctgcaaggttaccaaacatatggccactttcctagccgggccatcaagtctgagtacccagacccctataccagctcacccgagtccataatgggctattcatatatggatagttaccagacgagctctccagcaagcatcccacatctgatactggaacttttgaagtgtgagccagatgagcctcaagtccaggctaaaatcatggcctatttgcagcaagagcaggctaaccgaagcaagcacgaaaagctgagcacctttgggcttatgtgcaaaatggcagatcaaactctcttctccattgtcgagtgggccaggagtagtatcttcttcagagaacttaagggtctcactctgtcgcccagtctggagtgcagtggctcttggctcatggcaacctccacctcctgcattcaagtgattcgcctgcctcagcctcccgagtag

SEQ ID NO: 97241 - DNA, 1793 bp, Artificial Sequence
  derived and/or modified sequence
aagatctggaagagctttgtcccgtgtgtggagataaagtgtctgggtaccattatgggctcctcacctgtgaaagctgcaagggattttttaagcgaacagtccaaaataataaaaggtacacatgtatagaaaaccagaactgccaaattgacaaaacacagagaaagcgttgtccttactgtcgttttcaaaaatgtctaagtgttggaatgaagctagaagctgtaagggccgaccgaatgcgtggaggaaggaataagtttgggccaatgtacaagagagacagggccctgaagcaacagaaaaaagccctcatccgagccaatggacttaagctagaagccatgtctcaggtgatccaagctatgccctctgacctgaccatttcctctgcaattcaaaacatccactctgcctccaaaggcctacctctgaaccatgctgccttgcctcctacagactatgacagaagtccctttgtaacatcccccattagcatgacaatgccccctcacggcagcctgcaaggttaccaaacatatggccactttcctagccgggccatcaagtctgagtacccagacccctataccagctcacccgagtccataatgggctattcatatatggatagttaccagacgagctctccagcaagcatcccacatctgatactggaacttttgaagtgtgagccagatgagcctcaagtccaggctaaaatcatggcctatttgcagcaagagcaggctaaccgaagcaagcacgaaaagctgagcacctttgggcttatgtgcaaaatggcagatcaaactctcttctccattgtcgagtgggccaggagtagtatcttcttcagagaacttaagggtctcactctgtcgcccagtctggagtgcagtggcacgatcttggctcatggcaacctccacctcctgcattcaagtgattcgcctgcctcagcctcccgagtagctgggattacaggcgtgcaccacaacacccatctaatttttgtatttttagtagagatgggattttgccatgttggccaggctggtctcaaaactcctgacctcagggtgatctgcctgcctcggcctcccaaagtgctgggattatgggcatgagccactgcgcctggccgtaattgtgcttttttttccttttttctttttttgagatggagttacactcttgttgcctgggctggggtgcaatggcacagtctcggctcactgcaacctccacctcctgggttccagcaattctcctgcctcagcctcccgagtagctgggattacaggcatgcgccaccatgcctagctaattttcgtattattagtagaaacaaggtttcaccatgtcagccaggctggtctcaaactcctgacctcagatgatccacccgccttggcctcccaaagtgctgggattacagatgtgagccaccacgctcagccaaattgtactttcagtaaagtactttactgtttacaaagaacttccatatacatttttttggtcctggtctctgtctttcattttgggagcatggatgtaactggcctttcatcaatggttcagtagtgttgttttttaaagcctacaacagaaccatctcctatgaattgactatcacctgtctaaatgccctgtttacagcatgttgtacctgcaagagcaggatatttaaagtactttataattgataattgccattatcaatatgctcacctctttaccatattccaacaggtcttaaaggacttgtattattttttaccgaa

SEQ ID NO: 97242 - DNA, 972 bp, Artificial Sequence
  derived and/or modified sequence
gatctcgaggaactgtgccccgtctgcggcgataaggtcagcgggtatcactatggcctcctgacttgcgagagttgtaagggcttcttcaagagaaccgtgcagaacaacaagcggtatacgtgcatagaaaaccagaattgccagattgacaagactcagcgaaagaggtgcccctactgtcgattccagaaatgtttgagtgtcggcatgaagctggaggcagttcgggctgatcggatgcgtggaggtcggaacaagttcggtccaatgtataaacgggatagggcgctgaagcagcagaagaaggctctgataagggccaacgggctgaaacttgaggctatgagtcaagtcatccaggccatgcccagcgacctgactatctcaagcgccattcaaaacattcattccgcaagtaagggactgcccctaaaccacgccgcactgcctcccaccgattatgacagatctccgttcgtgacctctcccatttcgatgacaatgcctcctcacggtagtttgcagggataccagacttacggacattttccctcacgcgctatcaagtcagagtaccccgacccttacactagctcacccgagtccatcatgggctattcttacatggacagctatcaaacatcaagcccagcctccattcctcacctgatcctggagctcctgaaatgtgagcccgacgagccacaggtccaggcaaaaatcatggcgtacctccagcaggagcaggcaaaccgcagcaaacacgagaagctctctacattcgggctcatgtgtaagatggctgatcagaccctcttttcgattgtcgagtgggcacgtagttctatcttctttagagagctgaaggggctgaccctgagcccatcattggagtgcagcggaagctggctgatggctacatcaacctcatgcatacaggtgatacggttgccacagccacctgagtag

SEQ ID NO: 97243 - DNA, 1134 bp, Artificial Sequence
  derived and/or modified sequence
tgagacctcgaagaactttgccctgtgtgcggggacaaagtttctggctatcactatggtcttctcacatgcgagtcttgcaaaggcttcttcaagagaacggttcaaaataataagcgatacacatgtattgagaatcagaactgccaaatcgataaaacccaaagaaagcgttgcccatattgtcgattccagaaatgcctgtccgttgggatgaaattagaggctgtgagggcagaccggatgcggggagggaggaacaagtttgggccaatgtataagagagatcgcgctctgaagcagcagaagaaggcgttaatcagagctaatggcctcaaactggaagctatgtcacaggtgatacaggccatgcctagcgacctgactatttctagcgccattcagaacatccactcagctagcaaggggctacccctcaaccacgcagcacttcctcccactgattacgaccgctcccctttcgtgacatcacctattagcatgacgatgccccctcacggaagtctacaagggtatcagacatatggacactttccatcccgcgctatcaaaagtgagtatcccgatccttacaccagcagtcccgagagcataatgggctactcatatatggatagctatcagacaagctccccagctagtataccccatctaatcctggagttactcaagtgtgaaccagatgagcctcaagtgcaggcaaaaatcatggcctacctccagcaggagcaggccaaccggagtaaacacgagaagctgtcgacatttgggctcatgtgcaaaatggccgaccagaccctattttctattgtcgagtgggccaggtcctccatattttttagggagctgaaggggctcacacttagtccttctctggaatgcagcggtacaattctcgcccacggcaacttacatctgttacattcttccgatagtcctgcctccgcaagccgggttgctggtattacgggcgttcatcataacacgcacctgatttttgtgtttctggtggagatgggtttttgtcacgtgggccaggccggtctgaagacgccagatcttagagtgatctgcttgccgcgtcctccaaaagtgctggggctgtgggcatag

SEQ ID NO: 97244 - DNA, 972 bp, Artificial Sequence
  derived and/or modified sequence
gacctggaggagctgtgccccgtgtgcggcgacaaggtgagcggctaccactacggcctgctgacctgcgagagctgcaagggcttcttcaagagaaccgtgcagaacaacaagagatacacctgcatcgagaaccagaactgccagatcgacaagacccagagaaagagatgcccctactgcagattccagaagtgcctgagcgtgggcatgaagctggaggccgtgagagccgacagaatgagaggcggcagaaacaagttcggccccatgtacaagagagacagagccctgaagcagcagaagaaggccctgatcagagccaacggcctgaagctggaggccatgagccaggtgatccaggccatgcccagcgacctgaccatcagcagcgccatccagaacatccacagcgccagcaagggcctgcccctgaaccacgccgccctgccccccaccgactacgacagaagccccttcgtgaccagccccatcagcatgaccatgcccccccacggcagcctgcagggctaccagacctacggccacttccccagcagagccatcaagagcgagtaccccgacccctacaccagcagccccgagagcatcatgggctacagctacatggacagctaccagaccagcagccccgccagcatcccccacctgatcctggagctgctgaagtgcgagcccgacgagccccaggtgcaggccaagatcatggcctacctgcagcaggagcaggccaacagaagcaagcacgagaagctgagcaccttcggcctgatgtgcaagatggccgaccagaccctgttcagcatcgtggagtgggccagaagcagcatcttcttcagagagctgaagggcctgaccctgagccccagcctggagtgcagcggcagctggctgatggccaccagcaccagctgcatccaggtgatcagactgccccagccccccgagtag

SEQ ID NO: 97245 - DNA, 1134 bp, Artificial Sequence
  derived and/or modified sequence
tgagacctggaggagctgtgccccgtgtgcggcgacaaggtgagcggctaccactacggcctgctgacctgcgagagctgcaagggcttcttcaagagaaccgtgcagaacaacaagagatacacctgcatcgagaaccagaactgccagatcgacaagacccagagaaagagatgcccctactgcagattccagaagtgcctgagcgtgggcatgaagctggaggccgtgagagccgacagaatgagaggcggcagaaacaagttcggccccatgtacaagagagacagagccctgaagcagcagaagaaggccctgatcagagccaacggcctgaagctggaggccatgagccaggtgatccaggccatgcccagcgacctgaccatcagcagcgccatccagaacatccacagcgccagcaagggcctgcccctgaaccacgccgccctgccccccaccgactacgacagaagccccttcgtgaccagccccatcagcatgaccatgcccccccacggcagcctgcagggctaccagacctacggccacttccccagcagagccatcaagagcgagtaccccgacccctacaccagcagccccgagagcatcatgggctacagctacatggacagctaccagaccagcagccccgccagcatcccccacctgatcctggagctgctgaagtgcgagcccgacgagccccaggtgcaggccaagatcatggcctacctgcagcaggagcaggccaacagaagcaagcacgagaagctgagcaccttcggcctgatgtgcaagatggccgaccagaccctgttcagcatcgtggagtgggccagaagcagcatcttcttcagagagctgaagggcctgaccctgagccccagcctggagtgcagcggcaccatcctggcccacggcaacctgcacctgctgcacagcagcgacagccccgccagcgccagcagagtggccggcatcaccggcgtgcaccacaacacccacctgatcttcgtgttcctggtggagatgggcttctgccacgtgggccaggccggcctgaagacccccgacctgagagtgatctgcctgcccagaccccccaaggtgctgggcctgtgggcctag

SEQ ID NO: 97246 - DNA, 714 bp, Artificial Sequence
  derived and/or modified sequence
atgtggctgggcagaagagccctgtgcgccctggtgctgctgctggcctgcgccagcctgggcctgctgtacgccagcaccagagacgcccccggcctgagactgcccctggccccctgggcccccccccagagccccagaagacccgagctgcccgacctggcccccgagcccagatacgcccacatccccgtgagaatcaaggagcaggtggtgggcctgctggcctggaacaactgcagctgcgagagcagcggcggcggcctgcccctgcccttccagaagcaggtgagagccatcgacctgaccaaggccttcgaccccgccgagctgagagccgccagcgccaccagagagcaggagttccaggccttcctgagcagaagccagagccccgccgaccagctgctgatcgcccccgccaacagccccctgcagtaccccctgcagggcgtggaggtgcagcccctgagaagcatcctggtgcccggcctgagcctgcaggccgccagcggccaggaggtgtaccaggtgaacctgaccgccagcctgggcacctgggacgtggccggcgaggtgaccggcgtgaccctgaccggcgagggccaggccgacctgaccctggtgagccccggcctggaccagctgaacagacagctgcagctggtgacctacagcagcagaagctaccagaccaacaccgccgacacctag

SEQ ID NO: 97247 - DNA, 363 bp, Artificial Sequence
  derived and/or modified sequence
atgtggctgggcagaagagccctgtgcgccctggtgctgctgctggcctgcgccagcctgggcctgctgtacgccagcaccagagacgcccccggcctgagactgcccctggccccctgggcccccccccagagccccagaagacccgagctgcccgacctggcccccgagcccagatacgcccacatccccgtgagaatcaaggagcaggtggtgggcctgctggcctggaacaactgcagctgcgagagcagcggcggcggcctgcccctgcccttccagaagcaggtgagagccatcgacctgaccaaggccttcgaccccgccgagctgagagccgccagcgccaccagagagcagtag

SEQ ID NO: 97248 - DNA, 714 bp, Artificial Sequence
  derived and/or modified sequence
atgtggctcgggcggagagctctgtgcgcgctagtactgctgctcgcctgtgcttcgctgggtctgctgtacgcaagcacaagggatgcccctgggctgcgactgcctctagccccctgggctccacctcagagcccacggaggcccgaattgccggacctagctcccgagcccaggtacgcacatatcccagtcagaattaaagaacaggtggtcggcctgcttgcatggaacaactgctcctgcgaatccagtggaggaggacttccactgccctttcagaagcaggttagagcgatagacttaacaaaggctttcgatcctgcagaactgcgagcggcatctgcaacacgcgagcaggagtttcaggcttttctttctagatctcaatcccccgctgatcaactgctgatagcacccgcaaactctccgctacagtacccactgcagggcgtcgaagtgcagcccctccgttccatactcgtccctgggctgagcctccaggccgcctccgggcaggaagtgtaccaggtaaacctgaccgcttccctcgggacctgggacgtggcaggtgaggtgaccggcgtgactctgaccggtgagggacaggctgacctgaccctcgtttctcctgggctggaccagctcaatagacagctgcaattagtcacttattcatcccggtcttatcagaccaatacagcggacacctag

SEQ ID NO: 97249 - DNA, 363 bp, Artificial Sequence
  derived and/or modified sequence
atgtggctgggcaggagagctctgtgcgccctggtgttgttactggcatgtgcatccctgggcctactctatgcgagtacgcgtgacgcaccaggccttcgtctgccattggccccgtgggcacctcctcagagccctcgaaggccagagcttccagatctggcccctgaaccaaggtatgcccacataccggtgagaatcaaagaacaggtcgtaggccttttggcctggaataattgttcatgcgaaagttctggaggggggctgcccttgccttttcaaaaacaggtgcgtgctattgatctgaccaaggcatttgaccctgcggagcttagagccgcttcagcaacccgtgagcagtag

SEQ ID NO: 97250 - DNA, 714 bp, Artificial Sequence
  derived and/or modified sequence
atgtggctgggcagaagagccctgtgtgccctggtgctgctgctggcctgtgccagcctgggcctgctgtatgccagcaccagagatgcccctggcctgcggctgcccctggccccctgggccccaccccagagccccaggaggcctgagctgcctgacctggcccctgagcccaggtatgcccacatccctgtgcgcatcaaggagcaggtggtgggcctgctggcctggaacaactgcagctgtgagagcagcggcggcggcctgcccctgcccttccagaagcaggtgcgggccatcgacctgaccaaggcctttgatcctgctgagctgcgggccgccagcgccacccgggagcaggagttccaggccttcctgagccgcagccagagccctgctgaccagctgctgattgccccagccaacagccccctgcagtaccccctgcagggcgtggaggtgcagcccctgcggagcatcctggtgcccggcctgagcctgcaggccgccagcggccaggaggtgtaccaggtgaacctgacagccagcctgggcacctgggatgtggccggggaggtgactggagtgaccctgactggagagggccaggccgacctgaccctggtgtccccaggcctggaccagctgaaccggcagctgcagctggtgacctacagcagccgcagctaccagaccaacacagctgacacctag

SEQ ID NO: 97251 - DNA, 363 bp, Artificial Sequence
  derived and/or modified sequence
atgtggctgggcagaagagccctgtgtgccctggtgctgctgctggcctgtgccagcctgggcctgctgtatgccagcaccagagatgcccctggcctgcggctgcccctggccccctgggccccaccccagagccccaggaggcctgagctgcctgacctggcccctgagcccaggtatgcccacatccctgtgcgcatcaaggagcaggtggtgggcctgctggcctggaacaactgcagctgtgagagcagcggcggcggcctgcccctgcccttccagaagcaggtgcgggccatcgacctgaccaaggcctttgatcctgctgagctgcgggccgccagcgccacccgggagcagtag

SEQ ID NO: 97252 - DNA, 714 bp, Artificial Sequence
  derived and/or modified sequence
atgtggctgggccggcgggccctgtgcgccctggtgctgctgctggcatgtgcatcactaggcttactgtatgcgtccaccagggacgcacctggattacggctgcccctggctccttgggcccccccacagtctccacgcaggccggaattgcccgacctggcccctgagccaaggtacgcccatatcccagtccgaataaaggagcaggtagtgggcttactcgcttggaacaactgtagctgcgaaagttcgggaggaggactgcccctcccatttcagaaacaggtcagagccattgacctgaccaaggcgttcgatcctgctgaattgcgggccgccagcgccactcgggaacaggagttccaagcttttttgtctcgatcccaaagcccggctgaccaattgctgatcgcacccgctaatagcccactgcagtaccctttgcaaggcgttgaggtccagcctttgcggtccatcctggtgcctggattatcactgcaggcagcctctggccaggaggtctaccaagtgaacctgacagcctccctgggtacctgggacgtggccggtgaggtgaccggcgttactttgactggagaggggcaggcagatctcaccctcgtgagtcctggattagaccagcttaacaggcagcttcagctcgtaacctattcttctagaagctaccaaactaatacagccgacacatag

SEQ ID NO: 97253 - DNA, 363 bp, Artificial Sequence
  derived and/or modified sequence
atgtggctgggccggcgggccctgtgcgccctggtgctgctgctggcatgtgcctcactcggattactgtacgcttccacacgagacgcccctggtctgagattgccactcgccccctgggccccacctcaatctcccaggcgacctgaactccccgacctagctcccgaacctaggtacgcccacatccccgtgaggatcaaggaacaggttgtgggcctcttggcgtggaataattgctcttgtgaatcctcaggtggcggactgccactcccttttcagaaacaagtcagggccatcgatctgacaaaggctttcgatccagctgaactccgggcggcttcggcaacgagggagcagtag

SEQ ID NO: 97254 - DNA, 714 bp, Artificial Sequence
  derived and/or modified sequence
atgtggttgggccgacgagccctgtgcgctctcgttctgctgctggcttgcgcttctctggggctactatacgcttctaccagagatgcgccaggcttgcgcctgccccttgcgccttgggccccaccacagtctcccaggagaccagagttgccagatctggccccagagcctcggtatgcgcacattcccgtgaggattaaagagcaagtggtcggactcctcgcgtggaacaactgtagctgcgaatcgagtggtggcggactcccgctcccgttccagaagcaggtgagagccatcgacctcaccaaagcgttcgaccccgctgaactgcgtgctgcttcggctactagggaacaagaattccaggccttcctgagtaggagccagagccctgctgaccagctgctaatcgctccagctaacagtcctctccagtaccctctgcagggcgtggaagtgcagcccctgcgatctattctggtgcccggactctccctccaggcagccagcggtcaggaggtgtaccaggtgaatctgaccgcttctctgggcacttgggatgttgctggagaagttaccggcgttacccttaccggagagggccaagcagaccttacattagtgagcccagggttggatcagctgaatagacaactgcaattggtgacttactcctccaggtcttaccagaccaacaccgctgacacgtag

SEQ ID NO: 97255 - DNA, 363 bp, Artificial Sequence
  derived and/or modified sequence
atgtggctggggagaagagcgctctgtgccctggttctactgcttgcttgtgcctcactcgggctgctgtatgcttcaacacgcgacgcacctggtttgagacttccactggccccttgggcaccccctcaatcacctagaaggcctgagcttcccgatctggctcccgagccacggtatgcccatatccccgtcaggatcaaggaacaggtggtgggattgttggcatggaataattgctcttgcgagagcagcgggggtggcctccccctgccatttcagaagcaggttcgagccatagacttgactaaggctttcgatcctgctgaacttcgtgcagctagcgccacccgcgagcagtag

SEQ ID NO: 97256 - DNA, 841 bp, Artificial Sequence
  derived and/or modified sequence
cgcgccgcttgccgaggccactcatcgggtcacctccgccgggggcgcccgccagcacgggcatgattctgcattttttcctgacaggctaggtgtggagccgccctccgcagcccaccccggcccaggatgtggctgggccgccgggccctgtgcgctctggtccttctgctcgcctgcgcctcgctggggctcctgtacgcgagcacccgggacgcgcccggcctccggctacctcttgcgccgtgggcgcccccgcaaagcccccgcaggcccgagctgccagatcttgctcctgagccccgctacgcacacatcccggtcaggatcaaggagcaagtagtggggctgctggcttggaacaactgcagttgtgagtccagtggggggggcctccccctccccttccagaaacaagtccgagctattgacctcaccaaggcctttgaccctgcagagctgagggctgcctctgccacaagagagcaggagttccaggcctttctgtcgaggagccagtccccagctgaccagctgctcatagcccctgccaactccccgctccagtaccccctacagggtgtggaagttcagcccctcaggagcatcttggtgccagggctgagccttcaggcagcttctggtcaggaggtataccaggtgaacctgactgcctccctaggcacctgggacgtggcaggggaagtgactggagttactctcactggagagggtcaggcagatctcacccttgtcagcccagggctggaccaactcaacaggcaactacaactggtcacttacagcagccgaagctaccagaccaacacagcagacacag

SEQ ID NO: 97257 - DNA, 837 bp, Artificial Sequence
  derived and/or modified sequence
gctcgcattccccgcgcggagccgaagcagccgcaacgagccgggagctgagccgcgctgcgctgcggtgcgaagagccgggcggcggccagagccctccccgcgctgccagtgggacgcggagccagggatccccggctttgccccggggctggggtgcaacagactcttaacttggtcctcgcgccccgccaaccgcccccgggcaggaaacgcccagaaccaccaccgcgccgcgctccacaaaagccccgggagttccaagacgggagggatcgggcgcgctccagaggcaggagggtcccccacaccctcaggctcatgcccagctcccccatcgggcagcccccagccccatgaggaccctcaggccggggcgagagcccggcacagcccggaccgaaattttgccgctgccttagagcgttagacaggctaggtgtggagccgccctccgcagcccaccccggcccaggatgtggctgggccgccgggccctgtgcgctctggtccttctgctcgcctgcgcctcgctggggctcctgtacgcgagcacccgggacgcgcccggcctccggctacctcttgcgccgtgggcgcccccgcaaagcccccgcaggcccgagctgccagatcttgctcctgagccccgctacgcacacatcccggtcaggatcaaggagcaagtagtggggctgctggcttggaacaactgcagttgtgagtccagtggggggggcctccccctccccttccagaaacaagtccgagctattgacctcaccaaggcctttgaccctgcagagctgagggctgcctctgccacaagagagcagg

SEQ ID NO: 97258 - protein, 474 aa, Artificial Sequence
  derived and/or modified sequence
MRRVVRQSKFRHVFGQAVKNDQCYDDIRVSRVTWDSSFCAVNPRFVAIIIEASGGGAFLVLPLHKTGRIDKSYPTVCGHTGPVLDIDWCPHNDQVIASGSEDCTVMVWQIPENGLTLSLTEPVVILEGHSKRVGIVAWHPTARNVLLSAGCDNAIIIWNVGTGEALINLDDMHSDMIYNVSWNRNGSLICTASKDKKVRVIDPRKQEIVAEKEKAHEGARPMRAIFLADGNVFTTGFSRMSERQLALWNPKNMQEPIALHEMDTSNGVLLPFYDPDTSIIYLCGKGDSSIRYFEITDESPYVHYLNTFSSKEPQRGMGYMPKRGLDVNKCEIARFFKLHERKCEPIIMTVPRKSDLFQDDLYPDTAGPEAALEAEEWFEGKNADPILISLKHGYIPGKNRDLKVVKKNILDSKPTANKKCDLISIPKKTTDTASVQNEAKLDEILKEIKSIKDTICNQDERISKLEQQMAKIAA

SEQ ID NO: 97259 - protein, 162 aa, Artificial Sequence
  derived and/or modified sequence
MRRVVRQSKFRHVFGQAVKNDQCYDDIRVSRVTWDSSFCAVNPRFVAIIIEASGGGAFLVLPLHKTGRIDKSYPTVCGHTGPVLDIDWCPHNDQVIASGSEDCTVMVWQIPENGLTLSLTEPVVILEGHSKRVGIVAWHPTARNVLLSAGCDNAIIIWNVGT

SEQ ID NO: 97260 - protein, 181 aa, Artificial Sequence
  derived and/or modified sequence
MRRVVRQSKFRHVFGQAVKNDQCYDDIRVSRVTWDSSFCAVNPRFVAIIIEASGGGAFLVLPLHKTGRIDKSYPTVCGHTGPVLDIDWCPHNDQVIASGSEDCTVMVWQIPENGLTLSLTEPVVILEGHSKRVGIVAWHPTARNVLLSAGCDNAIIIWNVGTGEALINLDDMHSDMIYNVS

SEQ ID NO: 97261 - protein, 169 aa, Artificial Sequence
  derived and/or modified sequence
MRRVVRQSKFRHVFGQAVKNDQCYDDIRVSRVTWDSSFCAVNPRFVAIIIEASGGGAFLVLPLHKTGRIDKSYPTVCGHTGPVLDIDWCPHNDQVIASGSEDCTVMVWQIPENGLTLSLTEPVVILEGHSKRVGIVAWHPTARNVLLSAGCDNAIIIWNVGTGEALINL

SEQ ID NO: 97262 - protein, 151 aa, Artificial Sequence
  derived and/or modified sequence
MRRVVRQSKFRHVFGQAVKNDQCYDDIRVSRVTWDSSFCAVNPRFVAIIIEASGGGAFLVLPLHKTGRIDKSYPTVCGHTGPVLDIDWCPHNDQVIASGSEDCTVMVWQIPENGLTLSLTEPVVILEGHSKRVGIVAWHPTARNVLLSAGG

SEQ ID NO: 97263 - protein, 163 aa, Artificial Sequence
  derived and/or modified sequence
MRRVVRQSKFRHVFGQAVKNDQCYDDIRVSRVTWDSSFCAVNPRFVAIIIEASGGGAFLVLPLHKTGRIDKSYPTVCGHTGPVLDIDWCPHNDQVIASGSEDCTVMVWQIPENGLTLSLTEPVVILEGHSKRVGIVAWHPTARNVLLSAGCDNAIIIWNVGTG

SEQ ID NO: 97264 - protein, 482 aa, Artificial Sequence
  derived and/or modified sequence
MSGHKCYPWDLQDRYAQDKSVVNKMQQKYWETKQAFIKATGKKEDEHVVASDADLDAKLELFHSIQRTCLDLSKAIVLYQKRICFLSQEENELGKFLRSQGFQDKTRAGKMMQATGKALCFSSQQRLALRNPLCRFHQEVETFRHRAISDTWLTVNRMEQCRTEYRGALLWMKDVSQELDPDLYKQMEKFRKVQTQVRLAKKNFDKLKMDVCQKVDLLGASRCNLLSHMLATYQTTLLHFWEKTSHTMAAIHESFKGYQPYEFTTLKSLQDPMKKLVEKEEKKKINQQESTDAAVQEPSQLISLEEENQRKESSSFKTEDGKSILSALDKGSTHTACSGPIDELLDMKSEEGACLGPVAGTPEPEGADKDDLLLLSEIFNASSLEEGEFSKEWAAVFGDGQVKEPVPTMALGEPDPKAQTGSGFLPSQLLDQNMKDLQASLQEPAKAASDLTAWFSLFADLDPLSNPDAVGKTDKEHELLNA

SEQ ID NO: 97265 - DNA, 1449 bp, Artificial Sequence
  derived and/or modified sequence
atgtcaggccacaaatgctatccttgggatttgcaggaccggtacgctcaagataagagtgtcgtcaacaaaatgcaacagaaatattgggagaccaaacaggccttcatcaaagctactggaaagaaggaggacgagcacgtcgtggctagcgacgctgatcttgatgcaaagctcgagctgttccactctatccagcggacgtgcctggatctttccaaagctattgtgctgtaccaaaagcgtatctgctttctttctcaagaggagaatgaacttggtaaattccttaggtcacagggctttcaggataagacaagagcgggcaagatgatgcaggcgaccgggaaggcactgtgcttctcttctcagcagcgcctggcccttcgcaaccccctgtgccggtttcaccaggaggtagaaactttccgtcaccgcgccatctctgacacttggctgacagtgaacaggatggagcagtgccgcaccgaatacagaggcgcgttactgtggatgaaggacgtgtcgcaagagcttgatcctgacctgtataaacaaatggaaaagttcaggaaagtccagacccaggtgcggcttgccaagaagaactttgacaaactgaaaatggatgtctgccagaaagtcgatctcctgggcgcctctcgctgcaatctcctgtcacacatgctcgccacctaccagactaccctcctgcacttttgggagaagacgtcacatactatggcagccatacatgagtcattcaaaggctatcaaccctacgagttcaccacgctcaaatctctccaggatcccatgaaaaagctggtcgagaaagaagaaaaaaagaagatcaaccagcaggagtctactgatgcagcggtccaggagccttctcagttgatctctctcgaggaggagaatcagcggaaggagagtagttcgtttaaaactgaggatgggaagtcaatcctgtccgcacttgacaaagggagtactcacacagcatgttcggggcctatcgacgaattactcgacatgaagagtgaggagggggcatgcttgggaccggtggcgggtacccccgaacctgagggcgccgacaaagatgacctgttattgctctctgaaatattcaatgctagctccttagaggaaggtgaattcagcaaagaatgggctgccgtgttcggagatggacaggtgaaggagcctgtcccaacaatggccctgggcgaacccgaccctaaggctcagacaggtagcggttttctgccctcgcagctgttggaccaaaatatgaaggacctccaggcgagcctccaggagccggcaaaggccgcatctgatctgactgcctggtttagcctctttgctgacttagatccattgagcaatcctgatgccgtaggaaaaacggataaagaacacgagctgttgaatgcgtag

SEQ ID NO: 97266 - DNA, 405 bp, Artificial Sequence
  derived and/or modified sequence
atgtcgggccataagtgttacccctgggatcttcaggaccgttacgcacaagacaaatctgttgtcaacaagatgcagcaaaagtactgggaaactaaacaggcatttattaaggccaccggaaagaaagaagacgagcacgtggtcgcctcggacgccgatctggacgcaaagctggagttgtttcattccattcagcggacttgcctggatctatctaaggcaatcgtcctgtaccagaaaagaatctgcttcttgagccaggaagagaatgagcttggcaagttcctgaggtcccagggcttccaggacaaaacgcgagccggtaaaatgatgcaggctacgggcaaagcactgtgtttctcctcccagcagagactggcgctgaggaaccccctttgctag

SEQ ID NO: 97267 - DNA, 2309 bp, Artificial Sequence
  derived and/or modified sequence
ctgcgctccccccgcccctttccctcgccttcggctgacgctgacgtcggatgagtgatccggagggacgctccgaccgcggccgggaggctcctgggggccggggctccgaggttataatataacttatcctctcatgcttttttcctgccccttctccccaaatcatcaacaatagaagaagaagaaaacatgtcaggacacaaatgttatccctgggacttacaggatcgatatgctcaagataagtcagttgtaaataagatgcaacagaaatattgggagacgaagcaggcctttattaaagccacagggaagaaggaagatgaacatgttgttgcctctgacgcggacctggatgccaagctagagctgtttcattcaattcagagaacctgtctggacttatcgaaagcaattgtactctatcaaaagaggatatgtttcttgtctcaagaagaaaacgaactgggaaaatttcttcgatcccaaggtttccaagataaaaccagagcaggaaagatgatgcaagcgacaggaaaggccctctgcttttcttcccagcaaaggttggccttacgaaatcctttgtgtcgatttcaccaagaagtggagacttttcggcatcgggccatctcagatacttggctgacggtgaaccgcatggaacagtgcaggacggaatatagaggagcactattatggatgaaggacgtgtctcaggagcttgatccagacctctacaagcaaatggagaagttcaggaaggtacaaacacaagtgcgccttgcaaaaaaaaactttgacaaattgaagatggatgtttgtcaaaaagtggatcttcttggagcgagcagatgcaatctcttgtctcacatgctagcaacataccagaccactctgcttcatttttgggagaaaacttctcacactatggcagccatccatgagagtttcaaaggttatcaaccatatgaatttactactttaaagagcttacaagaccctatgaaaaaattagttgagaaagaagagaagaagaaaatcaaccagcaggaaagtacagatgcagccgtgcaggagccgagccaattaatttcattagaggaagaaaaccagcgcaaggaatcctctagttttaagactgaagatggaaaaagtattttatctgccttagacaaaggctctacacatactgcatgctcaggacccatagatgaactattagacatgaaatctgaggaaggtgcttgcctgggaccagtggcagggaccccggaacctgaaggtgctgacaaagatgacctgctgctgttgagtgagatcttcaatgcttcctccttggaagagggcgagttcagcaaagagtgggccgctgtgtttggagacggccaagtgaaggagccagtgcccactatggccctgggagagccagaccccaaggcccagacaggctcaggtttccttccttcgcagcttttagaccaaaatatgaaagacttacaggcctcgctacaagaacctgctaaggctgcctcagacctgactgcctggttcagcctcttcgctgacctcgacccactctcaaatcctgatgctgttgggaaaaccgataaagaacacgaattgctcaatgcatgaatctgtacccttcgggagggcactcacatgccgcccccagcagctcccctgggggctagcagaagtataaagtgatcagtatgctgttttaataattatgtgccattttaataaaatgaaagggtcaacggccctgtttatattggtataattatttactcttatttggtataaagggttttcgtgtatctctatgtggatctaaataatacaggattgtctagaagcggtttccaggccaccgctctcctgcctacatcccatcatggctgctgcggtgtcactgggctaccgtgagatccaagttgaaatcagaagcctactttgatggtaggtttgaatgacgtgtcctacagcctcagaggcagcaggaggctagcaaagcttaaatgcctccttctctgcccccagcctctgtcccccttggaggagggctgtaggaagattccctcttcctgccaagccaccttccagtgagctctggatgaagctctggccaaccaaagacactgtccccacagcaggtgcctggtgggccacgtgttctcacactggtggaggagctgggcttctgtccaaggcacaaaccttactatggaaagcagccatatttgcagataccactgtctccttttgtcctcttcgtggctggaattcaaaagcatgta

SEQ ID NO: 97268 - DNA, 551 bp, Artificial Sequence
  derived and/or modified sequence
gggggcgcgccgggcgggctgcaggaagcagcaggagacgcccggcagccgggacggtcggggacgcctggttataatataacttatcctctcatgcttttttcctgccccttctccccaaatcatcaacaatagaagaagaagaaaacatgtcaggacacaaatgttatccctgggacttacaggatcgatatgctcaagataagtcagttgtaaataagatgcaacagaaatattgggagacgaagcaggcctttattaaagccacagggaagaaggaagatgaacatgttgttgcctctgacgcggacctggatgccaagctagagctgtttcattcaattcagagaacctgtctggacttatcgaaagcaattgtactctatcaaaagaggatatgtttcttgtctcaagaagaaaacgaactgggaaaatttcttcgatcccaaggtttccaagataaaaccagagcaggaaagatgatgcaagcgacaggaaaggccctctgcttttcttcccagcaaaggttggccttacgaaatcctttgtgt

SEQ ID NO: 97269 - DNA, 1449 bp, Artificial Sequence
  derived and/or modified sequence
atgagcggccacaagtgctacccctgggacctgcaggacagatatgcccaggacaagtctgtggtgaacaagatgcagcagaagtactgggagaccaagcaggccttcatcaaggccaccgggaagaaggaggatgaacatgtggtggccagtgatgctgacctggatgccaagctggagctgttccacagcatccagaggacctgcctggacctgagcaaggccatcgtgctgtaccagaagaggatctgcttcctgagccaggaggagaatgagctgggcaagttcctgcggagccagggcttccaggacaagacccgggccggcaagatgatgcaggccaccgggaaggccctgtgcttcagcagccagcagaggctggccctgaggaaccccctgtgccgcttccaccaggaggtggagaccttccgccaccgggccatcagtgacacctggctgactgtgaacaggatggagcagtgcaggacagagtacagaggagccctgctgtggatgaaggatgtgtcccaggagctggaccctgacctgtacaagcagatggagaagttcaggaaggtgcagacccaggtgcggctggccaagaagaactttgacaagctgaagatggatgtgtgccagaaggtggacctgctgggcgccagccgctgcaacctgctgagccacatgctggccacctaccagaccaccctgctgcacttctgggagaagaccagccacaccatggccgccatccacgagagcttcaagggctaccagccctatgagttcaccaccctgaagagcctgcaggaccccatgaagaagctggtggagaaggaggagaagaagaagatcaaccagcaggagagcacagatgctgctgtgcaggagcccagccagctgatcagcctggaggaggagaaccagaggaaggagagcagcagcttcaagacagaagatggcaagagcatcctgagcgccctggacaagggcagcacccacacagcctgcagcggccccattgatgagctgctggacatgaagtctgaggagggcgcctgcctgggccctgtggccggcaccccagagcctgagggcgctgacaaggatgacctgctgctgctgtctgagatcttcaatgccagcagcctggaggagggggagttcagcaaggagtgggccgctgtgtttggagatggccaggtgaaggagcctgtgcccaccatggccctgggggagccagaccccaaggcccagacaggcagcggcttcctgcccagccagctgctggaccagaacatgaaggacctgcaggccagcctgcaggagcccgccaaggccgccagtgacctgacagcctggttcagcctgtttgctgacctggaccccctgagcaacccagatgctgtgggcaagacagacaaggagcacgagctgctgaatgcctag

SEQ ID NO: 97270 - DNA, 405 bp, Artificial Sequence
  derived and/or modified sequence
atgagcggccacaagtgctacccctgggacctgcaggacagatatgcccaggacaagtctgtggtgaacaagatgcagcagaagtactgggagaccaagcaggccttcatcaaggccaccgggaagaaggaggatgaacatgtggtggccagtgatgctgacctggatgccaagctggagctgttccacagcatccagaggacctgcctggacctgagcaaggccatcgtgctgtaccagaagaggatctgcttcctgagccaggaggagaatgagctgggcaagttcctgcggagccagggcttccaggacaagacccgggccggcaagatgatgcaggccaccgggaaggccctgtgcttcagcagccagcagaggctggccctgaggaaccccctgtgctag

SEQ ID NO: 97271 - DNA, 1449 bp, Artificial Sequence
  derived and/or modified sequence
atgagcggccacaagtgctacccctgggacctgcaggaccggtacgctcaggacaagtccgtggtcaataagatgcagcagaaatattgggagaccaagcaggcattcattaaggcaacaggcaagaaggaggatgagcatgttgttgctagtgatgcagacctggatgccaaactcgaactgttccatagtatacaaagaacttgtttggacctgagtaaggcaatcgtactctaccagaagcgcatttgtttcctcagtcaggaggaaaatgaactggggaaatttttaaggagccagggctttcaggataagacacgcgctggcaaaatgatgcaggcaactggaaaggccctgtgcttttcctcacagcagagactggctctccggaaccctctgtgtcggttccatcaggaggtcgaaacgttccggcatcgagcgatctccgatacttggctcactgtcaatagaatggaacaatgtcggacagagtacagaggtgctttactctggatgaaggatgtgtcacaggagttggatccagacctgtacaagcagatggagaagttcagaaaggtacagacacaggtgagacttgctaagaagaactttgataaattgaaaatggacgtgtgtcaaaaggttgacctgctcggagcctccaggtgtaatctgctctcccatatgctcgccacctatcagacgaccctgttgcacttctgggaaaagacaagccacaccatggccgcaattcatgaatctttcaagggctaccagccatatgaatttacaacattgaagagtctccaggaccccatgaagaaactggttgagaaagaggagaagaagaagattaaccagcaggaaagtactgatgctgccgtgcaagagccctcacagctgatttcactggaggaagaaaaccaacgtaaggaatccagcagcttcaaaactgaggatggcaaatcgattctgagcgccttggacaaaggatccactcacacagcatgttccggtccgattgacgaactgctggacatgaaaagtgaggagggagcgtgtttgggcccagtggctgggaccccagaacccgaaggagcggataaggacgatctgctccttctctccgaaatcttcaacgcttcaagcctggaggaaggcgaattctctaaagaatgggctgcagtgtttggcgacggacaggtaaaggagcctgtccccacaatggcactgggcgagcctgaccccaaggcccagacaggatctggttttctgccctcccagctgctcgaccagaacatgaaagatctgcaagccagtcttcaggaaccagctaaagcggcgagcgatttgacagcgtggttcagtctgttcgctgacctggatccactatccaacccggatgctgtcggaaaaactgacaaggagcatgaattgctcaatgcttag

SEQ ID NO: 97272 - DNA, 405 bp, Artificial Sequence
  derived and/or modified sequence
atgagcggccacaagtgctacccctgggacctgcaggaccggtacgctcaagacaagagcgtcgtgaacaagatgcagcagaagtactgggaaactaaacaggctttcatcaaggcgaccgggaaaaaagaagacgaacatgtggtggcgtctgatgcagacttggacgccaagctggagctctttcactctatccaaaggacttgcctcgacctgtctaaagcaatcgtgctctatcaaaagcggatctgtttcttgtcacaggaggaaaacgagctgggcaaatttctccgctcccaaggctttcaggataaaacacgagccggaaagatgatgcaggcaaccggaaaggccctgtgcttctcctcacaacagcgtcttgccctgagaaaccccttatgctag

SEQ ID NO: 97273 - DNA, 1449 bp, Artificial Sequence
  derived and/or modified sequence
atgagcggccacaagtgctatccctgggaccttcaggaccggtatgcgcaggacaagtcggttgtaaataaaatgcagcagaagtactgggagacaaaacaggctttcataaaggcaacaggaaaaaaggaagatgagcatgtggtcgcctctgacgcagacctcgacgccaagctggagctgttccatagcatccagcgaacttgtctcgatctgtctaaagcgattgtgttataccagaagaggatctgctttctcagccaggaggagaatgaactcggaaagttcctccggtcacagggctttcaggataagacccgggcagggaagatgatgcaggctactgggaaggctctgtgctttagctcgcagcagaggctggctcttcgaaaccccctgtgcagattccaccaggaggttgaaacattccgacatcgtgcgatctctgacacatggttaacagtgaaccgcatggagcaatgtcgtaccgagtatcgcggagcactgttgtggatgaaggatgttagccaggagctggacccagacctctacaagcagatggaaaaattccggaaggttcagacgcaggtccgactggctaagaaaaatttcgataaactcaagatggatgtgtgtcagaaagtagaccttctgggcgcaagtcgctgtaacctcttgagtcatatgttggcaacataccagacaaccttgttacacttctgggaaaagaccagtcacaccatggcagccattcatgagagtttcaagggctatcaaccctacgagttcacaaccctaaagagcctccaggacccgatgaagaaactagttgaaaaggaagagaaaaagaagatcaatcagcaggagtctaccgacgccgctgtccaggagcctagccaacttataagcctggaagaagagaatcagaggaaggaatcatcttctttcaagactgaggatggtaagagtatcctgtcagcactggataagggttctacccatactgcatgctcgggaccgatcgatgaattgctcgacatgaagtccgaagagggcgcatgtctaggccctgtcgcaggaactcccgaaccagagggcgcagataaggacgatctgttgctgctgtcagagatcttcaacgcctcttcactcgaggaaggagaattctcgaaagagtgggcagcagttttcggggacggccaggttaaggagcccgttcctacaatggccctgggcgaacctgatcctaaggctcagaccgggagcggtttcttaccgagccagctcctggatcagaatatgaaggacttgcaggcaagtcttcaggaacctgccaaggctgcctcggacctgactgcctggtttagtctttttgccgacctcgaccccctctcaaatccagatgctgtaggaaagaccgacaaagaacatgaactcctgaatgcatag

SEQ ID NO: 97274 - DNA, 405 bp, Artificial Sequence
  derived and/or modified sequence
atgagcgggcataagtgctatccctgggatttgcaggataggtacgctcaagacaaatctgtcgtaaacaagatgcagcaaaaatactgggaaaccaagcaagctttcataaaagctaccggcaaaaaggaggatgagcacgttgtcgcatccgatgctgacctggacgccaagttggagctctttcacagcattcagcgcacctgtctcgatctgtccaaagccattgttctgtatcagaaaaggatttgcttcctgagccaggaagagaacgaactgggcaaatttctgcgatctcaaggcttccaggataagactcgggctgggaagatgatgcaagcaactggcaaggccctgtgtttttcatctcagcagagactcgccctgaggaaccccctatgctag

SEQ ID NO: 97275 - DNA, 1449 bp, Artificial Sequence
  derived and/or modified sequence
atgagcggccacaagtgctacccctgggacctgcaggacagatacgcccaggacaagagcgtggtgaacaagatgcagcagaagtactgggagaccaagcaggccttcatcaaggccaccggcaagaaggaggacgagcacgtggtggccagcgacgccgacctggacgccaagctggagctgttccacagcatccagagaacctgcctggacctgagcaaggccatcgtgctgtaccagaagagaatctgcttcctgagccaggaggagaacgagctgggcaagttcctgagaagccagggcttccaggacaagaccagagccggcaagatgatgcaggccaccggcaaggccctgtgcttcagcagccagcagagactggccctgagaaaccccctgtgcagattccaccaggaggtggagaccttcagacacagagccatcagcgacacctggctgaccgtgaacagaatggagcagtgcagaaccgagtacagaggcgccctgctgtggatgaaggacgtgagccaggagctggaccccgacctgtacaagcagatggagaagttcagaaaggtgcagacccaggtgagactggccaagaagaacttcgacaagctgaagatggacgtgtgccagaaggtggacctgctgggcgccagcagatgcaacctgctgagccacatgctggccacctaccagaccaccctgctgcacttctgggagaagaccagccacaccatggccgccatccacgagagcttcaagggctaccagccctacgagttcaccaccctgaagagcctgcaggaccccatgaagaagctggtggagaaggaggagaagaagaagatcaaccagcaggagagcaccgacgccgccgtgcaggagcccagccagctgatcagcctggaggaggagaaccagagaaaggagagcagcagcttcaagaccgaggacggcaagagcatcctgagcgccctggacaagggcagcacccacaccgcctgcagcggccccatcgacgagctgctggacatgaagagcgaggagggcgcctgcctgggccccgtggccggcacccccgagcccgagggcgccgacaaggacgacctgctgctgctgagcgagatcttcaacgccagcagcctggaggagggcgagttcagcaaggagtgggccgccgtgttcggcgacggccaggtgaaggagcccgtgcccaccatggccctgggcgagcccgaccccaaggcccagaccggcagcggcttcctgcccagccagctgctggaccagaacatgaaggacctgcaggccagcctgcaggagcccgccaaggccgccagcgacctgaccgcctggttcagcctgttcgccgacctggaccccctgagcaaccccgacgccgtgggcaagaccgacaaggagcacgagctgctgaacgcctag

SEQ ID NO: 97276 - DNA, 405 bp, Artificial Sequence
  derived and/or modified sequence
atgagcggccacaagtgctacccctgggacctgcaggacagatacgcccaggacaagagcgtggtgaacaagatgcagcagaagtactgggagaccaagcaggccttcatcaaggccaccggcaagaaggaggacgagcacgtggtggccagcgacgccgacctggacgccaagctggagctgttccacagcatccagagaacctgcctggacctgagcaaggccatcgtgctgtaccagaagagaatctgcttcctgagccaggaggagaacgagctgggcaagttcctgagaagccagggcttccaggacaagaccagagccggcaagatgatgcaggccaccggcaaggccctgtgcttcagcagccagcagagactggccctgagaaaccccctgtgctag

SEQ ID NO: 97277 - DNA, 2882 bp, Artificial Sequence
  derived and/or modified sequence
aagcatgtgcacaggctgctcatgagttcctaaacgttgcgtttgcaacactaccagtgttttgtacgggcgctggcgcctgctcacagccttccacgtgaccggaaaaggccttcagcgcataaagtgggagaccggaagaggcggagacgatccgatgctcgaactccgccccctcttctccgcgtaggcccagctccctgaagcggctgtttcgagccacgcgcccatcgggttaaaaataagaagttggttgagctgctgagaaggaaagttcgtctcgcccagccttatgtcggcgtctttctaaagagagatgacagcaatgagtcggatgtggtcgagagcctggatgaaatctaccacacggggacgtttgcccagatccatgagatgcaggaccttggggacaagctgcgcatgatcgtcatgggacacagaagagtccatatcagcagacagctggaggtggagcccgaggagccggaggcggagaacaagcacaagccccgcaggaagtcaaagcggggcaagaaggaggcggaggacgagctgagcgccaggcacccggcggagctggcgatggagcccacccctgagctcccggctgaggtgctcatggtggaggtagagaacgttgtccacgaggacttccaggtcacggaggaggtgaaagccctgactgcagagatcgtgaagaccatccgggacatcattgccttgaaccctctctacagggagtcagtgctgcagatgatgcaggctggccagcgggtggtggacaaccccatctacctgagcgacatgggcgccgcgctcaccggggccgagtcccatgagctgcaggacgtcctggaagagaccaatattcctaagcggctgtacaaggccctctccctgctgaagaaggaatttgaactgagcaagctgcagcagcgcctggggcgggaggtggaggagaagatcaagcagacccaccgtaagtacctgctgcaggagcagctaaagatcatcaagaaggagctgggcctggagaaggacgacaaggatgccatcgaggagaagttccgggagcgcctgaaggagctcgtggtccccaagcacgtcatggatgttgtggacgaggagctgagcaagctgggcctgctggacaaccactcctcggagttcaatgtcacccgcaactacctagactggctcacgtccatcccttggggcaagtacagcaacgagaacctggacctggcgcgggcacaggcagtgctggaggaagaccactacggcatggaggacgtcaagaaacgcatcctggagttcattgccgttagccagctccgcggctccacccagggcaagatcctctgcttctatggcccccctggcgtgggtaagaccagcattgctcgctccatcgcccgcgccctgaaccgagagtacttccgcttcagcgtcgggggcatgactgacgtggctgagatcaagggccacaggcggacctacgtgggcgccatgcccgggaagatcatccagtgtttgaagaagaccaagacggagaaccccctgatcctcatcgacgaggtggacaagatcggccgaggctaccagggggacccgtcgtcggcactgctggagctgctggacccagagcagaatgccaacttcctggaccactacctggacgtgcccgtggacttgtccaaggtgctgttcatctgcacggccaacgtcacggacaccatccccgagccgctgcgagaccgtatggagatgatcaacgtgtcgggctacgtggcccaggagaagctggccattgcggagcgctacctggtgccccaggctcgcgccctgtgtggcttggatgagagcaaggccaagctgtcatcggacgtgctgacgctgctcatcaagcagtactgccgcgagagcggtgtccgcaacctgcagaagcaagtggagaaggtgttacggaaatcggcctacaagattgtcagcggcgaggccgagtccgtggaggtgacgcccgagaacctgcaggacttcgtggggaagcccgtgttcaccgtggagcgcatgtatgacgtgacaccgcccggcgtggtcatggggctggcctggaccgcaatgggaggctccacgctgtttgtggagacatccctgagacggccacaggacaaggatgccaagggtgacaaggatggcagcctggaggtgacaggccagctgggggaggtgatgaaggagagcgcccgcatagcctacaccttcgccagagccttcctcatgcagcacgcccccgccaatgactacctggtgacctcacacatccacctgcatgtgcccgagggcgccacccccaaggacggcccaagcgcaggctgcaccatcgtcacggccctgctgtccctggccatgggcaggcctgtccggcagaatctggccatgactggcgaagtctccctcacgggcaagatcctgcctgttggtggcatcaaggagaagaccattgcggccaagcgcgcaggggtgacgtgcatcgtcctgccagccgagaacaagaaggacttctacgacctggcagccttcatcaccgagggcctggaggtgcacttcgtggaacactaccgggagatcttcgacatcgccttcccggacgagcaggcagaggcgctggccgtggaacggtgacggccaccccgggactgcaggcggcggatgtcaggccctgtctgggccagaactgagcgctgtggggagcgcgcccggacctggcagtggagccaccgagcgagcagctcggtccagtgacccagatcccagggacctcagtcggcttaatcagagtgtggcatagaagctatttaatgattaaagtcatttgcagt

SEQ ID NO: 97278 - protein, 763 aa, Artificial Sequence
  derived and/or modified sequence
MQDLGDKLRMIVMGHRRVHISRQLEVEPEEPEAENKHKPRRKSKRGKKEAEDELSARHPAELAMEPTPELPAEVLMVEVENVVHEDFQVTEEVKALTAEIVKTIRDIIALNPLYRESVLQMMQAGQRVVDNPIYLSDMGAALTGAESHELQDVLEETNIPKRLYKALSLLKKEFELSKLQQRLGREVEEKIKQTHRKYLLQEQLKIIKKELGLEKDDKDAIEEKFRERLKELVVPKHVMDVVDEELSKLGLLDNHSSEFNVTRNYLDWLTSIPWGKYSNENLDLARAQAVLEEDHYGMEDVKKRILEFIAVSQLRGSTQGKILCFYGPPGVGKTSIARSIARALNREYFRFSVGGMTDVAEIKGHRRTYVGAMPGKIIQCLKKTKTENPLILIDEVDKIGRGYQGDPSSALLELLDPEQNANFLDHYLDVPVDLSKVLFICTANVTDTIPEPLRDRMEMINVSGYVAQEKLAIAERYLVPQARALCGLDESKAKLSSDVLTLLIKQYCRESGVRNLQKQVEKVLRKSAYKIVSGEAESVEVTPENLQDFVGKPVFTVERMYDVTPPGVVMGLAWTAMGGSTLFVETSLRRPQDKDAKGDKDGSLEVTGQLGEVMKESARIAYTFARAFLMQHAPANDYLVTSHIHLHVPEGATPKDGPSAGCTIVTALLSLAMGRPVRQNLAMTGEVSLTGKILPVGGIKEKTIAAKRAGVTCIVLPAENKKDFYDLAAFITEGLEVHFVEHYREIFDIAFPDEQAEALAVER

SEQ ID NO: 97279 - DNA, 2292 bp, Artificial Sequence
  derived and/or modified sequence
atgcaggacctgggcgacaagctgagaatgatcgtgatgggccacagaagagtgcacatcagcagacagctggaggtggagcccgaggagcccgaggccgagaacaagcacaagcccagaagaaagagcaagagaggcaagaaggaggccgaggacgagctgagcgccagacaccccgccgagctggccatggagcccacccccgagctgcccgccgaggtgctgatggtggaggtggagaacgtggtgcacgaggacttccaggtgaccgaggaggtgaaggccctgaccgccgagatcgtgaagaccatcagagacatcatcgccctgaaccccctgtacagagagagcgtgctgcagatgatgcaggccggccagagagtggtggacaaccccatctacctgagcgacatgggcgccgccctgaccggcgccgagagccacgagctgcaggacgtgctggaggagaccaacatccccaagagactgtacaaggccctgagcctgctgaagaaggagttcgagctgagcaagctgcagcagagactgggcagagaggtggaggagaagatcaagcagacccacagaaagtacctgctgcaggagcagctgaagatcatcaagaaggagctgggcctggagaaggacgacaaggacgccatcgaggagaagttcagagagagactgaaggagctggtggtgcccaagcacgtgatggacgtggtggacgaggagctgagcaagctgggcctgctggacaaccacagcagcgagttcaacgtgaccagaaactacctggactggctgaccagcatcccctggggcaagtacagcaacgagaacctggacctggccagagcccaggccgtgctggaggaggaccactacggcatggaggacgtgaagaagagaatcctggagttcatcgccgtgagccagctgagaggcagcacccagggcaagatcctgtgcttctacggcccccccggcgtgggcaagaccagcatcgccagaagcatcgccagagccctgaacagagagtacttcagattcagcgtgggcggcatgaccgacgtggccgagatcaagggccacagaagaacctacgtgggcgccatgcccggcaagatcatccagtgcctgaagaagaccaagaccgagaaccccctgatcctgatcgacgaggtggacaagatcggcagaggctaccagggcgaccccagcagcgccctgctggagctgctggaccccgagcagaacgccaacttcctggaccactacctggacgtgcccgtggacctgagcaaggtgctgttcatctgcaccgccaacgtgaccgacaccatccccgagcccctgagagacagaatggagatgatcaacgtgagcggctacgtggcccaggagaagctggccatcgccgagagatacctggtgccccaggccagagccctgtgcggcctggacgagagcaaggccaagctgagcagcgacgtgctgaccctgctgatcaagcagtactgcagagagagcggcgtgagaaacctgcagaagcaggtggagaaggtgctgagaaagagcgcctacaagatcgtgagcggcgaggccgagagcgtggaggtgacccccgagaacctgcaggacttcgtgggcaagcccgtgttcaccgtggagagaatgtacgacgtgaccccccccggcgtggtgatgggcctggcctggaccgccatgggcggcagcaccctgttcgtggagaccagcctgagaagaccccaggacaaggacgccaagggcgacaaggacggcagcctggaggtgaccggccagctgggcgaggtgatgaaggagagcgccagaatcgcctacaccttcgccagagccttcctgatgcagcacgcccccgccaacgactacctggtgaccagccacatccacctgcacgtgcccgagggcgccacccccaaggacggccccagcgccggctgcaccatcgtgaccgccctgctgagcctggccatgggcagacccgtgagacagaacctggccatgaccggcgaggtgagcctgaccggcaagatcctgcccgtgggcggcatcaaggagaagaccatcgccgccaagagagccggcgtgacctgcatcgtgctgcccgccgagaacaagaaggacttctacgacctggccgccttcatcaccgagggcctggaggtgcacttcgtggagcactacagagagatcttcgacatcgccttccccgacgagcaggccgaggccctggccgtggagagatag

SEQ ID NO: 97280 - DNA, 2292 bp, Artificial Sequence
  derived and/or modified sequence
atgcaggatcttggagataagctgcggatgatcgtgatgggtcatcggcgagtacatatctcacgtcagctcgaggtggagcccgaagagcctgaggccgagaacaagcataaacctcgaaggaagtcgaagagagggaagaaggaggcagaggacgagcttagtgcccgacaccccgcagagctcgccatggaacctacccctgaattgcccgctgaggtgctgatggttgaggtcgagaatgtagtgcacgaagattttcaggttacggaggaagtgaaggccctgacagcagaaatcgtgaagacaattcgcgacatcatcgccctgaatccgttgtacagagaatccgtgctccagatgatgcaagccggccagcgggtggtggacaacccaatttatctctccgacatgggagcagcgttgaccggagccgagagtcatgaattacaggatgtcctcgaagagacgaatatccctaaacgcctgtacaaagcactatcgctgctgaaaaaggagtttgagttaagcaagctgcagcagaggctgggcagggaggtggaggagaagattaagcagacccaccgaaaatacctgttgcaggagcagctgaagattatcaagaaagaactgggtcttgagaaagatgataaggatgccatcgaagagaaattcagggaaagactcaaggaacttgtggtcccaaaacatgtcatggatgtggtcgatgaggagctttctaagctggggctgttggacaatcattcctctgagttcaatgtgacaaggaactacctggattggctaactagtataccctggggcaaatattcaaacgaaaacctggacctcgcccgcgctcaggcagtcttagaggaagaccactatggaatggaggatgtgaaaaagcgtattcttgagttcatagcagtgagccagctgagaggctccacacaaggaaagatcctgtgtttctacggacctcccggggtggggaagactagcatagctcgctccatagcccgcgctctgaaccgagagtattttcgattctccgttggcggcatgactgatgtagctgagattaagggtcacagacgcacctacgttggcgcaatgccagggaagatcatccagtgcctgaagaagacaaaaaccgaaaaccctctgatcctaatcgacgaggttgacaaaattgggcgaggatatcaaggggatccctcatccgcactcctggaactcctcgatccggagcagaacgccaattttctggaccactacctcgacgtgcccgtcgatctatctaaggttctgtttatttgtactgccaacgttacagatacgatcccagagcctctccgcgatcggatggagatgataaatgtctctggctatgtggcccaggaaaagcttgccatcgctgagcgctatctggtacctcaggcacgcgccctttgtggcctcgatgaaagtaaagccaagctatcaagtgatgttctaaccctcttgattaagcaatactgtagagaaagcggcgtgcgaaacctgcagaagcaggtggagaaagtgctcaggaagagcgcctataagatcgtgagcggggaggctgaatccgtggaggtgacacccgagaatctgcaagatttcgtaggcaagccagtctttacagttgagagaatgtatgatgtgacacccccaggggtcgtgatgggcctggcatggaccgcaatgggcgggtcaaccctgtttgtcgaaacttccctgcgtagaccccaagacaaagatgccaagggagacaaagatggaagcctggaggtaactggccagctcggggaagtaatgaaagagtccgcacggatcgcctacaccttcgccagggcattcctgatgcaacacgcaccggccaatgattacttagtgaccagtcatatccatttgcacgtgcctgagggagccacacctaaagatgggccaagtgctggctgcaccatcgtcaccgctctgttgtcactggctatgggccgacctgtaaggcagaatctggcaatgaccggagaggtgtctttgaccggtaaaatcctgccagttggaggtatcaaagagaaaacaatagctgcgaaacgcgcgggagtgacctgcatcgtattgcctgctgagaacaaaaaggacttctatgacctagcagccttcatcaccgaggggttggaagtccacttcgttgagcactatcgggagatcttcgacatagcgttcccagacgaacaggctgaggctctggccgtggaacggtag

SEQ ID NO: 97281 - DNA, 2292 bp, Artificial Sequence
  derived and/or modified sequence
atgcaggacctgggggacaagctgaggatgattgtgatgggccaccggcgggtgcacatcagccggcagctggaggtggagcctgaggagcctgaggccgagaacaagcacaagcccaggaggaagagcaagaggggcaagaaggaggctgaagatgagctgagcgcccggcaccctgctgagctggccatggagcccaccccagagctgcctgctgaggtgctgatggtggaggtggagaatgtggtgcatgaggacttccaggtgacagaggaggtgaaggccctgacagctgagatcgtgaagaccatccgggacatcatcgccctgaaccccctgtaccgggagagcgtgctgcagatgatgcaggccggccagagggtggtggacaaccccatctacctgagtgacatgggcgccgccctgactggagctgagagccatgagctgcaggatgtgctggaggagaccaacatccccaagaggctgtacaaggccctgagcctgctgaagaaggagtttgagctgagcaagctgcagcagaggctgggccgggaggtggaggagaagatcaagcagacccacaggaagtacctgctgcaggagcagctgaagatcatcaagaaggagctgggcctggagaaggatgacaaggatgccatcgaggagaagttccgggagcggctgaaggagctggtggtgcccaagcacgtgatggatgtggtggatgaggagctgagcaagctgggcctgctggacaaccacagcagcgagttcaacgtgaccaggaactacctggactggctgaccagcatcccctggggcaagtacagcaatgaaaacctggacctggcccgggcccaggccgtgctggaggaggaccactacggcatggaggatgtgaagaagaggatcctggagttcatcgctgtgtcccagctgcggggcagcacccagggcaagatcctgtgcttctacggccccccaggagtgggcaagaccagcatcgcccggagcatcgcccgggccctgaaccgggagtacttccgcttctctgtgggcggcatgacagatgtggccgagatcaagggccacaggaggacctacgtgggcgccatgcctgggaagatcatccagtgcctgaagaagaccaagacagagaaccccctcatcctgattgatgaggtggacaagattggccggggctaccagggcgaccccagcagcgccctgctggagctgctggaccctgagcagaatgccaacttcctggaccactacctggatgtgcctgtggacctgagcaaggtgctcttcatctgcacagccaacgtgacagacaccatccctgagcccctgcgggacaggatggagatgatcaacgtgtctggctacgtggcccaggagaagctggccatcgccgagcgctacctggtgccccaggcccgggccctgtgtggcctggatgagagcaaggccaagctgagcagtgatgtgctgaccctgctgatcaagcagtactgccgggagagcggcgtgaggaacctgcagaagcaggtggagaaggtgctgaggaagagcgcctacaagatcgtgtctggagaggccgagagcgtggaggtgaccccagagaacctgcaggactttgtgggcaagcctgtgttcaccgtggagaggatgtatgatgtgaccccacctggggtggtgatgggcctggcctggacagccatgggcggcagcaccctgtttgtggagaccagcctgcggcggccccaggacaaggatgccaagggggacaaggatggcagcctggaggtgacaggccagctgggggaggtgatgaaggagagcgcccgcatcgcctacacctttgcccgggccttcctgatgcagcacgccccagccaatgactacctggtgaccagccacatccacctgcacgtgcctgagggcgccacccccaaggatggccccagcgctggctgcaccatcgtgacagccctgctgagcctggccatgggccggcctgtgcggcagaacctggccatgaccggggaggtgtccctgaccgggaagatcctgcctgtgggcggcatcaaggagaagaccatcgccgccaagagagctggggtgacctgcatcgtgctgcctgctgagaacaagaaggacttctatgacctggccgccttcatcacagagggcctggaggtgcactttgtggagcactaccgggagatctttgatattgccttcccagatgagcaggccgaggccctggccgtggagaggtag

SEQ ID NO: 97282 - DNA, 2292 bp, Artificial Sequence
  derived and/or modified sequence
atgcaggacctgggcgacaagctgcggatgatcgtgatgggccaccgacgggtccatatctctcgtcaattggaagttgaacccgaggagccggaggccgagaataagcataaaccacgtagaaaaagcaaaaggggcaaaaaggaggcggaggatgaactgtccgccaggcacccagctgaactggctatggaacctacccctgaactgcctgcagaagtcctgatggtggaggttgaaaatgtagttcatgaggattttcaggtgactgaggaagtaaaggctctgactgcagagatcgtgaagaccattagagatatcattgccttaaaccctctgtatcgcgagtcagtactgcagatgatgcaggctggccaaagagttgtggacaatcctatctacctttctgacatgggggcagctctgactggggccgaaagtcacgagttgcaagacgtcctcgaggaaaccaacattcctaaaaggctctataaagccctgtccttactaaaaaaagagttcgagctctctaagctgcagcagcggctcggccgtgaggtggaggaaaagataaaacagactcatcgtaagtatttacttcaggagcagctgaaaataatcaagaaggagcttggcttagagaaagacgacaaggacgctatagaagagaaatttcgggagagactcaaagagttagttgttcccaagcacgtcatggatgtggtggacgaggaattgtcaaagcttggcctgctcgataatcactcatctgagtttaacgtgactcgaaattaccttgattggctgacttccatcccatggggtaaatattctaatgagaacctcgatctcgcaagggcccaggccgtgcttgaggaagaccattacgggatggaggacgtgaagaagcgaatcttagagttcatcgccgtctctcaactgcgtggcagtacccagggcaaaatcttgtgtttttacgggcctccaggggtcggaaagacatctattgcccgatcaatagctagagcactcaacagggagtattttaggttttctgtcgggggtatgaccgatgtagctgaaattaagggacaccgacgcacctatgttggggccatgcctggcaagatcatccagtgtttaaagaagacaaaaaccgaaaaccctctgatactgattgacgaagtggataagatcggtcggggttatcagggtgacccttctagcgcactgctggagttactggatcccgaacagaatgccaactttctggaccactacttagatgtcccggtggacttgtcaaaggtgctctttatctgtacggccaacgtcactgacaccattcccgaacccctcagggatcgcatggagatgataaatgtctctggctacgtcgcccaggaaaaattggctattgctgagcgctacctggtgccccaggccagagctctttgcggcctggacgagtctaaagcaaaattgtcaagcgatgtcctgactttactgattaagcagtattgtagggagagcggcgttaggaatctacagaagcaggtcgaaaaggtcctccgcaagagcgcatataaaatagtgagtggtgaggcggagtcagtcgaggtgacccctgaaaacctgcaggattttgtgggtaagcctgtcttcaccgttgaacggatgtatgacgttacgccaccaggggtggtgatgggtttagcttggactgctatggggggatctaccctgttcgtcgaaactagcctgaggagaccgcaggataaggacgccaagggtgataaagacggctctctcgaggttacaggacagctcggagaggtgatgaaagaaagcgcgcggatagcatatacgttcgctagagcctttttgatgcagcacgcccccgccaacgactacctggtcacgagtcacattcaccttcatgtgcccgagggtgccactccaaaggacgggccttcagctggttgcacaatcgttacggcgcttctgagtctggccatgggaaggcccgtgcgccagaacctcgcaatgactggcgaggtgagtttgaccggtaagatcctgcccgtggggggcatcaaggaaaagaccatcgccgctaagcgcgccggagtgacctgtatcgtgctacccgcagagaacaaaaaagatttttatgacctcgctgctttcatcacggagggactggaggtgcatttcgtggagcactatcgcgagatcttcgacatagcattcccggacgaacaggccgaggcacttgctgtcgagcggtag

SEQ ID NO: 97283 - DNA, 2292 bp, Artificial Sequence
  derived and/or modified sequence
atgcaggatcttggcgataagctacgcatgattgtcatgggacaccgccgagttcacatctcccgtcagctggaggtggagccggaggaacccgaagccgaaaacaaacataagccgcgacgcaaatccaagaggggcaagaaggaggcagaagacgaactttccgcacggcacccagctgaactcgccatggagccaaccccagaactcccagccgaagtgctgatggtggaagtcgagaacgtggtgcatgaggatttccaagttacagaggaagttaaagcactgacggccgagatcgttaagaccattagggacattattgcactgaatccactttacagagagagtgtgctccaaatgatgcaagctggtcagagagtggtggataacccaatctatctgagtgatatgggcgcagctctgacgggggcagagtctcacgagctgcaagacgtactggaggagaccaatattcccaagcgcctgtataaagccctgtctctattgaagaaggagttcgagctcagtaaactgcagcagcgtttaggccgagaagtggaggagaaaattaaacagacacatcgcaagtatctgctgcaggagcagctcaaaattattaaaaaggaactgggtctcgaaaaagacgacaaggacgcaattgaggaaaagttcagggagcggctcaaggagttggttgtgccaaagcatgtgatggacgtggtcgacgaggagctcagtaagctgggactgctggataaccacagtagcgagttcaacgtcacccgtaactacctcgattggctgacatccatcccgtggggcaagtactctaacgagaacctcgatcttgctagggcccaggccgtgctcgaggaggatcattacggaatggaggatgtgaaaaagcggatcctggagtttatcgccgtcagtcaactccgcggatcgacacaaggaaagatcctgtgcttttatgggcctcccggtgtgggcaagacatctatcgcccgatcaattgcccgtgccttgaaccgcgagtatttcagattctcagtgggtggaatgaccgatgtggccgagatcaaggggcacaggcgcacgtatgttggagccatgccaggtaagataatccagtgtctgaaaaaaactaagacagagaaccctctgatcctaatcgacgaagtggacaaaatcggcagaggataccaaggtgatccctctagtgctctactcgaactcttggatcccgagcagaatgccaactttcttgaccattacctggacgtacctgtcgatcttagtaaagtgctgtttatttgcacagccaacgtgacagacacgatccctgaaccactacgagacagaatggaaatgatcaacgtgagtgggtacgtcgcgcaggagaagctcgctatcgcagaaaggtatctcgtcccccaggctcgcgctctgtgcggactggacgagtccaaggctaagcttagttctgatgtccttacactgttgatcaagcagtactgtcgagaatctggtgtgaggaatctgcaaaaacaggtagagaaagtgttacgcaaaagtgcctataagatcgttagcggggaggccgaatccgttgaggttacaccagaaaacctccaagactttgtggggaaacccgtttttacagtggagcgcatgtatgatgtaacgcccccaggagtggtgatggggctggcttggaccgcgatgggcggttccaccctgtttgtcgagacaagcctgagacgtccacaggacaaggatgccaagggagacaaggacgggtccctggaagtaacaggacaactgggggaggtcatgaaggagagcgcacgcatcgcctacacattcgcacgggcttttctcatgcaacacgcacccgctaatgactacctggttacatcccatatccacctgcatgtgcctgagggagctacaccaaaagacggcccttctgctggctgcactatagtgaccgctcttttgtccctcgcaatgggaaggcccgtgcggcaaaaccttgcaatgacaggtgaagtgtcgctgaccgggaaaatcttgccagtgggtggcattaaagaaaaaacaatcgcagcgaagagagcaggagtcacctgcattgtgctccctgcggagaataagaaagacttttatgatctcgcagccttcatcacagaaggactggaggtacattttgtggagcattatcgggagatcttcgatatcgccttccctgacgagcaggcagaggctttagctgttgaacggtag

SEQ ID NO: 97284 - DNA, 579 bp, Artificial Sequence
  derived and/or modified sequence
atgttgttcaagaccaacgaagagaagaaaactgtccagatgatgtttaaagaggcaaagtttaaaatgggatatgctgacgaggtgcacacgcaggtgcttgaactgccttatgttgaggaggagctgtccatggtgattttgctgcctgacgataacaccgacctggccgtggtggagaaggctttgacttacgaaaaattcaaggcctggaccaattcagaaaagctgaccaaaagcaaggtccaggtcttccttccccggctgaagctcgaagagagctatgacctcgagccgttccttcgcaggctcggtatgattgacgcattcgacgaagctaaggcagatttctccggcatgagcacagagaaaaatgtaccactttcaaaggtggcccacaaatgcttcgtagaggtgaacgaggagggtacagaggctgcggctgccactgcagttgtccggaatagccggtgttcccggatggagcccaggttttgcgcagaccacccgtttctctttttcataagacatcataagaccaactgtatcttgttctgcggtaggttttcttccccttag

SEQ ID NO: 97285 - DNA, 579 bp, Artificial Sequence
  derived and/or modified sequence
atgctgttcaagaccaatgaggagaagaagacagtgcagatgatgttcaaggaggccaagttcaagatgggctatgcagatgaggtgcacacccaggtgctggagctgccctacgtggaggaggagctgtccatggtgatcctgctgcctgatgacaacacagacctggccgtggtggagaaggccctgacctatgagaagttcaaggcctggaccaacagcgagaagctgaccaagagcaaggtgcaggtgttcctgccccggctgaagctggaggagagctatgacctggagcccttcctgcggcggctgggcatgattgatgcctttgatgaggccaaggctgacttcagcggcatgagcacagagaagaatgtgcccctgagcaaggtggcccacaagtgctttgtggaggtgaatgaggagggcacagaggccgccgccgccacagctgtggtgaggaacagccgctgcagcaggatggagccccgcttctgtgccgaccaccccttcctgttcttcatccgccaccacaagaccaactgcatcctcttctgtggccgcttcagcagcccctag

SEQ ID NO: 97286 - DNA, 579 bp, Artificial Sequence
  derived and/or modified sequence
atgctgttcaagaccaacgaggagaagaagaccgtgcagatgatgtttaaggaggcaaagttcaaaatgggatacgctgatgaggtccacacccaggtgttggagctcccttatgtggaagaagaactttccatggttattctgcttccagacgataacaccgatctggccgttgtggagaaggctctaacatatgagaagttcaaagcatggaccaacagcgaaaagctcaccaaatcaaaggtgcaggtattccttccacggctcaaactggaggaaagctacgacctggaaccctttctgaggcgtctcggcatgattgacgccttcgatgaggctaaggcagatttttctggcatgagcacagaaaaaaatgtcccgctgtcgaaggtggctcataaatgttttgtggaggtgaatgaggaaggtactgaagcagctgccgctacagctgtggtacggaattcacgttgcagcaggatggagcctcgcttttgtgccgatcacccctttttgttctttattaggcaccataagaccaactgcattttgttctgcggaagattcagctctccatag

SEQ ID NO: 97287 - DNA, 579 bp, Artificial Sequence
  derived and/or modified sequence
atgctattcaagaccaacgaggagaaaaagaccgtgcagatgatgtttaaggaggccaaattcaagatgggctatgccgacgaggtgcatacgcaagtccttgagctgccttacgtagaagaggagctgtctatggtgattctgcttcccgacgataacaccgacctagcagtcgtggagaaggctttgacttacgaaaaatttaaagcctggactaatagcgaaaagcttactaagtcaaaagtgcaagtgttccttccaagacttaaacttgaagagtcttacgatttggagccgtttctgaggcggctggggatgatcgacgctttcgatgaagctaaagccgacttttctggtatgtctaccgagaagaacgtgccgttatcaaaagtggctcataagtgcttcgtggaggttaatgaagaagggacagaagccgctgccgcaactgccgtggtgcgaaactccagatgttcaagaatggagccgagattttgtgcggaccaccccttcctcttttttatcagacatcataagactaattgtattctgttttgcggaaggttcagttccccctag

SEQ ID NO: 97288 - DNA, 579 bp, Artificial Sequence
  derived and/or modified sequence
atgctgttcaagaccaacgaggagaagaagaccgtgcagatgatgttcaaggaggccaagttcaagatgggctacgccgacgaggtgcacacccaggtgctggagctgccctacgtggaggaggagctgagcatggtgatcctgctgcccgacgacaacaccgacctggccgtggtggagaaggccctgacctacgagaagttcaaggcctggaccaacagcgagaagctgaccaagagcaaggtgcaggtgttcctgcccagactgaagctggaggagagctacgacctggagcccttcctgagaagactgggcatgatcgacgccttcgacgaggccaaggccgacttcagcggcatgagcaccgagaagaacgtgcccctgagcaaggtggcccacaagtgcttcgtggaggtgaacgaggagggcaccgaggccgccgccgccaccgccgtggtgagaaacagcagatgcagcagaatggagcccagattctgcgccgaccaccccttcctgttcttcatcagacaccacaagaccaactgcatcctgttctgcggcagattcagcagcccctag

SEQ ID NO: 97289 - DNA, 465 bp, Artificial Sequence
  derived and/or modified sequence
atggaggagccccagagcgaccccagcgtggagccccccctgagccaggagaccttcagcgacctgtggaagctgctgcccgagaacaacgtgctgtacagccccgccctgaacaagatgttctgccagctggccaagacctgccccgtgcagctgtgggtggacagcacccccccccccggcacccgcgtgcgcgccatggccatctacaagcagagccagcacatgaccgaggtggtgcgccgctgcccccaccacgagcgctgcagcgacagcgacggcctggcccccccccagcacctgatccgcgtggagggcaacctgcgcgtggagtacctggacgaccgcaacaccttccgccacagcgtggtggtgccctacgagccccccgaggtgggcagcgactgcaccaccatccactacaactacatgtgcaacagcagctgcatgggcggcatgaaccgc

SEQ ID NO: 97290 - DNA, 468 bp, Artificial Sequence
  derived and/or modified sequence
atggaggagccccagagcgaccccagcgtggagccccccctgagccaggagaccttcagcgacctgtggaagctgctgcccgagaacaacgtgctgtacagccccgccctgaacaagatgttctgccagctggccaagacctgccccgtgcagctgtgggtggacagcacccccccccccggcaccagagtgagagccatggccatctacaagcagagccagcacatgaccgaggtggtgagaagatgcccccaccacgagagatgcagcgacagcgacggcctggcccccccccagcacctgatcagagtggagggcaacctgagagtggagtacctggacgacagaaacaccttcagacacagcgtggtggtgccctacgagccccccgaggtgggcagcgactgcaccaccatccactacaactacatgtgcaacagcagctgcatgggcggcatgaacagatag

SEQ ID NO: 97291 - DNA, 468 bp, Artificial Sequence
  derived and/or modified sequence
atggaagagccccaaagtgacccctcagtggagccacccctcagtcaggagaccttctctgacctgtggaagctgctcccagagaacaatgtgctctatagcccagctctgaataagatgttctgccagctcgctaagacatgtcctgtccaactgtgggtcgactccacaccccctccaggcaccagggtgcgggcaatggcaatttataagcagtctcagcatatgacggaggtggtccgaaggtgccctcaccacgagaggtgttcagacagtgatggattagccccaccacagcacctgattcgggtcgaaggaaatctgcgggtcgagtacctagacgacaggaacacatttaggcacagcgttgtggtgccatacgagcctcctgaagttggctccgattgtacaaccattcattataattacatgtgcaatagctcttgcatgggaggcatgaatcgctag

SEQ ID NO: 97292 - DNA, 468 bp, Artificial Sequence
  derived and/or modified sequence
atggaggagccacagagtgatccttccgtggaacccccactgagtcaggaaaccttcagtgacctatggaagcttcttccagagaataatgttctctacagccctgccctcaacaaaatgttctgtcaactggctaagacctgtcctgtccagctttgggtggactcaacacccccgccaggtacaagagtgcgggctatggcgatctacaagcagtctcagcacatgacagaggtggtaaggcgatgtccgcaccacgagcgctgctccgattcagacggactagcccctccacaacatctgattcgcgtcgaaggtaacttgcgagtcgagtacctagacgatcggaacacctttaggcactccgtcgtggttccttacgaaccgccggaagtgggctctgactgtaccacaatccattacaactatatgtgcaactcgagctgcatgggcggcatgaatcgttag

SEQ ID NO: 97293 - DNA, 468 bp, Artificial Sequence
  derived and/or modified sequence
atggaggagccccagagcgaccccagcgtggagccccccctgagccaggagaccttcagtgacctgtggaagctgctgcctgagaacaacgtgctgtacagccctgccctgaacaagatgttctgccagctggccaagacctgccctgtgcagctgtgggtggacagcaccccacctcctggcaccagggtgcgggccatggccatctacaagcagagccagcacatgacagaggtggtgcggcgctgcccccaccacgagcgctgcagcgacagtgatggcctggccccaccccagcacctgatccgggtggagggcaacctgcgggtggagtacctggatgacaggaacaccttccgccacagcgtggtggtgccctatgagcccccagaggtgggcagtgactgcaccaccatccactacaactacatgtgcaacagcagctgcatgggcggcatgaacagatag

SEQ ID NO: 97294 - DNA, 468 bp, Artificial Sequence
  derived and/or modified sequence
atggaggagccccagagcgaccccagcgtggagccccccctgagccaagaaactttcagcgatctctggaagctcctgcctgaaaacaatgtgctgtactctccggcgctgaacaagatgttctgccagctagcaaaaacatgtccagtgcaactgtgggtcgactctactccacccccggggacacgggtgcgggccatggccatctataagcagagccagcacatgacggaggttgtaaggcggtgccctcaccatgagcggtgcagcgactcagatggcctcgctcccccacaacatctaatacgggtggaaggaaatttacgggttgagtacctggatgacagaaacacatttcggcactccgtggtggtaccctatgaaccccccgaggtaggaagcgattgtactaccattcactataactatatgtgcaattcgtcttgcatggggggtatgaaccgatag

SEQ ID NO: 97295 - DNA, 468 bp, Artificial Sequence
  derived and/or modified sequence
atggaggagccccagagcgaccccagcgtggagccccccctgagccaggagaccttcagtgacttgtggaaactgttacccgagaacaatgttctgtactcaccggccttaaacaaaatgttctgccagctcgccaagacttgtccggtgcagctgtgggtggactctaccccacctccaggaacgagagtccgagccatggctatctacaagcagtcccagcacatgactgaggtggtgaggaggtgccctcaccatgaaaggtgctccgattccgatggcctggctccacctcagcatttgatacgagtggagggcaatctccgggttgagtacctggatgaccgcaatacctttaggcatagcgttgtcgtgccctatgaacctcctgaagtaggctctgactgcacaaccatacattataactacatgtgcaacagcagctgtatgggcggaatgaaccgctag

SEQ ID NO: 97296 - DNA, 468 bp, Artificial Sequence
  derived and/or modified sequence
atggaggagccacagagtgatccgagcgtggaacctccactgtctcaggagacctttagcgatctatggaagctgctgccagagaacaatgttttatatagcccagctctgaacaaaatgttctgtcaactggccaaaacctgtcccgtgcagctgtgggtggactcgacaccaccgccagggactcgggtaagagctatggctatttacaagcagtcacagcatatgaccgaagtggtccgacgatgcccccatcacgaacgatgctcggactctgacggactcgcccctccacagcacttgattagagtagaagggaacctgagggtcgagtacttggatgataggaatactttccgccactccgtggtggtgccatatgaaccacctgaagtgggatccgattgcaccactattcactataattatatgtgcaatagcagttgcatggggggtatgaacagatag

SEQ ID NO: 97297 - DNA, 468 bp, Artificial Sequence
  derived and/or modified sequence
atggaggagccacagtcggacccatctgtggaaccacccctcagccaggagacattcagtgacctctggaaactcctgccggagaataacgttttatattctcccgcactgaataagatgttttgtcagctggcaaagacttgtccagtgcagctttgggttgactccaccccccctcccggaacaagggtcagggcaatggccatatataaacaatcacagcacatgacggaggtagtgcgcaggtgtccccaccatgaaaggtgtagtgacagtgatgggctagctcctcctcagcatcttattagggtggaaggcaacctacgagtggagtatttagatgatagaaataccttcagacactccgttgtggtgccatatgagcctcctgaggttggctcagactgcacaaccattcattataattacatgtgtaacagctcatgtatgggcggaatgaataggtag

SEQ ID NO: 97298 - DNA, 468 bp, Artificial Sequence
  derived and/or modified sequence
atggaagagccccagagtgacccttccgtggaaccccctctatcccaggaaacctttagcgacctgtggaagctcttacccgaaaacaacgtgctctactcaccagcccttaataaaatgttctgtcaattagcgaaaacctgcccagtacagctgtgggtggactcaacaccaccccccgggacgagagtgcgggccatggcgatatataagcaaagtcagcatatgacagaagtggtccgtcgctgcccccaccatgagcgatgtagcgactcagatggactggcccctcctcagcacctgatccgtgtagagggcaacttacgagtggagtaccttgatgatagaaatacctttagacacagcgtagtggttccttacgagccacccgaggtgggctccgattgcacgactattcactacaattatatgtgtaactctagctgtatgggtggtatgaacaggtag

SEQ ID NO: 97299 - DNA, 468 bp, Artificial Sequence
  derived and/or modified sequence
atggaggaaccgcagagtgatccatcagtagaaccgcctctgtctcaggagaccttttccgacctttggaaactgttgcccgagaataatgtgctgtacagtccagccctaaacaaaatgttttgccagctcgctaaaacttgtcctgttcaattatgggtcgattccacccccccaccaggcacccgggtgcgcgcaatggcaatttataaacaaagccaacacatgaccgaggtggtgaggagatgtccccaccacgaacgctgttccgattccgatggactagctccaccccaacatctaattagagttgagggcaatctgagggtcgagtatctggacgaccgtaacacattccgacatagcgttgtggtaccttatgagcctcctgaggttggcagcgattgcaccaccatccattacaactacatgtgcaactcctcatgtatgggtggcatgaacagatag

SEQ ID NO: 97300 - DNA, 468 bp, Artificial Sequence
  derived and/or modified sequence
atggaagagccccagagcgacccatctgtggagccacctctgtcccaagaaacatttagcgatttatggaaactactgcctgaaaataatgtgctgtatagcccagctttgaataagatgttctgtcaactggccaaaacctgccccgtgcaactgtgggttgattcaacccccccccctggtacacgggtgagagcaatggcgatttacaaacaatcccaacacatgacggaagtagtacgcaggtgccctcaccatgaacgctgttcagattctgatggccttgcacctccccagcacctgatcagggtggaggggaatttgagagtggaatacctggatgatcgcaatacttttcggcactcagtggtcgtgccatacgaaccgcctgaagtaggaagtgactgtaccactatccactataactacatgtgtaactcatcttgcatgggaggtatgaatcgctag

SEQ ID NO: 97301 - DNA, 468 bp, Artificial Sequence
  derived and/or modified sequence
atggaagaacctcaatctgacccatccgtcgaaccgcctctctcacaggagaccttctcggacctctggaagctactcccagagaataacgtcctgtattctcctgcactgaacaaaatgttctgccaactcgcaaagacatgtcccgttcaactgtgggtggactccacgcctcctcccggaacaagagttcgcgctatggccatctataagcaatcacagcacatgacagaagtcgtccgccggtgtccccatcacgaaagatgcagcgatagtgacggtctcgccccacctcagcacctcatccgagtggaaggtaacctccgggtagaatacctcgacgaccgaaacacatttaggcattcagtagtagttccttacgagcctcccgaagtcggctcagattgcacaaccatccactacaattatatgtgcaactcctcctgcatgggcggcatgaatagatag

SEQ ID NO: 97302 - DNA, 729 bp, Artificial Sequence
  derived and/or modified sequence
aaaagtctagagccaccgtccagggagcaggtagctgctgggctccggggacactttgcgttcgggctgggagcgtgctttccacgacggtgacacgcttccctggattggtactcccctgccctcaacaagatgttttgccaactggccaagacctgccctgtgcagctgtgggttgattccacacccccgcccggcacccgcgtccgcgccatggccatctacaagcagtcacagcacatgacggaggttgtgaggcgctgcccccaccatgagcgctgctcagatagcgatggtctggcccctcctcagcatcttatccgagtggaaggaaatttgcgtgtggagtatttggatgacagaaacacttttcgacatagtgtggtggtgccctatgagccgcctgaggttggctctgactgtaccaccatccactacaactacatgtgtaacagttcctgcatgggcggcatgaaccggaggcccatcctcaccatcatcacactggaagactccagtggtaatctactgggacggaacagctttgaggtgcgtgtttgtgcctgtcctgggagagaccggcgcacagaggaagagaatctccgcaagaaaggggagcctcaccacgagctgcccccagggagcactaagcgagcactgcccaacaacaccagctcctctccccagccaaagaagaaaccactggatggagaatatttcacccttcag

SEQ ID NO: 97303 - DNA, 546 bp, Artificial Sequence
  derived and/or modified sequence
ttcgggctgggagcgtgctttccacgacggtgacacgcttccctggattggcagccagactgccttccgggtcactgccatggaggagccgcagtcagatcctagcgtcgagccccctctgagtcaggaaacattttcagacctatggaaactacttcctgaaaacaacgttctgtactcccctgccctcaacaagatgttttgccaactggccaagacctgccctgtgcagctgtgggttgattccacacccccgcccggcacccgcgtccgcgccatggccatctacaagcagtcacagcacatgacggaggttgtgaggcgctgcccccaccatgagcgctgctcagatagcgatggtctggcccctcctcagcatcttatccgagtggaaggaaatttgcgtgtggagtatttggatgacagaaacacttttcgacatagtgtggtggtgccctatgagccgcctgaggttggctctgactgtaccaccatccactacaactacatgtgtaacagttcctgcatgggcggcatgaaccggag

SEQ ID NO: 97304 - RNA, 468 nt, Artificial Sequence
  derived and/or modified sequence
auggaagagccccagagugacccuuccguggaacccccucuaucccaggaaaccuuuagcgaccuguggaagcucuuacccgaaaacaacgugcucuacucaccagcccuuaauaaaauguucugucaauuagcgaaaaccugcccaguacagcuguggguggacucaacaccaccccccgggacgagagugcgggccauggcgauauauaagcaaagucagcauaugacagaagugguccgucgcugcccccaccaugagcgauguagcgacucagauggacuggccccuccucagcaccugauccguguagagggcaacuuacgaguggaguaccuugaugauagaaauaccuuuagacacagcguagugguuccuuacgagccacccgaggugggcuccgauugcacgacuauucacuacaauuauauguguaacucuagcuguaugggugguaugaacagguag

SEQ ID NO: 97305 - RNA, 468 nt, Artificial Sequence
  derived and/or modified sequence
auggaggaaccgcagagugauccaucaguagaaccgccucugucucaggagaccuuuuccgaccuuuggaaacuguugcccgagaauaaugugcuguacaguccagcccuaaacaaaauguuuugccagcucgcuaaaacuuguccuguucaauuaugggucgauuccacccccccaccaggcacccgggugcgcgcaauggcaauuuauaaacaaagccaacacaugaccgagguggugaggagauguccccaccacgaacgcuguuccgauuccgauggacuagcuccaccccaacaucuaauuagaguugagggcaaucugagggucgaguaucuggacgaccguaacacauuccgacauagcguugugguaccuuaugagccuccugagguuggcagcgauugcaccaccauccauuacaacuacaugugcaacuccucauguauggguggcaugaacagauag

SEQ ID NO: 97306 - RNA, 468 nt, Artificial Sequence
  derived and/or modified sequence
auggaagagccccagagcgacccaucuguggagccaccucugucccaagaaacauuuagcgauuuauggaaacuacugccugaaaauaaugugcuguauagcccagcuuugaauaagauguucugucaacuggccaaaaccugccccgugcaacuguggguugauucaaccccccccccugguacacgggugagagcaauggcgauuuacaaacaaucccaacacaugacggaaguaguacgcaggugcccucaccaugaacgcuguucagauucugauggccuugcaccuccccagcaccugaucaggguggaggggaauuugagaguggaauaccuggaugaucgcaauacuuuucggcacucaguggucgugccauacgaaccgccugaaguaggaagugacuguaccacuauccacuauaacuacauguguaacucaucuugcaugggagguaugaaucgcuag

SEQ ID NO: 97307 - RNA, 468 nt, Artificial Sequence
  derived and/or modified sequence
auggaagaaccucaaucugacccauccgucgaaccgccucucucacaggagaccuucucggaccucuggaagcuacucccagagaauaacguccuguauucuccugcacugaacaaaauguucugccaacucgcaaagacaugucccguucaacuguggguggacuccacgccuccucccggaacaagaguucgcgcuauggccaucuauaagcaaucacagcacaugacagaagucguccgccgguguccccaucacgaaagaugcagcgauagugacggucucgccccaccucagcaccucauccgaguggaagguaaccuccggguagaauaccucgacgaccgaaacacauuuaggcauucaguaguaguuccuuacgagccucccgaagucggcucagauugcacaaccauccacuacaauuauaugugcaacuccuccugcaugggcggcaugaauagauag

SEQ ID NO: 97308 - protein, 44 aa, Artificial Sequence
  derived and/or modified sequence
PLPSQRRNHWMENISPFSHLKSKKGQSTSRHKKLMFKTEGPDSD

SEQ ID NO: 97309 - DNA, 135 bp, Artificial Sequence
  derived and/or modified sequence
cccctgcccagccagagaagaaaccactggatggagaacatcagccccttcagccacctgaagagcaagaagggccagagcaccagcagacacaagaagctgatgttcaagaccgagggccccgacagcgactag

SEQ ID NO: 97310 - DNA, 135 bp, Artificial Sequence
  derived and/or modified sequence
ccactgccttctcaaaggagaaatcattggatggaaaatatttctcctttctcacacttaaagtccaagaaaggccaatccacgtcccgccataaaaagctgatgtttaagaccgaaggccccgacagtgattag

SEQ ID NO: 97311 - DNA, 135 bp, Artificial Sequence
  derived and/or modified sequence
cccctgcccagccagaggaggaaccactggatggagaacatcagccccttcagccacctgaagagcaagaagggccagagcaccagccgccacaagaagctgatgttcaagacagagggccctgacagcgactag

SEQ ID NO: 97312 - DNA, 135 bp, Artificial Sequence
  derived and/or modified sequence
cccctgcccagccagcggcggaaccactggatggagaacatcagcccattttctcacctaaagagcaagaaaggccagagcacttctaggcataagaaactcatgttcaaaacggaagggccggattccgactag

SEQ ID NO: 97313 - DNA, 135 bp, Artificial Sequence
  derived and/or modified sequence
ccactgcctagccaaaggcgcaaccattggatggaaaatataagtccgttttcccaccttaagtcaaaaaagggccaatctacaagcaggcacaagaagctgatgttcaagaccgagggtccagacagcgactag

SEQ ID NO: 97314 - DNA, 135 bp, Artificial Sequence
  derived and/or modified sequence
cctttaccaagccagcggaggaatcattggatggaaaacataagtcccttctcccaccttaagtccaagaaaggccaatccacttcacgtcataagaagctcatgtttaagaccgaaggaccagactctgactag

SEQ ID NO: 97315 - RNA, 135 nt, Artificial Sequence
  derived and/or modified sequence
ccuuuaccaagccagcggaggaaucauuggauggaaaacauaagucccuucucccaccuuaaguccaagaaaggccaauccacuucacgucauaagaagcucauguuuaagaccgaaggaccagacucugacuag

SEQ ID NO: 97316 - protein, 891 aa, Artificial Sequence
  derived and/or modified sequence
MDQPEAPCSSTGPRLAVARELLLAALEELSQEQLKRFRHKLRDVGPDGRSIPWGRLERADAVDLAEQLAQFYGPEPALEVARKTLKRADARDVAAQLQERRLQRLGLGSGTLLSVSEYKKKYREHVLQLHARVKERNARSVKITKRFTKLLIAPESAAPEEAMGPAEEPEPGRARRSDTHTFNRLFRRDEEGRRPLTVVLQGPAGIGKTMAAKKILYDWAAGKLYQGQVDFAFFMPCGELLERPGTRSLADLILDQCPDRGAPVPQMLAQPQRLLFILDGADELPALGGPEAAPCTDPFEAASGARVLGGLLSKALLPTALLLVTTRAAAPGRLQGRLCSPQCAEVRGFSDKDKKKYFYKYFRDERRAERAYRFVKENETLFALCFVPFVCWIVCTVLRQQLELGRDLSRTSKTTTSVYLLFITSVLSSAPVADGPRLQGDLRNLCRLAREGVLGRRAQFAEKELEQLELRGSKVQTLFLSKKELPGVLETEVTYQFIDQSFQEFLAALSYLLEDGGVPRTAAGGVGTLLRGDAQPHSHLVLTTRFLFGLLSAERMRDIERHFGCMVSERVKQEALRWVQGQGQGCPGVAPEVTEGAKGLEDTEEPEEEEEGEEPNYPLELLYCLYETQEDAFVRQALCRFPELALQRVRFCRMDVAVLSYCVRCCPAGQALRLISCRLVAAQEKKKKSLGKRLQASLGGGSSQGTTKQLPASLLHPLFQAMTDPLCHLSSLTLSHCKLPDAVCRDLSEALRAAPALTELGLLHNRLSEAGLRMLSEGLAWPQCRVQTVRVQLPDPQRGLQYLVGMLRQSPALTTLDLSGCQLPAPMVTYLCAVLQHQGCGLQTLSLASVELSEQSLQELQAVKRAKPDLVITHPALDGHPQPPKELISTF

SEQ ID NO: 97317 - DNA, 2676 bp, Artificial Sequence
  derived and/or modified sequence
atggaccagcccgaggccccctgcagcagcaccggccccagactggccgtggccagagagctgctgctggccgccctggaggagctgagccaggagcagctgaagagattcagacacaagctgagagacgtgggccccgacggcagaagcatcccctggggcagactggagagagccgacgccgtggacctggccgagcagctggcccagttctacggccccgagcccgccctggaggtggccagaaagaccctgaagagagccgacgccagagacgtggccgcccagctgcaggagagaagactgcagagactgggcctgggcagcggcaccctgctgagcgtgagcgagtacaagaagaagtacagagagcacgtgctgcagctgcacgccagagtgaaggagagaaacgccagaagcgtgaagatcaccaagagattcaccaagctgctgatcgcccccgagagcgccgcccccgaggaggccatgggccccgccgaggagcccgagcccggcagagccagaagaagcgacacccacaccttcaacagactgttcagaagagacgaggagggcagaagacccctgaccgtggtgctgcagggccccgccggcatcggcaagaccatggccgccaagaagatcctgtacgactgggccgccggcaagctgtaccagggccaggtggacttcgccttcttcatgccctgcggcgagctgctggagagacccggcaccagaagcctggccgacctgatcctggaccagtgccccgacagaggcgcccccgtgccccagatgctggcccagccccagagactgctgttcatcctggacggcgccgacgagctgcccgccctgggcggccccgaggccgccccctgcaccgaccccttcgaggccgccagcggcgccagagtgctgggcggcctgctgagcaaggccctgctgcccaccgccctgctgctggtgaccaccagagccgccgcccccggcagactgcagggcagactgtgcagcccccagtgcgccgaggtgagaggcttcagcgacaaggacaagaagaagtacttctacaagtacttcagagacgagagaagagccgagagagcctacagattcgtgaaggagaacgagaccctgttcgccctgtgcttcgtgcccttcgtgtgctggatcgtgtgcaccgtgctgagacagcagctggagctgggcagagacctgagcagaaccagcaagaccaccaccagcgtgtacctgctgttcatcaccagcgtgctgagcagcgcccccgtggccgacggccccagactgcagggcgacctgagaaacctgtgcagactggccagagagggcgtgctgggcagaagagcccagttcgccgagaaggagctggagcagctggagctgagaggcagcaaggtgcagaccctgttcctgagcaagaaggagctgcccggcgtgctggagaccgaggtgacctaccagttcatcgaccagagcttccaggagttcctggccgccctgagctacctgctggaggacggcggcgtgcccagaaccgccgccggcggcgtgggcaccctgctgagaggcgacgcccagccccacagccacctggtgctgaccaccagattcctgttcggcctgctgagcgccgagagaatgagagacatcgagagacacttcggctgcatggtgagcgagagagtgaagcaggaggccctgagatgggtgcagggccagggccagggctgccccggcgtggcccccgaggtgaccgagggcgccaagggcctggaggacaccgaggagcccgaggaggaggaggagggcgaggagcccaactaccccctggagctgctgtactgcctgtacgagacccaggaggacgccttcgtgagacaggccctgtgcagattccccgagctggccctgcagagagtgagattctgcagaatggacgtggccgtgctgagctactgcgtgagatgctgccccgccggccaggccctgagactgatcagctgcagactggtggccgcccaggagaagaagaagaagagcctgggcaagagactgcaggccagcctgggcggcggcagcagccagggcaccaccaagcagctgcccgccagcctgctgcaccccctgttccaggccatgaccgaccccctgtgccacctgagcagcctgaccctgagccactgcaagctgcccgacgccgtgtgcagagacctgagcgaggccctgagagccgcccccgccctgaccgagctgggcctgctgcacaacagactgagcgaggccggcctgagaatgctgagcgagggcctggcctggccccagtgcagagtgcagaccgtgagagtgcagctgcccgacccccagagaggcctgcagtacctggtgggcatgctgagacagagccccgccctgaccaccctggacctgagcggctgccagctgcccgcccccatggtgacctacctgtgcgccgtgctgcagcaccagggctgcggcctgcagaccctgagcctggccagcgtggagctgagcgagcagagcctgcaggagctgcaggccgtgaagagagccaagcccgacctggtgatcacccaccccgccctggacggccacccccagccccccaaggagctgatcagcaccttctag

SEQ ID NO: 97318 - DNA, 2676 bp, Artificial Sequence
  derived and/or modified sequence
atggatcagccagaagcaccttgctcatccactggccctaggctggctgttgcccgggagctgctcctggcagcgttagaagaactttcccaagagcagctgaagcggttccgacacaagctcagggacgtgggaccagatgggcgctccattccgtggggaaggctggagcgcgcagatgcagttgacctggctgagcagctcgcccagttttatgggcctgagcccgccctcgaagtggcacgtaagacacttaagcgagccgatgcgcgagatgtggcagctcagctgcaggaaaggagactgcagagactcggtctaggaagcggaacgctgttatctgtgagcgaatataaaaagaaataccgggaacatgtgctgcagttacatgcaagggtgaaggagagaaatgctcgctcagtaaagatcaccaagcggttcactaagcttctcatcgcccccgagtccgcagctccagaggaagctatgggcccagccgaagaacccgagcccggacgggccagaaggagcgacacgcacacattcaatagactgtttagaagggacgaggagggacggaggccgctgacagtggtcctgcagggtccagccgggattgggaaaactatggccgccaaaaagatcctgtacgattgggctgcggggaaattatatcaggggcaggtcgattttgctttcttcatgccctgcggggaactcctggagcgaccaggaacaaggagtctggccgatctgatcttggatcaatgccctgaccgaggggcaccagtgcctcaaatgctagctcaaccccagcggttgctgttcatcctcgacggggccgacgaacttccggccctaggtgggcccgaggccgcaccatgtaccgatcccttcgaagctgccagcggggccagggtacttggggggctactgagtaaggctctcctgccaaccgccttactgctggtaaccacgcgggccgcagctcccggccgcctgcaaggcaggctgtgttcgccacagtgcgccgaggttaggggattcagcgataaagacaagaaaaagtatttctacaagtacttcagagacgagcgccgcgctgaacgggcctatcggttcgtcaaggagaatgagaccttgttcgccctgtgtttcgtaccatttgtgtgttggatcgtgtgtaccgtgctgagacagcaacttgagttgggacgtgatctgtcccggacctccaagactacgactagtgtgtatcttctcttcattacgtcggtgctctcatccgctcccgtggcagatggaccgaggcttcagggcgatctgcgcaacctgtgtagactggcgagagagggcgttctagggcgacgggctcagtttgccgagaaggagctggagcagctcgaacttagaggttccaaggtgcaaactctttttttgtccaagaaggaattgccgggcgtgttggaaacagaggtcacctatcagttcatagatcagtcctttcaagagttcctggccgccctttcttatctgcttgaggatgggggggtgccacgcactgcggcaggcggcgtgggcacgctcctgagaggcgacgctcaacctcacagccacctggtgcttaccactcgctttctgttcggtctcctgagcgctgagcgaatgcgggacatagaacgtcactttggctgcatggtgtccgaaagggtcaagcaagaggccctgaggtgggtgcaggggcagggtcagggctgtccgggagtcgcacccgaggtgaccgaaggagcaaagggactggaagataccgaggagccagaggaagaggaggagggcgaagaaccaaactatccgctggagctgctctactgcctctacgagacccaggaagacgcattcgttcgccaggccttgtgtcgattccccgaactcgccttacaacgcgtgagattctgtcgcatggacgtcgccgtgctgagctattgtgtcaggtgttgtccggccggccaagctctcaggctgatttcctgccggctcgtggctgcccaggagaaaaaaaagaagtccctcggcaagcggctgcaggcgagtctgggaggtggatctagtcagggaacgaccaaacagctccctgcctcactcttgcatcctctgtttcaagcaatgaccgatcctctttgtcacctctcctctcttacattatcccactgcaagctgccggacgccgtgtgcagggacctcagtgaggctctgagggccgcgcccgcactgaccgaactcggattactgcacaaccggctcagtgaagctggtctcagaatgctaagtgagggcctggcttggccacagtgtcgtgtccagaccgtccgggtgcagttgcccgatccccagcggggcctgcagtacctggtcggcatgctgaggcagagtccagctctgaccacgttggatttgtccggctgtcagttaccagccccgatggtgacttatctgtgcgctgtgctacagcaccagggttgtggcttacagactctgtccctggcaagcgtggagctctcggagcagagcttacaggagctccaagcagtgaagagggctaagcccgacctcgtcatcacccaccccgctctcgacggacatcctcagccgcctaaggagttgatttccaccttctag

SEQ ID NO: 97319 - DNA, 2676 bp, Artificial Sequence
  derived and/or modified sequence
atggaccagcctgaggccccctgcagcagcacaggcccccggctggccgtggcccgggagctgctgctggccgccctggaggagctgagccaggagcagctgaagcgcttccgccacaagctgagagatgtgggcccagatggccgcagcatcccctggggccgcctggagcgggcagatgctgtggacctggccgagcagctggcccagttctacggccctgagcccgccctggaggtggccaggaagaccctgaagagagcagatgccagagatgtggccgcccagctgcaggagcggcggctgcagaggctgggcctgggcagcggcaccctgctgtctgtgtctgagtacaagaagaagtaccgggagcacgtgctgcagctgcacgcccgggtgaaggagagaaatgcccggtctgtgaagatcaccaagcgcttcaccaagctgctgattgcccctgagagcgctgcccctgaggaggccatgggccctgctgaggagcctgagcccggccgggccaggagaagtgacacccacaccttcaacagactcttcagaagagatgaggagggcagaagacccctgactgtggtgctgcagggccctgctggcatcggcaagaccatggccgccaagaagatcctgtatgactgggccgccggcaagctgtaccagggccaggtggactttgccttcttcatgccctgtggggagctgctggagcggcccggcaccaggagcctggccgacctgatcctggaccagtgcccagacagaggagcccctgtgccccagatgctggcccagccccagaggctgctcttcatcctggatggagcagatgagctgcctgccctgggcggccctgaggccgccccctgcacagacccctttgaagctgccagcggggcccgggtgctgggcggcctgctgagcaaggccctgctgcccacagccctgctgctggtgaccaccagggctgctgcccctggccgcctgcagggccgcctgtgcagcccccagtgtgccgaggtgcggggcttcagtgacaaggacaagaagaagtacttctacaagtacttcagagatgagcggcgggcagagcgggcctacagatttgtgaaggaaaatgagaccctgtttgccctgtgctttgtgccctttgtgtgctggatcgtgtgcaccgtgctgcggcagcagctggagctgggccgggacctgagcaggaccagcaagaccaccacctctgtgtacctgctcttcatcacctctgtgctgagcagcgcccctgtggctgatggcccccggctgcagggcgacctgaggaacctgtgccgcctggcccgggagggcgtgctgggccggcgggcccagtttgctgagaaggagctggagcagctggagctgcggggcagcaaggtgcagaccctcttcctgagcaagaaggagctgcccggggtgctggagacagaggtgacctaccagttcatcgaccagagcttccaggagttcctggccgccctgagctacctgctggaggatggaggagtgcccaggacagctgctggaggagtgggcaccctgctgcggggagatgcccagccccacagccacctggtgctgaccacccgcttcctgtttggcctgctgtctgctgagaggatgagggacatcgagcggcacttcggctgcatggtgtctgagcgggtgaagcaggaggccctgcgctgggtgcagggccagggccagggctgccctggggtggcccctgaggtgacagagggcgccaagggcctggaggacacagaggagcctgaggaggaggaggagggggaggagcccaactaccccctggagctgctgtactgcctgtatgagacccaggaggatgcctttgtgcggcaggccctgtgccgcttccctgagctggccctgcagagggtgcgcttctgcaggatggatgtggccgtgctgagctactgtgtgcgctgctgcccagctggccaggccctgcggctcatcagctgccgcctggtggccgcccaggagaagaagaagaagagcctgggcaagaggctgcaggccagcctgggcggcggcagcagccagggcaccaccaagcagctgcctgccagcctgctgcaccccctcttccaggccatgacagaccccctgtgccacctgagcagcctgaccctgagccactgcaagctgcctgatgctgtgtgccgggacctgtctgaggccctgcgggccgccccagccctgacagagctgggcctgctgcacaaccggctgtctgaggccggcctgaggatgctgtctgagggcctggcctggccccagtgccgggtgcagacagtgcgggtgcagctgcctgacccccagaggggcctgcagtacctggtgggcatgctgcggcagagccctgccctgaccaccctggacctgagcggctgccagctgcctgcccccatggtgacctacctgtgtgctgtgctgcagcaccagggctgcggcctgcagaccctgagcctggcctctgtggagctgtctgagcagagcctgcaggagctgcaggccgtgaagagggccaagccagacctggtgatcacccacccagccctggatggccacccccagccccccaaggagctgatcagcaccttctag

SEQ ID NO: 97320 - DNA, 2676 bp, Artificial Sequence
  derived and/or modified sequence
atggaccagcccgaggccccctgcagcagcaccggcccccggctggccgtcgctagagagctgctgctggcggcactagaggaattgagccaggagcagctgaagaggtttagacataagttgagggatgtggggcccgatggaaggtctattccttggggaaggttggaaagagctgatgcagtggaccttgcagaacaactggcccagttctatggccctgaacccgctcttgaagttgccaggaagaccctcaaacgggccgacgccagagatgtcgctgcccagctgcaggaaagaaggttgcagcgattgggccttgggagtgggaccttgctctccgttagcgaatataagaaaaaatacagagaacacgtgttgcagctgcacgcgcgcgtaaaagagcggaatgctcggtcagtcaagatcacaaagcggttcactaaactgctgattgccccggaatccgcggcaccggaggaagcaatgggccccgctgaagagccagaacctggtagggctcgaagaagtgacacacacactttcaaccgcctttttaggagagatgaggagggccgtaggcctcttaccgtagtactgcagggtcctgctggtattggaaaaactatggcagctaagaagatcctctatgattgggcagctggcaaactctatcagggccaggtggatttcgctttctttatgccctgtggagaacttctggaaaggccaggaactaggagccttgccgacctgattctggatcagtgcccagacaggggtgctcccgtgccacagatgctggcccagccacagcggttgctatttattttggacggtgcggacgagctccccgcattggggggtccggaggcggccccttgcactgatccttttgaggccgccagcggtgctcgagtgttaggaggccttctgagcaaagcacttttgcccactgccctcctgctggttaccacccgcgctgcagcccccgggaggttacagggcagactgtgttctcctcagtgcgccgaagtgagagggtttagcgacaaggataaaaaaaagtacttctacaaatattttcgtgacgagcgtcgcgcagaacgtgcctacagattcgtcaaggagaacgagactctctttgcactctgcttcgtgcctttcgtctgttggatagtgtgtaccgttctgcggcaacagcttgaactagggcgagacttgagccggactagtaaaacaacaaccagcgtgtaccttttgtttattacctctgtcctatcgtctgctcccgtggcggatggaccacggttacaaggcgacctacgcaacctttgcagactggcgcgggagggagttctgggaaggcgcgcccagtttgccgaaaaagagctggagcaactcgaactacgtggttctaaggtccaaactctgtttctctctaagaaagaattacctggggtccttgagacagaggtaacataccaattcatcgaccagtcattccaagaattcttggctgccctgagctacctacttgaggatggcggtgtgcctcgcactgctgctgggggcgtcggtacactgttgcgcggagacgcccagccgcactcacacctcgttttgaccacaagattcttattcgggctgttatccgccgaaagaatgagggacatagagcgccacttcgggtgcatggtttcagaacgagttaagcaggaagccctccggtgggttcaggggcaggggcagggctgtcccggggtcgcccccgaggtgacagagggagccaaggggcttgaagataccgaagagcctgaggaggaggaagagggtgaggagcccaactaccctctggagctcctttattgtctctatgaaacgcaggaggacgcttttgtgcgccaagctctctgtagattcccagaactcgccctgcagcgcgtacgattctgcagaatggacgtggccgtattgtcgtactgcgtgcgttgttgccctgcagggcaggccttgagactgattagttgcaggctggtggctgcacaggaaaagaaaaaaaagtcactaggaaaaaggctgcaggcaagtctagggggaggctctagtcaaggcactaccaagcagctcccagcatctctgctgcacccactcttccaggcaatgacagatcccctctgccacctgtcctcactgacactgtcgcattgcaaactccctgacgcagtctgcagagacttgtccgaagcactgcgagccgccccagccctgaccgagttaggccttctccacaaccgcctgtcagaagcgggcctgcgcatgctgagtgagggcctcgcctggccccagtgcagggtgcaaactgtgcgggtccagctcccagatcctcagcgtgggctccaatacttggtggggatgttgagacaaagtcctgccctgaccactttggacttgagtgggtgccagctcccagcacccatggttacctacctctgtgccgttctccagcaccagggttgcggactgcagaccctgtcactcgcttctgtcgagctgagcgaacagtcacttcaagaactgcaggcagtgaagagagcgaagcctgacttagtgatcacacatcctgccctcgacggacacccacaaccccctaaagagctgatcagtacgttctag

SEQ ID NO: 97321 - DNA, 2676 bp, Artificial Sequence
  derived and/or modified sequence
atggaccagcccgaagctccatgttccagcacaggacccagacttgcggtggcccgagagctgttgcttgccgcattagaagaactgtcccaagaacagctcaagaggtttcgccacaaactacgcgacgttggcccagacggacgatctatcccctggggccgactggagagggcagatgctgtggacctggccgagcagctcgcccaattttacgggccagaacccgctttggaggtggcacgaaaaaccttgaagcgcgctgacgctcgtgacgttgctgcacagctgcaagagcggcgactgcagagacttggacttgggtcaggcaccctcttgagtgtctctgagtacaagaaaaagtatcgagaacacgtactgcagctgcatgcccgagtcaaggagcgtaacgcgaggtcggtcaaaatcactaagcggttcacgaaacttctgatagcccctgagtcagccgctcccgaagaggccatgggacccgctgaggaacccgaacctggacgcgctagacgatccgatacgcatacatttaatcggttgtttcggagggacgaggaggggaggcgtcctcttactgtcgtgctgcagggcccagcaggaatcgggaagaccatggcagccaaaaagatcctgtatgattgggcggcaggaaagctctatcaaggacaagttgattttgcatttttcatgccgtgcggggagctgctcgaaagacccggaacaagaagtctggccgacctgattttggaccaatgtcccgatcggggagccccagtgccgcagatgctagctcagccgcagcgcttgctattcattctggatggagctgatgagcttcctgcactgggcggaccggaagcagctccttgtaccgatcccttcgaggccgcttctggggcacgtgtgctcggaggcttgttgtctaaagctctgctacccactgcattgctgttagtcacgacgcgcgctgcagctccgggaagactccaggggagactttgttcaccgcagtgtgctgaggtgaggggatttagcgacaaggacaagaagaagtacttttataaatacttccgcgatgaacgtcgggcagagagggcgtaccgctttgtgaaagaaaatgagacactgtttgccctttgttttgtgccctttgtctgctggatcgtctgtactgttctgcggcagcagctggagttgggacgggacttgtctcgcacttctaaaaccactacttctgtgtacctgctctttattacatctgttctctcctcagctccagtcgccgacggcccaaggctgcagggggacttacggaatctttgtcggttggctcgggagggtgtgttgggccgtagggcccaatttgctgaaaaggaattggagcagctcgagttacgagggtccaaggttcagacattgtttctatctaagaaagaactgcccggagttctcgagaccgaggtcacctatcagttcattgatcaatcattccaggaattcctggccgctctttcttatctgctggaagatggaggagtgcctaggaccgccgcaggcggagtcggcactctgctgcgcggagacgctcagccccactctcacctggttcttaccacacgattcctctttgggctgctcagtgcagagcgaatgcgcgacattgagaggcacttcggttgtatggtgtccgagagggtaaagcaagaagcgttgaggtgggtccaggggcaaggacagggatgccccggagtagccccagaagtcactgagggagcaaagggcttggaggacacagaggagccagaggaggaagaggaaggcgaggaacccaattaccccctggaattactgtactgcctttatgaaacacaggaagacgctttcgtcaggcaggccctgtgccggtttccagaactcgcgttgcaacgcgtacgcttctgcaggatggacgtcgccgtcctgagctattgcgtgcgctgctgccccgctggacaagcgctgcggcttatctcatgccggttggttgccgcacaggagaaaaagaaaaaatctttagggaaaaggctccaggcctccctgggcggaggatcctcccaggggacaacaaaacagctgcctgcctcactccttcaccccttatttcaggcaatgactgacccattgtgccatctaagctctctgactctgagtcactgtaagctgccagacgcagtatgcagagacttaagcgaagccctgcgggctgctcctgcacttaccgagcttggcctgctccacaaccgattatctgaagccggtctgcggatgctctcagagggactcgcgtggccgcagtgtcgcgtgcagaccgtgagggtacaactcccggaccctcaaaggggtcttcagtacttagtcggcatgctgagacaaagccctgctctgacaacattggatttgtctgggtgccaactgccagcacccatggtcacatatctgtgcgcggtgctgcagcaccaggggtgcggactgcagacactaagtttggcctcggttgagctctctgagcagtcactgcaggagctccaagccgtaaagagggcgaaaccggaccttgtgatcacgcaccctgcactagatggtcatccccagcctccaaaggagctaatcagcactttctag

SEQ ID NO: 97322 - DNA, 2936 bp, Artificial Sequence
  derived and/or modified sequence
aaacggagcccttaaagggcaatgctctgcgtgtgccacggtgcccaacagcatctcgtgccagctgagctgcggtgtgtggacccggggaatggaccgggctggacaacctctaagacttggctccagctcagcctgtgaaggaatcacctctctgatccccacctctgccccggagtgctagacccagggaggaagagaccccatggaccagccagaggccccctgctccagcacggggccgcgcctcgcggtggcccgcgagctgctcctggctgcgctggaggaactgagccaagagcagctgaagcgcttccgccacaagctgcgcgacgtgggcccggacggacgcagcatcccgtgggggcggctggagcgcgcggacgccgtggacctcgcggagcagctggcccagttctacggcccggagcctgccctggaggtggcccgcaagaccctcaagagggcggacgcgcgcgacgtggcggcgcagctccaggagcggcggctgcagcggctcgggctcggctccgggacgctgctctccgtgtccgagtacaagaagaagtaccgggagcacgtgctgcagctgcacgctcgggtgaaggagaggaacgcccgctccgtgaagatcaccaagcgcttcaccaagctgctcatcgcgcccgagagcgccgccccggaggaggcgatggggcccgcggaagagcctgagccggggcgcgcgcggcgctcggacacgcacactttcaaccgcctcttccgccgcgacgaggagggccggcggccgctgaccgtggtgctgcagggcccggcgggcatcggcaagaccatggcggccaaaaagatcctgtacgactgggcggcgggcaagctgtaccagggccaggtggacttcgccttcttcatgccctgcggcgagctgctggagaggccgggcacgcgcagcctggctgacctgatcctggaccagtgccccgaccgcggcgcgccggtgccgcagatgctggcccagccgcagcggctgctcttcatcctggacggcgcggacgagctgccggcgctggggggccccgaggccgcgccctgcacagaccccttcgaggcggcgagcggcgcgcgggtgctaggcgggctgctgagcaaggcgctgctgcccacggccctcctgctggtgaccacgcgcgccgccgcccccgggaggctgcagggccgcctgtgttccccgcagtgcgccgaggtgcgcggcttctccgacaaggacaagaagaagtatttctacaagtatttccgggatgagaggagggccgagcgcgcctaccgcttcgtgaaggagaacgagacgctgttcgcgctgtgcttcgtgcccttcgtgtgctggatcgtgtgcaccgtgctgcgccagcagctggagctcggtcgggacctgtcgcgcacgtccaagaccaccacgtcagtgtacctgcttttcatcaccagcgttctgagctcggctccggtagccgacgggccccggttgcagggcgacctgcgcaatctgtgccgcctggcccgcgagggcgtcctcggacgcagggcgcagtttgccgagaaggaactggagcaactggagcttcgtggctccaaagtgcagacgctgtttctcagcaaaaaggagctgccgggcgtgctggagacagaggtcacctaccagttcatcgaccagagcttccaggagttcctcgcggcactgtcctacctgctggaggacggcggggtgcccaggaccgcggctggcggcgttgggacactcctgcgtggggacgcccagccgcacagccacttggtgctcaccacgcgcttcctcttcggactgctgagcgcggagcggatgcgcgacatcgagcgccacttcggctgcatggtttcagagcgtgtgaagcaggaggccctgcggtgggtgcagggacagggacagggctgccccggagtggcaccagaggtgaccgagggggccaaagggctcgaggacaccgaagagccagaggaggaggaggagggagaggagcccaactacccactggagttgctgtactgcctgtacgagacgcaggaggacgcgtttgtgcgccaagccctgtgccggttcccggagctggcgctgcagcgagtgcgcttctgccgcatggacgtggctgttctgagctactgcgtgaggtgctgccctgctggacaggcactgcggctgatcagctgcagattggttgctgcgcaggagaagaagaagaagagcctggggaagcggctccaggccagcctgggtggcggcagttctcaaggcaccacaaaacaactgccagcctcccttcttcatccactctttcaggcaatgactgacccactgtgccatctgagcagcctcacgctgtcccactgcaaactccctgacgcggtctgccgagacctttctgaggccctgagggcagcccccgcactgacggagctgggcctcctccacaacaggctcagtgaggcgggactgcgtatgctgagtgagggcctagcctggccgcagtgcagggtgcagacggtcagggtacagctgcctgacccccagcgagggctccagtacctggtgggtatgcttcggcagagccctgccctgaccaccctggatctcagcggctgccaactgcccgcccccatggtgacctacctgtgtgcagtcctgcagcaccagggatgcggcctgcagaccctcagtctggcctctgtggagctgagcgagcagtcactacaggagcttcaggctgtgaagagagcaaagccggatctggtcatcacacacccagcgctggacggccacccacaacctcccaaggaactcatctcgaccttctgaggctctggtggccagagcagggtggaagaccctagtcaaagtccctgtggagaga

SEQ ID NO: 97323 - protein, 681 aa, Artificial Sequence
  derived and/or modified sequence
MFRKKKKKRPEISAPQNFQHRVHTSFDPKEGKFVGLPPQWQNILDTLRRPKPVVDPSRITRVQLQPMKTVVRGSAMPVDGYISGLLNDIQKLSVISSNTLRGRSPTSRRRAQSLGLLGDEHWATDPDMYLQSPQSERTDPHGLYLSCNGGTPAGHKQMPWPEPQSPRVLPNGLAAKAQSLGPAEFQGASQRCLQLGACLQSSPPGASPPTGTNRHGMKAAKHGSEEARPQSCLVGSATGRPGGEGSPSPKTRESSLKRRLFRSMFLSTAATAPPSSSKPGPPPQSKPNSSFRPPQKDNPPSLVAKAQSLPSDQPVGTFSPLTTSDTSSPQKSLRTAPATGQLPGRSSPAGSPRTWHAQISTSNLYLPQDPTVAKGALAGEDTGVVTHEQFKAALRMVVDQGDPRLLLDSYVKIGEGSTGIVCLAREKHSGRQVAVKMMDLRKQQRRELLFNEVVIMRDYQHFNVVEMYKSYLVGEELWVLMEFLQGGALTDIVSQVRLNEEQIATVCEAVLQALAYLHAQGVIHRDIKSDSILLTLDGRVKLSDFGFCAQISKDVPKRKSLVGTPYWMAPEVISRSLYATEVDIWSLGIMVIEMVDGEPPYFSDSPVQAMKRLRDSPPPKLKNSHKVSPVLRDFLERMLVRDPQERATAQELLDHPFLLQTGLPECLVPLIQLYRKQTSTC

SEQ ID NO: 97324 - DNA, 2046 bp, Artificial Sequence
  derived and/or modified sequence
atgttcagaaagaaaaaaaaaaaacgcccagaaatcagcgccccacagaattttcaacaccgtgtacataccagctttgacccaaaagaagggaagttcgtgggcttgccaccccaatggcagaatatactggataccctccgcagacccaaacctgtggtagatccgtcacggataactagagttcagttgcagcctatgaagacagttgtgcggggatctgctatgccagttgatgggtatatcagcggcttattaaacgatattcaaaagctgtccgttatctccagcaacaccttacggggcagaagcccaactagccggcggcgtgcacagtctcttggcctgctgggcgacgagcactgggctaccgaccctgacatgtacctgcagtccccacaatcggagaggactgacccgcacggcctgtatctgtcttgcaacggaggaaccccagctggccacaagcagatgccttggcccgagccacagagccccagagtgctccctaatggcttggccgcaaaagcccagtcactggggcccgctgagtttcaaggcgcctctcagcgctgtcttcagctgggcgcatgtttacagtcttcaccgccgggagccagcccacccaccggcacaaacagacacggcatgaaagctgccaagcacggctcagaagaggcaagacctcaatcttgtttagtgggctccgctactggtaggccagggggggagggcagtccctcacccaagactagggagagttccctcaaacgaaggttgtttcgttccatgttcctgtctacagccgctactgctccccctagcagtagcaagcccggtccaccgcctcagtctaagcctaactcaagctttcggccccctcagaaggacaatccccccagtctggtcgctaaagctcaaagtctgcccagcgaccagcccgtgggcacattcagccctttgactacttccgacacaagcagcccccaaaagtccttgcgcaccgcccctgccactggccagctgccgggaaggtcaagtcctgccggttcccctcgtacgtggcacgcacaaatctctacctccaacctgtatctgccacaggaccctactgtggccaagggagccttagccggcgaagacactggcgttgtaacacacgagcagtttaaagctgcattgagaatggttgtggaccagggcgaccctcggttgctcctggattcctatgtgaaaattggcgaaggttccactggcattgtttgtctcgctcgcgagaaacattccggtaggcaggtggctgtgaaaatgatggatctgcgcaaacagcagcgaagagaattactatttaatgaagtcgtgattatgcgcgattaccagcatttcaatgtggtggagatgtataagtcttatctggttggtgaagaattgtgggtgctgatggagttcctgcaaggcggtgccctaacagacattgtgtcacaggtgaggctgaacgaagaacagatcgcaacagtatgcgaggccgtgcttcaggccctggcttacttacatgcccaaggcgttattcacagagatattaaatccgactccatcctcctcaccttagatggccgggtgaagcttagcgactttgggttctgcgcccagattagtaaggacgtgccaaagaggaaatcccttgttgggaccccgtactggatggcgcccgaggtcatttcccgatctctgtacgcaactgaggtcgatatctggagcctgggcatcatggtcatagaaatggtggacggggagcccccttactttagtgacagccctgttcaagcaatgaaaaggctgcgcgacagtcccccgccaaagctgaagaattcccataaggtgagcccagtcctcagggacttcctggagcgcatgctggtgcgggacccacaagagcgagcaacggctcaggagcttctggaccaccctttcctccttcaaaccggtctgcccgaatgcctggtccccttgatacagctgtatcgcaagcagaccagtacctgctag

SEQ ID NO: 97325 - DNA, 2046 bp, Artificial Sequence
  derived and/or modified sequence
atgtttagaaaaaagaaaaagaaacgccccgaaatttcagctcctcagaactttcagcaccgagtgcacactagctttgaccctaaagaggggaagtttgtgggcttgccgccccaatggcagaatatactggatacactccggcggccaaaacctgtcgtggatccctctaggatcactcgcgtacagcttcagccgatgaaaaccgtggtcagaggatctgcaatgcccgtggacgggtatattagcggactgttgaacgacatccaaaaactcagtgtgatctcaagcaacaccctgcgggggaggagccctaccagccgccgccgtgcccaatctctcggcctcttgggtgatgaacattgggctactgatcccgacatgtacctacagtcaccacagtcagagaggactgatcctcatggactatacctttcttgcaatggtggcacccccgcagggcacaagcagatgccttggcccgagccacaaagccctcgtgtcctccccaacggcttggcagcaaaagctcagtccctggggccggcagagttccagggagcatcccaacgatgcctacagctgggagcctgtctgcagtcctcccctccaggagccagtccacctacggggacaaaccgccatgggatgaaagcggcgaagcacgggtcggaagaggcacggccacagtcatgcttggtaggctctgccacagggcgaccagggggagagggctcccccagtcctaaaaccagagagtcctctctgaagagacgcttgttccggtccatgtttctcagtactgctgccactgcccccccaagcagttctaaacctggacctccaccacagtccaaacctaactcgtcttttaggccaccccagaaggataacccaccatcgctggtggctaaggcgcagagtctgccctcggatcagcccgttgggaccttttcaccccttacaactagcgacacctcatccccacaaaagagccttcgcactgcccctgctaccggacagttgccaggcaggtccagcccagcaggaagcccccggacttggcacgcacagatcagcacctcaaatctgtatcttccccaggaccccactgtcgcaaaaggagccctcgccggtgaagacacgggagtcgtcacacatgaacagtttaaggctgcccttcgcatggtggtggatcagggggacccacgccttctgctggactcctatgtgaaaataggcgaggggtccaccggcattgtctgtctggcaagggagaagcattcaggccgacaagtggccgtgaaaatgatggatctaaggaaacagcagcgccgagagctgctcttcaatgaggttgtgatcatgagagactatcagcacttcaacgtggttgaaatgtacaagtcttatctcgtgggcgaggagttgtgggtcctgatggagttcctgcaagggggagcacttacagacatcgtctctcaggtacgactgaatgaggagcagatcgctaccgtgtgcgaggctgtgctacaggccctggcttacctgcatgcccaaggcgtcatccaccgcgacattaaaagtgattctatacttctgacactggacggacgggtcaagctgtccgattttggcttttgcgctcagatctccaaggacgttccaaagcggaaatctctggtgggaaccccatactggatggcccctgaagtgataagtcggtccttatacgccacagaagtagatatctggagccttggcataatggtaattgagatggtcgacggagagcctccgtacttcagcgattccccagtgcaggccatgaagaggctgcgcgactcccctcctcccaagctgaagaattcccacaaagtgtctcctgtgctgagagatttcctggaacgtatgctggtgcgagatccacaagagcgggccacggcccaggaactgttagatcaccccttcctcttacagactggtctccccgaatgtctggtacctttgattcaactgtatcgcaagcaaacctcaacatgctag

SEQ ID NO: 97326 - DNA, 2046 bp, Artificial Sequence
  derived and/or modified sequence
atgtttagaaaaaaaaaaaaaaagcgacccgagatcagtgcccctcagaattttcagcaccgggtgcatacatcattcgatcccaaggagggcaaattcgtgggtctgccccctcaatggcagaacatactggacactttacgaaggcccaagcccgtggtggatccttcgaggatcacacgggtgcaactccagcccatgaagaccgtcgtccgaggctccgctatgcccgttgacggctacatttccggcctgctgaacgacatccagaaactaagcgttatctcttcaaacacactacgtgggcggagcccgactagccgaaggcgagcccagtctctgggactgcttggtgacgagcactgggccaccgatcctgacatgtatctacagtcccctcagtccgaacggacggatccgcacggactgtacctgtcttgtaatggcggcacacctgccggccataaacaaatgccgtggccagaaccgcagtcacctcgggtgctgccaaacgggttggcggccaaagcccagtcactggggcctgcagaattccagggcgctagtcagagatgtctccagctcggcgcatgcttgcagtcatcaccccccggggcctcgccaccaacagggacaaatcggcatggaatgaaggctgcaaagcacggcagtgaagaggccagaccccagtcttgcctggttgggagtgcaactggtaggccaggaggggaaggaagccccagcccaaaaactcgtgaatcctccctgaaaagacgactgttccgtagcatgtttttaagcacagccgcgacagccccaccttcctcatccaaacctggacctcctcctcaaagcaagccaaacagctcatttagacccccccaaaaggacaaccctcccagcctggttgctaaggcacagagcctgccatccgaccagcccgttgggacatttagcccccttacaaccagtgacacgagcagtccacagaagagtctcagaacggcgcccgccaccggacaattgcccgggcggtcgtcaccagccggtagtcctagaacgtggcacgctcagatttccacatcgaatctatatctgccccaggatcccaccgtggccaagggtgcgctcgcgggagaggacaccggtgtcgtcactcatgaacagttcaaggcggcattgagaatggtagttgatcagggcgatcccaggctgctgttagattcctatgtgaagatcggggagggttccaccggtatcgtttgtctggcacgtgagaaacattccggaaggcaggtagctgtcaaaatgatggacctgcgtaagcagcaacgccgagagctactctttaatgaagtggttatcatgcgcgactatcagcatttcaacgtggtcgagatgtacaagtcttacttggtcggcgaggagctctgggtccttatggagtttctgcagggaggggcactgactgatattgtgagtcaggtcagacttaatgaagagcagatcgctacagtgtgcgaggctgtattgcaggctcttgcatacctgcacgcacagggcgtgatacatagggacataaagtctgactctatcctgctgacgttggacggaagggtgaaactgagcgattttggtttttgcgctcaaatttctaaagacgtgcctaaacgcaagtctttggtcggaacgccatattggatggcgcccgaagtgatctcccgcagcctttatgccactgaggttgacatatggagcctcggtataatggtgatagaaatggttgacggggaaccaccctattttagtgatagccccgtccaggcaatgaaacgcctccgggattctccgccacctaaactgaagaactcccataaggtcagtccagtgctgcgagacttccttgagagaatgctggtgagagaccctcaggagcgggctaccgcacaagagctcctggaccacccatttctacttcaaaccggattgccagagtgtctggtgcctttaatccagctgtaccggaagcagaccagcacttgctag

SEQ ID NO: 97327 - DNA, 2046 bp, Artificial Sequence
  derived and/or modified sequence
atgttccgaaagaaaaaaaaaaaacggcctgagataagcgccccacagaattttcagcatcgcgtgcacacgtctttcgatccaaaggaaggtaaatttgtcggcttgcctcctcagtggcagaatatactggacacccttcggcggcctaaacccgtagtcgatccatccagaattacaagggtacagctgcagcccatgaaaaccgttgtgcgcggctccgccatgccagtcgacgggtacatatcgggattgctcaacgacattcagaaacttagcgtcataagttctaacacactccgggggcgatcacctacgtcacggcgccgggcccaatcccttggactacttggtgacgaacactgggctaccgatcccgatatgtacctgcagtcaccccaatccgagcgtacagaccctcacggcctgtacctctcctgcaacgggggcacacccgcggggcacaaacagatgccttggccagagcctcaaagtccaagagtcctacccaacgggcttgcagcaaaagctcaaagtctcggcccggctgagtttcagggcgcgagtcagcgctgtttacagcttggtgcatgcctgcagtcatccccgccaggtgcttccccccccacgggcacaaacagacacggcatgaaagcagcaaagcacggaagcgaagaggcccggccccagagttgtctagttggctcagccactgggaggcccggtggagaaggatcacccagtcctaagactcgcgagtcaagtcttaagcgtaggctgttccgaagcatgttcctgtccaccgctgcaactgcccctcctagtagctccaagcctggccctcccccacagtctaagcccaacagctccttcaggcctcctcagaaggataaccccccctcactggttgcgaaggcgcagtccctcccatcagaccagcctgtcggaaccttctctcctctaaccactagtgatacctccagcccccagaagtccctgaggacagcgcccgcgacgggacaactcccagggcggtccagccctgcaggatccccaagaacctggcatgcccagatctcgacgagcaatttgtaccttcctcaagatccgaccgtggctaagggagccctcgctggcgaagatactggcgtagttacccacgagcagttcaaagccgccctgaggatggtggtggatcagggcgatccccgattgctcctggatagctacgtgaagatcggagaaggatcaacaggcatcgtctgcctggcgagagaaaaacatagcggacgccaggtggctgttaaaatgatggatctgaggaagcagcagcgccgtgaactactctttaatgaagttgtaattatgcgcgactaccagcacttcaacgtggtggagatgtacaagtcatacctagtgggcgaagagctttgggtgctaatggaattccttcagggtggggccttaaccgacatcgtgtcacaggtgcgccttaacgaagagcagattgccaccgtctgcgaagccgttctgcaggctctggcttacctccatgcccagggggtcatacatagggatatcaagagcgactctattctgctgaccctggatggtcgcgtaaaacttagtgatttcggtttctgtgcccagataagcaaggatgtcccaaaaagaaagtccctcgtgggaacaccttattggatggccccggaggtgatttccagaagtctgtacgcaaccgaggtggatatatggtctttgggcattatggttatcgagatggtagacggcgaacctccatacttcagcgattcacccgttcaggccatgaagaggctgcgggattctcccccccccaagttgaagaactcccacaaggtgagccctgttcttcgagactttcttgaaagaatgctggtgcgtgatccgcaagaaagagccacagctcaagagttgcttgaccacccgtttcttctccagaccggactccccgaatgcttggtgccacttatccagctctaccgcaaacagacgtccacctgttag

SEQ ID NO: 97328 - DNA, 2046 bp, Artificial Sequence
  derived and/or modified sequence
atgttcaggaagaagaagaagaagaggcctgagatcagcgccccccagaacttccagcaccgggtgcacaccagctttgaccccaaggagggcaagtttgtgggcctgcccccccagtggcagaacatcctggacaccctgcggcggcccaagcctgtggtggaccccagccgcatcaccagggtgcagctgcagcccatgaagacagtggtgcggggcagcgccatgcctgtggatggctacatcagcggcctgctgaatgacatccagaagctgagcgtcatcagcagcaacaccctgcggggccgcagccccaccagcagaagaagagcccagagcctgggcctgctgggagatgagcactgggccacagatcctgacatgtacctgcagagcccccagagcgagaggacagacccccacggcctgtacctgagctgcaatggaggcaccccagctggccacaagcagatgccctggccagagccccagagcccccgggtgctgcccaacggcctggccgccaaggcccagagcctgggccctgctgagttccagggcgccagccagcgctgcctgcagctgggcgcctgcctgcagagcagccccccaggggccagcccccccaccggcaccaacagacatggcatgaaggccgccaagcacggcagcgaggaggcccggccccagagctgcctggtgggcagcgccaccggccggcctggaggagagggcagccccagccccaagacccgggagagcagcctgaagaggaggctcttccgctccatgttcctgagcacagctgccacagccccacccagcagcagcaagccaggccccccaccccagagcaagcccaacagcagcttccggcccccccagaaggacaacccccccagcctggtggccaaggcccagagcctgcccagcgaccagcctgtgggcaccttcagccccctgaccaccagtgacaccagcagcccccagaagagcctgaggacagccccagccaccggccagctgcccggccgcagcagccctgctggcagccccaggacctggcacgcccagatcagcaccagcaacctgtacctgccccaggaccccaccgtggccaagggggccctggccggggaggacaccggggtggtgacccatgagcagttcaaggccgccctgaggatggtggtggaccagggcgacccccggctgctgctggacagctatgtgaagattggagagggcagcacaggcatcgtgtgcctggcccgggagaagcacagcggccggcaggtggccgtgaagatgatggacctgaggaagcagcagaggcgggagctgctcttcaatgaggtggtgatcatgagggactaccagcacttcaacgtggtggagatgtacaagagctacctggtgggggaggagctgtgggtgctgatggagttcctgcagggcggggccctgacagacatcgtgtcccaggtgcggctgaatgaggagcagatcgccaccgtgtgtgaggccgtgctgcaggccctggcctacctgcacgcccagggcgtcatccaccgggacatcaagagtgacagcatcctgctgaccctggatggccgggtgaagctgagtgactttggcttctgtgcccagatcagcaaggatgtgcccaagaggaagagcctggtgggcaccccctactggatggcccctgaggtgatcagccgcagcctgtatgccacagaggtggacatctggagcctgggcatcatggtgattgagatggtggatggagagcccccctacttcagtgacagccctgtgcaggccatgaagaggctgcgggacagccccccacccaagctgaagaacagccacaaggtgtcccctgtgctgcgggacttcctggagaggatgctggtgcgggacccccaggagcgggccacagcccaggagctgctggaccaccccttcctgctgcagacaggcctgcctgaatgtctggtgcccctcatccagctgtacaggaagcagaccagcacctgctag

SEQ ID NO: 97329 - DNA, 2046 bp, Artificial Sequence
  derived and/or modified sequence
atgttccggaagaagaagaagaagcggcccgagatcagcgccccccagaactttcagcatagagttcacacaagtttcgatcccaaggagggcaagttcgtcggccttcctccacagtggcaaaacatactcgatacactgcggcgccctaagcctgttgtggaccccagcagaatcaccagggtccaactccagcctatgaaaactgtggtccgcggctccgcaatgcctgtggacgggtatatcagcgggttgctgaatgacattcagaaactgtccgtaatttcgtctaataccttaagaggtcggagccctacttcccggaggcgcgcacaaagcctgggactgctaggagacgagcattgggccacggaccctgatatgtacttgcagtcaccccagagtgagagaaccgaccctcatggcctctacctcagttgcaatggaggcacccccgccggtcataaacagatgccctggcccgaaccacagtcacccagagtcctaccgaatggactggccgctaaagcccagtcactcgggcccgccgaattccagggagcatcacagaggtgcctccagctaggcgcatgccttcaaagcagtccacccggcgcttctccacctaccgggaccaataggcatggtatgaaagccgcgaaacacggaagcgaggaggcccgaccacagagctgcttagtcggttctgccaccggtagaccaggaggagaagggtcaccaagccctaaaactcgcgagtcatctctgaagcgcagactttttcggtctatgttcctttctactgcggctactgccccccccagcagctcgaagcccggaccgccgcctcaatccaagcctaatagtagcttcaggcctccacagaaggataatccaccctccctcgtcgccaaggcccagagcctgccttccgaccagccggtcggcactttttctccacttaccacaagcgacaccagctctccacagaagagtctgaggaccgcgccagctacaggccagttacccggcagatcttcacccgctggaagtccaagaacatggcatgcccagatcagcacatctaacctgtatctgccccaggatcctacagtcgccaagggggcgctagccggggaagataccggggtagtgacccatgaacagttcaaggcggctctgcgaatggtggtggatcagggcgacccacgcctgcttctagattcttacgtcaagataggagagggctcgacaggcattgtgtgtctggctagggaaaaacattctggaaggcaggttgcagtgaagatgatggatctccgcaaacaacaacggagagagttgttattcaacgaagtggtcatcatgagggattatcaacacttcaacgtcgtggaaatgtataaaagctatctggttggggaggaactttgggtcctcatggaattcctgcaagggggagcacttacggacatcgtgagtcaagtgcggctgaacgaagaacagatcgctacggtgtgtgaggccgttctgcaggcccttgcttacttacatgcccaaggcgtgattcatagagacatcaagagtgactctattctcctcacactcgacggtagggtcaaactgtctgactttggcttctgtgcccagatatccaaggatgtacccaaacgcaagtcactcgttgggacgccttactggatggcccccgaagtaatttcacgtagtctttacgccaccgaggtggatatatggagcttaggcatcatggtgatcgagatggtggacggggaaccgccttacttctctgacagtcccgtccaggctatgaaaagactaagagactctcctccacccaagttgaaaaatagtcataaagtatctcctgtcctgagggactttctggagaggatgcttgtcagagatcctcaagagcgagccaccgctcaagagcttttggatcacccgtttctgctacagacagggcttccagaatgccttgtgcctctaattcagctgtatagaaagcagactagtacttgctag

SEQ ID NO: 97330 - DNA, 2046 bp, Artificial Sequence
  derived and/or modified sequence
atgttccggaagaagaagaagaagcggcccgagatcagcgccccccaaaatttccaacaccgggtccatacaagcttcgaccctaaagaggggaaattcgtgggactcccccctcagtggcagaatatcctggacactctgcggcgccccaaacctgtggtcgaccctagcaggataacacgcgttcagctgcagcccatgaaaaccgttgtgcggggctccgcaatgccagtggacggttatataagtggtctgctcaacgacattcagaaacttagtgtaatatctagcaataccctgcggggtcggtccccgacctctagacggagagcccagtctttgggcttgctcggcgatgagcactgggccactgacccagacatgtacctacagtccccacaatccgagagaacagaccctcacggcctttacttgtcttgcaatgggggtactccagctggtcataagcagatgccgtggcccgagcctcaatccccgcgggtcctccccaacggactggcagctaaagcacagtcactgggacctgcagaattccagggcgcatcccagcggtgcttgcaacttggcgcctgcttacagagtagcccaccaggcgcatcaccaccgaccggcaccaaccgacacggaatgaaagctgccaagcatggcagcgaggaagcccggccacagtcttgcctagtcggttccgctaccggccggcccgggggcgaagggtccccttcccccaagactagggaaagcagccttaaacgcagactctttcggtcgatgttcctgtcaacagctgctacagccccccccagctcttcgaagcccggtccaccacctcagtcaaagcccaacagttcattccgaccccctcaaaaagataacccaccaagtcttgttgcgaaagcgcagtccctaccgagtgaccagcccgtgggaacattttccccattaacaacttccgacacctcgagcccccagaaatcgttaaggactgctcctgccaccggtcagctccccggcagaagttcacctgcaggaagcccccgtacctggcacgcccagatcagcacatctaatctgtatcttccacaggaccctaccgtcgcaaagggcgccttggctggcgaggacactggagtggtgactcatgaacagttcaaagctgccttacgcatggttgttgaccaaggagatccccggctccttctcgactcctatgtgaagataggggaaggctcaacgggtattgtatgtctggcacgcgagaagcattcaggtcgccaggtcgcagtcaaaatgatggacctgcgtaagcagcaacgccgggagctgctcttcaacgaagtggtgataatgcgcgattaccagcattttaatgtggtggaaatgtacaagtcatacttagtaggagaagaactgtgggtcctgatggagttccttcaaggtggcgcactcaccgatatcgtctcacaggtgcggctgaacgaggaacagattgccactgtctgtgaagccgtgctgcaggctctggcatacctccacgcacagggcgtcatccatcgcgacatcaagagcgattccattctgctgacgttggatggcagagtcaagctttcggactttgggttctgcgctcagatttctaaagacgtgcctaagcgaaaatcactggttggaaccccttattggatggctcctgaagtcatcagtcggagcttgtacgcaaccgaggttgacatctggagtttgggaatcatggtgatcgaaatggttgacggcgagcctccatatttttctgattctccagtgcaagccatgaagcgtctgcgggattccccacctcccaaactaaagaactctcataaagtctctcctgtactgcgcgattttctggaacggatgcttgtgcgcgatccacaggagcgagcaaccgctcaggaactgctggaccatccttttctcctacaaacggggcttcccgagtgtctggttccactgattcagctctatagaaagcagacctccacctgctag

SEQ ID NO: 97331 - DNA, 2046 bp, Artificial Sequence
  derived and/or modified sequence
atgttccggaagaagaagaagaagcggcccgagatcagcgccccccagaatttccagcatcgagtacacacgagttttgacccaaaagaaggaaaattcgtcggacttcccccccagtggcaaaatatcctggataccctgagacggccaaagcccgtggtagatccgtctcggatcaccagagttcaacttcagcccatgaagactgtggtgcgaggcagtgcgatgccagtggacggctatatctctgggcttctcaatgacatccagaagctatccgttatatcgagtaataccctaagagggaggtcacctaccagtcggcgaagggctcagagcctgggcttgcttggcgacgaacattgggctaccgatcctgacatgtacttgcaatctccacagtccgagagaacagatccccacggactatatttgtcgtgcaatggaggaacccctgctggtcataagcagatgccgtggccagagccgcagtcccccagggttcttcctaatgggttagctgcaaaggcacaatcactcggacccgcggaatttcagggcgcttctcagcgctgtctgcaacttggcgcttgtttgcagagctcaccccctggggccagcccaccaacagggactaatcgccacggcatgaaagccgcaaaacatggctccgaggaagccaggccacagtcttgtctggttggttctgcaacaggcaggcccggtggagaaggttcacccagtccaaagacccgcgagtcttctctcaaaaggaggctatttcgaagcatgttcttgtccaccgccgcaacagcgcccccatcatctagtaagcctggcccccccccacagagcaagccaaactcctcttttcgaccaccccaaaaggacaaccctccatcactcgttgctaaggcacaatctcttccgagcgaccaaccagtggggacattcagcccgttgactacctctgatacctcttctccacagaagtccctccgaacggcccccgccaccggacaactacccggtcgcagctccccggctggttcccccagaacctggcatgcccaaatctccactagcaacctttatcttccccaggatcccactgtggcgaagggcgcattagcgggcgaggacaccggcgttgtgacacacgagcagttcaaagcagccttgaggatggtggtcgaccaaggcgatccccgcctactcttggactcttacgttaaaattggagaagggtctaccggcatcgtctgcctggcccgcgaaaaacactccgggcgccaagtggccgtgaagatgatggacctacggaaacagcagagaagagaactgctcttcaacgaggtggtcatcatgagagactatcagcacttcaacgtggtcgagatgtacaaaagttatttggtcggagaagaactgtgggtgttaatggagtttttgcagggtggagcgctgaccgacatcgtatcccaggttcgcctgaatgaggaacagatagctactgtgtgtgaggctgttttgcaggctctagcatacctccacgcacagggcgttatccacagagatattaagtcagacagcatcctcctgacccttgatgggcgcgtcaagttgtccgacttcggcttctgtgcccagatctcaaaggatgtacccaaaagaaagtccctggtggggactccatactggatggccccagaagtcatctcaagatccctgtacgccactgaagtcgacatctggtctctgggcatcatggtcatagagatggtcgacggtgagcctccctacttcagcgacagccctgtacaagcaatgaagcggttacgcgactcgcccccaccgaaattgaagaactcccacaaggtttctcctgtgctccgagatttcctggagcgcatgctggttcgcgacccccaggaaagggctaccgcccaagagttgctcgaccatcccttcctcctgcagacgggactcccagagtgcctagttcccctcatccagttgtatcgtaagcaaacctcaacttgctag

SEQ ID NO: 97332 - DNA, 2046 bp, Artificial Sequence
  derived and/or modified sequence
atgttccggaagaagaagaagaagcggcccgagatcagcgccccccagaactttcagcatcgagtacatactagcttcgaccccaaggaaggcaaatttgttggattgccccctcagtggcagaacatccttgatacgctgaggagaccgaagccagtcgtggacccatcaaggattacccgagtgcagttacagcctatgaagactgtagtccgcggtagtgcaatgccagtcgacgggtacatctcaggcctcctaaacgacatccagaagctgtctgtcatttcaagtaataccctgcgcggccgttcacccacctctcgccggcgggcccaatctctcggattgcttggggacgagcattgggcgactgaccccgacatgtatcttcagagccctcagagtgaaagaacagatccacatgggctgtatctcagttgcaacgggggcacacctgccggccataaacagatgccttggcccgaaccccagagccctagggtgctccccaacgggctcgccgcaaaggcccagagcctgggacccgccgagtttcaaggagcctcccagaggtgcctgcagctgggagcctgtctccagagctcccccccaggggcgtcacctcctaccggcacaaatcgccacggcatgaaggccgcaaagcacggctctgaggaagcccgcccccagtcctgtctggttggcagcgctaccggtcggccgggcggagagggttccccttcacccaagacacgcgaaagctctctgaaacgcaggctgtttagaagcatgttcctttccactgccgcaacagctcccccctcttcttctaagcccgggccgcccccgcagtcgaaacctaacagctcctttaggcccccccagaaggataacccaccctcccttgttgcgaaggcccagtcattaccctctgatcaacctgtggggaccttttccccgcttactacctccgacacctcctcacctcagaaatccctgcgaaccgctccagcgactgggcaattgccaggccggtcatcccccgccggatctccccggacctggcacgcccagatcagtacaagcaacctttacctcccacaggaccccaccgttgccaaaggcgcgctcgcaggagaagatacgggggtagttacccatgagcagttcaaagctgctcttcgcatggtcgtggatcaaggcgatccacgtttgcttttggactcttatgtgaagattggagaaggctccaccgggatcgtttgtttagcaagggagaaacacagtggtcgccaggtggcggtcaaaatgatggacctacggaagcagcagcgtagagagctactgttcaacgaagtcgtgattatgagagactaccagcatttcaatgtggtggaaatgtataagtcttacttggtgggcgaagagctctgggtgttgatggagttcttacaggggggcgctctgacagacatcgtctcacaggtgcggctgaatgaagaacaaatcgctacagtttgtgaagctgtattacaggccctagcttacctgcacgcccagggcgtgatccacagggacatcaagtccgatagcattcttctgaccctggatggtcgcgtaaaactaagtgacttcggcttctgtgcacagatcagcaaggatgttcctaagagaaaaagcctggtggggacaccatactggatggcaccggaggtgattagccggtccctgtacgccaccgaggtcgatatttggtcactgggaatcatggttatagagatggttgatggggaacctccctatttcagtgacagcccagttcaagcaatgaagcggctgagagatagccccccgcctaaactgaaaaatagtcataaggtcagccccgtcctccgggacttcctagaaagaatgctggtcagagatccccaggagagagccacagcacaggaactcttggaccacccgttcctgctgcagactggcctaccagaatgtttggttccgctgatccaactttaccgcaagcaaacctctacctgctag

SEQ ID NO: 97333 - DNA, 3865 bp, Artificial Sequence
  derived and/or modified sequence
gtgccgtccccctgctggggacagcagctgggtccagcagagagctggctgggggcttgacaggagtttatcctaactgatgctgggtgggcgcaggccctgagatgggcgtcagggagaggggacgccagacacacggcctgagcagggtgaggagcagctgccagccccggcaggcccaggccctgtctgggtgcacaggacagagacacagcaagatgcccagggagtgccgcttcctgggctagagacaagcaccagcctgcagtggagaacgcaggaccccgctgcccagaaggagcagccacggcctgcggaggactggcccagcaaggtcccaggtcttccctctcctcagcgcctaagagagaggcccagtgcgggtgaggagtcgcgaggaagaggcggaaggcgccggaaggcaccatgttccgcaagaaaaagaagaaacgccctgagatctcagcgccacagaacttccagcaccgtgtccacacctccttcgaccccaaagaaggcaagtttgtgggcctccccccacaatggcagaacatcctggacacactgcggcgccccaagcccgtggtggacccttcgcgaatcacacgggtgcagctccagcccatgaagacagtggtgcggggcagcgcgatgcctgtggatggctacatctcggggctgctcaacgacatccagaagttgtcagtcatcagctccaacaccctgcgtggccgcagccccaccagccggcggcgggcacagtccctggggctgctgggggatgagcactgggccaccgacccagacatgtacctccagagcccccagtctgagcgcactgacccccacggcctctacctcagctgcaacgggggcacaccagcaggccacaagcagatgccgtggcccgagccacagagcccacgggtcctgcccaatgggctggctgcaaaggcacagtccctgggccccgccgagtttcagggtgcctcgcagcgctgtctgcagctgggtgcctgcctgcagagctccccaccaggagcctcgccccccacgggcaccaataggcatggaatgaaggctgccaagcatggctctgaggaggcccggccacagtcctgcctggtgggctcagccacaggcaggccaggtggggaaggcagccctagccctaagacccgggagagcagcctgaagcgcaggctattccgaagcatgttcctgtccactgctgccacagcccctccaagcagcagcaagccaggccctccaccacagagcaagcccaactcctctttccgaccgccgcagaaagacaaccccccaagcctggtggccaaggcccagtccttgccctcggaccagccggtggggaccttcagccctctgaccacttcggataccagcagcccccagaagtccctccgcacagccccggccacaggccagcttccaggccggtcttccccagcgggatccccccgcacctggcacgcccagatcagcaccagcaacctgtacctgccccaggaccccacggttgccaagggtgccctggctggtgaggacacaggtgttgtgacacatgagcagttcaaggctgcgctcaggatggtggtggaccagggtgacccccggctgctgctggacagctacgtgaagattggcgagggctccaccggcatcgtctgcttggcccgggagaagcactcgggccgccaggtggccgtcaagatgatggacctcaggaagcagcagcgcagggagctgctcttcaacgaggtggtgatcatgcgggactaccagcacttcaacgtggtggagatgtacaagagctacctggtgggcgaggagctgtgggtgctcatggagttcctgcagggaggagccctcacagacatcgtctcccaagtcaggctgaatgaggagcagattgccactgtgtgtgaggctgtgctgcaggccctggcctacctgcatgctcagggtgtcatccaccgggacatcaagagtgactccatcctgctgaccctcgatggcagggtgaagctctcggacttcggattctgtgctcagatcagcaaagacgtccctaagaggaagtccctggtgggaaccccctactggatggctcctgaagtgatctccaggtctttgtatgccactgaggtggatatctggtctctgggcatcatggtgattgagatggtagatggggagccaccgtacttcagtgactccccagtgcaagccatgaagaggctccgggacagccccccacccaagctgaaaaactctcacaaggtctccccagtgctgcgagacttcctggagcggatgctggtgcgggacccccaagagagagccacagcccaggagctcctagaccaccccttcctgctgcagacagggctacctgagtgcctggtgcccctgatccagctctaccgaaagcagacctccacctgctgagcccaccccaagtatgcctgccacctacgcccacaggcagggcacactgggcagccagcctgccggcaggacttgcctgcctcctcctctcagtattctctccaaagattgaaatgtgaagccccagccccaccctctgcccttcagcctactgggccaggccggacctgccccctcagtgtctctccctcccgagtccccagatggagacccctttctacaggatgaccccttgatatttgcacagggatatttctaagaaacgcagaggccagcgttcctggcctctgcagccaacacagtagaaaaggctgctgtggttttttaaaggcagttgtccactagtgtcctaggccactgcagagggcagactgctggtctccacagatacctgctgttctcagctccagcttcaaacctcgagtctcgagagggccacggggtggtttttatgaccggaatcccgcttcctccctcacgtctgatgtcctgaaggtgcagtcccacctgtacagcccctccccgcccagaactgtgaatggcctgctccaggccatggctgggggcagggagtgaggggacaatttctgagtgaaagagaaagaatggggtcggtggtgaaggtgctctcactttacagaatggagagaacatcgtgtgtgtgtgtgtgtgtgtgtgtgtgtgtgtgtgtgtgtaaggggaggaaagccaccttgacagcccaggtccctccaggtcacccacagccagtttcaggaaggctgcccctctctcccactaagttctggcctgaagggacctgctttcttggcctggcttccacctctccactcctgtgtctacctggccagtggagtggtccatgctaagtctaacactcctgggagctcaggaggcttctgagcttctcctgtactgtgcatcgtgagggccagagacaggaatgtaaggattggcaactgtgttacctttcaagtttatctcaataaccaggtcatcagggacccattgttctcttcagaaccctatctgggagagaaggcgaaccacctccgggtttccatcatgtcaaggtcacaggcatccatgtgtgcaaaccatctgccccagctgcctccacagactgctgtctccttgtcctcctcggccctgccccacttcagggctgctgtgagatggaattccaggaaagaacttcaggtgtctggaccctttctatctagataatatttttagattcttctgctccctagtgacctacctgggggcaaagaaattgcaaggacttttttttaagggtcagagttttcaaaacaaaagcatcttccctagaaatttttgtgaattgtttgcacttgtgcctgttttaaattaaattgagtgttcaaagcca

SEQ ID NO: 97334 - DNA, 3878 bp, Artificial Sequence
  derived and/or modified sequence
aaagaccagctatgcagcttctttcatggcctatttttattatctccttctcttaaatctgggctcagaatccacgatccctatgattgtaacaagaacaatcaagctttgaagatagtggacttttcctacagtgttgaccttagggtgcagctggatgtttttaccctcagcggctttcggactgtacagatcctggaaggacaaaagatcctggctaactgttcttctccctaccagggagtgccgcttcctgggctagagacaagcaccagcctgcagtggagaacgcaggaccccgctgcccagaaggagcagccacggcctgcggaggactggcccagcaaggtcccaggtcttccctctcctcagcgcctaagagagaggcccagtgcgggtgaggagtcgcgaggaagaggcggaaggcgccggaaggcaccatgttccgcaagaaaaagaagaaacgccctgagatctcagcgccacagaacttccagcaccgtgtccacacctccttcgaccccaaagaaggcaagtttgtgggcctccccccacaatggcagaacatcctggacacactgcggcgccccaagcccgtggtggacccttcgcgaatcacacgggtgcagctccagcccatgaagacagtggtgcggggcagcgcgatgcctgtggatggctacatctcggggctgctcaacgacatccagaagttgtcagtcatcagctccaacaccctgcgtggccgcagccccaccagccggcggcgggcacagtccctggggctgctgggggatgagcactgggccaccgacccagacatgtacctccagagcccccagtctgagcgcactgacccccacggcctctacctcagctgcaacgggggcacaccagcaggccacaagcagatgccgtggcccgagccacagagcccacgggtcctgcccaatgggctggctgcaaaggcacagtccctgggccccgccgagtttcagggtgcctcgcagcgctgtctgcagctgggtgcctgcctgcagagctccccaccaggagcctcgccccccacgggcaccaataggcatggaatgaaggctgccaagcatggctctgaggaggcccggccacagtcctgcctggtgggctcagccacaggcaggccaggtggggaaggcagccctagccctaagacccgggagagcagcctgaagcgcaggctattccgaagcatgttcctgtccactgctgccacagcccctccaagcagcagcaagccaggccctccaccacagagcaagcccaactcctctttccgaccgccgcagaaagacaaccccccaagcctggtggccaaggcccagtccttgccctcggaccagccggtggggaccttcagccctctgaccacttcggataccagcagcccccagaagtccctccgcacagccccggccacaggccagcttccaggccggtcttccccagcgggatccccccgcacctggcacgcccagatcagcaccagcaacctgtacctgccccaggaccccacggttgccaagggtgccctggctggtgaggacacaggtgttgtgacacatgagcagttcaaggctgcgctcaggatggtggtggaccagggtgacccccggctgctgctggacagctacgtgaagattggcgagggctccaccggcatcgtctgcttggcccgggagaagcactcgggccgccaggtggccgtcaagatgatggacctcaggaagcagcagcgcagggagctgctcttcaacgaggtggtgatcatgcgggactaccagcacttcaacgtggtggagatgtacaagagctacctggtgggcgaggagctgtgggtgctcatggagttcctgcagggaggagccctcacagacatcgtctcccaagtcaggctgaatgaggagcagattgccactgtgtgtgaggctgtgctgcaggccctggcctacctgcatgctcagggtgtcatccaccgggacatcaagagtgactccatcctgctgaccctcgatggcagggtgaagctctcggacttcggattctgtgctcagatcagcaaagacgtccctaagaggaagtccctggtgggaaccccctactggatggctcctgaagtgatctccaggtctttgtatgccactgaggtggatatctggtctctgggcatcatggtgattgagatggtagatggggagccaccgtacttcagtgactccccagtgcaagccatgaagaggctccgggacagccccccacccaagctgaaaaactctcacaaggtctccccagtgctgcgagacttcctggagcggatgctggtgcgggacccccaagagagagccacagcccaggagctcctagaccaccccttcctgctgcagacagggctacctgagtgcctggtgcccctgatccagctctaccgaaagcagacctccacctgctgagcccaccccaagtatgcctgccacctacgcccacaggcagggcacactgggcagccagcctgccggcaggacttgcctgcctcctcctctcagtattctctccaaagattgaaatgtgaagccccagccccaccctctgcccttcagcctactgggccaggccggacctgccccctcagtgtctctccctcccgagtccccagatggagacccctttctacaggatgaccccttgatatttgcacagggatatttctaagaaacgcagaggccagcgttcctggcctctgcagccaacacagtagaaaaggctgctgtggttttttaaaggcagttgtccactagtgtcctaggccactgcagagggcagactgctggtctccacagatacctgctgttctcagctccagcttcaaacctcgagtctcgagagggccacggggtggtttttatgaccggaatcccgcttcctccctcacgtctgatgtcctgaaggtgcagtcccacctgtacagcccctccccgcccagaactgtgaatggcctgctccaggccatggctgggggcagggagtgaggggacaatttctgagtgaaagagaaagaatggggtcggtggtgaaggtgctctcactttacagaatggagagaacatcgtgtgtgtgtgtgtgtgtgtgtgtgtgtgtgtgtgtgtgtaaggggaggaaagccaccttgacagcccaggtccctccaggtcacccacagccagtttcaggaaggctgcccctctctcccactaagttctggcctgaagggacctgctttcttggcctggcttccacctctccactcctgtgtctacctggccagtggagtggtccatgctaagtctaacactcctgggagctcaggaggcttctgagcttctcctgtactgtgcatcgtgagggccagagacaggaatgtaaggattggcaactgtgttacctttcaagtttatctcaataaccaggtcatcagggacccattgttctcttcagaaccctatctgggagagaaggcgaaccacctccgggtttccatcatgtcaaggtcacaggcatccatgtgtgcaaaccatctgccccagctgcctccacagactgctgtctccttgtcctcctcggccctgccccacttcagggctgctgtgagatggaattccaggaaagaacttcaggtgtctggaccctttctatctagataatatttttagattcttctgctccctagtgacctacctgggggcaaagaaattgcaaggacttttttttaagggtcagagttttcaaaacaaaagcatcttccctagaaatttttgtgaattgtttgcacttgtgcctgttttaaattaaattgagtgttcaaagcc

SEQ ID NO: 97335 - DNA, 3795 bp, Artificial Sequence
  derived and/or modified sequence
aaagaccagctatgcagcttctttcatggcctatttttattatctccttctcttaaatctgggctcagaatccacgatccctatgattgtaacaagaacaatcaagctttgaagatagtggacttttcctacagtgttgaccttagggtgcagctggatgtttttaccctcagcggctttcggactgtacagatcctggaaggacaaaagatcctggctaactgttcttctccctaccaggcctgcggaggactggcccagcaaggtcccaggtcttccctctcctcagcgcctaagagagaggcccagtgcgggtgaggagtcgcgaggaagaggcggaaggcgccggaaggcaccatgttccgcaagaaaaagaagaaacgccctgagatctcagcgccacagaacttccagcaccgtgtccacacctccttcgaccccaaagaaggcaagtttgtgggcctccccccacaatggcagaacatcctggacacactgcggcgccccaagcccgtggtggacccttcgcgaatcacacgggtgcagctccagcccatgaagacagtggtgcggggcagcgcgatgcctgtggatggctacatctcggggctgctcaacgacatccagaagttgtcagtcatcagctccaacaccctgcgtggccgcagccccaccagccggcggcgggcacagtccctggggctgctgggggatgagcactgggccaccgacccagacatgtacctccagagcccccagtctgagcgcactgacccccacggcctctacctcagctgcaacgggggcacaccagcaggccacaagcagatgccgtggcccgagccacagagcccacgggtcctgcccaatgggctggctgcaaaggcacagtccctgggccccgccgagtttcagggtgcctcgcagcgctgtctgcagctgggtgcctgcctgcagagctccccaccaggagcctcgccccccacgggcaccaataggcatggaatgaaggctgccaagcatggctctgaggaggcccggccacagtcctgcctggtgggctcagccacaggcaggccaggtggggaaggcagccctagccctaagacccgggagagcagcctgaagcgcaggctattccgaagcatgttcctgtccactgctgccacagcccctccaagcagcagcaagccaggccctccaccacagagcaagcccaactcctctttccgaccgccgcagaaagacaaccccccaagcctggtggccaaggcccagtccttgccctcggaccagccggtggggaccttcagccctctgaccacttcggataccagcagcccccagaagtccctccgcacagccccggccacaggccagcttccaggccggtcttccccagcgggatccccccgcacctggcacgcccagatcagcaccagcaacctgtacctgccccaggaccccacggttgccaagggtgccctggctggtgaggacacaggtgttgtgacacatgagcagttcaaggctgcgctcaggatggtggtggaccagggtgacccccggctgctgctggacagctacgtgaagattggcgagggctccaccggcatcgtctgcttggcccgggagaagcactcgggccgccaggtggccgtcaagatgatggacctcaggaagcagcagcgcagggagctgctcttcaacgaggtggtgatcatgcgggactaccagcacttcaacgtggtggagatgtacaagagctacctggtgggcgaggagctgtgggtgctcatggagttcctgcagggaggagccctcacagacatcgtctcccaagtcaggctgaatgaggagcagattgccactgtgtgtgaggctgtgctgcaggccctggcctacctgcatgctcagggtgtcatccaccgggacatcaagagtgactccatcctgctgaccctcgatggcagggtgaagctctcggacttcggattctgtgctcagatcagcaaagacgtccctaagaggaagtccctggtgggaaccccctactggatggctcctgaagtgatctccaggtctttgtatgccactgaggtggatatctggtctctgggcatcatggtgattgagatggtagatggggagccaccgtacttcagtgactccccagtgcaagccatgaagaggctccgggacagccccccacccaagctgaaaaactctcacaaggtctccccagtgctgcgagacttcctggagcggatgctggtgcgggacccccaagagagagccacagcccaggagctcctagaccaccccttcctgctgcagacagggctacctgagtgcctggtgcccctgatccagctctaccgaaagcagacctccacctgctgagcccaccccaagtatgcctgccacctacgcccacaggcagggcacactgggcagccagcctgccggcaggacttgcctgcctcctcctctcagtattctctccaaagattgaaatgtgaagccccagccccaccctctgcccttcagcctactgggccaggccggacctgccccctcagtgtctctccctcccgagtccccagatggagacccctttctacaggatgaccccttgatatttgcacagggatatttctaagaaacgcagaggccagcgttcctggcctctgcagccaacacagtagaaaaggctgctgtggttttttaaaggcagttgtccactagtgtcctaggccactgcagagggcagactgctggtctccacagatacctgctgttctcagctccagcttcaaacctcgagtctcgagagggccacggggtggtttttatgaccggaatcccgcttcctccctcacgtctgatgtcctgaaggtgcagtcccacctgtacagcccctccccgcccagaactgtgaatggcctgctccaggccatggctgggggcagggagtgaggggacaatttctgagtgaaagagaaagaatggggtcggtggtgaaggtgctctcactttacagaatggagagaacatcgtgtgtgtgtgtgtgtgtgtgtgtgtgtgtgtgtgtgtgtaaggggaggaaagccaccttgacagcccaggtccctccaggtcacccacagccagtttcaggaaggctgcccctctctcccactaagttctggcctgaagggacctgctttcttggcctggcttccacctctccactcctgtgtctacctggccagtggagtggtccatgctaagtctaacactcctgggagctcaggaggcttctgagcttctcctgtactgtgcatcgtgagggccagagacaggaatgtaaggattggcaactgtgttacctttcaagtttatctcaataaccaggtcatcagggacccattgttctcttcagaaccctatctgggagagaaggcgaaccacctccgggtttccatcatgtcaaggtcacaggcatccatgtgtgcaaaccatctgccccagctgcctccacagactgctgtctccttgtcctcctcggccctgccccacttcagggctgctgtgagatggaattccaggaaagaacttcaggtgtctggaccctttctatctagataatatttttagattcttctgctccctagtgacctacctgggggcaaagaaattgcaaggacttttttttaagggtcagagttttcaaaacaaaagcatcttccctagaaatttttgtgaattgtttgcacttgtgcctgttttaaattaaattgagtgttcaaagcc

SEQ ID NO: 97336 - DNA, 4020 bp, Artificial Sequence
  derived and/or modified sequence
attttgggagctggaaacttggagctgcacctgagtcccgccccttctagctctcccctccctaccttgggctccaggaagatgggacttgctgtgagtctgctgccaccccctaaagatatggaagacgctgtgggggccagaagtgcccggggggctgtggcagcaggcagagtgcaatagcagatatggtggtcaggctgcctgtgtgtgtcctctggaggtgttgggacagaagggcagtcttgtccgagctgactggagtcctcccgggctggctctgaactcatctcccacggggatgtttcggtaaaggagtggcttctggggtcggagtggcatttggagagcgaggctggattggcttaggctggcctgggcagggagtgccgcttcctgggctagagacaagcaccagcctgcagtggagaacgcaggaccccgctgcccagaaggagcagccacggcctgcggaggactggcccagcaaggtcccaggtcttccctctcctcagcgcctaagagagaggcccagtgcgggtgaggagtcgcgaggaagaggcggaaggcgccggaaggcaccatgttccgcaagaaaaagaagaaacgccctgagatctcagcgccacagaacttccagcaccgtgtccacacctccttcgaccccaaagaaggcaagtttgtgggcctccccccacaatggcagaacatcctggacacactgcggcgccccaagcccgtggtggacccttcgcgaatcacacgggtgcagctccagcccatgaagacagtggtgcggggcagcgcgatgcctgtggatggctacatctcggggctgctcaacgacatccagaagttgtcagtcatcagctccaacaccctgcgtggccgcagccccaccagccggcggcgggcacagtccctggggctgctgggggatgagcactgggccaccgacccagacatgtacctccagagcccccagtctgagcgcactgacccccacggcctctacctcagctgcaacgggggcacaccagcaggccacaagcagatgccgtggcccgagccacagagcccacgggtcctgcccaatgggctggctgcaaaggcacagtccctgggccccgccgagtttcagggtgcctcgcagcgctgtctgcagctgggtgcctgcctgcagagctccccaccaggagcctcgccccccacgggcaccaataggcatggaatgaaggctgccaagcatggctctgaggaggcccggccacagtcctgcctggtgggctcagccacaggcaggccaggtggggaaggcagccctagccctaagacccgggagagcagcctgaagcgcaggctattccgaagcatgttcctgtccactgctgccacagcccctccaagcagcagcaagccaggccctccaccacagagcaagcccaactcctctttccgaccgccgcagaaagacaaccccccaagcctggtggccaaggcccagtccttgccctcggaccagccggtggggaccttcagccctctgaccacttcggataccagcagcccccagaagtccctccgcacagccccggccacaggccagcttccaggccggtcttccccagcgggatccccccgcacctggcacgcccagatcagcaccagcaacctgtacctgccccaggaccccacggttgccaagggtgccctggctggtgaggacacaggtgttgtgacacatgagcagttcaaggctgcgctcaggatggtggtggaccagggtgacccccggctgctgctggacagctacgtgaagattggcgagggctccaccggcatcgtctgcttggcccgggagaagcactcgggccgccaggtggccgtcaagatgatggacctcaggaagcagcagcgcagggagctgctcttcaacgaggtggtgatcatgcgggactaccagcacttcaacgtggtggagatgtacaagagctacctggtgggcgaggagctgtgggtgctcatggagttcctgcagggaggagccctcacagacatcgtctcccaagtcaggctgaatgaggagcagattgccactgtgtgtgaggctgtgctgcaggccctggcctacctgcatgctcagggtgtcatccaccgggacatcaagagtgactccatcctgctgaccctcgatggcagggtgaagctctcggacttcggattctgtgctcagatcagcaaagacgtccctaagaggaagtccctggtgggaaccccctactggatggctcctgaagtgatctccaggtctttgtatgccactgaggtggatatctggtctctgggcatcatggtgattgagatggtagatggggagccaccgtacttcagtgactccccagtgcaagccatgaagaggctccgggacagccccccacccaagctgaaaaactctcacaaggtctccccagtgctgcgagacttcctggagcggatgctggtgcgggacccccaagagagagccacagcccaggagctcctagaccaccccttcctgctgcagacagggctacctgagtgcctggtgcccctgatccagctctaccgaaagcagacctccacctgctgagcccaccccaagtatgcctgccacctacgcccacaggcagggcacactgggcagccagcctgccggcaggacttgcctgcctcctcctctcagtattctctccaaagattgaaatgtgaagccccagccccaccctctgcccttcagcctactgggccaggccggacctgccccctcagtgtctctccctcccgagtccccagatggagacccctttctacaggatgaccccttgatatttgcacagggatatttctaagaaacgcagaggccagcgttcctggcctctgcagccaacacagtagaaaaggctgctgtggttttttaaaggcagttgtccactagtgtcctaggccactgcagagggcagactgctggtctccacagatacctgctgttctcagctccagcttcaaacctcgagtctcgagagggccacggggtggtttttatgaccggaatcccgcttcctccctcacgtctgatgtcctgaaggtgcagtcccacctgtacagcccctccccgcccagaactgtgaatggcctgctccaggccatggctgggggcagggagtgaggggacaatttctgagtgaaagagaaagaatggggtcggtggtgaaggtgctctcactttacagaatggagagaacatcgtgtgtgtgtgtgtgtgtgtgtgtgtgtgtgtgtgtgtgtaaggggaggaaagccaccttgacagcccaggtccctccaggtcacccacagccagtttcaggaaggctgcccctctctcccactaagttctggcctgaagggacctgctttcttggcctggcttccacctctccactcctgtgtctacctggccagtggagtggtccatgctaagtctaacactcctgggagctcaggaggcttctgagcttctcctgtactgtgcatcgtgagggccagagacaggaatgtaaggattggcaactgtgttacctttcaagtttatctcaataaccaggtcatcagggacccattgttctcttcagaaccctatctgggagagaaggcgaaccacctccgggtttccatcatgtcaaggtcacaggcatccatgtgtgcaaaccatctgccccagctgcctccacagactgctgtctccttgtcctcctcggccctgccccacttcagggctgctgtgagatggaattccaggaaagaacttcaggtgtctggaccctttctatctagataatatttttagattcttctgctccctagtgacctacctgggggcaaagaaattgcaaggacttttttttaagggtcagagttttcaaaacaaaagcatcttccctagaaatttttgtgaattgtttgcacttgtgcctgttttaaattaaattgagtgttcaaagc

SEQ ID NO: 97337 - DNA, 2046 bp, Artificial Sequence
  derived and/or modified sequence
atgtttcgaaagaagaagaaaaagcggcctgaaatctctgcgcctcagaatttccagcaccgggttcacacctcctttgatccgaaggaaggcaagtttgtcgggctgccccctcagtggcagaatatactggacaccttgcggagacctaaacccgtggtcgatccttctaggatcaccagagttcaactccagcccatgaagacagtggtacggggtagcgccatgcccgtggatggatatataagcgggctgctcaatgatatccagaagctgtccgtgataagcagtaatacactgcgaggtcgttcacccaccagtcgcaggcgggctcagtcgcttggactgttgggtgacgaacattgggcaacagaccctgatatgtacttacagtcccctcaatcagaaaggaccgacccacacggactgtatctgtcttgcaacgggggaacgcccgcaggccataagcagatgccgtggcccgagccacaatcgccccgagtcctacccaacggtctggcagcaaaggcacagtctttaggtccagctgagttccagggcgcatcccagcggtgtcttcagctcggcgcttgtctccagtcatctcccccaggggctagccccccaacgggcacgaaccggcacggaatgaaagcagctaagcatgggagcgaggaagctcgaccccagagttgtctcgtgggaagtgcaactgggaggcctggcggagagggctcgcccagccctaagacacgggagagctcgctcaagcgtagacttttcagaagtatgttcctgtctactgccgctaccgccccaccatccagtagtaaacccggtccgcctccacagtcgaaaccaaatagttcctttagaccccctcagaaggacaatccgccaagtctggtggcgaaggcccagagtctcccctcagaccagccagtgggaacgttttcgccactgactacctcggatacatccagcccacagaaaagcctgagaaccgcacccgcaactggtcagctgccgggtaggagcagccctgccggatccccgagaacctggcatgcacagatctcaacgtcaaatctgtacctgccgcaggatccgacggtcgcgaaaggcgctctggcgggagaggacacaggtgtcgtcacccatgaacagtttaaggccgctctgcggatggtagtggatcagggggatcccagattgctcctggactcttatgttaagattggcgaaggcagtactggtattgtctgcctcgccagggagaagcacagtggtcgccaggtagctgtgaagatgatggacctcagaaagcagcaacgacgggagttgctgttcaacgaagtggtgatcatgcgcgactatcagcatttcaatgtggtggagatgtacaaatcctacttggtcggagaggaactctgggtgctgatggaatttcttcagggcggagccttgacggatatcgtctcccaagttcgccttaacgaggagcagatagctaccgtatgcgaagccgtcctgcaggcactggcctatctgcacgcgcagggtgttattcacagagacatcaaatctgacagcatcttattaacattagacggccgtgttaagttgtctgattttgggttttgcgctcagatatccaaagacgttccaaagcggaagagcttggtagggactccctactggatggcccctgaagtgatttcacgctctctgtatgccacagaggtagatatctggagcttagggatcatggttattgaaatggtggatggcgagccaccctacttctctgatagccccgtgcaagcgatgaaaagactgcgcgactcccctccccctaaacttaaaaactcacacaaggtgtcgcctgttctcagggatttcctggagcgcatgttagtccgggaccctcaggaaagagccactgcacaggagttgttggatcatccctttctcttgcagactggcttacctgagtgcctggtgcccctaatccagctgtacaggaaacagacctccacctgctag

SEQ ID NO: 97338 - DNA, 2046 bp, Artificial Sequence
  derived and/or modified sequence
atgttccgcaagaagaagaaaaagcgacctgaaatttcagctccccagaacttccagcatagagttcatacatcttttgatccaaaggagggtaagttcgtggggcttccaccccagtggcagaacatcctggacactcttaggaggccaaagcctgtggttgatccaagccgaattacccgcgtgcagctccagccaatgaaaactgtcgtgagaggcagcgctatgcctgtagatggctacattagcgggctgctgaacgacattcaaaaactgtctgtgatttcgagcaatactcttaggggccgttcccctacctcgcggcgtagagcccagtctctcggcctgctcggcgatgaacactgggccacagaccccgatatgtacttacaatccccgcagtcagagaggactgatccacatgggctctatctgagctgcaatggaggaactcccgctggccataagcagatgccctggccagagccacagtccccaagggtccttcccaatggacttgccgctaaggcccagagcctcggccctgccgagtttcagggagcttctcagcggtgcctgcaactgggcgcttgtcttcagagcagtcctcctggagctagccctccaaccggaactaataggcacggaatgaaagcagccaagcatggctcggaggaagcacgtcctcagagttgtctggttggttccgctactggaaggcccggaggtgagggctcacctagtccaaagacgcgtgaaagttccctgaagcggagactatttcgctcaatgttcctgtctactgccgctaccgcccctccaagtagttccaagcccggtcccccaccccagagcaagcccaacagtagtttcaggccccctcagaaagacaatcccccaagcctcgtggctaaagcgcagagcctacccagcgaccagccggtcggcacattctcccccctcacaacttccgacacaagctctccccagaaaagtcttaggaccgcgccagctacgggtcaacttcccggacgctcctctcctgctgggagccctcgaacctggcatgcccagattagcacatccaacttgtatctgccacaggaccctacagtcgcaaagggagcactggctggtgaagacaccggcgtggtgactcatgagcagttcaaggccgcacttcgcatggtagtggatcaaggagatcccagacttctgctggacagttatgtgaagatcggggagggctccaccggcatcgtttgcctggcgagggagaaacacagtggcagacaagtcgcagtgaagatgatggacctaagaaagcagcaacgtagggaattgcttttcaatgaagtggtaattatgcgggattaccagcattttaacgtagttgaaatgtacaagtcttacctggtgggtgaggaactgtgggtgctgatggagttcctgcagggcggagcactaaccgacattgttagccaggtgagattgaatgaagagcaaatagcaactgtctgcgaggctgtgctgcaagctctggcgtacctgcatgcccagggtgtgatacaccgggatatcaaatccgactctatcttgcttacacttgacggcagggtaaagttgtctgacttcggtttttgtgcccaaattagtaaggatgtccctaaacgcaagtctttagtgggaaccccatactggatggccccagaagtgatctctaggtcactgtacgcaacggaagtcgatatctggtccctgggcattatggtgattgagatggtggatggtgaacccccatacttttcagatagtcccgtgcaggctatgaagcgactgcgcgatagtccacctcccaaactgaaaaactctcacaaagtatctcctgtcctccgtgactttctggagcgcatgcttgttcgcgacccacaggaacgcgctacagcacaggaactgttagatcacccatttctactccagaccggcctgcccgagtgcctggtgccccttattcagctttatagaaaacagacctcgacatgctag

SEQ ID NO: 97339 - DNA, 2046 bp, Artificial Sequence
  derived and/or modified sequence
atgtttcgtaaaaagaagaagaaaaggcctgaaatttccgcccctcagaactttcagcacagagtacataccagtttcgacccaaaagagggcaagttcgtgggcttgcctccacagtggcaaaacattctcgacacactgaggcgtccaaagcccgtcgtggatccaagcaggatcacacgggtgcagttacagcccatgaagaccgtagtgagagggtccgccatgccagttgacgggtatattagcggacttctgaacgacatccagaagctcagcgtgatttcgtccaatacgttgcgtggacgatctcccacctctaggaggcgcgcacagagcctcggactcttgggggacgaacattgggctacagaccccgacatgtatctccagtcccctcagtctgaacggaccgacccacacggcctgtatctgtcttgtaatggtgggactcctgcaggccataaacagatgccatggcccgagccgcagtcacccagagtcttgccaaacgggctggcagccaaagctcaaagcttggggcctgccgagtttcaaggcgcttcccaacgctgcttgcagttgggagcctgtctccagtcgagccccccaggggctagccccccaacagggactaataggcacgggatgaaggcggctaagcatggatccgaggaggctagacctcagagctgtttagtgggtagtgctaccggcagaccgggtggcgagggatctccttcccctaaaacccgtgaatcttcgttaaaaaggcgcttgtttagaagcatgttcctgtccacggccgcaaccgcccctccctcctcttccaagccaggtcctccaccgcaaagtaaaccaaactccagtttcaggcctcctcaaaaggataacccaccgtccctagtggctaaagcacaaagcctgccctctgatcagcccgtaggcaccttttctcccctaactacctctgacacttctagtccgcaaaagtcgctgcggacggccccagccacaggccagctgccaggcaggtcctctcccgctgggtccccccgtacctggcacgcacagatctcaactagcaatctgtatttgccacaagaccctacagtggctaagggggctctggccggagaagacacgggcgttgtgacccacgagcaatttaaggctgccctgagaatggtcgttgaccagggcgatcccaggcttctgctggattcttacgtcaagatcggcgagggaagcaccggtattgtgtgtttggctcgggagaagcacagcggcaggcaggtcgccgtgaagatgatggatctgcggaagcagcagaggagagagctactcttcaatgaagtcgtcattatgcgagactatcaacactttaatgtcgtggagatgtacaaaagctacctggtcggtgaggagttatgggtcctgatggagtttctccaaggtggcgcattaacggatattgtctctcaggtgcggctgaacgaagagcagatcgccactgtatgcgaagcagtcctgcaggccctggcctatctgcatgcgcagggagtgatacaccgtgatattaaatccgattccatccttctcactttggatggaagagttaagctgagcgatttcggcttttgcgcacagataagcaaggatgttcccaaacgaaaatctctggttggaacaccgtactggatggcaccagaggtgatctctcgctccttgtacgctacagaggttgacatctggagtctgggcattatggttatcgagatggtagatggggaacctccctatttctctgattccccggtccaggcaatgaagaggctccgggattcccctcctcctaaactcaaaaactcccataaggtatcaccagtccttcgcgattttctggagaggatgctggtaagggaccctcaggagcgggcaaccgctcaggagctgcttgatcatccattcctgcttcagacgggactccctgagtgcctggtgccattgattcagctctacagaaaacagactagcacttgttag

SEQ ID NO: 97340 - DNA, 2046 bp, Artificial Sequence
  derived and/or modified sequence
atgtttaggaagaagaaaaagaaacgaccagagatctcagcaccccagaacttccaacaccgcgtgcacacatcattcgatcctaaggaagggaaatttgttggtctccctcctcagtggcaaaatatcctggatactttaaggaggcctaagccggtggtggacccctcaaggattacacgggtgcagctgcagcccatgaaaacagtggtcagaggatccgccatgcccgttgatggttatattagtgggcttctcaacgacatccagaaattatccgtcatatccagcaataccttgcggggacgatccccaacatcaagaaggcgcgcacaatctctcgggctcttgggagacgaacactgggccaccgacccagatatgtacttgcagagtccccaaagcgagaggactgatccacatggtctatacctgagttgtaacggcggtacgccagctggccacaaacaaatgccatggcctgagccgcagtctcccagagtactccccaatggactagcggcaaaagctcagtcactgggtcccgctgagttccagggggcatctcagcgctgcctgcagctaggcgcatgtctccagtctagtccacctggcgcaagtccgcctaccgggaccaaccgacatggcatgaaggcagctaagcatggctccgaggaggcgaggccacaatcttgtctggtcggcagcgccactggccgtcccggtggagaaggctctcctagtcctaagactcgggagagttcccttaaacgacgactgtttcggagcatgtttctgtctacagcagccactgcacccccatcctccagtaaacccggtccgccacctcagtccaaaccgaattcctctttcaggcccccacagaaagacaatcccccttctctggtcgctaaagctcaatctctgccctccgatcaaccggtaggaaccttttcaccactgactacctccgatacatcatcccctcagaaatccctccgaacagcgccagccacgggacaattgcctggacggtcctccccggctggctcaccacggacctggcacgctcagatctctacctccaacctgtatctaccacaggatccaaccgtggccaaaggggctttggctggggaagacactggcgtggtgacacatgaacaatttaaagcagccctgaggatggtggtggatcaaggagaccccagactgctgctggactcgtacgtgaaaattggtgaaggttccacaggcattgtttgtcttgccagggaaaagcactcagggaggcaagtggctgtgaaaatgatggatctccggaaacaacaacgccgtgaactgctattcaacgaggttgtgattatgcgcgactaccagcacttcaatgttgttgagatgtacaaaagctatctcgttggggaggagctctgggttctcatggagtttcttcagggaggggctctaactgatatcgtgagtcaagttcgactgaacgaggagcagatcgcaacagtctgtgaagccgtcctgcaggcgttggcatatttacatgcccaaggagttattcacagggatattaaatccgactcgatcttgttgacactcgatggcagggtaaagctttctgactttggtttctgtgcgcaaatctctaaagacgttcccaagcggaagagtctggtaggcacaccttactggatggcacctgaggtgatctctcggtccctatacgccacagaagtggacatttggtcgctcggtatcatggtaattgagatggtggacggggagcccccttattttagtgactctcctgttcaggctatgaagcgtttgcgggacagccctccacctaagcttaagaactcccacaaagtttcgcccgtgttaagggatttcttggagcgcatgctggtgagggatccacaggagagagccaccgcacaggagttacttgaccacccattcctgctgcagaccgggcttcccgagtgtctggtgccattgattcagctctacaggaagcagacatcaacatgttag

SEQ ID NO: 97341 - DNA, 2046 bp, Artificial Sequence
  derived and/or modified sequence
atgttcagaaagaagaagaagaagagacccgagatcagcgccccccagaacttccagcacagagtgcacaccagcttcgaccccaaggagggcaagttcgtgggcctgcccccccagtggcagaacatcctggacaccctgagaagacccaagcccgtggtggaccccagcagaatcaccagagtgcagctgcagcccatgaagaccgtggtgagaggcagcgccatgcccgtggacggctacatcagcggcctgctgaacgacatccagaagctgagcgtgatcagcagcaacaccctgagaggcagaagccccaccagcagaagaagagcccagagcctgggcctgctgggcgacgagcactgggccaccgaccccgacatgtacctgcagagcccccagagcgagagaaccgacccccacggcctgtacctgagctgcaacggcggcacccccgccggccacaagcagatgccctggcccgagccccagagccccagagtgctgcccaacggcctggccgccaaggcccagagcctgggccccgccgagttccagggcgccagccagagatgcctgcagctgggcgcctgcctgcagagcagcccccccggcgccagcccccccaccggcaccaacagacacggcatgaaggccgccaagcacggcagcgaggaggccagaccccagagctgcctggtgggcagcgccaccggcagacccggcggcgagggcagccccagccccaagaccagagagagcagcctgaagagaagactgttcagaagcatgttcctgagcaccgccgccaccgccccccccagcagcagcaagcccggcccccccccccagagcaagcccaacagcagcttcagacccccccagaaggacaacccccccagcctggtggccaaggcccagagcctgcccagcgaccagcccgtgggcaccttcagccccctgaccaccagcgacaccagcagcccccagaagagcctgagaaccgcccccgccaccggccagctgcccggcagaagcagccccgccggcagccccagaacctggcacgcccagatcagcaccagcaacctgtacctgccccaggaccccaccgtggccaagggcgccctggccggcgaggacaccggcgtggtgacccacgagcagttcaaggccgccctgagaatggtggtggaccagggcgaccccagactgctgctggacagctacgtgaagatcggcgagggcagcaccggcatcgtgtgcctggccagagagaagcacagcggcagacaggtggccgtgaagatgatggacctgagaaagcagcagagaagagagctgctgttcaacgaggtggtgatcatgagagactaccagcacttcaacgtggtggagatgtacaagagctacctggtgggcgaggagctgtgggtgctgatggagttcctgcagggcggcgccctgaccgacatcgtgagccaggtgagactgaacgaggagcagatcgccaccgtgtgcgaggccgtgctgcaggccctggcctacctgcacgcccagggcgtgatccacagagacatcaagagcgacagcatcctgctgaccctggacggcagagtgaagctgagcgacttcggcttctgcgcccagatcagcaaggacgtgcccaagagaaagagcctggtgggcaccccctactggatggcccccgaggtgatcagcagaagcctgtacgccaccgaggtggacatctggagcctgggcatcatggtgatcgagatggtggacggcgagcccccctacttcagcgacagccccgtgcaggccatgaagagactgagagacagccccccccccaagctgaagaacagccacaaggtgagccccgtgctgagagacttcctggagagaatgctggtgagagacccccaggagagagccaccgcccaggagctgctggaccaccccttcctgctgcagaccggcctgcccgagtgcctggtgcccctgatccagctgtacagaaagcagaccagcacctgctag

SEQ ID NO: 97342 - protein, 122 aa, Artificial Sequence
  derived and/or modified sequence
MFRKKKKKRPEISAPQNFQHRVHTSFDPKEGKFVGLPPQWQNILDTLRRPKPVVDPSRITRVQLQPMKTVVRGSAMPVDGYISGLLNDIQKLSVISSNTLRGRSPTSRRRAQSLGLLGDEHW

SEQ ID NO: 97343 - protein, 123 aa, Artificial Sequence
  derived and/or modified sequence
MFRKKKKKRPEISAPQNFQHRVHTSFDPKEGKFVGLPPQWQNILDTLRRPKPVVDPSRITRVQLQPMKTVVRGSAMPVDGYISGLLNDIQKLSVISSNTLRGRSPTSRRRAQSLGLLGDEHWA

SEQ ID NO: 97344 - protein, 109 aa, Artificial Sequence
  derived and/or modified sequence
MFRKKKKKRPEISAPQNFQHRVHTSFDPKEGKFVGLPPQWQNILDTLRRPKPVVDPSRITRVQLQPMKTVVRGSAMPVDGYISGLLNDIQKLSVISSNTLRGRSPTSRR

SEQ ID NO: 97345 - protein, 112 aa, Artificial Sequence
  derived and/or modified sequence
MFRKKKKKRPEISAPQNFQHRVHTSFDPKEGKFVGLPPQWQNILDTLRRPKPVVDPSRITRVQLQPMKTVVRGSAMPVDGYISGLLNDIQKLSVISSNTLRGRSPTSRRRAQ

SEQ ID NO: 97346 - protein, 284 aa, Artificial Sequence
  derived and/or modified sequence
MFRKKKKKRPEISAPQNFQHRVHTSFDPKEGKFVGLPPQWQNILDTLRRPKPVVDPSRITRVQLQPMKTVVRGSAMPVDGYISGLLNDIQKLSVISSNTLRGRSPTSRRRAQSLGLLGDEHWATDPDMYLQSPQSERTDPHGLYLSCNGGTPAGHKQMPWPEPQSPRVLPNGLAAKAQSLGPAEFQGASQRCLQLGACLQSSPPGASPPTGTNRHGMKAAKHGSEEARPQSCLVGSATGRPGGEGSPSPKTRESSLKRRLFRSMFLSTAATAPPSSSKPGPPPQ

SEQ ID NO: 97347 - protein, 105 aa, Artificial Sequence
  derived and/or modified sequence
MFRKKKKKRPEISAPQNFQHRVHTSFDPKEGKFVGLPPQWQNILDTLRRPKPVVDPSRITRVQLQPMKTVVRGSAMPVDGYISGLLNDIQKLSVISSNTLRGRSP

SEQ ID NO: 97348 - DNA, 369 bp, Artificial Sequence
  derived and/or modified sequence
atgtttaggaagaaaaagaagaaaagacctgagatttccgccccgcaaaacttccagcaccgggttcacactagtttcgatccaaaagaggggaagttcgtcggcctaccccctcagtggcagaatatattggacactctgagacgccctaagcccgtcgtggatccttctaggatcactagagtgcaacttcagccaatgaagaccgtagtgcgcggaagcgcaatgcccgtggacgggtacatctctgggctgttaaacgatatccaaaagttgagtgtgattagctcaaacacgctcagaggcaggtctcctactagcagaaggcgggcccaatccctggggcttcttggagacgagcactggtag

SEQ ID NO: 97349 - DNA, 372 bp, Artificial Sequence
  derived and/or modified sequence
atgttccggaagaaaaaaaaaaaaagacccgagatctcagcacctcagaattttcagcaccgagtccacacctctttcgacccgaaagaaggaaaatttgtgggcctgccacctcagtggcagaatatcctggacactttgcgccgcccgaagcccgtggtcgacccttctcgcataaccagggtgcagctccaacccatgaagactgtggtgagaggcagtgcaatgccggtagatggatacattagcggattgcttaacgacattcagaagctctcggtgatctctagcaacacattgcgcgggcggtccccaactagtcgacggcgggcacagagcttaggattactgggggacgaacattgggcctag

SEQ ID NO: 97350 - DNA, 330 bp, Artificial Sequence
  derived and/or modified sequence
atgtttagaaagaagaagaaaaaaagacccgagatttctgccccccaaaactttcaacatagggtccatacttcctttgacccaaaagagggcaaatttgtcggactccccccgcaatggcagaacattcttgatacccttcgtcggccaaaacctgtggtcgatcctagccgaattacaagggtacaacttcagccgatgaaaacagttgtgagggggtccgcaatgcctgtggacggctacatttccgggctgttgaatgatatccagaagctgtccgtgatctcatccaatactctccgagggcgcagtccaacgagccggcgttag

SEQ ID NO: 97351 - DNA, 339 bp, Artificial Sequence
  derived and/or modified sequence
atgtttcgtaaaaaaaagaagaagcggccggaaatttcggccccccagaacttccagcatcgagtccacacgtcctttgacccaaaggagggcaagtttgtaggcctgcccccccagtggcagaacatccttgacactctgcggcggcctaagccagttgtggatccctcaagaattacccgcgtccagctgcagcccatgaagacggtagtgcgggggtccgcaatgcccgtggacggctatatctctggcctgctgaacgatattcagaaactgtctgttatcagttccaacaccctccgcgggcgctccccaacatcaaggcgcagggcccagtag

SEQ ID NO: 97352 - DNA, 855 bp, Artificial Sequence
  derived and/or modified sequence
atgtttaggaaaaagaaaaaaaaaaggccggaaatctcagcgcctcaaaattttcagcaccgtgtgcatacctcttttgatcccaaagaagggaaattcgtaggactgccaccccagtggcaaaacatactggataccctgcggagacccaaaccagtcgtcgatccaagccggataacgcgggttcagctacaaccaatgaagactgtggtgaggggtagtgccatgccagtggatggctacatctccggcctgctgaacgacattcagaaactttccgtcatctcatcaaataccctgcgcggtcggtccccgacctcccgccgaagagcccagagcctcggcctcctgggagacgagcactgggccactgacccggatatgtatttgcaatccccccaatccgagcgcactgacccacatggactgtatttgagttgcaatgggggcacgcctgcggggcacaaacaaatgccctggcctgagccacagtcaccgagggtcctacctaacgggctggccgccaaagcccagagtcttgggcctgccgaatttcaaggggcatcgcagcggtgtttgcagctgggagcttgcttacagtcttcccctcccggggcttcacctcccactggtacaaaccggcacggtatgaaagccgccaaacacgggtctgaagaggctcgaccgcaatcatgcctggttggtagcgccacaggaagacccggaggcgaaggcagcccttccccgaagactcgagaatccagcctgaagagacgattgttccggtcaatgtttctgtccacagcggccactgcacccccgtcctccagcaaacctggaccccccccgcaatag

SEQ ID NO: 97353 - DNA, 318 bp, Artificial Sequence
  derived and/or modified sequence
atgttccgtaagaagaagaagaagcggcccgaaattagcgccccgcagaactttcaacatcgcgtgcacaccagcttcgatcccaaggagggaaaattcgtcggattgccccctcagtggcaaaacatcttggatactctacggcgcccgaagccggttgtggacccgagcagaatcacccgcgtgcagctgcagcccatgaagactgtggtgcgcggatctgccatgcccgtggatgggtatatatcaggccttctcaatgatatacagaaactgtctgtcatctcttccaatacgctccgcggaaggagtccatag

SEQ ID NO: 97354 - DNA, 369 bp, Artificial Sequence
  derived and/or modified sequence
atgttcaggaagaagaagaagaagaggcctgagatcagcgccccccagaacttccagcaccgggtgcacaccagctttgaccccaaggagggcaagtttgtgggcctgcccccccagtggcagaacatcctggacaccctgcggcggcccaagcctgtggtggaccccagccgcatcaccagggtgcagctgcagcccatgaagacagtggtgcggggcagcgccatgcctgtggatggctacatcagcggcctgctgaatgacatccagaagctgagcgtcatcagcagcaacaccctgcggggccgcagccccaccagcagaagaagagcccagagcctgggcctgctgggagatgagcactggtag

SEQ ID NO: 97355 - DNA, 372 bp, Artificial Sequence
  derived and/or modified sequence
atgttcaggaagaagaagaagaagaggcctgagatcagcgccccccagaacttccagcaccgggtgcacaccagctttgaccccaaggagggcaagtttgtgggcctgcccccccagtggcagaacatcctggacaccctgcggcggcccaagcctgtggtggaccccagccgcatcaccagggtgcagctgcagcccatgaagacagtggtgcggggcagcgccatgcctgtggatggctacatcagcggcctgctgaatgacatccagaagctgagcgtcatcagcagcaacaccctgcggggccgcagccccaccagcagaagaagagcccagagcctgggcctgctgggagatgagcactgggcctag

SEQ ID NO: 97356 - DNA, 330 bp, Artificial Sequence
  derived and/or modified sequence
atgttcaggaagaagaagaagaagaggcctgagatcagcgccccccagaacttccagcaccgggtgcacaccagctttgaccccaaggagggcaagtttgtgggcctgcccccccagtggcagaacatcctggacaccctgcggcggcccaagcctgtggtggaccccagccgcatcaccagggtgcagctgcagcccatgaagacagtggtgcggggcagcgccatgcctgtggatggctacatcagcggcctgctgaatgacatccagaagctgagcgtcatcagcagcaacaccctgcggggccgcagccccaccagcagaagatag

SEQ ID NO: 97357 - DNA, 339 bp, Artificial Sequence
  derived and/or modified sequence
atgttcaggaagaagaagaagaagaggcctgagatcagcgccccccagaacttccagcaccgggtgcacaccagctttgaccccaaggagggcaagtttgtgggcctgcccccccagtggcagaacatcctggacaccctgcggcggcccaagcctgtggtggaccccagccgcatcaccagggtgcagctgcagcccatgaagacagtggtgcggggcagcgccatgcctgtggatggctacatcagcggcctgctgaatgacatccagaagctgagcgtcatcagcagcaacaccctgcggggccgcagccccaccagcagaagaagagcccagtag

SEQ ID NO: 97358 - DNA, 855 bp, Artificial Sequence
  derived and/or modified sequence
atgttcaggaagaagaagaagaagaggcctgagatcagcgccccccagaacttccagcaccgggtgcacaccagctttgaccccaaggagggcaagtttgtgggcctgcccccccagtggcagaacatcctggacaccctgcggcggcccaagcctgtggtggaccccagccgcatcaccagggtgcagctgcagcccatgaagacagtggtgcggggcagcgccatgcctgtggatggctacatcagcggcctgctgaatgacatccagaagctgagcgtcatcagcagcaacaccctgcggggccgcagccccaccagcagaagaagagcccagagcctgggcctgctgggagatgagcactgggccacagatcctgacatgtacctgcagagcccccagagcgagaggacagacccccacggcctgtacctgagctgcaatggaggcaccccagctggccacaagcagatgccctggccagagccccagagcccccgggtgctgcccaacggcctggccgccaaggcccagagcctgggccctgctgagttccagggcgccagccagcgctgcctgcagctgggcgcctgcctgcagagcagccccccaggggccagcccccccaccggcaccaacagacatggcatgaaggccgccaagcacggcagcgaggaggcccggccccagagctgcctggtgggcagcgccaccggccggcctggaggagagggcagccccagccccaagacccgggagagcagcctgaagaggaggctcttccgctccatgttcctgagcacagctgccacagccccacccagcagcagcaagccaggccccccaccccagtag

SEQ ID NO: 97359 - DNA, 318 bp, Artificial Sequence
  derived and/or modified sequence
atgttcaggaagaagaagaagaagaggcctgagatcagcgccccccagaacttccagcaccgggtgcacaccagctttgaccccaaggagggcaagtttgtgggcctgcccccccagtggcagaacatcctggacaccctgcggcggcccaagcctgtggtggaccccagccgcatcaccagggtgcagctgcagcccatgaagacagtggtgcggggcagcgccatgcctgtggatggctacatcagcggcctgctgaatgacatccagaagctgagcgtcatcagcagcaacaccctgcggggccgcagcccctag

SEQ ID NO: 97360 - DNA, 369 bp, Artificial Sequence
  derived and/or modified sequence
atgttccggaagaagaagaagaagcggcccgagatcagcgccccccagaatttccagcatcgcgttcacacaagctttgatcccaaagaagggaaattcgtcggattgccaccccaatggcagaacattctggacacgcttaggcgccctaaacctgtcgtggaccctagccgaatcactagggtgcagctgcagccaatgaagaccgtggtgcgcggctccgcgatgcctgtggacggctatatctcaggacttctgaatgacatacagaagttgtccgtcatctcttccaacaccttaagaggacgatctcccacatctcgtcggagagcccaaagtttgggattactgggggacgagcactggtag

SEQ ID NO: 97361 - DNA, 372 bp, Artificial Sequence
  derived and/or modified sequence
atgttccggaagaagaagaagaagcggcccgagatcagcgccccccagaatttccagcatcgcgtgcacacctcattcgacccgaaagagggcaaattcgtaggacttccgccacaatggcaaaacatcctcgatacgcttcggagaccgaaacctgtggtggatcctagtaggataaccagagtacaactgcagccaatgaagacagttgtccggggttccgctatgccagtcgatggctatatcagcgggcttctgaacgatatacagaagctgtctgttatttcttcaaacaccctgcgaggaagatctccaaccagtcgtcgtcgcgcccagtctctgggactcttaggagacgaacactgggcttag

SEQ ID NO: 97362 - DNA, 330 bp, Artificial Sequence
  derived and/or modified sequence
atgttccggaagaagaagaagaagcggcccgagatcagcgccccccagaacttccagcatcgcgtgcacaccagctttgaccccaaggaggggaagttcgtcggtctgcccccccaatggcaaaacattctggatacactgcggaggcctaaacctgtcgtggacccatctcggataaccagggtgcagctacaaccaatgaagaccgtggtgagaggctccgcaatgccggtcgatggctatatttcaggacttttgaatgatatccagaagctctcagtcatctcctcaaataccttgagaggacgatctcccactagcagaaggtag

SEQ ID NO: 97363 - DNA, 339 bp, Artificial Sequence
  derived and/or modified sequence
atgttccggaagaagaagaagaagcggcccgagatcagcgccccccagaacttccagcatcgggtgcacacctctttcgatcctaaggaaggtaagttcgtgggtcttcctccacagtggcagaatatcttggataccttgcgacggccaaagcctgtcgtcgacccctcccgaattacacgcgttcagctgcagcccatgaaaaccgtggtgaggggctcagctatgccagtagatgggtacatcagcggacttctgaatgatattcagaagctgtcagtgatttcttctaacacactgagagggagatcacccactagtagaagaagggctcagtag

SEQ ID NO: 97364 - DNA, 855 bp, Artificial Sequence
  derived and/or modified sequence
atgttccggaagaagaagaagaagcggcccgagatcagcgccccccagaactttcagcatagagtacacacaagcttcgatccaaaagagggcaagttcgtgggcctgccacctcaatggcagaatatccttgatacactcagacggcctaagccagtcgtagacccttctcggattacacgagtccaactccagcctatgaagacagtggtgaggggctcggctatgcctgtggacgggtacatcagtggcctgctaaatgacattcagaagctcagcgtcatttcaagcaatacactccgggggaggtctcccactagccgaaggcgagcgcagtctctcgggctcctgggagatgagcattgggcaaccgatcccgatatgtacttgcagagcccacagagcgaacggaccgacccccacggcctatatctctcctgtaacggggggacacctgctggacacaagcagatgccttggccagaaccacagtccccaagagtgctgccgaatgggttagcagctaaggcccagtctttaggtcccgctgaattccagggagcatctcagaggtgcctgcagcttggtgcatgtctccagtcgtccccaccgggtgccagcccaccaaccggaacaaacagacacggaatgaaggcagccaaacatggctcagaagaggctcgtcctcagtcctgtctcgttggatctgccacaggtcgccccggcggggaggggtctcctagccccaagacgcgcgaaagttcgctgaagcgacgtctctttcgcagcatgttcctgtccaccgcagccactgccccaccaagctctagcaagccgggacccccacctcagtag

SEQ ID NO: 97365 - DNA, 318 bp, Artificial Sequence
  derived and/or modified sequence
atgttccggaagaagaagaagaagcggcccgagatcagcgccccccagaatttccagcatcgtgttcatacgtcttttgatcccaaagaaggaaagttcgtaggactgccccctcagtggcagaacatacttgatactcttcggcgtccgaagcctgtggtggatccctcacgaattacacgcgttcagttacaacccatgaagaccgtggtccgaggcagcgccatgcctgttgacggatacatttcaggtcttctcaacgacatccagaaactgtccgtgatttcctccaatactcttagaggccgtagcccttag

SEQ ID NO: 97366 - DNA, 565 bp, Artificial Sequence
  derived and/or modified sequence
aaaattgccaagcaacgttggagcagctcggcgccccaaacgagcaggtcgatgcctgaggatttaatggagaaatcccaaagcctgcggaggactggcccagcaaggtcccaggtcttccctctcctcagcgcctaagagagaggcccagtgcgggtgaggagtcgcgaggaagaggcggaaggcgccggaaggcaccatgttccgcaagaaaaagaagaaacgccctgagatctcagcgccacagaacttccagcaccgtgtccacacctccttcgaccccaaagaaggcaagtttgtgggcctccccccacaatggcagaacatcctggacacactgcggcgccccaagcccgtggtggacccttcgcgaatcacacgggtgcagctccagcccatgaagacagtggtgcggggcagcgcgatgcctgtggatggctacatctcggggctgctcaacgacatccagaagttgtcagtcatcagctccaacaccctgcgtggccgcagccccaccagccggcggcgggcacagtccctggggctgctgggggatgagcactgg

SEQ ID NO: 97367 - DNA, 560 bp, Artificial Sequence
  derived and/or modified sequence
acacgcggcccgctcaggtccgggagagtcggcccgcggctctggagcgtgcatctgcgatgccagtgaacgaggcctgcggaggactggcccagcaaggtcccaggtcttccctctcctcagcgcctaagagagaggcccagtgcgggtgaggagtcgcgaggaagaggcggaaggcgccggaaggcaccatgttccgcaagaaaaagaagaaacgccctgagatctcagcgccacagaacttccagcaccgtgtccacacctccttcgaccccaaagaaggcaagtttgtgggcctccccccacaatggcagaacatcctggacacactgcggcgccccaagcccgtggtggacccttcgcgaatcacacgggtgcagctccagcccatgaagacagtggtgcggggcagcgcgatgcctgtggatggctacatctcggggctgctcaacgacatccagaagttgtcagtcatcagctccaacaccctgcgtggccgcagccccaccagccggcggcgggcacagtccctggggctgctgggggatgagcactgggcc

SEQ ID NO: 97368 - DNA, 571 bp, Artificial Sequence
  derived and/or modified sequence
ttcgcgtccccgagagggcgcagcagtggggcctgcgagctggggccgggtggccgcgccgggtcggagtgtggctggagaggggccgccccggaagcggtgctgcgcccaacgtccccttctccccgcctgcggaggactggcccagcaaggtcccaggtcttccctctcctcagcgcctaagagagaggcccagtgcgggtgaggagtcgcgaggaagaggcggaaggcgccggaaggcaccatgttccgcaagaaaaagaagaaacgccctgagatctcagcgccacagaacttccagcaccgtgtccacacctccttcgaccccaaagaaggcaagtttgtgggcctccccccacaatggcagaacatcctggacacactgcggcgccccaagcccgtggtggacccttcgcgaatcacacgggtgcagctccagcccatgaagacagtggtgcggggcagcgcgatgcctgtggatggctacatctcggggctgctcaacgacatccagaagttgtcagtcatcagctccaacaccctgcgtggccgcagccccaccagccggcgg

SEQ ID NO: 97369 - DNA, 598 bp, Artificial Sequence
  derived and/or modified sequence
aaaatcgcggtcaggtgaagccggcgctgcaccaacgtgtaagcgcggcccctcctcggcgttcccgcgccgaggtccctcccgcggagggcgggcccggctcccacgacctcttcgagcgttcctgggcttcccgctccgcaggcctgcggaggactggcccagcaaggtcccaggtcttccctctcctcagcgcctaagagagaggcccagtgcgggtgaggagtcgcgaggaagaggcggaaggcgccggaaggcaccatgttccgcaagaaaaagaagaaacgccctgagatctcagcgccacagaacttccagcaccgtgtccacacctccttcgaccccaaagaaggcaagtttgtgggcctccccccacaatggcagaacatcctggacacactgcggcgccccaagcccgtggtggacccttcgcgaatcacacgggtgcagctccagcccatgaagacagtggtgcggggcagcgcgatgcctgtggatggctacatctcggggctgctcaacgacatccagaagttgtcagtcatcagctccaacaccctgcgtggccgcagccccaccagccggcggcgggcacagt

SEQ ID NO: 97370 - DNA, 1146 bp, Artificial Sequence
  derived and/or modified sequence
ccccttctccccgtaagccccgcaaggagcctgccgcctcttgcacctgagccaggagttcagtcgggaggcgggcgcggagcggttcccagcgcctggacgtcagccagtcgcaacacccgcgggaacacttgctacatttgccataatgcatttctgatctgtttccgcgcaggcctgcggaggactggcccagcaaggtcccaggtcttccctctcctcagcgcctaagagagaggcccagtgcgggtgaggagtcgcgaggaagaggcggaaggcgccggaaggcaccatgttccgcaagaaaaagaagaaacgccctgagatctcagcgccacagaacttccagcaccgtgtccacacctccttcgaccccaaagaaggcaagtttgtgggcctccccccacaatggcagaacatcctggacacactgcggcgccccaagcccgtggtggacccttcgcgaatcacacgggtgcagctccagcccatgaagacagtggtgcggggcagcgcgatgcctgtggatggctacatctcggggctgctcaacgacatccagaagttgtcagtcatcagctccaacaccctgcgtggccgcagccccaccagccggcggcgggcacagtccctggggctgctgggggatgagcactgggccaccgacccagacatgtacctccagagcccccagtctgagcgcactgacccccacggcctctacctcagctgcaacgggggcacaccagcaggccacaagcagatgccgtggcccgagccacagagcccacgggtcctgcccaatgggctggctgcaaaggcacagtccctgggccccgccgagtttcagggtgcctcgcagcgctgtctgcagctgggtgcctgcctgcagagctccccaccaggagcctcgccccccacgggcaccaataggcatggaatgaaggctgccaagcatggctctgaggaggcccggccacagtcctgcctggtgggctcagccacaggcaggccaggtggggaaggcagccctagccctaagacccgggagagcagcctgaagcgcaggctattccgaagcatgttcctgtccactgctgccacagcccctccaagcagcagcaagccaggccctccaccacagag

SEQ ID NO: 97371 - DNA, 891 bp, Artificial Sequence
  derived and/or modified sequence
aaaaccagctgagaccagcacctgccagatctgaatgcgcagctccaagttctggggggtgggggtgggggtgagccaaggaggtctggcttctctagggcaagggtaggaaggacagcagggaggctcaccctgagcccggcaggcagcccttcctcctcctccccttcagcaaagaaaggcagataaaaacgtgtttttataaatagctccagccccagctgatttgtaaattcagtgggttttttgtgtcaatgacatcaccttcctccccatggcaacccccgacgatatcaaaattgccaagcaacgttggagcagctcggcgccccaaacgagcaggtcgatgcctgaggatttaatggagaaatcccaaaggagtgccgcttcctgggctagagacaagcaccagcctgcagtggagaacgcaggaccccgctgcccagaaggagcagccacggcctgcggaggactggcccagcaaggtcccaggtcttccctctcctcagcgcctaagagagaggcccagtgcgggtgaggagtcgcgaggaagaggcggaaggcgccggaaggcaccatgttccgcaagaaaaagaagaaacgccctgagatctcagcgccacagaacttccagcaccgtgtccacacctccttcgaccccaaagaaggcaagtttgtgggcctccccccacaatggcagaacatcctggacacactgcggcgccccaagcccgtggtggacccttcgcgaatcacacgggtgcagctccagcccatgaagacagtggtgcggggcagcgcgatgcctgtggatggctacatctcggggctgctcaacgacatccagaagttgtcagtcatcagctccaacaccctgcgtggccgcagccc

SEQ ID NO: 97372 - DNA, 369 bp, Artificial Sequence
  derived and/or modified sequence
atgttccgcaagaagaagaagaagcggcctgagatttccgcgccacagaatttccagcatagggttcatacgtcctttgacccaaaagagggcaagttcgtgggcctgcccccacagtggcagaacatcctggataccctgcgccgtcctaaacctgtggttgatccctcaagaatcacgagggtccaactccagcccatgaaaactgtggtgaggggcagcgcaatgccagtagacggttacatttctggactgttgaatgatattcagaagttgtctgtcatcagcagcaacaccctgcggggtagaagccccacgagtaggaggcgagcacaaagtctcggactgctcggcgacgagcattggtag

SEQ ID NO: 97373 - DNA, 372 bp, Artificial Sequence
  derived and/or modified sequence
atgtttcgtaagaaaaaaaaaaagcgtccagaaatctcagcccctcagaacttccagcacagagtgcacacatcctttgatcctaaagagggaaaattcgtcggcctccccccacagtggcagaatatattggacactctcagaagaccgaaaccagtggtggatcctagccgcatcacccgtgtacaattgcagccaatgaaaactgtcgtcagggggagtgctatgccggtcgatggctatatttctggacttttgaacgatatccagaaattgtctgtgatctcgtctaacactttgagaggtaggagcccgacctccaggcgtagggcccagtccctggggctgttaggagacgaacattgggcttag

SEQ ID NO: 97374 - DNA, 330 bp, Artificial Sequence
  derived and/or modified sequence
atgtttcgaaagaagaagaagaaacgtcccgagataagcgctccccaaaatttccagcatagagtccacactagcttcgacccaaaagaaggaaaatttgtgggacttcccccacagtggcagaacatcctcgacacactgagaagaccaaaacctgtagtcgatccatcgaggataacacgagttcaactgcagcctatgaagactgttgtacggggttctgctatgcctgtggatgggtatatttcagggctgctcaatgatattcagaagctcagcgtgatctccagtaataccctgagaggacgttctccaaccagtagacgctag

SEQ ID NO: 97375 - DNA, 339 bp, Artificial Sequence
  derived and/or modified sequence
atgttccgtaaaaaaaagaagaagcggcctgagattagtgctccccagaattttcaacacagagtccataccagctttgatcccaaggaaggaaagtttgtggggctgccgccacagtggcagaatatccttgataccctccggaggcccaaaccagtggtggacccgtctcggattacaagggtccagttgcagcctatgaagacagtggtgagaggcagcgcaatgccagtcgacggttacattagtgggctcttgaacgatattcagaagctgtctgttatcagcagtaatactcttaggggtcgttccccaacttcgaggcgcagagctcagtag

SEQ ID NO: 97376 - DNA, 855 bp, Artificial Sequence
  derived and/or modified sequence
atgttcagaaagaagaagaagaagcgacctgaaataagcgcccctcaaaacttccagcatagggtccatacttcattcgatcccaaggagggtaagttcgtgggccttcctccccagtggcagaatatcttggacacactgcggagacccaaacctgtggttgaccccagtcgaatcacaagggttcagctccaacccatgaagacggttgtgcggggatccgccatgcccgttgacgggtacatatcaggattgctaaatgatattcagaagcttagtgtcatcagttctaacaccttaagaggccgaagcccaacaagccggaggcgggctcagagtctcggattgctgggcgacgaacactgggctacagatcccgacatgtatttacagagcccacagagcgagagaactgacccgcacggactgtatttatcatgtaatggaggtacccctgccggtcacaaacaaatgccttggcctgaacctcagtcccctagagtgctgcctaatggcctggctgctaaagcacaatccttgggccctgcggaattccaaggtgcctcgcagagatgtcttcagttgggagcatgtctgcagtccagcccaccaggcgcttccccaccaaccggcaccaaccgtcacggcatgaaagctgctaaacatggttccgaagaagccagaccacagagctgtctcgtgggctctgccactggcagacctgggggtgaaggtagcccctcgccaaagaccagagagagtagcttgaagcgtagactctttcggtccatgtttctcagcaccgcagcaaccgccccaccctcctcatctaaaccgggtccgcctccccagtag

SEQ ID NO: 97377 - DNA, 318 bp, Artificial Sequence
  derived and/or modified sequence
atgttcaggaaaaaaaagaagaaaagaccagaaatctcggcaccccagaacttccagcatagagtacatacctccttcgatccaaaggagggaaaatttgtggggctgcccccacaatggcagaacatccttgacaccctccggaggcctaaacctgtcgtggacccgtccaggatcaccagagttcaactacagcctatgaaaacagtcgtgcgcggttccgcaatgcctgtggacgggtacatctctgggctcctgaacgatattcagaaactgtctgtcattagttccaacaccctgagaggcagatcaccttag

SEQ ID NO: 97378 - DNA, 369 bp, Artificial Sequence
  derived and/or modified sequence
atgttcagaaagaagaagaagaagagacccgagatcagcgccccccagaacttccagcacagagtgcacaccagcttcgaccccaaggagggcaagttcgtgggcctgcccccccagtggcagaacatcctggacaccctgagaagacccaagcccgtggtggaccccagcagaatcaccagagtgcagctgcagcccatgaagaccgtggtgagaggcagcgccatgcccgtggacggctacatcagcggcctgctgaacgacatccagaagctgagcgtgatcagcagcaacaccctgagaggcagaagccccaccagcagaagaagagcccagagcctgggcctgctgggcgacgagcactggtag

SEQ ID NO: 97379 - DNA, 372 bp, Artificial Sequence
  derived and/or modified sequence
atgttcagaaagaagaagaagaagagacccgagatcagcgccccccagaacttccagcacagagtgcacaccagcttcgaccccaaggagggcaagttcgtgggcctgcccccccagtggcagaacatcctggacaccctgagaagacccaagcccgtggtggaccccagcagaatcaccagagtgcagctgcagcccatgaagaccgtggtgagaggcagcgccatgcccgtggacggctacatcagcggcctgctgaacgacatccagaagctgagcgtgatcagcagcaacaccctgagaggcagaagccccaccagcagaagaagagcccagagcctgggcctgctgggcgacgagcactgggcctag

SEQ ID NO: 97380 - DNA, 330 bp, Artificial Sequence
  derived and/or modified sequence
atgttcagaaagaagaagaagaagagacccgagatcagcgccccccagaacttccagcacagagtgcacaccagcttcgaccccaaggagggcaagttcgtgggcctgcccccccagtggcagaacatcctggacaccctgagaagacccaagcccgtggtggaccccagcagaatcaccagagtgcagctgcagcccatgaagaccgtggtgagaggcagcgccatgcccgtggacggctacatcagcggcctgctgaacgacatccagaagctgagcgtgatcagcagcaacaccctgagaggcagaagccccaccagcagaagatag

SEQ ID NO: 97381 - DNA, 339 bp, Artificial Sequence
  derived and/or modified sequence
atgttcagaaagaagaagaagaagagacccgagatcagcgccccccagaacttccagcacagagtgcacaccagcttcgaccccaaggagggcaagttcgtgggcctgcccccccagtggcagaacatcctggacaccctgagaagacccaagcccgtggtggaccccagcagaatcaccagagtgcagctgcagcccatgaagaccgtggtgagaggcagcgccatgcccgtggacggctacatcagcggcctgctgaacgacatccagaagctgagcgtgatcagcagcaacaccctgagaggcagaagccccaccagcagaagaagagcccagtag

SEQ ID NO: 97382 - DNA, 855 bp, Artificial Sequence
  derived and/or modified sequence
atgttcagaaagaagaagaagaagagacccgagatcagcgccccccagaacttccagcacagagtgcacaccagcttcgaccccaaggagggcaagttcgtgggcctgcccccccagtggcagaacatcctggacaccctgagaagacccaagcccgtggtggaccccagcagaatcaccagagtgcagctgcagcccatgaagaccgtggtgagaggcagcgccatgcccgtggacggctacatcagcggcctgctgaacgacatccagaagctgagcgtgatcagcagcaacaccctgagaggcagaagccccaccagcagaagaagagcccagagcctgggcctgctgggcgacgagcactgggccaccgaccccgacatgtacctgcagagcccccagagcgagagaaccgacccccacggcctgtacctgagctgcaacggcggcacccccgccggccacaagcagatgccctggcccgagccccagagccccagagtgctgcccaacggcctggccgccaaggcccagagcctgggccccgccgagttccagggcgccagccagagatgcctgcagctgggcgcctgcctgcagagcagcccccccggcgccagcccccccaccggcaccaacagacacggcatgaaggccgccaagcacggcagcgaggaggccagaccccagagctgcctggtgggcagcgccaccggcagacccggcggcgagggcagccccagccccaagaccagagagagcagcctgaagagaagactgttcagaagcatgttcctgagcaccgccgccaccgccccccccagcagcagcaagcccggcccccccccccagtag

SEQ ID NO: 97383 - DNA, 318 bp, Artificial Sequence
  derived and/or modified sequence
atgttcagaaagaagaagaagaagagacccgagatcagcgccccccagaacttccagcacagagtgcacaccagcttcgaccccaaggagggcaagttcgtgggcctgcccccccagtggcagaacatcctggacaccctgagaagacccaagcccgtggtggaccccagcagaatcaccagagtgcagctgcagcccatgaagaccgtggtgagaggcagcgccatgcccgtggacggctacatcagcggcctgctgaacgacatccagaagctgagcgtgatcagcagcaacaccctgagaggcagaagcccctag

SEQ ID NO: 97384 - protein, 147 aa, Artificial Sequence
  derived and/or modified sequence
MSAHMSGLEIMDEDQLIKDVLDKFLNCHEQTYDEEFLNTFTHLSQDLLLLPGEVEQDVSTSIPSCIPFVAQPPTCEVKPKPSVKRMDKQTEEILGDEVQLFSLDEEFDYDNVMLTSKFSPAEIENIKELCKQQKRKDTSPDLEKSCD

SEQ ID NO: 97385 - protein, 90 aa, Artificial Sequence
  derived and/or modified sequence
MSAHMSGLEIMDEDQLIKDVLDKFLNCHEQTYDEEFLNTFTHLSQDLLLLPGEVEQDVSTSIPSCIPFVAQPPTCEVKPKPSVKRMDKQT

SEQ ID NO: 97386 - DNA, 633 bp, Artificial Sequence
  derived and/or modified sequence
gtgtagctttggaaatctgtctttgttgctctgggagaggggactcctggaatgtgtctgtgaataaagactagccgaagatactgtggcctcatgaataggaatgtctgcccatatgtcaggattggaaataatggatgaagatcaattaatcaaagacgtcttggataaattccttaattgtcatgagcaaacatatgatgaagaatttctgaacacttttactcatctttcacaagatttgctgctgcttccaggagaagtggagcaggatgtaagcaccagcattccttcctgtatcccttttgtggcccagcctcctacctgtgaagtgaagccaaagcccagtgttaaaagaatggacaaacagacggaagagatacttggagatgaagttcaacttttttcacttgatgaagaatttgattatgacaatgtgatgctaacctccaagtttagtcctgcagagatagagaacatcaaagagctatgcaagcagcagaagagaaaggacaccagcccagacttagagaaatcctgtgactgattcacagaggcattttgtgtgtgtgtgcttattttaattttgttcttattctagcaacattagaataaaagataaacctactataa

SEQ ID NO: 97387 - DNA, 366 bp, Artificial Sequence
  derived and/or modified sequence
tgtgaataaagactagccgaaggtgcgaagtgactagacgggagcaaaggaggaaaactagggaatgggagatactgtggcctcatgaataggaatgtctgcccatatgtcaggattggaaataatggatgaagatcaattaatcaaagacgtcttggataaattccttaattgtcatgagcaaacatatgatgaagaatttctgaacacttttactcatctttcacaagatttgctgctgcttccaggagaagtggagcaggatgtaagcaccagcattccttcctgtatcccttttgtggcccagcctcctacctgtgaagtgaagccaaagcccagtgttaaaagaatggacaaacagacgga

SEQ ID NO: 97388 - DNA, 801 bp, Artificial Sequence
  derived and/or modified sequence
tagctttggaaatctgtctttgttgctctgggagaggggactcctggaatgtgtctgtgaataaagactagccgaaggtgcgaagtgactagacgggagcaaaggaggaaaactagggaatgggaggtgagagtggctgacaccgacccaacgtccgggttgccggaaggctgcagcgcccggagcggtgtcgggcaaaccgctaccctggtattgctggagcctctcctggggacttttgaacagatactgtggcctcatgaataggaatgtctgcccatatgtcaggattggaaataatggatgaagatcaattaatcaaagacgtcttggataaattccttaattgtcatgagcaaacatatgatgaagaatttctgaacacttttactcatctttcacaagatttgctgctgcttccaggagaagtggagcaggatgtaagcaccagcattccttcctgtatcccttttgtggcccagcctcctacctgtgaagtgaagccaaagcccagtgttaaaagaatggacaaacagacggaagagatacttggagatgaagttcaacttttttcacttgatgaagaatttgattatgacaatgtgatgctaacctccaagtttagtcctgcagagatagagaacatcaaagagctatgcaagcagcagaagagaaaggacaccagcccagacttagagaaatcctgtgactgattcacagaggcattttgtgtgtgtgtgcttattttaattttgttcttattctagcaacattagaataaaagataaacctactataatt

SEQ ID NO: 97389 - DNA, 444 bp, Artificial Sequence
  derived and/or modified sequence
atgagcgcccacatgagcggcctggagatcatggacgaggaccagctgatcaaggacgtgctggacaagttcctgaactgccacgagcagacctacgacgaggagttcctgaacaccttcacccacctgagccaggacctgctgctgctgcccggcgaggtggagcaggacgtgagcaccagcatccccagctgcatccccttcgtggcccagccccccacctgcgaggtgaagcccaagcccagcgtgaagagaatggacaagcagaccgaggagatcctgggcgacgaggtgcagctgttcagcctggacgaggagttcgactacgacaacgtgatgctgaccagcaagttcagccccgccgagatcgagaacatcaaggagctgtgcaagcagcagaagagaaaggacaccagccccgacctggagaagagctgcgactag

SEQ ID NO: 97390 - DNA, 273 bp, Artificial Sequence
  derived and/or modified sequence
atgagcgcccacatgagcggcctggagatcatggacgaggaccagctgatcaaggacgtgctggacaagttcctgaactgccacgagcagacctacgacgaggagttcctgaacaccttcacccacctgagccaggacctgctgctgctgcccggcgaggtggagcaggacgtgagcaccagcatccccagctgcatccccttcgtggcccagccccccacctgcgaggtgaagcccaagcccagcgtgaagagaatggacaagcagacctag

SEQ ID NO: 97391 - DNA, 444 bp, Artificial Sequence
  derived and/or modified sequence
atgagcgcccacatgtctggactggaaataatggacgaggaccagttgataaaagatgtactggacaaattcctcaactgccacgagcagacatatgatgaagagtttttgaatacgtttactcacctgagccaagatctgctgctactacctggcgaggttgaacaggacgtgtctacctccatccccagttgcattcccttcgttgcccagcccccaacctgcgaagtcaaaccaaagccctcagtgaagaggatggacaagcagactgaagaaatcttaggtgatgaggtgcagttattcagcctggacgaagagtttgactacgacaacgtcatgctaacatctaagttctcacccgcagagattgagaacatcaaagaactctgcaagcagcagaagaggaaggatacatcgcccgatctcgaaaagtcttgtgattag

SEQ ID NO: 97392 - DNA, 273 bp, Artificial Sequence
  derived and/or modified sequence
atgagcgcacacatgtctggactggaaattatggatgaagaccagctcatcaaagatgtgcttgacaaattcctgaactgccacgagcagacctatgacgaagagttcctaaatacgtttacccacctgagccaggatctgctgctgctgcccggagaggtggagcaggacgtgagtacctcaatcccatcatgcataccgtttgtggctcaacctcccacttgcgaagtgaaacctaaaccctctgtgaaaagaatggacaaacagacctag

SEQ ID NO: 97393 - DNA, 444 bp, Artificial Sequence
  derived and/or modified sequence
atgagtgcacacatgtctggcctagaaatcatggacgaagaccagctcatcaaggatgtgctagacaaatttcttaattgccacgagcagacatacgacgaagagttcctcaatacatttacccacctgtcgcaagatctgctcctcctcccgggcgaagttgagcaggacgtttctacatctattccctcttgtattcccttcgtggcacagccaccaacttgcgaggtgaaaccaaagccttcagtgaagagaatggacaagcagaccgaggaaattctgggggacgaggtgcagctattttccctggatgaggagtttgattacgataacgttatgctcacgtcaaagttctccccagccgagatagaaaatataaaggagctctgtaaacagcaaaaaagaaaagatactagcccagatctagaaaagtcttgcgactag

SEQ ID NO: 97394 - DNA, 444 bp, Artificial Sequence
  derived and/or modified sequence
atgtctgcccacatgagcggcctggagatcatggatgaggaccagctgatcaaggatgtgctggacaagttcctgaactgccacgagcagacctatgatgaggagttcctgaacaccttcacccacctgagccaggacctgctgctgctgcctggagaggtggagcaggatgtgtccaccagcatccccagctgcatcccctttgtggcccagccccccacctgtgaggtgaagcccaagcccagcgtgaagaggatggacaagcagacagaggagatcctgggagatgaggtgcagctgttcagcctggatgaggagtttgattatgacaacgtgatgctgaccagcaagttcagccctgctgagattgagaacatcaaggagctgtgcaagcagcagaagaggaaggacaccagcccagacctggagaagagctgtgactag

SEQ ID NO: 97395 - DNA, 273 bp, Artificial Sequence
  derived and/or modified sequence
atgtctgcccacatgagcggcctggagatcatggatgaggaccagctgatcaaggatgtgctggacaagttcctgaactgccacgagcagacctatgatgaggagttcctgaacaccttcacccacctgagccaggacctgctgctgctgcctggagaggtggagcaggatgtgtccaccagcatccccagctgcatcccctttgtggcccagccccccacctgtgaggtgaagcccaagcccagcgtgaagaggatggacaagcagacctag

SEQ ID NO: 97396 - DNA, 444 bp, Artificial Sequence
  derived and/or modified sequence
atgagcgcccacatgagcggcctggagatcatggacgaggaccagctgatcaaagacgtactggataagtttcttaactgccacgaacagacatacgacgaagagttcttgaacacctttacgcaccttagccaggatctgctattgctgccaggcgaagttgagcaagacgtgtcaacatctatcccctcctgcattccatttgttgcgcaaccgcccacatgtgaggttaaacccaaaccctctgttaagagaatggataaacaaaccgaagagattctaggcgatgaggtgcagctgttttctcttgacgaggagtttgattacgataacgtcatgctgacttccaagttctctcccgccgagatcgagaacataaaggaattatgtaagcagcagaaacggaaagatacgtctcccgacttggagaagtcgtgcgattag

SEQ ID NO: 97397 - DNA, 273 bp, Artificial Sequence
  derived and/or modified sequence
atgagcgcccacatgagcggcctggagatcatggacgaggaccagttgattaaagacgtcctcgacaaattcttaaactgccacgagcagacctacgatgaggagttcctcaatacgtttacacacctgtctcaagacctcttactgcttcccggggaggtggagcaggacgtctcgacctcgatcccctcatgtattccctttgtggcccaacctccgacctgcgaggtgaagccaaagcctagcgttaagcgaatggataaacagacttag

SEQ ID NO: 97398 - DNA, 444 bp, Artificial Sequence
  derived and/or modified sequence
atgagcgcccacatgagcggcctggagatcatggacgaggaccagctgatcaaagacgtgctcgacaaatttctcaattgccatgaacaaacgtacgacgaggagttcctgaatacattcacacacttgtcccaagacttgctgctgctgccgggcgaagttgaacaggatgtttccaccagcattcccagttgcataccgttcgtcgcacagcccccaacctgtgaggtcaagccaaaacccagcgtaaaacggatggacaagcagaccgaggagatactcggcgacgaagtgcagctcttcagtctagatgaggaattcgactacgacaacgtgatgttgacttctaagttcagtcccgctgaaatcgaaaatatcaaggaactctgtaaacaacagaagcggaaggataccagtccagacttggagaaaagctgcgactag

SEQ ID NO: 97399 - DNA, 444 bp, Artificial Sequence
  derived and/or modified sequence
atgagcgcccacatgagcgggctcgagattatggatgaggaccagctgattaaagacgtgctggacaaatttctgaattgtcatgagcagacttacgacgaggaatttcttaacaccttcacacacctttcccaggatctgctcttgctacccggagaggttgaacaggatgtgagtaccagtatcccgagctgtatcccctttgttgctcagccacctacctgcgaggtgaagcctaagccaagcgtcaagagaatggacaagcagaccgaagagattctgggagacgaggtgcagctgttttctctcgacgaggagtttgactacgacaatgtcatgctaacttctaaattttcgcccgctgagatagaaaatatcaaagagctttgcaagcaacagaagcgcaaggacacaagtccagatctggagaagagctgcgattag

SEQ ID NO: 97400 - DNA, 273 bp, Artificial Sequence
  derived and/or modified sequence
atgtctgctcatatgtcaggcctagaaattatggacgaagatcagctgattaaagacgtcctggataaatttctgaattgtcacgagcagacctatgacgaagaatttctcaataccttcacacatctgtcacaggatctcctgctgctcccaggggaagttgagcaggacgtgtctacatcgatcccctcgtgcattcccttcgtggcccagccccctacatgtgaagtgaaacctaaaccctctgtcaaacgaatggacaaacagacttag

SEQ ID NO: 97401 - DNA, 444 bp, Artificial Sequence
  derived and/or modified sequence
atgtcggcccatatgtccggtctcgagattatggatgaagatcagctgatcaaggacgtgctggataaatttctcaattgtcacgagcaaacctacgatgaagaatttctcaacactttcacccatctgtctcaggacttactgctgctgccaggcgaagttgagcaggatgtgtccacctcgattcctagttgcatacctttcgttgctcaacctccaacatgtgaagtcaagccgaagcccagcgtcaaacggatggataaacaaacggaggagattctgggtgacgaggtacagctgttttcattggatgaggaatttgactacgacaatgtgatgctcacgagcaaattttctcccgctgagattgagaacataaaggagttatgtaagcagcaaaagaggaaagatacctcgcctgatctggagaaatcatgtgactag

SEQ ID NO: 97402 - protein, 505 aa, Artificial Sequence
  derived and/or modified sequence
MSPWSWFLLQTLCLLPTGAASRRGAPGTANCELKPQQSELNSFLWTIKRDPPSYFFGTIHVPYTRVWDFIPDNSKEAFLQSSIVYFELDLTDPYTISALTSCQMLPQGENLQDVLPRDIYCRLKRHLEYVKLMMPLWMTPDQRGKGLYADYLFNAIAGNWERKRPVWVMLMVNSLTEVDIKSRGVPVLDLFLAQEAERLRKQTGAVEKVEEQCHPLNGLNFSQVIFALNQTLLQQESLRAGSLQIPYTTEDLIKHYNCGDLSSVILSHDSSQVPNFINATLPPQERITAQEIDSYLRRELIYKRNERIGKRVKALLEEFPDKGFFFAFGAGHFMGNNTVLDVLRREGYEVEHAPAGRPIHKGKSKKTSTRPTLSTIFAPKVPTLEVPAPEAVSSGHSTLPPLVSRPGSADTPSEAEQRFRKKRRRSQRRPRLRQFSDLWVRLEESDIVPQLQVPVLDRHISTELRLPRRGHSHHSQMVASSACLSLWTPVFWVLVLAFQTETPLL

SEQ ID NO: 97403 - DNA, 1809 bp, Artificial Sequence
  derived and/or modified sequence
tccttccctccgcgttccgggcctcggagccgccttgaggaggatgagtccctggagctggttcctgctgcagaccctctgcctcctgcccacgggcgcagcttcgcggcgcggggcgcccggcaccgccaactgcgagctcaagccccaacaaagcgagctgaattccttcttgtggaccattaagcgagacccaccatcttacttctttggcacaatccatgtcccgtacacccgagtttgggacttcatccccgacaactctaaggaggctttcctgcagagcagcattgtgtactttgagttggatctcacagacccctataccatctcagctctcaccagctgtcagatgctgccacagggcgagaacctccaagatgtgctccccagggacatctactgccgcctcaagcgccacctggagtatgtcaagctcatgatgcccttgtggatgaccccagaccagcgcggcaaggggctctacgcagactacctcttcaatgctattgccggaaactgggagcgcaagaggcctgtctgggtgatgctcatggtcaactccctgactgaagtggacattaagtcccgtggagtgcctgtcttagacctgttccttgcccaggaggctgagcggctgaggaaacagactggggcagtggaaaaggtggaagagcagtgccatccattgaatgggttgaacttttcacaggtcatctttgctttgaaccagaccctcctgcagcaggaaagcctgcgagcaggcagtcttcagatcccctacacgacggaggatctcatcaaacactataactgcggggacctcagctccgtcatcctcagccatgacagctcccaggttcccaattttattaatgccacgctaccacctcaggagcgcatcactgctcaggagattgacagctacttacgccgggagctgatctacaagcggaatgagagaatagggaagcgggtgaaggcccttttggaggagttccctgacaaaggcttcttctttgcctttggagctggtcatttcatgggcaacaacacagtgctggatgttttgcggcgtgaaggctatgaggtagaacacgcccctgctggacgacccatccacaaagggaagagtaaaaagacctccacacggcccactctgtccaccatctttgctccaaaagtccctaccctggaagtaccggcaccagaagccgtatcctcagggcactcaacgctgcctccccttgtgtcccggcctggaagtgccgacacgcccagtgaggccgaacagaggttccggaagaagcggaggcggtcacagcggaggccgcgactccggcaattcagcgatctgtgggtccgcctggaggagagtgacatagtcccgcaactccaggtccctgtcctggacaggcacatctccactgaactgcggctccctcgccgtgggcattcccaccacagccagatggtggccagcagtgcctgcctgtctctctggactcctgtgttctgggtgctggtgctggctttccaaacagagacacccctcctgtaacgactggaagcaccaggctaagaacctgacccctcggacttgaagaatggccattcctgtactccacattctggtctagccttgttgggcccaatccagaagagactgctcttgaaaaagcggcccagtgttgattcttctctttccaaggaatgtgactttgggttatccaactttgggggcaggtgtacagttttgtaacatagtgagttgtgtgaaaataaattataaatgagttgtatgaaaat

SEQ ID NO: 97404 - DNA, 1518 bp, Artificial Sequence
  derived and/or modified sequence
atgagcccctggagctggttcctgctgcagaccctgtgcctgctgcccaccggcgccgccagcagaagaggcgcccccggcaccgccaactgcgagctgaagccccagcagagcgagctgaacagcttcctgtggaccatcaagagagacccccccagctacttcttcggcaccatccacgtgccctacaccagagtgtgggacttcatccccgacaacagcaaggaggccttcctgcagagcagcatcgtgtacttcgagctggacctgaccgacccctacaccatcagcgccctgaccagctgccagatgctgccccagggcgagaacctgcaggacgtgctgcccagagacatctactgcagactgaagagacacctggagtacgtgaagctgatgatgcccctgtggatgacccccgaccagagaggcaagggcctgtacgccgactacctgttcaacgccatcgccggcaactgggagagaaagagacccgtgtgggtgatgctgatggtgaacagcctgaccgaggtggacatcaagagcagaggcgtgcccgtgctggacctgttcctggcccaggaggccgagagactgagaaagcagaccggcgccgtggagaaggtggaggagcagtgccaccccctgaacggcctgaacttcagccaggtgatcttcgccctgaaccagaccctgctgcagcaggagagcctgagagccggcagcctgcagatcccctacaccaccgaggacctgatcaagcactacaactgcggcgacctgagcagcgtgatcctgagccacgacagcagccaggtgcccaacttcatcaacgccaccctgcccccccaggagagaatcaccgcccaggagatcgacagctacctgagaagagagctgatctacaagagaaacgagagaatcggcaagagagtgaaggccctgctggaggagttccccgacaagggcttcttcttcgccttcggcgccggccacttcatgggcaacaacaccgtgctggacgtgctgagaagagagggctacgaggtggagcacgcccccgccggcagacccatccacaagggcaagagcaagaagaccagcaccagacccaccctgagcaccatcttcgcccccaaggtgcccaccctggaggtgcccgcccccgaggccgtgagcagcggccacagcaccctgccccccctggtgagcagacccggcagcgccgacacccccagcgaggccgagcagagattcagaaagaagagaagaagaagccagagaagacccagactgagacagttcagcgacctgtgggtgagactggaggagagcgacatcgtgccccagctgcaggtgcccgtgctggacagacacatcagcaccgagctgagactgcccagaagaggccacagccaccacagccagatggtggccagcagcgcctgcctgagcctgtggacccccgtgttctgggtgctggtgctggccttccagaccgagacccccctgctgtag

SEQ ID NO: 97405 - DNA, 1518 bp, Artificial Sequence
  derived and/or modified sequence
atgtcgccgtggtcatggtttctattacaaactttgtgcctgctgcccaccggagccgcgtccagacgaggagctcccggcacagccaactgcgagcttaagcctcaacaaagcgaactcaactcttttttgtggaccattaaaagagacccccccagctatttcttcgggaccatccatgtcccctatacgcgggtttgggacttcatcccggataacagtaaagaggccttcttacagtctagtatagtgtactttgagctcgacctgacagatccctatactatatccgccctgacgtcctgccaaatgctgccccagggcgagaacctccaggacgtccttccacgggatatttactgccgattgaagcggcatctcgaatacgtgaagctaatgatgcccctttggatgacccccgaccagcgtggcaagggactgtacgcggattatctgtttaacgcaattgcagggaattgggagaggaagaggcccgtctgggtgatgctgatggtaaacagtctcacagaggtcgacatcaaatcgcgcggagtcccagtcctggatctgttcctagcacaagaggccgagaggctgcggaagcagacaggggctgtggagaaagtagaggagcagtgccacccattaaacggcctcaacttctctcaggtcatatttgccctcaatcagacactgctgcaacaggagagcctgcgtgcaggatctcttcaaataccatacaccactgaggacctaattaagcattacaactgcggcgacctttcatcagttattctgtcacatgacagttctcaggtcccaaacttcatcaacgcaacactgccaccacaggaacgcattaccgcccaagaaatcgattcctaccttcgcagagagttgatatacaagagaaacgaacgaattggcaagcgcgtgaaggccttactcgaagaattcccagacaagggctttttcttcgccttcggcgccggccacttcatgggaaacaataccgtgcttgacgtgctgcggcgcgaaggatatgaggtggagcatgccccagccggacggcctattcacaaagggaagtcaaaaaaaacttccacaagacctactctgtccacaattttcgctcccaaagtaccaacattggaggtcccggcccctgaggcagtctccagcggccattcaactttaccacccttagtgtctcggcctggttcagccgatactccaagtgaggcagaacagaggttcagaaagaagcgtaggaggtcccaacgccggccaaggcttcgacagttctcagacttgtgggtaaggctggaagaaagtgatatcgttccgcagctgcaagtgccagtcttagaccgtcacatttcgaccgaattaagactgcctagaaggggacactcacaccattcccaaatggttgccagctctgcatgcttgtccctctggactcctgttttctgggtgctagtcttagcttttcagacagaaacaccactactctag

SEQ ID NO: 97406 - DNA, 1518 bp, Artificial Sequence
  derived and/or modified sequence
atgagcccctggagctggttcctgctgcagaccctgtgcctgctgcccactggagctgccagccggcggggggcccctggaacagccaactgtgagctgaagccccagcagagcgagctgaacagcttcctgtggaccatcaagagggaccccccatcctacttcttcggcaccatccacgtgccctacaccagggtgtgggacttcatcccagacaacagcaaggaggccttcctgcagagcagcatcgtgtactttgagctggacctgacagacccctacaccatcagcgccctgaccagctgccagatgctgccccagggcgagaacctgcaggatgtgctgccccgggacatctactgccgcctgaagaggcacctggagtatgtgaagctgatgatgcccctgtggatgaccccagaccagaggggcaagggcctgtatgctgactacctgttcaatgccatcgccggcaactgggagaggaagaggcctgtgtgggtgatgctgatggtgaacagcctgacagaggtggacatcaagagccggggcgtgcctgtgctggacctcttcctggcccaggaggccgagcggctgaggaagcagacaggagctgtggagaaggtggaggagcagtgccaccccctgaatggcctgaacttcagccaggtgatctttgccctgaaccagaccctgctgcagcaggagagcctgcgggccggcagcctgcagatcccctacaccacagaggacctgatcaagcactacaactgtggggacctgagcagcgtcatcctgagccatgacagcagccaggtgcccaacttcatcaatgccaccctgcccccccaggagcgcatcacagcccaggagattgacagctacctgcggcgggagctgatctacaagagaaatgaaagaattggcaagagggtgaaggccctgctggaggagttcccagacaagggcttcttctttgccttcggggccggccacttcatgggcaacaacacagtgctggatgtgctgcggcgggagggctatgaggtggagcacgccccagctggccggcccatccacaagggcaagagcaagaagaccagcacccggcccaccctgagcaccatctttgcccccaaggtgcccaccctggaggtgcctgcccctgaggccgtgagcagcggccacagcaccctgccccccctggtgtcccggcccggcagcgctgacaccccatctgaggccgagcagcgcttcaggaagaagagaagaagaagccagaggcggccccggctgcggcagttcagtgacctgtgggtgcggctggaggagagtgacatcgtgccccagctgcaggtgcctgtgctggacagacacatcagcacagagctgcggctgccccggcggggccacagccaccacagccagatggtggccagcagcgcctgcctgagcctgtggacccctgtgttctgggtgctggtgctggccttccagacagagacccccctgctgtag

SEQ ID NO: 97407 - DNA, 1518 bp, Artificial Sequence
  derived and/or modified sequence
atgagcccctggagctggttcctgctgcagaccctgtgcctgctgcctaccggcgcagcctctaggcgcggcgccccaggcaccgcgaattgtgagctaaaaccccagcagagcgagctgaatagttttctctggacgattaagcgtgatcccccctcttatttttttgggactatccacgtgccctacaccagggtgtgggactttatccccgacaattcaaaagaggctttcttacagagctctattgtctatttcgaacttgacctgacggacccatataccataagcgcccttacgtcctgtcagatgttaccacagggcgagaatctgcaggacgtactcccacgtgacatttattgtagacttaagagacatctggagtacgtgaagctgatgatgccactctggatgactcctgatcaacgaggcaaggggctctatgccgattatctatttaacgctatcgccggaaattgggagcgtaagagaccagtttgggttatgctaatggttaactccctaactgaggtcgatattaagtctagaggggtccccgtgcttgatctttttttagcgcaagaggcagaacgtctacggaaacagactggagcagttgaaaaggtcgaagaacagtgccacccactcaatggcctcaacttctcacaggtgatattcgcacttaatcagacccttctgcagcaggagagcttgagagcgggttcattgcagataccgtatacaacagaggatttaatcaagcactataactgcggcgacttgagctccgtgattctgtcccacgacagcagtcaagtccctaacttcatcaatgccaccctacctccccaggaaagaatcacagcccaagagattgattcctatctaagaagggagcttatctacaagaggaacgagagaatagggaaacgagtgaaagctctgctcgaggagtttcccgacaaaggattcttcttcgcctttggcgcaggacattttatgggcaataacaccgtgctggatgttctgcgccgggagggttacgaggttgagcacgctcccgccggtaggcctattcataaaggtaagtctaaaaagaccagtacacgacctaccttgagtaccattttcgctccaaaagttcctactttagaagtacccgccccagaagccgtctctagcgggcattcaacactgcctccactcgtgtccaggcccggcagcgctgatactccttcagaggcagaacaacgattccggaaaaaaagacgccgcagtcaacgccggcccagacttaggcaattttctgatctgtgggtgagactggaagaatcagatatcgttcctcagctccaggttcccgttctggatcgccacatcagcaccgagttgaggttgccgaggaggggccattctcatcacagtcagatggtggcctcttcagcatgtctctcgctgtggacgccagtattctgggttttggtactcgcttttcaaacggagactcctttactctag

SEQ ID NO: 97408 - DNA, 1518 bp, Artificial Sequence
  derived and/or modified sequence
atgtctccctggagttggttcctgctccagaccctgtgtctcttgcctacgggcgcagcaagccggcgaggggctcccggaaccgccaattgtgagctcaaaccccagcagtccgaactgaactcatttctttggaccatcaaacgtgaccctccatcctacttcttcggcaccatccatgtcccatatacccgagtctgggatttcatccctgacaattctaaagaggcattcctgcagtcctcaatagtctacttcgaattggatctgacggatccctacacgatcagcgccctgacctcttgccaaatgctccctcagggcgaaaacctccaggacgtattgcctagagacatttactgtcgcctgaaaaggcatctggagtacgtgaaactgatgatgcccctgtggatgacccccgatcagcgtggtaagggattgtatgcagactacctgttcaacgccattgcaggaaattgggagagaaaacgccctgtgtgggtcatgctgatggtgaactctctcacagaagttgatattaagtctaggggtgtcccagtcctggatctttttttagcccaggaggcagagcgactccgcaagcagacaggagcggtcgagaaagtcgaggaacagtgtcacccccttaacggtctaaacttctcacaggtcatcttcgcgctgaaccagaccctactacaacaggagtctctgagggcaggctcccttcagatcccatacacgacagaggatctgatcaagcactataactgcggggaccttagcagcgttatcctcagccacgactcaagtcaagtgcccaacttcattaatgccacactgccaccacaggaacgcatcacagcgcaagagatcgactcgtacctccgacgcgagctcatatacaagaggaatgagcgcatcggtaagcgcgtcaaggctttactggaggagttccctgataaagggtttttcttcgcttttggcgcagggcacttcatgggtaataatactgtccttgatgtcctccgccgagaaggctacgaggtcgagcatgccccagctggacgcccaattcacaaaggaaaatctaagaagactagtacaagacctacactaagcactattttcgcaccaaaggtgcccactctggaggtgcccgctcctgaggccgtaagtagcgggcactccactcttccaccacttgtttcgcggccaggctcggcagacaccccaagcgaggcagaacaacggtttagaaagaagcggaggagatctcagaggagaccgagattaaggcagttttcagatctgtgggtaagattggaggagagtgacattgttccgcagctccaagttccagtgctggaccggcacattagtaccgagctgcgtctccccaggcgcggtcatagtcaccacagtcaaatggtggcatcttcggcttgtctgagcctctggaccccagtattttgggtgctggttctagcatttcagacggaaacaccactgctgtag

SEQ ID NO: 97409 - protein, 593 aa, Artificial Sequence
  derived and/or modified sequence
MPRTLSLHEITDLLETDDSIEASAIVIQPPENATAPVSDEESGDEEGGTINNLPGSLLHTAAYLIQDGSDAESDSDDPSYAPKDDSPDEVPSTFTVQQPPPSRRRKMTKILCKWKKADLTVQPVAGRVTAPPNDFFTVMRTPTEILELFLDDEVIELIVKYSNLYACSKGVHLGLTSSEFKCFLGIIFLSGYVSVPRRRMFWEQRTDVHNVLVSAAMRRDRFETIFSNLHVADNANLDPVDKFSKLRPLISKLNERCMKFVPNETYFSFDEFMVPYFGRHGCKQFIRGKPIRFGYKFWCGATCLGYICWFQPYQGKNPNTKHEEYGVGASLVLQFSEALTEAHPGQYHFVFNNFFTSIALLDKLSSMGHQATGTVRKDHIDRVPLESDVALKKKERGTFDYRIDGKGNIVCRWNDNSVVTVASSGAGIHPLCLVSRYSQKLKKKIQVQQPNMIKVYNQFMGGVDRADENIDKYRASIRGKKWYSSPLLFCFELVLQNAWQLHKTYDEKPVDFLEFRRRVVCHYLETHGHPPEPGQKGRPQKRNIDSRYDGINHVIVKQGKQTRCAECHKNTTFRCEKCDVALHVKCSVEYHTE

SEQ ID NO: 97410 - DNA, 540 bp, Artificial Sequence
  derived and/or modified sequence
atgcccaacgagggcatcccccacagcagccagacccaggagcaggactgcctgcagagccagcccgtgagcaacaacgaggagatggccatcaagcaggagagcggcggcgacggcgaggtggaggagtacctgagcttcagaagcgtgggcgacggcctgagcaccagcgccgtgggctgcgccagcgccgcccccagaagaggccccgccctgctgcacatcgacagacaccagatccaggccgtggagcccagcgcccaggccctggagctgcagggcctgggcgtggacgtgtacgaccaggacgtgctggagcagggcgtgctgcagcaggtggacaacgccatccacgaggccagcagagccagccagctggtggacgtggagaaggagtacagaagcgtgctggacgacctgaccagctgcaccaccagcctgagacagatcaacaagatcatcgagcagctgagcccccaggccgccaccagcagagacatcaacagaaagctggacagcgtgaagagacagaagtactag

SEQ ID NO: 97411 - DNA, 540 bp, Artificial Sequence
  derived and/or modified sequence
atgcccaatgaaggcatccctcacagtagccagacccaggaacaggactgtcttcagtctcagcccgtgagcaataatgaagagatggcaatcaagcaggagtcaggaggtgacggggaagtggaagaatacctcagtttcagatccgttggagacggactctccaccagcgccgtgggatgcgccagtgccgcccccagaagagggccagctttgctgcatattgaccgacaccagatccaggccgtcgagccttctgcccaggctttagaactgcaggggctgggcgtggatgtctatgaccaggacgtgcttgagcagggggtgctgcagcaagtggataatgctattcacgaagcttctcgcgcaagccagctagtggatgtcgagaaggagtatcggagcgtcctcgatgacctgacctcttgtacaacctccttgcggcagattaacaaaataatagagcagttgtcgccacaggctgccacctcccgtgatatcaatcgaaaactagacagtgtgaagagacaaaaatattag

SEQ ID NO: 97412 - DNA, 660 bp, Artificial Sequence
  derived and/or modified sequence
aggtgcgcgcgtggcggagggggaacagagaagcaggacagctctccatccttcccgtgttcagtcgtgggagacaacaagagaggtcacagcctggcgaccaaaaagtagtctgtagagaatgccaaatgagggaatcccccactcaagtcaaactcaggagcaagactgtttacagagtcaacctgtcagtaataatgaagaaatggcaatcaagcaagaaagtggtggtgatggggaggtggaggagtacctctcctttcgttctgtgggtgacgggctgtccacctctgctgtggggtgcgcatcagcagctccgaggagagggccagccctgctgcacatcgaccgacatcagatccaggcagtagagcctagcgcccaggcccttgagctgcagggtttgggtgtggacgtctatgaccaggacgtgctggaacagggagtgcttcagcaggtggacaatgccatccatgaggccagccgtgcctcccagctcgttgacgtggagaaggagtatcggtcggtcctggatgacctcacgtcatgtacgacatccctaaggcaaatcaataaaattattgaacagcttagccctcaagctgccaccagcagagacatcaacaggaaactagattctgtaaaacgacagaagtataa

SEQ ID NO: 97413 - DNA, 540 bp, Artificial Sequence
  derived and/or modified sequence
atgcccaatgaaggcatcccccacagcagccagacccaggagcaggactgcctgcagagccagcctgtgagcaacaatgaggagatggccatcaagcaggagagcggaggagatggagaggtggaggagtacctgtccttccgctctgtgggagatggcctgagcaccagcgctgtgggctgtgccagcgctgccccccggcggggccctgccctgctgcacatcgacagacaccagatccaggccgtggagcccagcgcccaggccctggagctgcagggcctgggcgtggatgtgtatgaccaggatgtgctggagcagggcgtgctgcagcaggtggacaatgccatccacgaggccagccgggccagccagctggtggatgtggagaaggagtacagatctgtgctggatgacctgaccagctgcaccaccagcctgcggcagatcaacaagatcatcgagcagctgagcccccaggccgccaccagccgggacatcaacaggaagctggacagcgtgaagaggcagaagtactag

SEQ ID NO: 97414 - DNA, 540 bp, Artificial Sequence
  derived and/or modified sequence
atgcccaacgagggcatcccccacagcagccagacccaggagcaggattgcctacagagccagcctgtgtccaacaacgaggagatggcaattaagcaagaatcgggtggcgacggggaagttgaggagtacttgagctttcgttccgtgggtgacggcctgtccacctccgctgtggggtgcgcgagcgccgcgccgcgcaggggacccgcgttattgcacattgatcggcaccaaatccaagcagtcgagccaagtgctcaggctcttgagctgcagggtctgggtgtcgatgtgtacgaccaggacgtcctggaacaaggggtgctgcagcaggttgacaatgccatacatgaagcgtctcgagcctcacagcttgtggacgtagaaaaggaataccgcagtgtgctcgacgacttgaccagttgcacaacttccttgagacagatcaataaaattatcgagcagttgagccctcaagctgccacctcacgtgatatcaaccgaaaactcgattcggtgaaacggcaaaaatattag

SEQ ID NO: 97415 - DNA, 540 bp, Artificial Sequence
  derived and/or modified sequence
atgcctaacgagggcatcccccattcatcacaaacgcaggaacaagactgtctccagtctcaacctgtgtcgaataatgaggagatggccataaagcaggaatcgggcggtgatggcgaagtcgaggaatatttgagcttcagaagtgtgggggatggcttgtctaccagcgccgtcgggtgcgcttctgccgctccccgacgaggccctgcactgctccacattgatcgccaccaaatccaagcggttgagccatccgcccaagcactggaactccagggcctgggcgtggatgtctacgaccaggacgtcctggaacagggcgtcctgcagcaggtggataatgccatccacgaggcttctcgagcatcccaactggttgatgtcgaaaaagagtaccggtcggtcctggacgacttgacaagctgtacgacttcactgcgtcaaatcaataaaatcattgagcagctcagcccacaagccgctacatcacgcgatattaaccggaaactggattccgtcaagcgccagaagtattag

SEQ ID NO: 97416 - DNA, 1782 bp, Artificial Sequence
  derived and/or modified sequence
atgcccagaaccctgagcctgcacgagatcaccgacctgctggagaccgacgacagcatcgaggccagcgccatcgtgatccagccccccgagaacgccaccgcccccgtgagcgacgaggagagcggcgacgaggagggcggcaccatcaacaacctgcccggcagcctgctgcacaccgccgcctacctgatccaggacggcagcgacgccgagagcgacagcgacgaccccagctacgcccccaaggacgacagccccgacgaggtgcccagcaccttcaccgtgcagcagcccccccccagcagaagaagaaagatgaccaagatcctgtgcaagtggaagaaggccgacctgaccgtgcagcccgtggccggcagagtgaccgccccccccaacgacttcttcaccgtgatgagaacccccaccgagatcctggagctgttcctggacgacgaggtgatcgagctgatcgtgaagtacagcaacctgtacgcctgcagcaagggcgtgcacctgggcctgaccagcagcgagttcaagtgcttcctgggcatcatcttcctgagcggctacgtgagcgtgcccagaagaagaatgttctgggagcagagaaccgacgtgcacaacgtgctggtgagcgccgccatgagaagagacagattcgagaccatcttcagcaacctgcacgtggccgacaacgccaacctggaccccgtggacaagttcagcaagctgagacccctgatcagcaagctgaacgagagatgcatgaagttcgtgcccaacgagacctacttcagcttcgacgagttcatggtgccctacttcggcagacacggctgcaagcagttcatcagaggcaagcccatcagattcggctacaagttctggtgcggcgccacctgcctgggctacatctgctggttccagccctaccagggcaagaaccccaacaccaagcacgaggagtacggcgtgggcgccagcctggtgctgcagttcagcgaggccctgaccgaggcccaccccggccagtaccacttcgtgttcaacaacttcttcaccagcatcgccctgctggacaagctgagcagcatgggccaccaggccaccggcaccgtgagaaaggaccacatcgacagagtgcccctggagagcgacgtggccctgaagaagaaggagagaggcaccttcgactacagaatcgacggcaagggcaacatcgtgtgcagatggaacgacaacagcgtggtgaccgtggccagcagcggcgccggcatccaccccctgtgcctggtgagcagatacagccagaagctgaagaagaagatccaggtgcagcagcccaacatgatcaaggtgtacaaccagttcatgggcggcgtggacagagccgacgagaacatcgacaagtacagagccagcatcagaggcaagaagtggtacagcagccccctgctgttctgcttcgagctggtgctgcagaacgcctggcagctgcacaagacctacgacgagaagcccgtggacttcctggagttcagaagaagagtggtgtgccactacctggagacccacggccacccccccgagcccggccagaagggcagaccccagaagagaaacatcgacagcagatacgacggcatcaaccacgtgatcgtgaagcagggcaagcagaccagatgcgccgagtgccacaagaacaccaccttcagatgcgagaagtgcgacgtggccctgcacgtgaagtgcagcgtggagtaccacaccgagtag

SEQ ID NO: 97417 - DNA, 1782 bp, Artificial Sequence
  derived and/or modified sequence
atgcccaggaccctttccctccacgagatcacagacttgctggaaactgacgacagtattgaagcttccgcaatcgtgatccagccccctgagaacgccacagctcctgtaagtgatgaggagagtggtgacgaagaaggcggcactattaataatcttcccggcagcctgttgcacacagccgcctatctgatccaagacggtagtgatgccgaaagcgactcggacgatccctcctacgcccccaaggatgacagccccgacgaagttccctccactttcactgtccagcagcctcctccctcacggcgacgcaaaatgacaaagatcctttgcaaatggaaaaaagcagacctgactgtgcagcctgtcgccggcagagtgaccgctccaccgaacgatttcttcaccgtcatgagaacgcctaccgagattctggaactctttctagatgacgaggtaatcgaacttatcgtcaagtacagcaatctctatgcatgctcgaagggggtccacctgggtctgacttcgtctgagttcaaatgtttcctgggaatcatttttctttctgggtacgtgagtgtaccccggcgccgcatgttctgggaacagcgcacagatgtgcacaacgtgcttgtttcggccgctatgagaagagatcggtttgagaccattttcagtaacctgcacgttgccgataatgcaaacctcgatccagttgacaagttttctaaactgcggccactgatttctaagttgaacgaaagatgtatgaaatttgtgccaaatgagacctacttttcttttgatgaatttatggtaccgtatttcggaaggcacggatgcaagcaatttatccggggcaaacccatccgtttcggttacaagttttggtgcggagccacatgcctgggatacatctgttggtttcagccttaccagggcaagaaccccaacaccaagcacgaagaatatggcgttggggcgtcattggtgttacagttctctgaggccctgaccgaagcgcatcccggtcagtaccactttgtgtttaataacttcttcaccagcattgccctcctggataagcttagctcgatgggtcaccaggctaccggaacggtgcgcaaagaccatatagacagggtgcccctggagagtgatgtcgccctcaaaaagaaggagcgggggacctttgactatcggatcgacggcaagggcaacattgtgtgcaggtggaatgataattccgtcgtgacggtggcctcctctggagctggtatccaccctctatgtcttgtgtctagatatagtcagaagcttaagaagaaaattcaagtgcagcagcccaatatgatcaaagtgtacaaccagttcatgggaggcgtggacagagccgacgaaaacatcgataagtatagagcctccatccggggaaaaaaatggtatagcagcccattgctgttttgctttgagttggttttacagaacgcctggcagcttcacaagacctatgatgaaaaaccagtggacttccttgagttccgcagaagagtggtttgccactatctcgaaactcacgggcatcccccagagcctggccaaaagggccgaccacagaaacgaaatatcgattcccgctatgacggcatcaaccacgtgatagtgaaacaggggaagcagacccgctgcgcagaatgccataaaaataccacatttcgttgcgagaagtgtgacgttgcactgcatgtcaagtgctccgtcgaatatcacaccgaatag

SEQ ID NO: 97418 - DNA, 1782 bp, Artificial Sequence
  derived and/or modified sequence
atgcctcgaactctaagtctgcacgagatcaccgacttgttggagaccgatgattccatcgaggcatctgcaattgtgattcagcccccggagaacgcaaccgcccccgtgagtgatgaggagtccggggacgaagagggcgggacaataaacaatttgcccgggtcactccttcatacagccgcatatcttatccaagatgggtcagatgctgagtccgactcagatgatccctcatatgcccctaaagacgactctcccgacgaagtgcccagcacatttacggtccaacaacctcctccaagtcgtagaagaaagatgacaaagatcctatgcaagtggaaaaaggctgatctcaccgtgcagccagtcgctggccgcgtgacagcccctcctaatgacttctttaccgtgatgcggacgccgacggaaatactggagctgtttctggacgacgaggtcattgaacttattgtgaagtatagcaatctgtacgcatgctcgaagggcgtccacctgggcctgacatcgagcgagtttaaatgcttcctgggcattatctttttgtcaggttacgtgtcggttccccgtcgacgcatgttttgggagcagcggaccgatgtacacaatgtccttgtcagtgccgctatgagaagagacaggttcgagactatattctcgaacttgcatgttgctgacaacgcaaatctggatcccgttgacaagttcagcaagctgcgccctctgatttcaaaattgaatgaaaggtgcatgaagtttgtaccaaacgagacatacttctccttcgacgaattcatggtcccatatttcgggcgacatggctgtaagcagtttatcagaggaaagccgattcggtttgggtataagttttggtgtggggctacttgcctgggatatatctgctggtttcagccatatcaggggaagaatcccaataccaaacatgaggagtatggtgtgggagcctcactggtgctccagttcagcgaagccctgactgaagcgcatccaggacagtaccactttgtgtttaacaacttttttacatcgatagccctgctggataaactatcctccatgggccatcaggccacgggcactgtgaggaaggaccacatcgatcgcgtccccctagagtcagatgtggcacttaagaagaaagaacgtggcacttttgactacaggatcgatggcaaaggaaatattgtgtgtcgatggaatgacaactccgtggtgacagtggcgtctagcggagcaggaattcaccccctgtgcctcgttagtagatattcccaaaagctcaagaagaagattcaggtacaacagccaaacatgatcaaggtctataatcagttcatgggaggcgtggaccgggccgatgaaaacattgataagtaccgagcatctatcagggggaagaagtggtacagttcgccacttttgttctgctttgagctcgtgcttcagaatgcctggcagcttcataagacctatgatgagaaaccagtggatttcctcgagttcagacgcagggttgtgtgccattaccttgagactcatggccatccgccagaaccaggccagaaaggtaggccccagaaaaggaatattgactcaagatacgatgggatcaaccacgttatcgtcaaacagggaaaacagaccagatgtgctgagtgtcataaaaatacaacttttagatgcgaaaagtgtgacgtggctctgcacgtgaagtgttcagtggagtaccataccgaatag

SEQ ID NO: 97419 - DNA, 1782 bp, Artificial Sequence
  derived and/or modified sequence
atgcccaggaccctgagcctgcacgagatcacagacctgctggagacagatgacagcattgaggccagcgccatcgtcatccagcccccagaaaatgccacagcccctgtgtctgatgaggagagcggagatgaggagggcggcaccatcaacaacctgcccggcagcctgctgcacacagctgcctacctgatccaggacggcagtgatgctgagagtgacagtgatgaccccagctatgcccccaaggatgacagcccagatgaggtgcccagcaccttcaccgtgcagcagcccccacccagcagaagaaggaagatgaccaagatcctgtgcaagtggaagaaggctgacctgactgtgcagcctgtggccggccgggtgacagcccccccaaatgacttcttcaccgtgatgaggacccccacagagatcctggagctgttcctggatgatgaggtgattgagctgattgtgaagtacagcaacctgtatgcctgcagcaaaggagtgcacctgggcctgaccagcagcgagttcaagtgcttcctgggcatcatcttcctgagcggctacgtgtctgtgcccaggaggaggatgttctgggagcagaggacagatgtgcacaacgtgctggtgtctgctgccatgaggcgggacagatttgagaccatcttcagcaacctgcacgtggccgacaatgccaacctggaccctgtggacaagttcagcaagctgcggcccctcatcagcaagctgaatgaacgctgcatgaagtttgtgcccaatgagacctacttctcctttgatgagttcatggtgccctacttcggccgccacggctgcaagcagttcatccggggcaagcccatccgcttcggctacaagttctggtgtggggccacctgcctgggctacatctgctggttccagccctaccagggcaagaaccccaacaccaagcatgaggagtatggagtgggcgccagcctggtgctgcagttcagcgaggccctgacagaggcccaccctggccagtaccactttgtgttcaacaacttcttcaccagcatcgccctgctggacaagctgagctccatgggccaccaggccaccggcaccgtgaggaaggaccacatcgacagagtgcccctggagagtgatgtggccctgaagaagaaggagcggggcacctttgactacagaattgatggcaagggcaacatcgtgtgccgctggaatgacaacagcgtggtgacagtggccagcagcggggccggcatccaccccctgtgcctggtgagccgctacagccagaagctgaagaagaagatccaggtgcagcagcccaacatgatcaaggtgtacaaccagttcatgggcggcgtggacagagcagatgagaacatcgacaagtaccgggccagcatccggggcaagaagtggtacagcagccccctgctcttctgctttgagctggtgctgcagaatgcctggcagctgcacaagacctatgatgagaagcctgtggacttcctggagttcagaagaagagtggtgtgccactacctggagacccacggccaccccccagagcccggccagaagggccggccccagaagaggaacatcgacagccgctatgatggcatcaaccacgtgattgtgaagcagggcaagcagacccgctgtgccgagtgccacaagaacaccaccttccgctgtgagaagtgtgatgtggccctgcacgtgaagtgcagcgtggagtaccacacagaatag

SEQ ID NO: 97420 - DNA, 1782 bp, Artificial Sequence
  derived and/or modified sequence
atgccccggaccctgagcctgcacgagatcaccgacctgctggagaccgatgactctatagaggcctctgctatagttattcagccaccagagaacgccaccgcgccagtgagcgacgaggaatcgggcgatgaggagggtggtacaatcaataaccttcctgggtctctgttgcatacagcagcttatctgatccaggatggtagcgatgccgagtcggactcagatgacccctcatatgcgcccaaggacgactcgcctgacgaagtaccctcaacatttacagtccagcagcctccacccagtagaaggcgaaagatgacaaagatattatgtaagtggaaaaaggctgacctgaccgtgcagcctgtggctggccgagtgaccgcccctccaaatgatttttttaccgtcatgcgcactcctaccgagatactggaattgttcctcgatgatgaggtgatagagctcatcgtgaagtattccaatctgtatgcctgttcaaaaggggttcatctgggactgacttccagtgaattcaagtgctttctgggcatcatatttctctcaggctacgttagtgtccctcggaggaggatgttctgggaacagcgcaccgacgtgcacaatgtgctggttagcgctgctatgcgtcgagatcgcttcgagactatcttttcgaacctgcatgtcgctgacaacgcaaatcttgatccagtagacaagtttagcaagctgcggccattaattagcaagctaaatgagaggtgcatgaaattcgtccctaatgaaacatacttctcctttgacgagttcatggttccttacttcggccggcatggctgcaaacaatttatcagaggtaaacctatacggttcggctataaattctggtgtggcgcaacgtgcttgggatacatctgctggttccagccctaccaggggaagaatccaaataccaagcacgaggagtacggcgtgggggcttccctggtgctgcagttcagcgaggctttgaccgaggcgcacccaggtcagtatcattttgtcttcaataatttttttacaagcattgctcttctggataaactctcaagcatgggccaccaggccacaggcacagtccggaaggatcacattgacagggtgccattggagagtgacgtggccttgaaaaagaaggagcggggtacgtttgattatcggatcgatggaaaggggaacatagtatgcagatggaatgacaacagtgtggtcaccgtagcatcgagcggggccggaattcaccccctatgcttggtgtcgagatattctcagaaactgaaaaagaaaatccaagtacagcagcccaatatgatcaaggtctacaaccagtttatgggcggggtggatcgagctgacgaaaatatcgataagtacagggccagtatccggggcaagaagtggtactccagcccactgctgttttgtttcgaactggtcctccagaacgcctggcagctgcataagacctacgatgagaagcctgtcgacttcctggagttcaggaggcgggttgtctgccactacctggagacccatggacatccccccgaaccaggccaaaagggtaggccccagaaaagaaacatcgatagccgctacgacggaataaaccacgttatcgtaaagcagggcaaacagacgcgctgtgctgagtgccacaagaatactactttccggtgcgaaaagtgtgacgtggccctgcacgtcaagtgttctgtggagtaccacacagagtag

SEQ ID NO: 97421 - DNA, 1782 bp, Artificial Sequence
  derived and/or modified sequence
atgccccggaccctgagcctgcacgagatcaccgacctgctggagactgatgattccatcgaggcctccgcgatcgtgatccaacctccagagaatgctaccgctcccgtgagtgacgaggaaagtggggacgaggagggagggacgatcaataaccttcccgggagtcttctccataccgccgcgtacctgattcaggacggatcagatgccgaatccgactctgatgatccctcatatgcccctaaagacgactctccggacgaagtgcctagcacctttaccgtccagcagcccccaccttcacgccgccgtaaaatgacgaagattttatgtaaatggaaaaaagctgatctgacagttcaacccgtagcgggtagggtgacagctcctcctaacgatttttttactgtgatgagaacccccacagagatcctggagcttttcctggatgacgaagtgatcgagctcatagtgaagtattctaacctctacgcttgctccaaaggagtgcacctgggcctgacctcttccgagttcaaatgctttttagggataatattcctatctggctacgtaagcgtgccccggagaaggatgttttgggagcaacggacggatgtgcataatgttttggttagcgcggctatgcgaagggatcggtttgagaccatcttcagcaatctgcacgtcgctgataacgcaaacctggatcctgtcgataagttttcaaagctcagacctctcattagtaagttgaatgaaagatgtatgaagtttgttcccaatgaaacgtacttctctttcgacgagttcatggttccgtattttggaaggcacggctgtaagcaattcatccgcggcaaacccattaggttcggttacaaattctggtgcggggcaacatgtctgggctatatctgttggtttcagccatatcagggcaagaaccccaataccaagcacgaggagtacggagtcggggcttcactggtgctgcagttttcagaagctttaaccgaggcccaccccgggcagtaccacttcgtttttaacaacttcttcacttcaatcgcactcctggataaactctccagcatgggacatcaggccaccggaacagtgcgcaaggatcacatagaccgcgtgcccttagagtccgatgtagctttgaaaaaaaaagaacggggcacgtttgactaccggatcgatggcaaaggcaatattgtctgccgatggaacgataattccgtcgttaccgttgcttcatccggggctggaattcatcccctgtgcctggtaagccgctatagccagaaactgaagaagaaaattcaggttcagcagccaaatatgattaaggtttataatcagtttatgggcggtgtggatagagctgatgaaaatatcgacaaataccgggcctccattaggggaaaaaagtggtattcatctccattgctgttttgttttgaactggtcctgcagaatgcctggcagctgcacaagacatatgatgagaagcctgtcgatttcctagagtttcgaagacgcgtcgtgtgtcattaccttgagacccatgggcatccccccgagcctggtcaaaaaggccgcccgcagaaacgaaacatcgactccagatatgatggaatcaaccacgtgatcgttaagcaaggcaaacagacgaggtgcgccgagtgtcacaagaatacaactttcaggtgcgagaagtgcgatgtggctctccacgttaaatgtagcgtggagtaccacactgagtag

SEQ ID NO: 97422 - DNA, 2212 bp, Artificial Sequence
  derived and/or modified sequence
ctatgagctgaagcctctgcccaagggcgggaaacggcagaagaaagtgccagtgcaggagattgatgatgactttttcccaagttctggggaagaagctgaagctgcttctgtaggagaaggaggaggaggaggtcggaaagtgggaagataccgagatgatggagatgaagattattataagcagcggttaagtcccaagatgcctcgaacactaagtttacatgaaataactgaccttttagagacagatgacagcatagaagcaagtgctatagtgatacaaccacctgaaaatgctacagcacctgtttctgatgaggaatcaggagatgaagaaggtggaacaataaataatctgccaggttctttgttgcacacagctgcgtatcttattcaagatggctctgatgctgagtctgactcagatgatccctcatacgcacctaaagatgactctcctgatgaagttccatctacgtttactgtgcagcaacctccaccatcaaggaggaggaaaatgacaaaaattctttgcaaatggaaaaaagccgacctaactgtacaacccgtagcaggtagagttacagcaccaccaaacgatttcttcaccgtaatgagaactcccacagaaattcttgaactttttcttgatgacgaggtcattgaactcattgtcaagtactccaacttatatgcttgcagtaaaggtgtacatcttggcttgactagctctgaattcaaatgttttctgggaattatttttctgagtggttatgtctcagttcctagaaggcgtatgttttgggaacaaagaacagatgtgcataatgtactggttagtgctgccatgagacgtgaccggtttgaaactatattttctaatttgcatgttgctgacaatgcaaatttggatccagtggacaaattttccaaattgcgacctctcataagcaaacttaatgagagatgcatgaaatttgttccaaatgaaacatatttcagctttgatgaattcatggttccttattttggtcgtcacgggtgcaaacaatttattcggggaaagcccattcggtttggctataagttttggtgtggtgccacctgtctgggctacatttgctggtttcagccgtatcagggtaaaaacccaaatactaaacatgaggaatatggtgtcggtgcgtcacttgtccttcagtttagtgaggcacttacagaggcacaccctggacaataccattttgtattcaataactttttcaccagtattgcacttcttgataagctcagttcaatgggacatcaggcaacaggtacagtgagaaaggatcacattgacagagttccactggaatcagatgtagctttaaagaaaaaagaaagaggcacatttgattatcgaattgatggcaaaggcaatattgtctgcagatggaatgataacagtgttgtcactgttgcctcatctggtgctggtatccatcccctgtgtcttgtcagtcgttactcccagaaactgaaaaagaagatacaagttcagcagccaaacatgatcaaagtgtataaccagttcatgggaggcgtagacagagctgatgaaaacattgataagtatcgggcatcaatccgtggaaagaaatggtattcaagccctcttttgttctgtttcgaactggtcttacaaaatgcttggcaattgcataaaacatatgatgagaaaccagtggattttctggagtttcgtcgacgtgtggtatgccattatctggagacccatggtcatcctccagaacctggccaaaaaggaagacctcagaagcgtaacattgactcacgttatgatggcataaatcatgtgatagtcaaacagggaaagcaaacgcgatgcgctgaatgtcataagaacacaacttttcgatgtgaaaaatgtgatgttgccttacatgtgaagtgttccgttgaatatcacactgaatagcaggtgtcaccacctcctgagataagaaacatagttttatacattatgtacagtgtagcagtggttttgcctagtgttccaattttggaacgtcacataacaatggaacataataaatttttttttctcttcaaatttttgttccttgaatttttctaggtaacatatatgaatttcatgcaaaaattcaaaaaattgtaacctcagacataaatgggttaaagatgt

SEQ ID NO: 97423 - DNA, 1782 bp, Artificial Sequence
  derived and/or modified sequence
atgcctcgaacactaagtttacatgaaataactgaccttttagagacagatgacagcatagaagcaagtgctatagtgatacaaccacctgaaaatgctacagcacctgtttctgatgaggaatcaggagatgaagaaggtggaacaataaataatctgccaggttctttgttgcacacagctgcgtatcttattcaagatggctctgatgctgagtctgactcagatgatccctcatacgcacctaaagatgactctcctgatgaagttccatctacgtttactgtgcagcaacctccaccatcaaggaggaggaaaatgacaaaaattctttgcaaatggaaaaaagccgacctaactgtacaacccgtagcaggtagagttacagcaccaccaaacgatttcttcaccgtaatgagaactcccacagaaattcttgaactttttcttgatgacgaggtcattgaactcattgtcaagtactccaacttatatgcttgcagtaaaggtgtacatcttggcttgactagctctgaattcaaatgttttctgggaattatttttctgagtggttatgtctcagttcctagaaggcgtatgttttgggaacaaagaacagatgtgcataatgtactggttagtgctgccatgagacgtgaccggtttgaaactatattttctaatttgcatgttgctgacaatgcaaatttggatccagtggacaaattttccaaattgcgacctctcataagcaaacttaatgagagatgcatgaaatttgttccaaatgaaacatatttcagctttgatgaattcatggttccttattttggtcgtcacgggtgcaaacaatttattcggggaaagcccattcggtttggctataagttttggtgtggtgccacctgtctgggctacatttgctggtttcagccgtatcagggtaaaaacccaaatactaaacatgaggaatatggtgtcggtgcgtcacttgtccttcagtttagtgaggcacttacagaggcacaccctggacaataccattttgtattcaataactttttcaccagtattgcacttcttgataagctcagttcaatgggacatcaggcaacaggtacagtgagaaaggatcacattgacagagttccactggaatcagatgtagctttaaagaaaaaagaaagaggcacatttgattatcgaattgatggcaaaggcaatattgtctgcagatggaatgataacagtgttgtcactgttgcctcatctggtgctggtatccatcccctgtgtcttgtcagtcgttactcccagaaactgaaaaagaagatacaagttcagcagccaaacatgatcaaagtgtataaccagttcatgggaggcgtagacagagctgatgaaaacattgataagtatcgggcatcaatccgtggaaagaaatggtattcaagccctcttttgttctgtttcgaactggtcttacaaaatgcttggcaattgcataaaacatatgatgagaaaccagtggattttctggagtttcgtcgacgtgtggtatgccattatctggagacccatggtcatcctccagaacctggccaaaaaggaagacctcagaagcgtaacattgactcacgttatgatggcataaatcatgtgatagtcaaacagggaaagcaaacgcgatgcgctgaatgtcataagaacacaacttttcgatgtgaaaaatgtgatgttgccttacatgtgaagtgttccgttgaatatcacactgaatag

SEQ ID NO: 97424 - DNA, 1782 bp, Artificial Sequence
  derived and/or modified sequence
atgcccagaactttatcactgcacgagattacagacctcctggagactgatgattccatagaagcatcagcaatagtgattcagccccctgagaatgccactgctccagtgagcgacgaggagagtggagacgaagagggtggaacaatcaacaacctgcccggatcactgttgcatactgctgcataccttattcaggatggcagcgacgcagaatctgattcagacgacccttcttatgctcccaaggatgactcccccgacgaagtgcccagcacattcaccgtacaacagccccctcctagccggaggcggaaaatgaccaaaatcctttgtaaatggaagaaggcagatctgacggtccagcctgttgctggacgtgtgaccgctccgcctaacgatttttttactgtaatgagaacaccaactgaaatattggagctgttcctggacgacgaggtgattgagttgatcgtcaaatattctaatctgtatgcctgctccaaaggtgtgcacttggggctcacctcctctgagttcaagtgttttcttgggatcatcttcctctccggttatgttagcgttccaaggaggcggatgttctgggagcaaaggaccgatgtgcacaacgtgctggtgtcagccgctatgcgaagagaccggttcgaaactatattcagcaatctacacgttgctgataacgccaacttggatccagtggataaatttagtaaactgaggcccctaatatcaaaacttaacgagcgctgtatgaagttcgtgccaaacgaaacctacttttcatttgatgagttcatggtcccgtactttggacggcatggatgtaagcaattcatccggggaaagccaatcaggtttgggtacaaattctggtgcggcgcaacctgcctggggtatatttgttggttccagccataccaggggaaaaacccaaacacgaagcatgaggagtacggggttggcgcttccctggtgcttcagttcagtgaggcattgaccgaggcccacccaggccagtaccatttcgtcttcaacaatttcttcacaagcatagcgctgctggataagctctcaagcatgggacaccaagcaaccggaaccgtgagaaaagatcatatcgaccgagttcctctcgagagcgatgtggcgttgaaaaagaaagaaagaggtacatttgattacagaatagatgggaaaggcaacattgtgtgcagatggaatgataacagtgtggtcacagtggcgtcctcaggggctggtattcacccattgtgtctggtgtcgaggtacagccagaaattgaagaaaaaaatccaggtgcagcagcccaatatgatcaaggtgtataaccagttcatgggtggcgtcgaccgcgcagacgaaaatatcgataaatatcgcgcaagcatccgcggaaaaaagtggtattcaagcccactcctgttttgcttcgagttagttttacaaaacgcctggcagttgcacaagacttatgacgagaaacctgtggacttcctggaatttcgccgtagggtagtatgtcattatctagagacccacgggcacccccctgagccaggacagaagggcagaccgcagaagagaaacattgattcccgctacgatggaattaatcatgtgattgtcaagcaaggaaaacagaccaggtgtgccgaatgtcataaaaatactaccttcaggtgtgaaaagtgcgatgttgcactccacgttaaatgttccgtggagtaccatacagagtag

SEQ ID NO: 97425 - DNA, 1782 bp, Artificial Sequence
  derived and/or modified sequence
atgccccgtaccttatccctgcacgagattacagacctcttggagaccgacgactctatagaggcaagtgccatagtcatccagccacccgagaatgccaccgcccctgtgagcgatgaggaaagcggtgatgaggaaggagggaccatcaacaacctacctggttccctactgcataccgctgcctatttgatacaggacggcagtgatgccgaatccgacagcgacgacccaagctacgcccctaaggatgatagtcccgatgaggtgcctagcacctttactgtgcagcagccccctccatcccgccgtcgcaaaatgaccaagattttgtgtaagtggaaaaaagcggatctgacagtgcagcccgtcgccggaagggtgactgcccctccaaacgacttctttacagttatgcgtaccccaacggagatcctagaattattcctggatgatgaggttatcgagctcatcgtgaaatacagcaacctatacgcctgcagtaaaggcgttcatcttgggcttacttcctctgagttcaaatgtttcctgggcatcattttcctaagcggatacgtctcagttccaaggcgtcgtatgttttgggaacagcggactgacgtccacaacgtgctcgtctctgccgcaatgagaagggatagattcgagacgatctttagcaatctacacgtggccgataacgcgaatttggaccctgttgataagtttagcaaactgcgtcctctgatctccaagctgaatgaaagatgtatgaagttcgttcccaacgagacctactttagctttgacgaatttatggtgccatatttcggacgccatggctgtaagcagttcatcaggggaaagccaatcaggttcggctataaattctggtgtggcgcaacttgccttggctacatctgctggtttcagccttatcagggaaaaaatcctaacactaaacatgaggagtatggagtcggcgcatccctcgttctgcaatttagcgaagcgctgaccgaagcacacccaggacagtaccatttcgtttttaataattttttcaccagcattgcgctactcgacaagttgtcttctatgggacatcaggcgacaggcaccgtgaggaaagatcatatcgaccgcgtgccactggagagcgacgtggccctcaagaagaaggagagaggcacattcgattaccggattgacggcaagggcaatatcgtatgtcgttggaatgataactccgtggtcaccgtggcctcatctggcgctgggatccatcccctgtgcctggtaagcaggtacagccagaagttgaagaaaaaaatccaggtccaacagcccaacatgattaaggtgtacaatcagttcatgggaggagtagatagagctgatgaaaatatagacaagtaccgggcttctatccgcggaaagaaatggtacagcagtcccctccttttctgtttcgagcttgtactgcaaaacgcttggcagctgcacaaaacatacgatgaaaaacccgtcgattttctggagtttcgtagacgcgtggtgtgccactatctagagacgcatggccaccccccagagcccggacagaaagggcgacctcaaaagcgtaacatcgatagccgctatgatggcattaaccacgtcattgtcaaacaggggaagcagacgagatgcgccgagtgtcacaagaataccactttccgatgtgaaaaatgtgacgttgcacttcatgtgaaatgctccgtcgagtaccacacggaatag

SEQ ID NO: 97426 - protein, 224 aa, Artificial Sequence
  derived and/or modified sequence
MGEQPIFSTRAHVFQIDPNTKKNWVPTSKHAVTVSYFYDSTRNVYRIISLDGSKAIINSTITPNMTFTKTSQKFGQWADSRANTVYGLGFSSEHHLSKVTELECVSSQANAVHTHKTELNQTIQELEETLKLKEEEIERLKQEIDNARELQEQRDSLTQKLQEVEIRNKDLEGQLSDLEQRLEKSQNEQEAFRNNLKTLLEILDGKIFELTELRDNLAKLLECS

SEQ ID NO: 97427 - DNA, 675 bp, Artificial Sequence
  derived and/or modified sequence
atgggcgaacagcccattttcagcacgcgcgcgcatgtatttcagatcgaccctaatacgaaaaaaaactgggttcctacgtccaagcacgctgtgacagtctcgtacttttacgacagtacccgtaatgtgtataggattatttccctggatggctcgaaggctatcatcaattcaactattacccctaatatgaccttcaccaagactagccaaaaatttggccagtgggcagacagtcgcgcaaacaccgtgtacggtctcggcttcagctctgagcaccatctgtcaaaggttaccgaactagaatgcgtgtcttcacaggcaaacgctgtccacacccataagactgagctcaaccagaccatccaggagctggaagaaaccctgaagctgaaagaggaagaaattgagaggctcaagcaggagatcgataatgccagggagctccaggagcaaagggactctttgacccaaaaactgcaagaagtggagatccgaaacaaggacctcgaggggcagctgtcagatctcgagcagcggcttgagaagtcacagaacgaacaggaggcgttcaggaataacctcaagaccctcctggagatcctggatggcaaaatcttcgagctcacagaattgcgcgacaatctggctaaactgctggagtgctcgtag

SEQ ID NO: 97428 - DNA, 774 bp, Artificial Sequence
  derived and/or modified sequence
gcaagttttcattgggcaaaatgggggaacaacctatcttcagcactcgagctcatgtcttccaaattgacccaaacacaaagaagaactgggtacccaccagcaagcatgcagttactgtgtcttatttctatgacagcacaagaaatgtgtataggataatcagtttagatggctcaaaggcaataataaatagtaccatcaccccaaacatgacatttactaaaacatctcagaagtttggccagtgggctgatagccgggcaaacaccgtttatggattgggattctcctctgagcatcatctttcgaaagtgactgaacttgaatgtgttagtagccaagcaaatgcagtacatactcataagacagaattaaatcagacaatacaagaactggaagagacactgaaactgaaggaagaggaaatagaaaggttaaaacaagaaattgataatgccagagaactacaagaacagagggattctttgactcagaaactacaggaagtagaaattcggaacaaagacctggagggacaactgtctgacttagagcaacgtctggagaaaagtcagaatgaacaagaagcttttcgcaataacctgaagacactcttagaaattctggatggaaagatatttgaactaacagaattacgagataacttggccaagctactagaatgcagctaaggaaagtgaaatttcagtgccaattaattaaaagatacactgtctctcttcataggactgtttaggctctgcatcaaga

SEQ ID NO: 97429 - DNA, 675 bp, Artificial Sequence
  derived and/or modified sequence
atgggagagcagcccatcttcagcacccgggcccacgtgttccagattgaccccaacaccaagaagaactgggtgcccaccagcaagcatgctgtgacagtgtcctacttctatgacagcaccagaaatgtgtaccgcatcatcagcctggatggcagcaaggccatcatcaacagcaccatcacccccaacatgaccttcaccaagaccagccagaagtttggccagtgggccgacagccgggccaacacagtgtatggcctgggcttcagcagcgagcaccacctgagcaaggtgacagagctggagtgtgtgagcagccaggccaatgctgtgcacacccacaagacagagctgaaccagaccatccaggagctggaggagaccctgaagctgaaggaggaggagattgagcggctgaagcaggagattgacaatgcccgggagctgcaggagcagagggacagcctgacccagaagctgcaggaggtggagatccggaacaaggacctggagggccagctgagtgacctggagcagaggctggagaagagccagaatgagcaggaggccttcaggaacaacctgaagaccctgctggagatcctggatggcaagatctttgagctgacagagctgcgggacaacctggccaagctgctggagtgcagctag

SEQ ID NO: 97430 - DNA, 675 bp, Artificial Sequence
  derived and/or modified sequence
atgggcgagcagcccatcttcagcacccgggcccacgtgttccagattgacccaaacaccaagaagaattgggtccctacctctaagcacgcggtgactgtttcctacttttatgattctactaggaatgtgtatcggattatttccctggacggaagcaaggcgatcattaactcaaccataacgccaaacatgacattcacgaaaacatctcagaagttcgggcaatgggcagactccagagcaaacacagtttatggtctcggattttcctcagaacaccacttatccaaggtaacagagctcgagtgcgtctcgtctcaggcaaacgccgtccatacccacaagacagagcttaatcagactattcaggagctggaggaaacactcaaactgaaagaggaagagatcgagcgccttaagcaggagattgacaacgcccgggaactgcaggagcagcgcgacagcttaacgcagaagctccaggaagtggaaattcgtaacaaagacctggagggccaactgagcgacctagagcagcgcctggagaagtctcagaacgaacaggaggcattccgaaacaatctgaaaacattacttgaaattctggacggcaaaattttcgaactgacagaactgcgtgacaacctggcgaagctgctagagtgctcatag

SEQ ID NO: 97431 - DNA, 675 bp, Artificial Sequence
  derived and/or modified sequence
atgggtgaacagccgatctttagcactcgagctcacgtgttccagatcgacccgaatactaagaagaattgggtgccaacttccaaacatgccgtgaccgtgtcttatttttacgactcaacccgaaatgtgtatcgcatcattagtctggatggatccaaagccattattaacagtactatcacgcccaacatgacgtttaccaagaccagccagaagtttggccagtgggccgacagtagggccaacacagtctatggtctcggctttagttcagaacaccatctgtcgaaggtgaccgaactcgagtgcgtttcaagtcaggcgaatgctgtgcacacccataaaaccgaactgaatcagaccatccaagagcttgaagagactttgaagttgaaggaagaggaaatagaaagactgaagcaggaaattgataatgccagagagctgcaggaacagagagactcattgactcagaaactgcaggaggtggaaatccgcaataaagatcttgaggggcagctttctgacctggagcagagactggaaaagtcacaaaacgaacaggaggctttcagaaacaatctgaaaactctcttagagattcttgatggtaaaattttcgagttaactgagctcagagacaatctcgccaagctgctggagtgttcttag

SEQ ID NO: 97432 - DNA, 675 bp, Artificial Sequence
  derived and/or modified sequence
atgggcgagcagcccatcttcagcaccagagcccacgtgttccagatcgaccccaacaccaagaagaactgggtgcccaccagcaagcacgccgtgaccgtgagctacttctacgacagcaccagaaacgtgtacagaatcatcagcctggacggcagcaaggccatcatcaacagcaccatcacccccaacatgaccttcaccaagaccagccagaagttcggccagtgggccgacagcagagccaacaccgtgtacggcctgggcttcagcagcgagcaccacctgagcaaggtgaccgagctggagtgcgtgagcagccaggccaacgccgtgcacacccacaagaccgagctgaaccagaccatccaggagctggaggagaccctgaagctgaaggaggaggagatcgagagactgaagcaggagatcgacaacgccagagagctgcaggagcagagagacagcctgacccagaagctgcaggaggtggagatcagaaacaaggacctggagggccagctgagcgacctggagcagagactggagaagagccagaacgagcaggaggccttcagaaacaacctgaagaccctgctggagatcctggacggcaagatcttcgagctgaccgagctgagagacaacctggccaagctgctggagtgcagctag

SEQ ID NO: 97433 - DNA, 534 bp, Artificial Sequence
  derived and/or modified sequence
atgggcgaacagccgatctttagcactagggcccatgtattccagattgacccaaacaccaagaaaaattgggtgcccacctccaagcacgccgtaacggtctcctacttctacgattccacaagaaatgtgtaccggatcatctcactcgacggctctaaagcaatcatcaattcaactattaccccaaacatgacattcacaaagaccagccagaagttcggccagtgggccgacagtcgagctaacaccgtgtacgggcttggcttctcttcagagcatcatttgtcgaagtttgcagagaagtttcaggagtttaaagaggctgcacgtttagcaaaagagaagtcccaagaaaagatggagctcacgagtaccccatctcaagaatcggcagggggagatctgcagagtccactcacaccagaatcaatcaatggtactgatgacgaaagaacgcccgatgttactcagaacagtgagcctagggctgagcctacccaaaatgccctgccattctctcatcgtaaatag

SEQ ID NO: 97434 - DNA, 815 bp, Artificial Sequence
  derived and/or modified sequence
gcaagttttcattgggcaaaatgggggaacaacctatcttcagcactcgagctcatgtcttccaaattgacccaaacacaaagaagaactgggtacccaccagcaagcatgcagttactgtgtcttatttctatgacagcacaagaaatgtgtataggataatcagtttagatggctcaaaggcaataataaatagtaccatcaccccaaacatgacatttactaaaacatctcagaagtttggccagtgggctgatagccgggcaaacaccgtttatggattgggattctcctctgagcatcatctttcgaaatttgcagaaaagtttcaggaatttaaagaagctgctcgactagcaaaggaaaaatcacaagagaagatggaacttaccagtacaccttcacaggaatccgcaggcggggatcttcagtctcctttaacaccggaaagtatcaacgggacagatgatgaaagaacacctgatgtgacacagaactcagagccaagggctgaaccaactcagaatgcattgccattttcacataggaagtagaaattcggaacaaagacctggagggacaactgtctgacttagagcaacgtctggagaaaagtcagaatgaacaagaagcttttcgcaataacctgaagacactcttagaaattctggatggaaagatatttgaactaacagaattacgagataacttggccaagctactagaatgcagctaaggaaagtgaaatttcagtgccaattaattaaaagatacactgtctctcttcataggactgtttaggctctgcatcaaga

SEQ ID NO: 97435 - DNA, 534 bp, Artificial Sequence
  derived and/or modified sequence
atgggagagcagcccatcttcagcacccgggcccacgtgttccagattgaccccaacaccaagaagaactgggtgcccaccagcaagcatgctgtgacagtgtcctacttctatgacagcaccagaaatgtgtaccgcatcatcagcctggatggcagcaaggccatcatcaacagcaccatcacccccaacatgaccttcaccaagaccagccagaagtttggccagtgggccgacagccgggccaacacagtgtatggcctgggcttcagcagcgagcaccacctgagcaagtttgctgagaagttccaggagttcaaggaggccgcccggctggccaaggagaagagccaggagaagatggagctgaccagcacccccagccaggagagcgctggaggagacctgcagagccccctgaccccagagagcatcaatggaacagatgatgagaggaccccagatgtgacccagaacagcgagcccagggctgagcccacccagaatgccctgcccttcagccacaggaagtag

SEQ ID NO: 97436 - DNA, 534 bp, Artificial Sequence
  derived and/or modified sequence
atgggcgagcagcccatcttcagcacccgggcccacgtgttccagattgatcctaacacgaaaaagaattgggttccaacttcaaaacatgctgtgaccgtatcctacttctatgatagcactcgaaatgtgtatagaattatttccctcgatggcagtaaggctatcattaattcgacgattaccccaaacatgactttcaccaaaacgtcacagaaatttggacagtgggctgactcacgagctaatacggtatacggacttggatttagttcagaacatcatctgtctaaattcgccgaaaagttccaagagttcaaggaagctgctcgcctggctaaggagaagtcacaagaaaaaatggagctcacctctaccccttcgcaagagtccgccggcggtgacctgcagagccccctgactccggagtcgattaatggtactgacgacgagcgtactccagatgttacacaaaacagcgaacctcgtgctgaacccactcagaacgccctgcctttctctcacaggaaatag

SEQ ID NO: 97437 - DNA, 534 bp, Artificial Sequence
  derived and/or modified sequence
atgggggagcagcctatcttcagtacgcgcgcacacgtgtttcagattgaccccaacacaaagaaaaactgggtacctaccagtaaacacgccgttacagtttcttacttttatgactccacgcgaaacgtttatcggatcatctctctcgacggaagcaaagcaattatcaactcaaccataacccccaacatgacattcactaaaaccagtcagaagttcggccagtgggccgacagtcgggcaaacaccgtctacggtttagggttttctagcgaacaccatctgtcaaagttcgccgagaaatttcaggagtttaaagaggccgcacggttagctaaagaaaaatcacaggagaaaatggaactgacttcaacccctagtcaagaatcggcaggcggagatctgcagtccccactgacaccggaatccataaacgggacagacgacgagagaacacctgatgtcactcagaatagcgaacctcgtgccgagcccactcagaatgctctgcccttctctcatagaaaatag

SEQ ID NO: 97438 - DNA, 534 bp, Artificial Sequence
  derived and/or modified sequence
atgggcgagcagcccatcttcagcaccagagcccacgtgttccagatcgaccccaacaccaagaagaactgggtgcccaccagcaagcacgccgtgaccgtgagctacttctacgacagcaccagaaacgtgtacagaatcatcagcctggacggcagcaaggccatcatcaacagcaccatcacccccaacatgaccttcaccaagaccagccagaagttcggccagtgggccgacagcagagccaacaccgtgtacggcctgggcttcagcagcgagcaccacctgagcaagttcgccgagaagttccaggagttcaaggaggccgccagactggccaaggagaagagccaggagaagatggagctgaccagcacccccagccaggagagcgccggcggcgacctgcagagccccctgacccccgagagcatcaacggcaccgacgacgagagaacccccgacgtgacccagaacagcgagcccagagccgagcccacccagaacgccctgcccttcagccacagaaagtag

SEQ ID NO: 97439 - DNA, 1309 bp, Artificial Sequence
  derived and/or modified sequence
actgcagccgaaccctggtccctcctccacaatgtggcttctcctcactctctccttcctgctggcatccacagcagcccaggatggtgacaagttgctggaaggtgacgagtgtgcaccccactcccagccatggcaagtggctctctacgagcgtggacgctttaactgtggcgcttccctcatctccccacactgggtgctgtctgcggcccactgccaaagccgcttcatgagagtgcgcctgggagagcacaacctgcgcaagcgcgatggcccagagcaactacggaccacgtctcgggtcattccacacccgcgctacgaagcgcgcagccaccgcaacgacatcatgttgctgcgcctagtccagcccgcacgcctgaacccccaggtgcgccccgcggtgctacccacgcgttgcccccacccgggggaggcctgtgtggtgtctggctggggcctggtgtcccacaacgagcctgggaccgctgggagcccccggtcacaagtgagtctcccagatacgttgcattgtgccaacatcagcattatctcggacacatcttgtgacaagagctacccagggcgcctgacaaacaccatggtgtgtgcaggcgcggagggcagaggcgcagaatcctgtgagggtgactctgggggacccctggtctgtgggggcatcctgcagggcattgtgtcctggggtgacgtcccttgtgacaacaccaccaagcctggtgtctataccaaagtctgccactacttggagtggatcagggaaaccatgaagaggaactgactattctagcctatctcctgtgcccctgactgagcagaagcccccacagctggccagcagccccgcctgacatggaacagaacggagccatcccccaagaccctgtccaaggcccagatgttagccaaggacttgtcccacctgaggacaaagctggcgctcaaggtcacctgtttaatgccaagataacaaagcgctgatccaagttgctctgtaggaatttctgtgacttttttctggggtcaaagagaaaccccgagacactgtacactgttccttttcacccaccaccccgatccctaggtgaggagaagcggcttgaagcagggctccattcattcaacacacatgaccacccgtgtgatcttgaacaagaggcccaatctcacttcgccttggtttccttatctgtaaaatgagaccatcttattgctgacttcaaagggctgttgtgaggattaaatgagatgattcgtctgaactgattaaaatcgtgtctggcactga

SEQ ID NO: 97440 - DNA, 855 bp, Artificial Sequence
  derived and/or modified sequence
actgcagccgaaccctggtccctcctccacaatgtggcttctcctcactctctccttcctgctggcatccacagcagcccaggatggtgacaagttgctggaaggtgacgagtgtgcaccccactcccagccatggcaagtggctctctacgagcgtggacgctttaactgtggcgcttccctcatctccccacactgggtgctgtctgcggcccactgccaaagccgcttcatgagagtgcgcctgggagagcacaacctgcgcaagcgcgatggcccagagcaactacggaccacgtctcgggtcattccacacccgcgctacgaagcgcgcagccaccgcaacgacatcatgttgctgcgcctagtccagcccgcacgcctgaacccccaggtgcgccccgcggtgctacccacgcgttgcccccacccgggggaggcctgtgtggtgtctggctggggcctggtgtcccacaacgagcctgggaccgctgggagcccccggtcacaagtgagtctcccagatacgttgcattgtgccaacatcagcattatctcggacacatcttgtgacaagagctacccagggcgcctgacaaacaccatggtgtgtgcaggcgcggagggcagaggcgcagaatcctgtgagggtgactctgggggacccctggtctgtgggggcatcctgcagggcattgtgtcctggggtgacgtcccttgtgacaacaccaccaagcctggtgtctataccaaagtctgccactacttggagtggatcagggaaaccatgaagaggaactgactattctagcctatctcctgtgcccctgactgagcagaagcccccacagctgg

SEQ ID NO: 97441 - protein, 4523 aa, Artificial Sequence
  derived and/or modified sequence
MAAQVAAREARDFREAPTLRLTSGAGLEAVGAVELEEEEENEEEAAARRARSFAQDARVRFLGGRLAMMLGFTEEKWSQYLESEDNRQVLGEFLESTSPACLVFSFAASGRLAASQEIPRDANHKLVFISKKITESIGVNDFSQVVLFGELPALSLGHVSAFLDEILVPVLSNKNNHKSWSCFTSQDMEYHIEVMKKKMYIFRGKMSRRTLLPIPTVAGKMDLDQNCSENKPPSNERIILHAIESVVIEWSHQIQEIIERDSVQRLLNGLHLSPQAELDFWMMRRENLSCIYDQLQAPVVLKMVKILTTKQSSYFPTLKDIFLAVENALLEAQDVELYLRPLRRHIQCLQETEFPQTRILIAPLFHTICLIWSHSKFYNTPARVIVLLQEFCNLFINQATAYLSPEDLLRGEIEESLEKVQVAVNILKTFKNSFFNYRKKLASYFMGRKLRPWDFQSHLVFCRFDKFLDRLIKIEDIFATTLEFEKLERLEFGGTKGAILNGQVHEMSEELMELCKLFKQSTYDPSDCTNMEFESDYVAFKSKTLEFDRRLGTIICEAFFNCNGLEAAFKLLTIFGNFLEKPVVMEIFSLHYSTLVHMFNTELDVCKQLYNEHMKQIECGHVVLNKNMPFTSGNMKWAQQVLQRLQMFWSNFASLRYLFLGNPDHALVYQKYVEMTTLLDQFESRIYNEWKSNVDEICEFNLNQPLVKFSAINGLLCVNFDPKLVAVLREVKYLLMLKKQDIPDSALAIFKKRNTILKYIGNLDLLVQGYNKLKQTLLEVEYPLIEDELRAIDEQLTAATTWLTWQDDCWGYIERVRAATSELEHRVERTQKNVKVIQQTMRGWARCVLPPRREHRREAAFTLEDKGDLFTKKYKLIQGDGCKIHNLVEENRKLFKANPSLDTWKIYVEFIDDIVVEGFFQAIMHDLDFFLKNTEKQLKPAPFFQAQMILLPPEIVFKPSLDREAGDGFYDLVEEMLCNSFRMSAQMNRIATHLEIKNYQNDMDNMLGLAEVRQEIMNRVVNVINKVLDFRNTLETHTYLWVDDRAEFMKHFLLYGHAVSSDEMDAHANEEIPEQPPTLEQFKEQIDIYEALYVQMSKFEDFRVFDSWFKVDMKPFKVSLLTIIKKWSWMFQEHLLRFVIDSLNELQEFIKETDSGLQRELNEGDHDGLVDIMVHLLAVRSRQRATDELFEPLKETITLLESYGQKMPEQVYIQLEELPERWETTKKIAATVRHEVSPLHNAEVTLIRKKCILFDAKQAEFRERFRHYAPLGFNAENPYTALDKANEELEALEEEMLQMQESTRLFEVALPEYKQMKQCRKEIKLLKGLWDVIIYVRRSIDNWTKTQWRQIHVEQMDVELRRFAKASSITEIWSLNKEVRVWDAYTGLEGTVKDMTASLRAITELQSPALRDRHWHQLMKAIGVKFLINEATTLADLLALRLHRVEDDVRRIVDKAVKELGTEKVITEISQTWATMKFSYEVHYRTGIPLLKSDEQLFETLEHNQVQLQTLLQSKYVEYFIEQVLSWQNKLNIADLVIFTWMEVQRTWSHLESIFVCSEDIRIQLVKDARRFDGVDAEFKELMFKTAKVENVLEATCRPNLYEKLKDLQSRLSLCEKALAEYLETKRIAFPRFYFVSSADLLDILSKGAQPKQVTCHLAKLFDSIADLQFEDNQDVSAHRAVGMYSKEKEYVPFQAECECVGHVETWLLQLEQTMQETVRHSITEAIVAYEEKPRELWIFDFPAQVALTSSQIWWTTDVGIAFSRLEEGYETALKDFHKKQISQLNTLITLLLGELPPGDRQKIMTICTIDVHARDVVAKLISQKQVVVSPQAFTWLSQLRHRWEDTQKHCFVNICDAQFQYFYEYLGNSPRLVITPLTDRCYITLTQSLHLTMSGAPAGPAGTGKTETTKDLGRALGMMVYVFNCSEQMDYKSIGNIYKGLVQTGAWGCFDEFNRISVEVLSVVAVQVKMIHDAIRNRKKRFVFLGEAITLKPSVGIFITMNPGYAGRTELPENLKALFRPCAMVAPDIELICEILLVAEGFVDARALARKFITLYTLCKELLSKQDHYDWGLRAIKSVLVVAGSLKRGDKNRPEDQVLMRALRDFNMPKIVTDDIPVFLGLVGDLFPALDVPRRRKLHFEQMVRQSTLELRLQPEESFILKVVQLEELLAVRHSVFVVGNAGTGKSKILRTLNRTYVNMKQKPVWNDLNPKAVTTDELFGFIHHATREWKDGKIVYSYFIGLFSSILREQANLKHDGPKWIVLDGDIDPMWIESLNTVMDDNKVLTLASNERIALTPFMRLLFEIHHLRSATPATVSRAGILYVNPQDLGWNPYVASWIDRRRHQSEKANLTILFDKYVPACLDKLRTSFKTITSIPESSLVQTLCVLLECLLTPENVPSDSPKEVYEVYFVFACIWAFGGTLLQDQISDYQADFSRWWQKEMKAVKFPSQGTIFDYYVDHKTKKLLPWADKIAQFTMDPDVPLQTVLVHTTETARLRYFMELLLEKGKPLMLVGNAGVGKTVFVGDTLASLSEDYIVSRVPFNYYTTSTALQKILEKPLEKKAGHNYGPGGNKKLIYFIDDMNMPEVDLYGTVQPHTLIRQHIDYGHWYDRQKVMLKEIHNCQYVACMNPMVGSFTINPRLQRHFTVFAFNFPSLDALNTIYGQIFSFHFQQQAFAPSILRSGPTLIQATIAFHQTMMCNFLPTAIKFHYIFNLRDLSNVFQGILFASPECLKGPLDLIHLWLHESARVYGDKLIDKKDCDLFQRRMLETAYKYFEGIDSHMLLQQPLIYCHFADRGKDPHYMPVKDWEVLKTILTETLDNYNELNAAMHLVLFEDAMQHVCRISRILRTPQGCALLVGVGGSGKQSLSRLAAYLRGLEVFQITLTEGYGIQELRVDLANLYIRTGAKNMPTVFLLTDAQVLDESFLVLINDLLASGEIPDLFSDEDVDKIISGIHNEVHALGMVDSRENCWKFFMARVRLQLKIILCFSPVGRTLRVRARKFPAIVNCTAIDWFHAWPQEALVSVSRRFIEETKGIEPVHKDSISLFMAHVHTTVNEMSTRYYQNERRHNYTTPKSFLEQISLFKNLLKKKQNEVSEKKERLVNGIQKLKTTASQVGDLKARLASQEAELQLRNHDAEALITKIGLQTEKVSREKTIADAEERKVTAIQTEVFQKQRECEADLLKAEPALVAATAALNTLNRVNLSELKAFPNPPIAVTNVTAAVMVLLAPRGRVPKDRSWKAAKVFMGKVDDFLQALINYDKEHIPENCLKVVNEHYLKDPEFNPNLIRTKSFAAAGLCAWVINIIKFYEVYCDVEPKRQALAQANLELAAATEKLEAIRKKLVDLDRNLSRLTASFEKATAEKVRCQEEVNQTNKTIKLANRLVKELEAKKIRWGQSIKSFEAQEKTLCGDVLLTAAFVSYVGPFTRQYRQELVHCKWVPFLQQKVSIPLTEGLDLISMLTDDATIAAWNNEGLPSDRMSTENAAILTHCERWPLVIDPQQQGIKWIKNKYGMDLKVTHLGQKGFLNAIETALAFGDVILIENLEETIDPVLDPLLGRNTIKKGKYIRIGDKECEFNKNFRLILHTKLANPHYKPELQAQTTLLNFTVTEDGLEAQLLAEVVSIERPDLEKLKLVLTKHQNDFKIELKYLEDDLLLRLSAAEGSFLDDTKLVERLEATKTTVAEIEHKVIEAKENERKINEARECYRPVAARASLLYFVINDLQKINPLYQFSLKAFNVLFHRAIEQADKVEDMQGRISILMESITHAVFLYTSQALFEKDKLTFLSQMAFQILLRKKEIDPLELDFLLRFTVEHTHLSPVDFLTSQSWSAIKAIAVMEEFRGIDRDVEGSAKQWRKWVESECPEKEKLPQEWKKKSLIQKLILLRAMRPDRMTYALRNFVEEKLGAKYVERTRLDLVKAFEESSPATPIFFILSPGVDALKDLEILGKRLGFTIDSGKFHNVSLGQGQETVAEVALEKASKGGHWVILQNVHLVAKWLGTLEKLLERFSQGSHRDYRVFMSAESAPTPDEHIIPQGLLENSIKITNEPPTGMLANLHAALYNFDQDTLEICSKEQEFKSILFSLCYFHACVAGRLRFGPQGWSRSYPFNPGDLTICASVLYNYLEANSKVPWEDLRYLFGEIMYGGHITDDWDRKLCRVYLEEFMNPSLTEDELMLAPGFAAPPYLDYAGYHQYIEEMLPPESPALYGLHPNAEIEFLTVTSNTLFRTLLEMQPRNALSGDELGQSTEEKVKNVLDDILEKLPEEFNMAEIMQKNSNRSPYVLVCFQECERMNILIREIRISLEQLDLSLKGELALSPAVEAQQFALSYDTVPDTWSKLAYPSTYGLAQWFNDLLLRCRELDTWTQDLTLPAVVWLSGFFNPQSFLTAIMQTMARKNEWPLDKTRLTADVTKKTKEDYGHPPREGAYLHGLFMEGARWDTQAGTIVEARLKELACPMPVIFAKATPVDRQETKQTYECPVYRTKLRGPSYIWTFRLKSEEKTAKWVLAGVALLLEA

SEQ ID NO: 97442 - DNA, 13572 bp, Artificial Sequence
  derived and/or modified sequence
atggccgctcaggtcgcagcgagagaagcccgagacttccgcgaggccccaaccctacgattgacctctggcgccgggctggaggccgttggtgccgtcgagctagaagaggaggaagaaaatgaggaagaggccgctgcccgacgggccagaagcttcgcccaggacgctcgcgtcagattcctgggcgggcggctggctatgatgctgggcttcaccgaggagaagtggtcacagtacttagaatccgaggacaaccgacaagttctcggcgagttcctggaaagcacttcaccggcatgtcttgtcttctcttttgcagcctcaggaaggctggctgccagccaggaaatcccccgggatgcgaaccacaagctcgtgtttatctccaagaaaatcactgagagcatcggcgtgaacgacttttcccaggtggtgctgttcggcgaactgccagccctgtcccttggtcatgtgtcagccttcttagacgaaatactggtacccgtgctgagcaacaaaaataaccataagagctggtcatgttttacatctcaagacatggagtatcacatcgaagtcatgaaaaaaaaaatgtacatcttccggggaaaaatgtccaggaggacccttctgcccattcctaccgtggcaggcaaaatggatctggaccagaactgttcagaaaataagcctccttctaatgaacgcatcatcctgcacgccatcgagtccgtggtgatcgagtggagccatcagatacaggagatcatcgagcgggacagtgttcaacgcttgctaaatggcttgcacctgtctccccaagccgaactggatttctggatgatgagaagagagaacctctcttgcatctatgaccagttgcaggcccccgtagtcctcaagatggtgaagattctgactacaaaacaatcctcctattttcccacgttgaaagacatcttcctggctgtcgaaaacgccctgttagaggctcaagatgtggagctgtatttaagaccacttcggcgacacattcagtgtcttcaggagacagagtttccccagacccgcattctgatcgcccccctgttccacaccatctgcctgatatggagccactccaaattttacaatactcctgccagagtgattgtgctgctgcaagaattttgtaacttgttcattaaccaagccactgcatacctcagccccgaagacctgctccgcggagagattgaagagtccctagaaaaggttcaagtagccgtcaatatcttgaagacctttaaaaacagttttttcaattatcgcaaaaaattggcttcttacttcatgggccgaaaactgcgaccgtgggattttcagtctcaccttgtgttctgtagattcgacaagtttcttgatagactaatcaaaatcgaagatatcttcgccaccacacttgagtttgaaaagcttgagcgccttgagttcggtggaacgaagggtgctatcctcaatggacaagtgcacgagatgagcgaagagctgatggagttgtgtaaactgttcaagcagagcacgtatgatccatcagactgcacgaacatggaatttgaaagtgactacgttgctttcaagtcaaaaaccctcgagttcgatcgacgccttggcaccattatctgtgaggcatttttcaattgtaatgggctggaggccgctttcaagctgcttaccatctttgggaattttctggagaaaccagtcgtgatggaaattttcagtcttcactactccacactggttcatatgttcaatacagagttagacgtgtgtaaacagctttacaacgaacacatgaagcagatagagtgcggccatgtggttctgaataagaatatgccgttcaccagcggcaacatgaaatgggcacaacaagtgctgcagcgacttcagatgttctggtcaaatttcgcatcactccgttatctgttcctagggaaccccgaccatgccctagtctaccaaaaatacgttgagatgactactctcttagaccagttcgagtcccgtatttacaatgaatggaaaagcaacgtcgatgaaatctgtgagtttaatctgaatcaacctctcgttaaattctccgcgattaacgggctgctctgtgtgaactttgaccctaagcttgtggcagtcttacgagaagtgaaatacttgctgatgcttaagaagcaggacattcccgattccgccctggcgattttcaaaaagagaaatactattcttaagtacatcgggaacctggacctgctcgtgcagggatataataaactcaaacagactctgctggaggtggagtaccccttgatcgaagacgagcttcgggctatcgacgagcaactgactgcagccactacatggctgacatggcaagatgactgctgggggtacattgaaagagtgagggcagcgaccagcgagcttgagcaccgggttgaacgtacgcagaagaatgttaaggtgatccaacagacgatgcgcggatgggcacgttgcgtgctcccccccagaagagagcaccgccgggaagccgcgtttacgcttgaagacaagggtgatttattcacaaaaaagtacaaattgatccagggtgatggatgcaagattcacaacctggtcgaagaaaatagaaagctgttcaaggcgaacccctccctagacacctggaaaatttacgttgagttcatcgacgacatcgtcgtcgaaggcttttttcaagccattatgcacgatcttgatttttttttgaaaaatactgaaaaacagctcaagcctgctccctttttccaagcccaaatgatcctgctccctccggaaatcgtctttaagccgtccctcgatagggaagcaggcgatggtttttacgatctcgtggaggagatgctctgcaattcctttcggatgtcagcacagatgaatcggatcgccacacacctggagattaagaattaccagaacgatatggataatatgctgggcctggctgaggtccgacaagaaattatgaatcgagtggtgaacgttatcaacaaggtccttgattttagaaataccctggagacccacacatatctttgggtggatgaccgcgctgaatttatgaaacacttcttactgtacggacatgccgtctcttccgatgaaatggacgcacacgcaaacgaagaaattccagaacaacctccgaccctggaacagtttaaggaacagatagacatctacgaggcgctgtacgtccagatgagcaagttcgaggactttcgggtgtttgactcctggttcaaagtagacatgaagccatttaaggtgagcctcctgacaatcattaagaagtggagttggatgtttcaggaacacctgctgagatttgtgatcgattcactgaacgagctccaggagttcattaaagagacagacagcggcttacagcgggagcttaacgaaggtgaccatgatggtctggtggatataatggtgcacctgcttgctgtgagaagcaggcaaagggctactgatgagttatttgagcctctcaaagagacgattacactgctagaaagctacggacagaaaatgcctgaacaggtctacatacagctggaggagctgcctgagagatgggaaaccaccaagaagatagccgctacagtgcggcacgaggtgagcccactgcataatgccgaagtcactctgatcagaaagaagtgcatcctttttgacgccaaacaggcagagttcagagaacgttttcgacactacgcacccctgggcttcaatgctgaaaatccttacactgctctggacaaagccaatgaggagctggaggccctcgaggaggaaatgctacaaatgcaggagagcaccaggttgtttgaagtcgcactcccagagtataaacagatgaagcagtgccgcaaggagatcaagttgctcaagggactttgggatgtcatcatctacgtccgtcgatcaatcgacaactggacaaagacacagtggcgacagatacacgtggaacaaatggatgtcgagctccgcagattcgcgaaggcttctagcatcaccgagatttggagcctgaacaaagaggtaagggtgtgggacgcatacacgggcctggagggcactgtgaaggacatgacagcttctctgcgcgccattacagagctccagagtccagccttgcgggacaggcattggcaccagctcatgaaggccatcggcgtgaaatttctgatcaacgaggctacaaccctggcagacctcctggcactgcgcctgcacagagtcgaagatgatgtccggcgtatcgtggacaaagccgtcaaggaattagggactgaaaaggtgatcacggaaatatctcagacatgggcaactatgaagttttcctatgaagtccactatcgaacggggatcccattgcttaaatccgatgaacagttgtttgagactcttgagcacaaccaggtgcagctacagacgctgctccaaagcaagtatgtggaatacttcatagagcaggtcctatcttggcagaacaagctaaatattgctgatctcgtgatctttacgtggatggaggtgcagaggacctggtcccaccttgaatcaattttcgtgtgctcagaggatatcaggatacagctggtgaaagacgcgaggagattcgacggggtggatgcagagtttaaagagttgatgtttaagacagccaaagtggaaaatgtgctggaggccacgtgtaggcccaacttgtacgaaaagctgaaggatctccagagccggttaagcttgtgtgagaaggcactggcagagtaccttgaaactaagaggatcgctttccccagattctattttgtgtcaagtgcagatttgctggatattctaagcaaaggggcccagcccaagcaagtcacctgccacctcgcaaaattgttcgatagcatagctgatctgcagttcgaggacaatcaggacgtgtctgcccaccgggctgtgggcatgtacagcaaagagaaggagtacgtgccctttcaagcagaatgcgaatgcgtgggacacgtggagacgtggctgttgcagctggagcagaccatgcaagagacagtcagacattcaatcacagaggcaattgtggcctatgaggaaaagcccagggaactctggatcttcgatttcccagcccaggtggccctcacttcttctcagatttggtggaccactgatgtcggtatcgcatttagccgattagaggagggatacgaaaccgccctcaaggactttcacaagaaacagatatcccagctcaatactctcatcacgttgctgcttggggaactcccccccggcgacaggcaaaagataatgaccatctgcaccattgatgttcatgcgcgggacgttgtcgccaaactcatctcacaaaagcaggtagttgtgagcccccaggctttcacttggctcagccagctgcgacatcgatgggaagatacacagaagcactgtttcgtcaatatctgtgatgcccagttccaatatttctacgaatacctcggcaattcccccaggctcgtaatcacaccgctgaccgaccgctgctacattaccctgacacaatctctgcatttaactatgtcaggggcgccagctggtcctgctgggactgggaagacagagacgaccaaagacctgggcagagcactgggtatgatggtctacgtgttcaattgttccgagcagatggattataagtccatcggaaacatctacaaaggcctggttcagactggggcttggggatgcttcgacgagttcaaccgaattagtgttgaggtgctgtctgtggtggcggttcaggttaagatgatacatgatgcaatcagaaaccgaaagaagaggttcgtgtttctgggtgaagcgattacactcaagccatcggttgggattttcataactatgaaccccgggtacgccggaaggactgagctgcccgaaaaccttaaagcccttttcaggccatgtgccatggtcgcacctgatattgagctgatctgcgaaatcttactggtagccgagggtttcgtcgacgcacgagctctcgcgaggaagttcattacactttacaccctgtgtaaggaacttctttctaaacaagatcattatgattggggactgagagcaatcaagtcggtactggtggttgccggtagtctgaaacggggggacaagaatcgccctgaggatcaagttttgatgagagctcttcgagactttaacatgccaaagattgttacggatgatataccagtgtttcttggcttggtgggcgacctttttcccgcattagacgtaccccgccgacgaaaacttcattttgagcagatggtgcggcagtccactttggaactcaggctgcagcccgaggagagcttcatacttaaggttgttcagctggaggagctactggccgtccggcattccgtgttcgtggtgggcaacgccggcacaggcaaatcgaaaatcctgagaactctgaataggacgtacgtgaatatgaagcagaaaccagtgtggaatgatctgaatccaaaagccgtaactactgatgaattgtttggcttcattcaccacgctacccgggaatggaaagacggtaaaatcgtttattcttatttcattggtcttttcagctcaatattgcgcgagcaggcgaacctcaagcatgacgggcctaagtggatcgtgttggacggcgacatcgatcctatgtggatcgaatcgctcaacaccgtcatggacgataacaaagtgctgaccttggcctcaaacgaaagaatcgcacttacccccttcatgcgcctgctcttcgaaatccaccacctgagatctgctacccctgctactgtaagtagagccggcatcttgtacgtgaacccccaagacctcggttggaatccatatgtggctagctggatcgataggaggaggcaccagtccgagaaggccaatttgacaattcttttcgataaatacgtccccgcatgcctggataagctgcgcaccagctttaaaactattacttcaatccctgagtcctccttggtccagacactttgtgtgttgctagaatgtctccttacgcccgaaaacgtgccttccgatagccctaaggaggtctacgaggtctactttgtgtttgcctgcatctgggccttcgggggtaccctgctccaggatcagatctcagactatcaagctgatttctctcgttggtggcaaaaagaaatgaaagctgttaaattcccaagtcagggaactatcttcgattattacgtagatcataaaacaaaaaaattactaccctgggctgataaaattgcccagttcactatggacccggatgtgcccctgcagacagtcctggtccacaccacagagacagctcgcctccggtactttatggaactactccttgagaaaggcaagcccctgatgttggtgggtaatgcgggggtagggaaaactgtttttgtcggcgacacactcgcaagcttgtccgaggactacattgtgtctagagtgccattcaactattataccacaagcactgctctgcaaaagatcttggaaaagcctctggagaaaaaagccggccacaattatgggcccggggggaacaagaagctcatctatttcattgacgacatgaacatgccagaagtggatctttacgggacagtgcagccgcacactcttattcgccaacatattgattacgggcattggtatgataggcaaaaagttatgctgaaagagatacacaactgccagtacgtagcttgtatgaatcctatggtgggaagctttacgattaacccacggttgcagagacatttcaccgtgtttgccttcaatttcccgtctcttgatgccctgaatactatatacggccagatcttcagcttccacttccagcaacaggcgttcgcgccgtcgatccttcgcagcggaccaactctcattcaggcaaccatagccttccaccaaacaatgatgtgcaattttttacccacggccatcaagtttcattacattttcaacctgagggacctgtctaacgtgttccaggggatccttttcgcaagtcccgagtgtctgaaagggcccctcgacctgatccatctctggctgcatgaatctgcgcgagtgtatggggacaagctaatcgataagaaggactgtgacctgttccagcgtcggatgctcgaaacagcttataaatattttgagggcattgactcacacatgctgctacagcagccattgatctactgccatttcgcagacaggggaaaggacccgcattatatgcccgtcaaagattgggaggtactcaagacgattctgactgaaactctggacaactataacgagctgaacgccgctatgcatctcgtattgttcgaggacgcaatgcagcacgtctgccgaatttcccgcattttgagaaccccccagggttgcgccctgctagtgggcgtagggggctcaggaaagcagagcctcagcaggctggctgcctacctgcgtggcctagaagttttccaaataacacttacagagggatacggcatccaggaactgcgtgtcgatctcgcaaacctctatatcagaacaggagccaagaacatgccgaccgtttttctcttgacagacgcccaagttcttgacgaatccttcctggttctgataaacgatctactcgcatcaggagaaatccccgacctattctccgacgaagacgtggataaaatcatcagcggcattcataacgaggttcatgcactggggatggtggattcccgagagaactgttggaagttttttatggctagagtacgactccagttaaagattatcctgtgcttctctccagttgggcgaacgctgcgggtgagggcccgcaaatttccggccatcgtcaattgtactgcaatcgattggtttcatgcctggcctcaggaggccctggtgagtgtctctcggcgttttattgaagagaccaaaggaatcgaacctgtgcacaaagattcgatctccctgtttatggctcatgtacatacaaccgttaatgagatgtccacgagatactaccagaacgagcgacggcacaactatacaacacctaagtcattcctggaacagatttcattgttcaaaaatcttctgaagaagaagcaaaacgaagtaagcgaaaaaaaggaaaggctcgtgaacgggatccagaagctcaaaaccaccgcatctcaggttggagacctgaaagcgaggctcgcctcccaagaagctgaactgcagctgagaaaccacgatgcagaagctctgattacaaagatcggtctgcaaaccgaaaaggtttcccgggagaaaaccatcgctgacgccgaggagagaaaggtcacggccatccagactgaagtgttccagaagcagagagaatgtgaagcagacttgctcaaggccgagccggcactcgttgccgcgactgctgctcttaatacactcaacagggtgaaccttagcgagctgaaagcgtttcccaatccccctatcgccgtgacgaacgttacggccgccgtcatggtactcctagcgccacgtggaagggttcctaaggatagaagttggaaggctgcaaaagtgttcatggggaaagtggatgactttctgcaggcactgattaattatgacaaagaacacattcctgaaaactgtctcaaggtcgttaatgaacactacctaaaagaccccgaattcaacccgaacctcatccgcacgaaaagttttgcagccgctggcctgtgcgcgtgggtgatcaacatcataaaattttacgaggtgtactgcgatgtggagccaaagaggcaagccctggcccaggccaacttagagctcgcagctgccaccgagaaactggaagcaatccggaaaaagcttgtggatctggacagaaacctctccagactgaccgcctcctttgaaaaagccacagccgaaaaggtacgatgccaggaggaggttaatcaaaccaataagaccatcaagctggctaacaggctcgtgaaggaactggaggcaaaaaagattcgctggggccagtcaattaaaagtttcgaggcccaggagaagactctgtgcggcgatgtacttctgaccgcagctttcgtcagctatgtcggccccttcactcgccagtacaggcaggagcttgtgcactgtaagtgggttcccttcctgcagcagaaggtgtccataccactgaccgaagggctggatctgatctcaatgctcacagatgacgctacaatcgccgcctggaataatgaaggcctcccttcagacaggatgagcaccgagaatgcagctatactcacccattgtgagcgctggccactggtgattgacccacagcaacagggaatcaagtggatcaaaaacaagtacggcatggacctcaaggtgacccacctgggccagaaaggcttcctgaacgccatcgagactgctctcgcattcggggacgtcattttgatcgagaacctggaggagaccatcgaccccgtgctggatcctctcctgggcagaaacaccattaagaaagggaaatacattcgcattggagataaggagtgcgagttcaataaaaactttcgacttattctgcataccaaactggctaacccgcactataaaccggaactccaggcgcaaactacactgttgaactttaccgtaaccgaagacgggcttgaggctcagctcttggcggaagttgtgagtatcgaaagacccgaccttgagaaattgaaactggtcctcacaaagcaccagaacgacttcaaaattgagctgaagtacctggaagatgatttgttattgaggctgtccgcagccgaaggcagctttctagatgataccaagctcgtcgaacgcctcgaggccaccaaaaccacagtggctgagatcgagcacaaagttattgaggcgaaagagaatgagagaaagattaacgaggcaagagagtgctacagaccagtcgctgcacgggctagcctactgtactttgtgatcaacgatcttcagaagatcaaccccctgtaccagtttagcctgaaggcctttaacgtgctatttcaccgggccatcgaacaggccgacaaggtcgaagatatgcaggggaggatttccatcttgatggagtctatcacgcacgcagtgtttctttacacaagccaggccctgttcgaaaaagataagttaacttttttgagccagatggccttccagattctactgaggaaaaaggagatcgacccactcgagctggacttcctgctacggtttacagtggagcacacccatctgtcccccgtggattttctgactagccaatcctggtctgcgattaaggctatcgcagtgatggaagagttcagaggcatcgatagagatgtggagggttcagccaagcagtggcggaaatgggtggaaagcgaatgtccagaaaaagaaaaacttccccaagaatggaagaaaaagagtcttattcaaaagctgatcctcttacgcgcaatgcggccagacagaatgacatatgccctgagaaactttgtggaggagaagcttggcgcaaagtacgtggagcggacaaggttggatctggtaaaggcatttgaagagtcctcacctgccacaccaatcttctttattctttcccctggtgtcgatgccctgaaagaccttgagattttgggaaaacggctcgggtttacgatcgattccggaaagttccacaacgtttctttaggccagggacaggaaactgtcgccgaagttgctttagagaaagcatctaaaggaggccattgggtaatactgcagaatgtgcacctggtggccaagtggctggggacactggagaagctgcttgagcggttttcacagggatcccacagggactatagagtcttcatgtctgcggagagcgccccaacccctgacgagcacatcattccacaggggctgcttgagaattcgattaaaataacaaacgagccaccaaccggaatgcttgcaaacctacacgcggccctctataatttcgaccaggatactctcgagatctgcagtaaagaacaggagtttaaatccattcttttttctctgtgttattttcacgcttgcgtcgccggacgcttaaggttcggacctcaggggtggtcccgctcgtacccctttaatcccggtgatctgacaatttgcgcatccgttttatacaattatttggaggccaattctaaggttccctgggaggaccttagatatctgttcggcgagattatgtatggtggccatattacagacgactgggataggaaactgtgccgtgtgtacttggaggaattcatgaacccaagccttacagaagacgaactcatgttggcccccggcttcgctgcacctccctaccttgattatgccggataccatcagtacatcgaagaaatgttgccgcccgagtccccggccctttatggactacatcctaacgcggagatcgagttcctgaccgtcactagtaacacattattccggactctgttggagatgcagccacggaatgctctgagtggggacgaattaggccagtcaacagaagagaaagtgaaaaacgttctggatgacatcctggaaaagctccccgaggaatttaacatggccgaaatcatgcagaaaaacagcaacagatctccttacgtgctggtatgttttcaggaatgtgaacgcatgaacatcctgatccgggagatcaggatcagtttggaacagttagacttgtccttaaaaggcgagctcgctctgagccccgcagtcgaagctcaacagtttgcgctttcatacgacactgtacccgacacatggagtaagcttgcatatcctagtacgtatggattggcccagtggttcaacgacctcctgctcagatgcagagagctcgacacctggacccaggatctgacactgcccgctgtggtgtggttgtcaggcttctttaacccgcaaagtttcttgacagccatcatgcaaactatggctaggaagaatgaatggccactggacaagactaggttgactgccgatgtcaccaaaaagactaaagaggactacggtcaccctcccagagaaggtgcttatctgcatgggctctttatggaaggagcccggtgggatacccaggcgggaacgatcgtggaggctaggctgaaggagctggcctgccccatgcccgtgatctttgcaaaggccacgcccgtggacagacaggaaaccaagcaaacgtacgagtgccctgtttacaggaccaaacttaggggtcctagctacatatggactttccggttaaaaagtgaggaaaagacagccaagtgggtcctagcaggcgttgcattattgcttgaagcctag

SEQ ID NO: 97443 - DNA, 13572 bp, Artificial Sequence
  derived and/or modified sequence
atggccgcccaggtggccgcccgggaggcccgggacttccgggaggcccccaccctgcggctgaccagcggggccggcctggaggccgtgggcgctgtggagctggaggaggaggaggagaatgaggaggaggccgccgcccggcgggcccggagctttgcccaggatgcccgggtgcgcttcctgggcggccgcctggccatgatgctgggcttcacagaggagaagtggagccagtacctggagagcgaggacaaccggcaggtgctgggggagttcctggagagcaccagccctgcctgcctggtgttctcctttgctgccagcggccgcctggccgccagccaggagatccccagagatgccaaccacaagctggtgttcatcagcaagaagatcacagagagcattggagtgaatgacttcagccaggtggtgctgtttggagagctgcctgccctgagcctgggccacgtgtctgccttcctggatgagatcctggtgcctgtgctgagcaacaagaacaaccacaagtcctggagctgcttcaccagccaggacatggagtaccacatcgaggtgatgaagaagaagatgtacatcttccggggcaagatgagcaggaggaccctgctgcccatccccaccgtggccggcaagatggacctggaccagaactgcagcgagaacaagccacccagcaatgaaagaatcatcctgcacgccattgaatctgtggtgattgagtggagccaccagatccaggagatcatcgagcgggacagcgtgcagaggctgctgaatggcctgcacctgagcccccaggccgagctggacttctggatgatgaggcgggagaacctgagctgcatctatgaccagctgcaggcccctgtggtgctgaagatggtgaagatcctgaccaccaagcagagcagctacttccccaccctgaaggacatcttcctggccgtggagaatgccctgctggaggcccaggatgtggagctgtacctgcggcccctgcggcggcacatccagtgcctgcaggagacagagttcccccagacccgcatcctgattgcccccctcttccacaccatctgcctgatctggagccacagcaagttctacaacaccccagcccgggtgattgtgctgctgcaggagttctgcaacctcttcatcaaccaggccacagcctacctgagccctgaggacctgctgcggggggagattgaggagagcctggagaaggtgcaggtggccgtgaacatcctgaagaccttcaagaacagcttcttcaactacaggaagaagctggccagctacttcatgggcaggaagctgcggccctgggacttccagagccacctggtgttctgccgctttgacaagttcctggacaggctcatcaagattgaggacatctttgccaccaccctggagtttgagaagctggagcggctggagtttggaggcaccaagggggccatcctgaatggccaggtgcatgagatgtctgaggagctgatggagctgtgcaagctgttcaagcagagcacctatgaccccagcgactgcaccaacatggagtttgaaagtgactatgtggccttcaagagcaagaccctggagtttgaccggcggctgggcaccatcatctgtgaggccttcttcaactgcaatggcctggaggccgccttcaagctgctgaccatctttggaaacttcctggagaagcctgtggtgatggagatcttcagcctgcactacagcaccctggtgcacatgttcaacacagagctggatgtgtgcaagcagctgtacaatgagcacatgaagcagattgaatgtggccacgtggtgctgaacaagaacatgcccttcaccagcggcaacatgaagtgggcccagcaggtgctgcagaggctgcagatgttctggagcaactttgccagcctgcgctacctgttcctgggcaacccagaccacgccctggtgtaccagaagtatgtggagatgaccaccctgctggaccagtttgagagccgcatctacaatgagtggaagagcaatgtggatgagatctgtgagttcaacctgaaccagcccctggtgaagttcagcgccatcaatggcctgctgtgtgtgaactttgaccccaagctggtggccgtgctgcgggaggtgaagtacctgctgatgctgaagaagcaggacatcccagattctgccctggccatcttcaagaagaggaacaccatcctgaagtacatcggcaacctggacctgctggtgcagggctacaacaagctgaagcagaccctgctggaggtggagtaccccctgattgaagatgagctgcgggccattgatgagcagctgacagctgccaccacctggctgacctggcaggatgactgctggggctacatcgagcgggtgcgggccgccaccagcgagctggagcaccgggtggagaggacccagaagaatgtgaaggtgatccagcagaccatgaggggctgggcccgctgtgtgctgcccccccggcgggagcaccggcgggaggccgccttcaccctggaggacaagggggacctcttcaccaagaagtacaagctgatccagggagatggctgcaagatccacaacctggtggaggagaacaggaagctgttcaaggccaaccccagcctggacacctggaagatctacgtggagttcattgatgacatcgtggtggagggcttcttccaggccatcatgcatgacctggacttcttcctgaagaacacagagaagcagctgaagccagcccccttcttccaggcccagatgatcctgctgcccccagaaattgtgttcaagcccagcctggaccgggaggccggagatggcttctatgacctggtggaggagatgctgtgcaacagcttcaggatgtctgcccagatgaaccgcatcgccacccacctggagatcaagaactaccagaatgacatggacaacatgctgggcctggccgaggtgcggcaggagatcatgaacagagtggtgaatgtcatcaacaaggtgctggacttcaggaacaccctggagacccacacctacctgtgggtggatgacagagctgagttcatgaagcacttcctgctgtatggccatgctgtgtccagtgatgagatggatgcccacgccaatgaggagatccctgagcagccccccaccctggagcagttcaaggagcagattgacatctatgaggccctgtatgtgcagatgagcaagtttgaggacttccgggtgtttgacagctggttcaaggtggacatgaagcccttcaaggtgtccctgctgaccatcatcaagaagtggagctggatgttccaggagcacctgctgcgcttcgtcatcgacagcctgaatgagctgcaggagttcatcaaggagacagattctggcctgcagcgggagctgaatgaaggagaccatgatggcctggtggacatcatggtgcacctgctggccgtgcgcagccggcagagggccacagatgagctgtttgagcccctgaaggagaccatcaccctgctggagagctatggccagaagatgcctgagcaggtgtacatccagctggaggagctgcctgagcgctgggagaccaccaagaagattgctgccaccgtgagacatgaggtgagccccctgcacaatgctgaggtgaccctcatcaggaagaagtgcatcctgtttgatgccaagcaggccgagttccgggagcgcttccgccactacgcccccctgggcttcaatgctgagaacccctacacagccctggacaaggccaatgaggagctggaggccctggaggaggagatgctgcagatgcaggagagcacccggctgtttgaggtggccctgcctgagtacaagcagatgaagcagtgcaggaaggagatcaagctgctgaagggcctgtgggatgtgatcatctacgtgagaagaagcattgacaactggaccaagacccagtggaggcagatccacgtggagcagatggatgtggagctgcggagatttgccaaggccagcagcatcacagagatctggagcctgaacaaggaggtgcgggtgtgggatgcctacacaggcctggagggcaccgtgaaggacatgacagccagcctgcgggccatcacagagctgcagagccctgccctgcgggacagacactggcaccagctgatgaaggccatcggcgtgaagttcctgatcaatgaggccaccaccctggccgacctgctggccctgcggctgcaccgggtggaggatgatgtgcggcgcatcgtggacaaggctgtgaaggagctgggcacagagaaggtgatcacagagatcagccagacctgggccaccatgaagttctcctatgaggtgcactacagaacaggcatccccctgctgaagagtgatgagcagctgtttgagaccctggagcacaaccaggtgcagctgcagaccctgctgcagagcaaatatgtggagtacttcatcgagcaggtgctgtcctggcagaacaagctgaacattgctgacctggtgatcttcacctggatggaggtgcagaggacctggagccacctggagagcatctttgtgtgcagcgaggacatccgcatccagctggtgaaggatgccaggagatttgatggagtggatgctgagttcaaggagctgatgttcaagacagccaaggtggagaatgtgctggaggccacctgccggcccaacctgtatgagaagctgaaggacctgcagagccggctgagcctgtgtgagaaggccctggccgagtacctggagaccaagagaattgccttcccccgcttctactttgtgagcagcgctgacctgctggacatcctgagcaaaggagcccagcccaagcaggtgacctgccacctggccaagctgtttgacagcattgctgacctgcagtttgaggacaaccaggatgtgtctgcccacagagctgtgggcatgtacagcaaggagaaggagtatgtgcccttccaggctgaatgtgaatgtgtgggccacgtggagacctggctgctgcagctggagcagaccatgcaggagaccgtgcgccacagcatcacagaggccatcgtggcctatgaggagaagccccgggagctgtggatctttgacttccctgcccaggtggccctgaccagcagccagatctggtggaccacagatgtgggcatcgccttcagccggctggaggagggctatgaaacagccctgaaggacttccacaagaagcagatcagccagctgaacaccctcatcaccctgctgctgggggagctgcccccaggggaccggcagaagatcatgaccatctgcaccattgatgtgcacgccagagatgtggtggccaagctgatcagccagaagcaggtggtggtgagcccccaggccttcacctggctgagccagctgcggcaccgctgggaggacacccagaagcactgctttgtgaacatctgtgatgcccagttccagtacttctatgagtacctgggcaacagcccccggctggtgatcacccccctgacagaccgctgctacatcaccctgacccagagcctgcacctgaccatgtctggggccccagctggccctgctggcaccgggaagacagagaccaccaaggacctgggccgggccctgggcatgatggtgtatgtgttcaactgcagcgagcagatggactacaagagcatcggcaacatctacaagggcctggtgcagacaggagcctggggctgctttgatgagttcaaccgcatctctgtggaggtgctgtctgtggtggccgtgcaggtgaagatgattcatgatgccatccggaacaggaagaagagatttgtgttcctgggggaggccatcaccctgaagcccagcgtgggcatcttcatcaccatgaaccctggctacgccggccgcacagagctgcctgagaacctgaaggccctcttccggccctgtgccatggtggccccagacatcgagctgatctgtgagatcctgctggtggccgagggctttgtggatgcccgggccctggccaggaagttcatcaccctgtacaccctgtgcaaggagctgctgagcaagcaggaccactatgactggggcctgcgggccatcaagtctgtgctggtggtggccggcagcctgaagagaggagacaagaacagacctgaggaccaggtgctgatgagggccctgcgggacttcaacatgcccaagatcgtgacagatgacatccctgtgttcctgggcctggtgggggacctcttccctgccctggatgtgcccaggaggaggaagctgcactttgagcagatggtgcggcagagcaccctggagctgcggctgcagcctgaggagagcttcatcctgaaggtggtgcagctggaggagctgctggccgtgcgccacagcgtgtttgtggtgggcaatgccggcaccgggaagagcaagatcctgcggaccctgaacagaacctacgtgaacatgaagcagaagcctgtgtggaatgacctgaaccccaaggctgtgaccacagatgagctgtttggcttcatccaccacgccacccgggagtggaaggatggcaagatcgtgtacagctacttcatcggcctcttcagcagcatcctgcgggagcaggccaacctgaagcatgatggccccaagtggatcgtgctggatggagacatcgaccccatgtggattgagagcctgaacacagtgatggatgacaacaaggtgctgaccctggccagcaatgaaagaattgccctgacccccttcatgaggctgctgtttgagatccaccacctgcggagcgccaccccagccaccgtgtccagagctggcatcctgtatgtgaacccccaggacctgggctggaacccctacgtggcctcctggattgacagaagaagacaccagagcgagaaggccaacctgaccatcctgtttgacaagtatgtgcctgcctgcctggacaagctgcggaccagcttcaagaccatcaccagcatccctgagagcagcctggtgcagaccctgtgtgtgctgctggagtgcctgctgaccccagaaaatgtgcccagcgacagccccaaggaggtgtatgaggtgtactttgtgtttgcctgcatctgggcctttggaggcaccctgctgcaggaccagatcagtgactaccaggccgacttcagccgctggtggcagaaggagatgaaggctgtgaagttccccagccagggcaccatctttgactactacgtggaccacaagaccaagaagctgctgccctgggccgacaagatcgcccagttcaccatggaccctgatgtgcccctgcagacagtgctggtgcacaccacagaaacagcccggctgcgctacttcatggagctgctgctggagaagggcaagcccctgatgctggtgggcaatgccggcgtgggcaagacagtgtttgtgggggacaccctggccagcctgtctgaggactacatcgtgtcccgggtgcccttcaactactacaccaccagcacagccctgcagaagatcctggagaagcccctggagaagaaggccggccacaactacggccctgggggcaacaagaagctgatctacttcattgatgacatgaacatgcctgaggtggacctgtatggaacagtgcagccccacaccctcatccggcagcacatcgactatggccactggtatgaccggcagaaggtgatgctgaaggagatccacaactgccagtatgtggcctgcatgaaccccatggtgggcagcttcaccatcaacccccggctgcagaggcacttcaccgtgtttgccttcaacttccccagcctggatgccctgaacaccatctacggccagatcttctccttccacttccagcagcaggcctttgcccccagcatcctgcggagcggccccaccctcatccaggccaccatcgccttccaccagaccatgatgtgcaacttcctgcccacagccatcaagttccactacatcttcaacctgcgggacctgagcaatgtgttccagggcatcctgtttgccagcccagaatgtctgaagggccccctggacctgatccacctgtggctgcatgaaagtgcccgggtgtatggagacaagctgattgacaagaaggactgtgacctcttccagaggaggatgctggagacagcctacaagtactttgagggcatcgacagccacatgctgctgcagcagcccctcatctactgccactttgctgaccggggcaaggacccccactacatgcctgtgaaggactgggaggtgctgaagaccatcctgacagagaccctggacaactacaatgagctgaatgctgccatgcacctggtgctgtttgaagatgccatgcagcacgtgtgccgcatcagccgcatcctgcggaccccccagggctgtgccctgctggtgggcgtgggcggcagcggcaagcagagcctgagccggctggccgcctacctgcggggcctggaggtgttccagatcaccctgacagagggctacggcatccaggagctgcgggtggacctggccaacctgtacatcagaactggagccaagaacatgcccaccgtcttcctgctgacagatgcccaggtgctggatgagagcttcctggtgctgatcaatgacctgctggccagcggggagatcccagacctcttcagtgatgaagatgtggacaagatcatcagcggcatccacaatgaggtgcacgccctgggcatggtggacagccgggagaactgctggaagttcttcatggcccgggtgcggctgcagctgaagatcatcctgtgcttcagccctgtgggccgcaccctgcgggtgcgggccaggaagtttcctgccatcgtgaactgcacagccatcgactggttccacgcctggccccaggaggccctggtgtctgtgtcccggcgcttcatcgaggagaccaagggcatcgagcctgtgcacaaggacagcatcagcctcttcatggcccacgtgcacaccaccgtgaatgagatgagcacccgctactaccagaatgaaagaagacacaactacaccacccccaagagcttcctggagcagatcagcctcttcaagaacctgctgaagaagaagcagaatgaggtgtctgagaagaaggagcggctggtgaatggcatccagaagctgaagaccacagccagccaggtgggggacctgaaggcccggctggccagccaggaggccgagctgcagctgagaaatcatgatgctgaggccctgatcaccaagattggcctgcagacagagaaggtgtcccgggagaagaccatcgcagatgctgaggagaggaaggtgacagccatccagacagaggtgttccagaagcagcgggagtgtgaggccgacctgctgaaggccgagcccgccctggtggccgccacagctgccctgaacaccctgaacagagtgaacctgtctgagctgaaggccttccccaacccccccatcgctgtgaccaacgtgacagctgctgtgatggtgctgctggccccccggggccgggtgcccaaggaccgctcctggaaggccgccaaggtgttcatgggcaaggtggatgacttcctgcaggccctgatcaactatgacaaggagcacatccctgagaactgcctgaaggtggtgaatgagcactacctgaaggaccctgagttcaaccccaacctgatccgcaccaagagctttgctgctgctggcctgtgtgcctgggtgatcaacatcatcaagttctatgaggtgtactgtgatgtggagcccaagaggcaggccctggcccaggccaacctggagctggccgccgccacagagaagctggaggccatcaggaagaagctggtggacctggacaggaacctgagccggctgacagccagctttgagaaggccacagctgagaaggtgcgctgccaggaggaggtgaaccagaccaacaagaccatcaagctggccaaccggctggtgaaggagctggaggccaagaagatccgctggggccagagcatcaagagctttgaggcccaggagaagaccctgtgtggagatgtgctgctgacagctgcctttgtgtcctatgtgggccccttcacccggcagtaccggcaggagctggtgcactgcaagtgggtgcccttcctgcagcagaaggtgtccatccccctgacagagggcctggacctgatctccatgctgacagatgatgccaccatcgccgcctggaacaatgaaggcctgcccagcgacaggatgagcacagaaaatgctgccatcctgacccactgtgagcgctggcccctggtgattgacccccagcagcagggcatcaagtggatcaagaacaagtatggcatggacctgaaggtgacccacctgggccagaagggcttcctgaatgccattgaaacagccctggcctttggagatgtgatcctgattgagaacctggaggagaccatcgaccctgtgctggaccccctgctgggcaggaacaccatcaagaagggcaagtacatcagaattggagacaaggaatgtgagttcaacaagaacttccgcctcatcctgcacaccaagctggccaacccccactacaagccagagctgcaggcccagaccaccctgctgaacttcaccgtgacagaagatggcctggaggcccagctgctggccgaggtggtgtccattgaaagaccagacctggagaagctgaagctggtgctgaccaagcaccagaatgacttcaagattgagctgaagtacctggaggatgacctgctgctgcggctgtctgctgctgagggcagcttcctggatgacaccaagctggtggagcggctggaggccaccaagaccaccgtggccgagattgagcacaaggtgattgaggccaaggaaaatgaaaggaagatcaatgaggcccgggagtgctacagacctgtggccgcccgggccagcctgctgtacttcgtcatcaatgacctgcagaagatcaaccccctgtaccagttcagcctgaaggccttcaacgtgctcttccaccgggccatcgagcaggccgacaaggtggaggacatgcagggccgcatcagcatcctgatggagagcatcacccatgctgtgttcctgtacaccagccaggccctgtttgagaaggacaagctgaccttcctgagccagatggccttccagatcctgctgaggaagaaggagattgaccccctggagctggacttcctgctgcgcttcaccgtggagcacacccacctgagccctgtggacttcctgaccagccagagctggagcgccatcaaggccatcgctgtgatggaggagttccggggcatcgacagagatgtggagggcagcgccaagcagtggaggaagtgggtggagagcgagtgcccagagaaggagaagctgccccaggagtggaagaagaagagcctcatccagaagctgatcctgctgcgggccatgaggccagacaggatgacctacgccctgaggaactttgtggaggagaagctgggcgccaagtatgtggagaggacccggctggacctggtgaaggcctttgaggagagcagccctgccacccccatcttcttcatcctgagccctggggtggatgccctgaaggacctggagatcctgggcaagaggctgggcttcaccattgattctgggaagttccacaacgtgtccctgggccagggccaggagaccgtggccgaggtggccctggagaaggccagcaagggcggccactgggtgatcctgcagaatgtgcacctggtggccaagtggctgggcaccctggagaagctgctggagcgcttcagccagggcagccaccgggactacagagtcttcatgtctgctgagagcgcccccaccccagatgagcacatcatcccccagggcctgctggagaacagcatcaagatcaccaatgaaccacccaccggcatgctggccaacctgcatgctgccctgtacaactttgaccaggacaccctggagatctgcagcaaggagcaggagttcaagagcatcctcttcagcctgtgctacttccacgcctgtgtggccggccgcctgcgcttcggcccccagggctggagccgcagctaccccttcaaccctggggacctgaccatctgtgcctctgtgctgtacaactacctggaggccaacagcaaggtgccctgggaggacctgcgctacctgtttggagagatcatgtatggaggccacatcacagatgactgggacaggaagctgtgccgggtgtacctggaggagttcatgaaccccagcctgacagaagatgagctgatgctggcccctggctttgctgccccaccctacctggactatgccggctaccaccagtacatcgaggagatgctgcccccagagagccctgccctgtatggcctgcaccccaatgctgagattgagttcctgactgtgaccagcaacaccctcttccgcaccctgctggagatgcagcccagaaatgccctgtctggagatgagctgggccagagcacagaggagaaggtgaagaatgtgctggatgacatcctggagaagctgcctgaggagttcaacatggccgagatcatgcagaagaacagcaacagaagcccctacgtgctggtgtgcttccaggagtgtgagaggatgaacatcctgatccgggagatccgcatcagcctggagcagctggacctgagcctgaagggggagctggccctgagccctgctgtggaggcccagcagtttgccctgtcctatgacacagtgcctgacacctggagcaagctggcctaccccagcacctacggcctggcccagtggttcaatgacctgctgctgcgctgccgggagctggacacctggacccaggacctgaccctgcctgctgtggtgtggctgagcggcttcttcaacccccagagcttcctgacagccatcatgcagaccatggccaggaagaatgagtggcccctggacaagacccggctgacagcagatgtgaccaagaagaccaaggaggactatggccaccccccccgggagggcgcctacctgcacggcctcttcatggagggcgcccgctgggacacccaggccggcaccatcgtggaggcccggctgaaggagctggcctgccccatgcctgtgatctttgccaaggccacccctgtggaccggcaggagaccaagcagacctatgagtgccctgtgtaccgcaccaagctgcggggccccagctacatctggaccttccggctgaagtctgaggagaagacagccaagtgggtgctggccggcgtggccctgctgctggaggcctag

SEQ ID NO: 97444 - DNA, 13572 bp, Artificial Sequence
  derived and/or modified sequence
atggccgcccaggtggccgcccgggaggcccgggacttccgggaggcccctactttgaggctgacgtctggcgctggactcgaggccgtgggcgccgtcgaacttgaagaagaggaagagaatgaagaggaggctgcagcccggcgagcgagaagcttcgcccaagatgcgcgcgtccggtttttaggaggccgcttagctatgatgctggggtttactgaagagaagtggtcccagtacctcgaatccgaggataaccgacaggtgctgggagaatttctggagagcactagtccggcctgtttggtattctcatttgctgcctctggcagacttgccgccagccaggagataccccgcgatgctaatcacaagctcgtgtttatctctaagaagatcaccgaaagtatcggtgtcaatgacttcagccaagtagttctttttggtgaattgcctgcgttgtccctgggccatgtcagcgcattcctcgacgagattctggtcccagtactctcaaataagaacaaccacaagagctggagctgtttcaccagccaggacatggaataccacatcgaggttatgaaaaagaagatgtatatctttagggggaagatgtcacggcgcaccctgttaccgatcccaaccgtcgctggaaaaatggacttagatcaaaactgttctgagaacaagcccccgtccaatgagcgcattatcttacatgccatcgagtctgttgttatcgagtggtcccaccagatccaggagatcatcgagagggattcagtacagcgcctacttaacggactccacctgagcccccaagccgagctggatttttggatgatgagaagggaaaatctgtcctgtatctacgaccagctgcaggcacctgttgtgctcaagatggtcaaaatccttaccactaaacaatcatcatatttccccacgttgaaagatatctttctggccgtggaaaatgccttgctggaagcccaggatgtggagctgtacttgcgacctcttcggaggcacatccaatgtctacaggagacggagtttccgcaaacgagaatcctcattgcacccctatttcatacaatttgtctgatatggtcacatagcaagttttataacacccccgcgagggtcatcgtcttacttcaagagttttgcaacctgttcataaatcaggctaccgcatacctttcgcctgaggatcttctcaggggggaaatcgaggaaagcctggaaaaggtgcaggtggccgtgaatatactgaaaacctttaaaaactcctttttcaactacagaaagaaacttgcttcatacttcatgggacgcaaactgcggccatgggatttccaatctcacctcgtgttttgccggttcgacaaatttttagaccggctgatcaagattgaagatatttttgccaccacactcgagtttgagaagctggaacgcctcgaattcggcggtaccaagggggctattctgaacgggcaagtgcacgagatgtctgaggagcttatggagctgtgcaaattattcaagcagagcacctacgaccccagcgactgcacgaacatggagttcgagtctgattatgtggcctttaagtctaagacgcttgagttcgatcgccgcttagggaccattatctgcgaggccttttttaactgtaacggcctggaagcggcttttaagctgctcacgatctttggaaattttttggaaaagcccgttgttatggagattttttcccttcactactccaccttagtgcacatgtttaatactgagttggacgtgtgcaagcagctatataacgaacatatgaagcagatcgagtgtggccatgtcgtccttaacaagaatatgccctttacctctggaaacatgaaatgggctcagcaggtgctccaacgacttcaaatgttctggagtaatttcgccagtctgagatatctgttcttaggcaatccggaccatgctctggtgtaccagaaatacgtcgagatgaccaccctactggaccaattcgaaagcagaatttataacgagtggaagagcaatgtagatgaaatttgtgaattcaatctcaatcagccactggtgaagttctcagccattaacgggctgttgtgtgtgaacttcgaccctaaattagtggctgtcctgcgagaggtcaagtatctgctcatgctgaagaagcaggacatacccgactctgctctggctatcttcaaaaaacgcaataccatcttgaaatacatcggcaacctagacctgcttgtacaggggtataacaaactcaaacagacactcctcgaagtggagtatccactgatcgaagatgaattgcgcgctatcgacgagcaattaacagctgccacaacatggcttacctggcaggacgattgttggggatacatagagagggtccgagccgcaacatccgaactggagcaccgggtggaacggacacagaagaatgtgaaggtaatccaacagactatgcgaggatgggcccgatgcgtgcttcccccgcgccgagagcatcggcgggaggccgccttcacactagaagacaaaggcgacctattcacaaaaaaatataaacttatacagggcgacgggtgtaaaattcataatctggtcgaggaaaataggaagttgtttaaagcaaatccctccctggacacctggaagatttatgtcgagtttatcgatgacatagtggtggagggcttcttccaggccattatgcacgacttggacttcttccttaagaatacggagaagcagctcaaaccggctccatttttccaggcgcagatgatacttctgcctcctgaaatcgtctttaaaccttccctggacagggaagccggggatggtttttacgatctggtggaagaaatgctttgcaatagctttcggatgagcgcgcagatgaatcgcattgccacacatctggagattaaaaattaccagaatgatatggataatatgctcggtctagccgaagtgcggcaggaaattatgaaccgagtcgtgaatgttattaacaaagtgttagacttcagaaatacacttgagactcacacatatctctgggtcgacgaccgtgcggagtttatgaagcatttcttactctatggtcatgccgtgtcctccgatgaaatggacgctcatgccaatgaggaaattccggagcagcctcctaccttggagcagtttaaagagcagatcgacatctatgaagctctgtacgtacaaatgtcgaaatttgaggattttagagttttcgacagctggtttaaagtcgacatgaagcctttcaaagtctctctcctgactatcattaaaaagtggtcctggatgttccaggagcatcttctgaggttcgtgatcgacagcttgaatgaattgcaggaattcattaaggagacggactcggggctccagcgggaacttaacgaaggcgaccacgatggtctggtcgatatcatggtccacctcctggccgtgagatctagacaacgcgctaccgatgaattgtttgagcctctgaaagagacaatcaccctgctcgaaagttacgggcagaaaatgccagagcaagtgtatattcagctagaagaactaccagaaagatgggagaccacgaagaagatcgcagccaccgtgcggcacgaggtcagcccccttcacaatgcggaagtgacactcataagaaaaaaatgtatcctctttgacgcaaagcaggccgagtttcgcgagcgctttaggcactatgctcctctgggtttcaatgctgaaaacccctacactgctctggacaaggctaacgaagagctggaagcactggaggaggaaatgttgcagatgcaggagagcactagactctttgaggtcgcccttcctgagtacaagcagatgaagcagtgcaggaaagaaataaagctgctcaaaggactgtgggacgtgattatttacgtccggcggtccatagacaactggactaaaacacagtggagacaaattcacgttgagcagatggatgtcgaattgaggagattcgcaaaggctagtagtattacagaaatttggagcctaaacaaagaagtgagagtgtgggacgcatacactggcctggaaggaacagtgaaggatatgaccgctagtctgcgtgccataaccgaactacagagcccagccttacgcgaccggcactggcaccaattaatgaaggccatcggagttaagtttctgatcaacgaggccaccaccttagctgaccttctggccctcagactgcacagagttgaggacgatgtgcggcggatcgttgacaaagccgtgaaggagctggggacagagaaggtcatcactgaaatctctcaaacttgggccactatgaagttctcttacgaggtgcattaccggaccggaatccctctgcttaagtcagacgaacagcttttcgaaacactcgaacacaaccaggtccagctccagaccctgttacagagtaagtacgtcgagtatttcattgagcaggtcctatcctggcagaacaaacttaatatcgcggatttagtaatctttacttggatggaggtccagcggacctggtcccacttggagtccatctttgtgtgctcagaagatattcgaatccaacttgtcaaggatgcaagaaggttcgacggggtggatgccgagtttaaggagcttatgttcaagaccgccaaagtggagaacgtattggaggctacctgtagacctaatttatatgaaaagttgaaagacctgcagtcaagactgtctttgtgcgagaaagccctggcggagtacttagagaccaagcgcatcgctttccctagattttacttcgtaagctcagcagacctgttagacattttgtctaagggggcccagccaaagcaggtcacctgccacttggccaaacttttcgactccatcgctgatctgcagtttgaggataaccaggacgtttccgctcatcgggctgtgggaatgtatagtaaggagaaagagtacgtgccattccaagccgagtgtgagtgcgtgggccatgtagaaacatggttgcttcagctggagcagaccatgcaggagaccgtgagacattccatcaccgaggccatcgtggcctacgaggaaaaaccccgggagctttggatattcgacttcccagcgcaggtggctctaactagtagtcagatctggtggactactgatgtggggattgccttctccagattagaagaaggatatgagaccgctctgaaggatttccataagaagcagatcagtcagctcaacaccctcatcacactcctgttaggcgaactcccacctggggacaggcaaaagatcatgacaatatgtacaatcgatgttcacgccagagatgtagtagcaaagctcatcagccagaaacaggtggtcgtgagtccacaggcgtttacttggctctcacagctccggcacagatgggaggacactcagaaacattgctttgtaaatatctgtgacgctcagtttcagtacttctacgagtacctcggtaattcaccacggctagtcatcactcccttgacagatcgttgttatatcacgttaactcaatcccttcatctcactatgtccggagcaccggccgggcccgccggcaccggcaagactgagactaccaaggacctcggccgcgcactagggatgatggtgtacgtgttcaactgcagcgagcagatggactacaagtcaattgggaacatctataaagggctggtgcaaacgggtgcttggggctgctttgatgagttcaaccgcatatcggtcgaagtgttatccgtggtggcggtacaggtcaagatgatccacgatgccattcgcaatcgaaaaaagcggttcgtgttcctcggagaagctatcacactcaagccctccgtaggaatctttatcaccatgaatccaggctatgccggtaggacagagctgcctgaaaatctcaaagcactattccgtccgtgtgccatggtggcacccgacatcgagctcatctgtgagattcttctggtcgccgaagggttcgtggacgcaagagccttggctcggaaattcattacattatatacattatgcaaggaactcctctccaaacaggaccactatgattggggcctcagagccataaaatccgtcttggtggtggctggcagcctgaaacggggtgacaagaaccgcccagaagatcaggttctgatgcgagccctgagagattttaacatgcccaagattgtgacagatgacataccggtgttcctgggactggtcggtgacctcttccccgcgcttgatgtccctaggcgccgtaagttacatttcgagcaaatggttcggcagtcaactcttgagttgcgcttacagcctgaggagtcatttattttgaaggtggtacagttagaggaacttctggcggtacggcacagcgtgtttgtggttgggaatgcagggacaggcaagtcaaagattctgcgcaccttaaaccgaacctatgtgaacatgaagcagaaacccgtctggaacgacctgaacccaaaggcagtgaccaccgacgaattgtttggatttatccatcacgcaacccgggagtggaaggacggcaaaatcgtctatagttatttcataggactcttctcatcaatccttcgcgagcaagcaaatcttaaacacgatggcccgaaatggattgtacttgatggagatatcgatcccatgtggattgagtccttgaatactgtaatggatgacaacaaggtcctgacgttggcctcaaatgagcggattgcccttacaccatttatgcggctgctgtttgagatacatcacctgcgcagcgccacgcccgcgactgtgtctagggcaggaatactatatgtgaatcctcaggacctgggctggaacccatacgtggcctcatggatagatcgcagacggcaccaaagtgagaaggccaacctcaccatcttatttgacaagtacgtccccgcatgtctagataagctgcgaaccagtttcaaaaccatcacaagcatcccagaaagctcactcgtccagacgctttgtgtgctgttggagtgtctgctgacccccgagaacgtgcccagcgactcacccaaagaggtatacgaggtctatttcgtgttcgcctgcatttgggcgtttgggggtacactactgcaggatcagatctccgattaccaggccgacttcagtcggtggtggcaaaaggaaatgaaggctgtgaagtttccaagtcagggcaccatttttgactactacgtggatcacaagactaaaaagctgcttccttgggccgacaagattgcacagtttactatggatcccgacgtgccacttcagactgtgctggtccacaccactgagacagccaggctgagatacttcatggagctgctcctggagaagggcaagccgctgatgttagtgggaaacgcaggtgtaggaaagacggtgttcgtgggcgacacacttgctagtttgagcgaagactatattgtctcaagagtgccattcaactattatacaacctccactgccctgcagaaaatactggagaagcccctggagaagaaggccgggcacaactatggcccgggcggcaataaaaagctaatttatttcatagacgatatgaacatgcccgaggtggacttgtacggtacggtgcagccccacaccctcattaggcaacacatcgattacgggcactggtacgacaggcagaaagtaatgctcaaggaaatccataattgccagtacgtggcgtgcatgaatcctatggtgggttctttcaccatcaacccacgtttacagcggcactttaccgtgttcgccttcaactttccatccctggatgccctcaataccatatacgggcagattttcagcttccactttcaacagcaggccttcgctccaagcatcctgcgcagcggaccaactctgatccaagcgaccattgccttccatcagacgatgatgtgtaacttcttacccaccgcaattaagttccactacattttcaacctacgggacttgtcgaacgttttccagggcattttgttcgcttcccctgaatgcctcaagggtccgctcgatttgatccacctgtggctccacgaaagcgctagagtgtatggagacaagctgatcgataagaaagactgcgatttatttcaacggcgcatgctcgaaactgcgtataagtactttgaaggcatcgactcacatatgctcctgcaacaaccactgatctactgtcactttgctgacagagggaaagatccgcattatatgcctgtcaaagactgggaagtgttgaagacaattttgacagagacactggacaactataatgagcttaacgctgctatgcatcttgtactctttgaggacgctatgcaacatgtctgcaggatcagtcgaattctgagaacccctcagggatgtgcactcttagtgggagtcggcggcagcggaaagcagtctctgagcaggctggctgcctacttgaggggcctggaagtattccagatcaccctcacagaaggttacggcattcaggagctcagagtcgaccttgcgaatttgtacattcggacaggggcaaagaacatgcccacagtttttcttttgactgacgcccaggtgttggatgagagtttcctggtactcatcaatgacctcctggcaagcggcgagatccctgatttgttctcagatgaggacgtcgataagataatctccgggatccacaacgaggtgcatgcgttggggatggtcgattctagagaaaattgttggaaatttttcatggccagagtaagactccagctgaaaattattctctgtttctctcctgtaggccgcaccttgcgggtgagggcacgcaaatttcctgccattgtcaattgtaccgctatcgattggtttcatgcctggccccaggaagccttagtttctgtctctagaagatttattgaggagaccaagggcatcgaaccagtccataaagacagtatttctcttttcatggcccacgtgcatactaccgtcaatgagatgtcaacgcgctattatcagaatgagaggcgtcataactacaccacacccaagagttttctagaacagatctccctattcaaaaatctccttaagaagaaacaaaacgaagtgtccgaaaagaaagagcggctggttaacggcatacagaaacttaaaaccaccgcctcccaggtgggggacctgaaggcccgacttgccagccaagaagccgaattgcagctgcgcaaccatgacgcagaggccctgataaccaagatcggcttacagacggaaaaggtgtcacgggaaaaaacgatcgcggacgctgaagagcgcaaggttactgcaattcaaacggaggtgttccagaagcagcgagaatgtgaggccgatctgctgaaggccgagccagcgctcgttgccgcaacagctgccctgaacacgctgaatagggtgaatctgtccgaactgaaagcctttccaaacccacctattgccgttactaacgtgactgccgcagtgatggtgctgctcgcccccaggggcagggtgcctaaggataggtcatggaaggctgccaaggtgttcatgggcaaagtggacgattttctccaggccctgattaactacgacaaggagcatatcccagaaaactgcttgaaggtggttaacgaacattacttaaaggaccccgaattcaatccaaacttaatccggacaaaatccttcgcagcagccgggctttgtgcttgggtaatcaacataattaaattttacgaagtgtactgtgacgtcgaacccaaaaggcaagccttggcacaagcaaatctagagctggctgctgccactgagaaattagaggctatcaggaagaagctcgtcgatctggacagaaacctcagtagattgacggcatcattcgaaaaggctaccgccgagaaggtgcgctgccaagaagaagttaaccagacaaacaaaactataaagctcgccaatcgcctggtgaaagaactcgaggctaagaaaatcagatggggacagtcgattaagtcctttgaggcccaggagaaaacactttgtggcgacgtgctgctgacagccgcctttgtctcgtacgttggtcctttcaccagacagtacagacaagaactcgtgcactgcaaatgggtgcctttcttacagcagaaagtgagcatcccattaacagagggcctggaccttatttccatgctgacagacgatgcaacgatagccgcatggaataatgaaggcttaccctccgataggatgtcaacagagaatgcagcaatcctcacgcactgcgaacggtggcccctggtgatcgatccccaacagcagggcatcaagtggatcaagaataagtatggcatggatctgaaagtgacacacctagggcagaagggcttcttgaacgcaatcgagacggctttagcctttggcgacgtgatcctgatagaaaacctggaagaaactatcgaccctgtactggatcctctcctggggcggaatactataaagaaaggcaagtacattaggattggcgataaagaatgtgagtttaacaagaattttcgactcatcttacatacaaaacttgccaatccacactacaagccagaactgcaagctcagaccacgctgttaaattttaccgtgacagaagatggcttagaagctcagctgttggcagaggttgtgagtatcgagcgacctgatttggagaagctgaaactcgttctaactaagcatcagaacgactttaagatagagttgaaatacttagaagacgacctcctgctaaggttatccgccgccgaaggttcttttttggacgatacaaagctggtcgagcggttagaggctacgaagacaacagtagctgagatcgagcataaggttatcgaggctaaggaaaacgaacgaaaaatcaatgaagcccgggaatgctatagacctgtcgccgcaagggcttccttgctctatttcgtaattaacgatctgcagaagattaatcccttgtaccagtttagcctcaaagcttttaatgtgctgttccatagggccattgaacaggccgataaagtggaagacatgcaagggagaatctccatcttgatggagagtattactcatgctgtgtttttatacacctcacaggcgttgttcgagaaagacaagctaactttcctatctcaaatggctttccagatccttcttagaaaaaaggagattgaccccctggagctggacttcctccttaggtttacagtcgagcatacacatttatccccagtcgacttccttacaagccagagttggtctgccataaaggctatagcagtcatggaagagtttcgagggatcgacagagacgtggaagggtcagctaagcagtggcggaagtgggtcgaaagcgagtgtccagagaaagaaaaactcccccaggagtggaagaaaaagagtctgatccagaagctaatactactgagagcgatgaggccggatcgtatgacatacgctctccgcaactttgttgaggaaaaactgggagcaaagtatgtagaacggaccagacttgatctggtgaaggcctttgaggagtcttctcccgcaactccaatatttttcattcttagcccgggcgttgacgcgctgaaagacctggagatactggggaagcgccttgggtttaccatagattccggcaagttccataatgtgtctctcggacagggccaggagacggtggcagaagtggctctcgagaaggcaagcaagggaggacactgggtaatcctgcagaatgtacacctcgtggcaaaatggctggggaccttagagaagctcctggagcgttttagccagggctcgcatagagactacagggtgttcatgagtgccgagtcagcacctacccccgacgaacacattataccccaggggctgcttgaaaacagcatcaagataacgaatgaaccgcccaccgggatgctggccaaccttcacgccgctctgtataacttcgatcaggatacccttgagatatgcagtaaggagcaggagttcaagtcaattttattctccctctgttacttccatgcatgtgtggctggcaggctcagattcggaccacaggggtggagccgctcgtatccttttaaccctggcgacctcaccatctgcgccagtgtgctctacaattatctggaggccaatagcaaggtcccctgggaagacctgagatacttattcggtgaaataatgtatggagggcatatcactgacgattgggaccgtaaactttgcagagtgtatctggaggagttcatgaatccctctctgactgaggatgagctgatgctcgcaccaggcttcgctgcccccccttacctcgactacgccgggtatcaccaatacatcgaagaaatgctgccacctgagagccccgccctgtatggcctccaccccaatgccgagatcgagttcctgaccgtcacctctaacacactgttcagaactctgttggagatgcagccacgcaacgccctatccggagacgagcttggtcagtccactgaggagaaggtgaaaaacgtcttggacgacatcctggaaaagctccctgaggaatttaacatggcagaaattatgcagaagaactccaaccgctccccctacgtgttggtgtgctttcaggagtgcgagcgcatgaacatcctgattcgggagataagaatctccctggagcagctcgatctgagcctgaagggcgagcttgctctctctccagcagtcgaggcccagcagtttgcactcagttacgacactgtgccagatacttggagtaagttagcatacccttcaacatatgggttggcacagtggttcaatgatttactgctcagatgccgagagctggacacttggactcaagatctgacccttcccgcggtagtctggctctctggcttcttcaatccacagagctttcttacggcaatcatgcaaactatggcccgcaaaaacgagtggcctctggacaagacaaggctaaccgcagatgtaacaaagaagaccaaggaagattacggccatcctcctcgagagggcgcatatctgcacggcctcttcatggaaggagcacgctgggacacacaggccggcaccatagtggaggccagactgaaggagctggcatgccctatgccagtgatttttgctaaggccacccctgttgatagacaagagaccaaacagacttacgagtgccccgtctatagaacaaaactccgcgggccctcctacatatggacatttcggttgaaaagtgaagaaaagaccgccaaatgggtgctggccggtgtggccttgctgcttgaagcctag

SEQ ID NO: 97445 - DNA, 13572 bp, Artificial Sequence
  derived and/or modified sequence
atggccgcacaggtggctgccagagaggccagggacttcagggaagcacctactctgaggttgaccagtggcgctgggctggaggcagtgggcgctgttgaactggaggaggaggaggaaaatgaggaggaggccgcagcacgcagggcgagaagcttcgcccaggacgctcgcgtaaggtttttaggtggaagactggctatgatgctaggattcaccgaggagaaatggagccagtacctggagtccgaagacaaccggcaagtgctgggagaattcctggaatccacctcccctgcttgcctcgttttttcattcgccgcatctggaagactggccgctagtcaggaaatacctagggatgctaatcacaaactggtgtttatctcaaagaaaattacagaaagtatcggagtgaacgacttttcccaggtggtgctgttcggagagctgcccgcattgagtctcggccatgtgagcgctttcctggatgagattcttgtgcctgtactctctaacaaaaataatcacaaatcctggtcttgtttcaccagccaagacatggaatatcacatcgaggtcatgaagaagaaaatgtatatattccggggaaaaatgtccagacggacgttactccctattcctaccgtagccggaaagatggatttggaccaaaactgttccgaaaacaaacctccttcgaatgagcgaataatcctccacgccatcgagtccgtcgtgattgaatggtctcatcagatccaggagattattgaaagggattcggttcagcgtcttttgaatggactgcatttaagtccccaggctgagctggatttttggatgatgagacgagaaaatctgagctgtatctacgaccagctccaggccccagtcgtcttgaagatggtcaagattttaactaccaagcagagttcctacttccccaccttaaaggacatttttctcgcagttgagaatgcactgttagaggcgcaggatgtggagctgtacctgcgccctctgcgcagacacatacagtgtctgcaggagaccgagtttccacagactagaatcctgatcgcccctcttttccataccatatgcctgatatggtcccactctaaattttataacacaccagctcgagtaatcgttctgctgcaggagttttgcaacctatttattaaccaggctaccgcctatctatcacctgaggatctgctgagaggcgagatagaagagagtctggagaaggttcaggtagccgtaaacattctgaagactttcaagaatagcttcttcaattatcgtaagaagcttgcatcctacttcatgggcagaaaactgcgaccctgggatttccaaagccatttggttttctgtaggttcgataaatttctggaccggctaatcaaaattgaagatattttcgctacaacgctggaatttgagaagctcgagcgcctggaattcggcggaaccaaaggggctatcctaaatggacaagtccatgagatgagcgaggagttaatggaactatgcaagctttttaagcaatctacgtacgatccatcagattgtaccaatatggagtttgaatccgattatgtggcatttaagtctaagacactggaattcgatcggaggctcggcactattatctgcgaggcattcttcaactgtaacggcctggaggccgctttcaaactacttaccatttttggaaacttccttgagaaaccggtcgtaatggaaattttctccttgcactactccacactggttcatatgttcaatacagagctcgatgtatgtaaacagttatacaatgagcacatgaagcagatagaatgcgggcatgtggtgctgaacaaaaatatgcctttcacctcaggaaatatgaaatgggcgcagcaagtgctgcaaagattacagatgttctggtcgaactttgcaagtttaaggtacctttttctgggaaatccagatcatgctctggtgtatcagaaatatgttgagatgaccacacttctggatcaatttgaatccagaatctacaacgagtggaagtcaaatgtcgacgagatttgtgaatttaacctgaaccagccattagttaagtttagcgccattaatggcctgctgtgcgtcaattttgatcccaagctggtcgcagttctccgtgaggtgaagtatcttcttatgttaaaaaagcaggacatccctgacagcgcgctggccatctttaagaagcggaacaccattcttaaatatattgggaatcttgatcttttggtgcaggggtacaataagttgaagcaaaccctccttgaggtagaatatcccttgatcgaagatgaactgcgggctatcgacgagcagctaaccgctgcgaccacatggctgacctggcaggacgattgctggggctacattgagcgtgtcagagccgcaaccagtgaactcgagcaccgtgtcgaacgcacccagaaaaatgtgaaggtgatccaacagaccatgaggggctgggccaggtgcgtgctcccccctcgcagagagcaccgcagagaggcagctttcactctggaggataagggcgacctctttactaagaaatataagctgatccagggtgacggatgtaagattcacaacctggtggaggaaaataggaagctctttaaggcaaatccaagcctagatacctggaaaatctacgtggaattcatcgacgacatcgtggttgagggctttttccaagcaatcatgcacgatctggatttctttctgaagaacaccgaaaagcagctgaaaccagcaccattcttccaagcccaaatgatcctcctcccacctgagattgtgtttaagccgtctctagatcgtgaagccggtgacgggttctacgatcttgtcgaagaaatgctttgcaactcgtttcggatgagcgcccagatgaaccggatcgccacccacctggaaattaaaaattaccaaaatgatatggacaacatgctggggttggccgaagtcagacaggagatcatgaatagggtcgtgaacgtcattaacaaggtgctggactttcggaacaccctggagacacatacatatttgtgggtcgacgaccgggcagagttcatgaaacacttcctcctatacggtcacgctgtctcctcggatgaaatggatgcacacgcaaacgaggagatccctgaacagccccctaccctggaacagttcaaagaacagatcgatatctacgaagctctgtacgtccagatgagtaaatttgaggattttagggtcttcgactcttggttcaaagttgacatgaagccatttaaagtgtcccttctcacaatcatcaaaaagtggagctggatgtttcaggaacaccttctgagatttgtgattgattcactcaacgagctccaggaattcatcaaggagaccgactccggtctgcagcgggaactcaatgaaggcgatcacgacggtctcgtggatatcatggtgcacttgctcgctgtcagaagccggcaacgggctaccgacgagctattcgagcccctgaaagagactatcacactgctggagtcctacgggcagaaaatgcctgaacaggtgtacatccagctggaggagctccccgagaggtgggagaccactaagaagatcgctgctacggtaagacacgaggtgagccccttgcacaacgccgaggtaactctcatcagaaagaagtgtattttattcgacgctaagcaggccgaatttcgtgagcgattccgtcattatgcccctctcggtttcaatgctgaaaacccttatactgctctggacaaagcaaatgaagagctggaagcactggaggaggaaatgctccaaatgcaagaatcgacccgtctgtttgaggttgccctcccagaatacaaacagatgaagcagtgtcggaaagaaatcaaactgctcaagggcctgtgggacgttattatctatgttcgacgttccatcgacaattggaccaaaacacagtggcggcaaattcatgtcgaacagatggatgttgaattgagacgctttgctaaggcatcctctattacagagatctggagtctgaataaagaggttcgagtgtgggacgcatataccgggctggaaggtaccgtgaaggacatgaccgccagcctcagggccattactgagctgcagagtcccgctttaagggatagacattggcaccaattgatgaaggcaattggggtgaagtttctaatcaacgaagccaccactctggctgatctcctggccctgaggttacatagggtcgaggatgacgtgcggaggatagtcgacaaggctgtgaaagagctcgggactgagaaggtgatcactgaaatcagtcagacctgggctacaatgaagttcagttatgaagttcactacaggactggaattccactgttaaagagtgatgaacagttgttcgagacactggagcacaatcaggtgcagctgcaaacactattgcagtccaagtatgtggagtattttatcgaacaggtgctcagttggcagaacaaactgaacatagctgacttagtcatttttacatggatggaagtgcagcggacttggtcccacctagagagcatttttgtctgcagcgaagatatcagaatacagttagtcaaggatgcgagacgattcgacggagtagatgcggagttcaaggagctgatgttcaaaacagccaaagttgagaacgtgctcgaggcaacctgcagacccaatctttatgagaagctaaaggatctgcaaagtcggctgtccctgtgcgagaaggcactcgcagagtatctggaaaccaagcgcattgctttccccaggttttacttcgtctctagcgctgatctgctggatatcctctccaagggcgcacaacccaagcaggtgacctgtcatctggcaaagctctttgactcgattgcagatttgcagtttgaggataaccaggatgtgtcagcccacagagctgttggcatgtactccaaagagaaagaatatgttcccttccaggccgagtgtgagtgtgttggccatgttgaaacctggctcctccaactggagcagaccatgcaggagaccgtgaggcattctataactgaggctattgtcgcctacgaagagaagccaagggagttatggatctttgacttcccagctcaagtggctctcaccagctcacagatttggtggaccaccgatgtggggatcgcttttagccgccttgaggagggatacgaaacagctctgaaagactttcacaaaaagcagatctctcagttgaataccctgattacactcctgctaggggaactgccacccggtgatagacaaaaaatcatgaccatctgtaccatcgacgtccacgcccgtgacgtggtcgctaaattgatttcacagaagcaggttgtcgtttctccacaggcattcacgtggttgagtcaactccgacatcgatgggaagacacacagaagcactgcttcgtgaatatctgtgatgcacagttccaatatttctatgagtacctcggcaattcacccaggctggtgatcacaccccttacggaccgctgttatataactctgacacagagcttgcacctgacaatgtctggcgctccggcaggacctgccggtacaggcaagacagagaccactaaggacctcgggagggcgctgggtatgatggtttacgtattcaactgtagtgaacagatggattataagtcaataggcaacatatacaaaggcctggtgcagacaggagcctggggatgtttcgacgaattcaaccggatcagtgtcgaagttctctccgtggtggcagtccaggtaaagatgattcacgacgcgattaggaacagaaaaaagcgcttcgtgttccttggagaagctatcactctcaagccatccgtgggaatctttattaccatgaaccccggttacgccggtagaactgagcttccagaaaacctgaaagctctgttcagaccctgtgcaatggtcgcccctgacatcgagctaatttgcgaaatactgttagtggctgagggattcgttgacgctagggcactggctcggaaattcatcacactgtacactctgtgcaaagagctgcttagtaaacaggaccactatgattggggacttcgagcaatcaaatctgtgcttgtagtggcaggatctctgaagcgtggcgataagaacaggccggaggaccaggtcctgatgcgcgctttgcgcgacttcaacatgcccaagatagtgacagacgacatacctgtgttcctggggcttgttggtgacttattcccagccctggacgttccacgaagacgaaagttgcattttgagcagatggtgaggcagagcacactggagcttaggttacaaccagaggaatcatttatacttaaggtagtccagctggaggagctcttggcagtccggcatagcgtttttgtggtcggtaacgcaggcacggggaagtccaaaatcttgcggactttgaatcgcacctacgtaaatatgaagcagaagccagtgtggaatgacctgaaccccaaagccgtcacaacagatgagctgttcggatttatccaccatgccactcgtgaatggaaagacggaaaaatcgtgtactcgtacttcatagggctgttcagctccatacttagggagcaggctaaccttaagcacgacggcccaaaatggatagtacttgacggggatatcgaccctatgtggattgaatctttaaacacagtcatggatgataacaaggtgttgactctggcctccaacgagagaatagccttgactccctttatgcggctgttgttcgagattcaccatctgcgaagcgccacgcccgctacagtcagccgtgctggtattctctacgtgaacccccaggatctgggctggaacccttatgttgcttcttggatcgacagaaggaggcatcagtccgaaaaagctaacctcacaatcttattcgacaaatatgtgccagcttgcctggacaaactgaggactagttttaaaacgataacaagtatacccgagagttctcttgttcaaactctgtgtgtgctcctcgagtgtttattaactccggaaaacgtgccttctgactccccaaaagaggtttacgaggtgtactttgtgttcgcatgtatttgggctttcggagggacacttctgcaggatcaaatcagcgattatcaggccgacttttcgcggtggtggcagaaagagatgaaagcagtaaaattccccagccagggcaccatatttgactactacgtggaccacaagactaagaaactgctgccctgggccgacaagatagctcagtttacaatggatccagacgtgccgctgcagacggtgttggtgcataccacagagactgcccgactgcgctattttatggaactgctgttggagaaggggaagccgttgatgctcgtagggaacgcaggagtcggtaaaactgtcttcgtaggcgatacactagcctccctctctgaagattatatcgtgtcccgtgttccatttaactactatacaacatctactgccctgcaaaagatcctggaaaaaccactggagaaaaaggctgggcataactacggcccaggcggaaataaaaagctcatttattttatagacgatatgaatatgcccgaggtggatctgtatggaaccgtgcagccccatacgttgatacgccaacatatcgactacggtcactggtacgacaggcagaaggtcatgcttaaggagattcacaactgtcagtatgtcgcttgcatgaacccaatggtgggttctttcacaatcaacccccgtctccagaggcactttacagtatttgcttttaacttcccaagtctcgacgctctgaataccatttacggccagattttctccttccacttccagcaacaggccttcgctcctagcatcctgcgatccggccctacactgattcaggctaccatcgcatttcatcaaactatgatgtgcaactttctgccgacagcgataaaattccactacatctttaaccttcgcgatctgtccaatgttttccaaggtatcttatttgcctctcctgagtgcttgaaaggacctctcgacctgattcacctttggctccatgagagcgctcgggtgtacggcgataaactgattgataagaaagattgcgacttatttcaacgtaggatgctggaaacggcctataagtacttcgagggaatagatagtcacatgctgcttcaacagcctcttatatattgtcatttcgcagataggggtaaggatcctcactacatgcctgtcaaagactgggaagtgctgaaaacaattctcaccgaaacactcgacaattacaatgaattgaatgccgcaatgcaccttgtcctcttcgaggatgccatgcagcatgtgtgcagaatctcaaggattcttaggacaccacagggctgtgcccttcttgtcggagtgggcggatcaggaaagcagtctttgtcccgcctcgccgcatacctgaggggcctggaagtgtttcaaataacactgactgagggttacggcattcaggagctgcgggtcgatctcgccaatctttacattagaactggcgctaagaatatgcctacagtgtttttgctcaccgacgcgcaggtgctggacgaaagtttcctggttctcattaacgatcttctagcatctggggaaatccccgacctgttcagcgatgaagacgtggataagatcatttcagggatccacaacgaagtgcacgcactggggatggtggactccagagaaaactgctggaaattctttatggctagggtgcgccttcaactgaaaataatcctgtgcttcagcccagtaggcaggactttacgtgtgagggccaggaaattccccgctattgtgaactgcactgcaatagattggtttcacgcttggccgcaagaggccctggtgtccgtgtctcggagatttattgaagaaacaaagggcatcgaaccagttcacaaggacagtatctcactattcatggctcatgtgcacaccacggtgaacgaaatgagcacccgctactaccagaacgagaggaggcacaattacaccacccccaagtcgttccttgagcagatttccctatttaaaaatctcctcaagaaaaagcagaatgaggttagtgaaaagaaggagagactggtcaacggtattcaaaaattaaaaactaccgcttctcaggtgggggacctgaaagccaggttagcgagccaggaggctgagttacagctgcggaaccacgacgcagaagccctgatcaccaaaattggcttgcagacagaaaaggtctccagagaaaagactatcgccgacgccgaagagaggaaagtgaccgccattcagacagaggtattccagaaacaaagggagtgtgaggcggatctgttgaaggcagagccagcgctcgtggctgccacagccgcactcaatacactgaatagggtcaatctgagtgagctaaaggccttccctaacccacccatcgccgtcactaatgtcacagcagcagtcatggtcttactggcccctcgcggacgcgtgccgaaagacaggtcctggaaggctgccaaggtattcatgggcaaagtggatgactttctccaggccctgatcaactacgacaaggaacatatccctgagaactgccttaaagtcgtgaacgaacattatctgaaggatcctgagttcaaccctaatttgatcagaactaagagctttgccgctgcagggctctgtgcctgggtcatcaacatcattaaattctacgaggtgtattgtgatgtggaacccaaaaggcaggcgcttgcgcaggctaatctggaactcgctgccgctacagagaagctcgaggctattcgaaaaaaactggttgatctggaccgaaacctgagccgcctgaccgcttccttcgagaaggcaaccgccgaaaaggttcggtgtcaggaagaggtaaaccagacaaataagactataaaactggcaaaccggttggtgaaggaactggaagcgaaaaaaatcagatggggccagtcaatcaagagcttcgaggcgcaagaaaaaaccttgtgcggtgatgtacttttgacagcggcattcgtttcctatgtcggaccattcactcgacaataccgccaggaactggttcactgtaaatgggtccccttcctgcagcaaaaggtgagcatccctctgaccgagggactcgacctgatttcaatgctgacagatgatgctactatcgcggcttggaacaatgagggcttaccaagtgatagaatgagtaccgaaaatgcggcaattctcacccattgtgaacgttggcccctcgtcattgacccacagcaacaggggatcaaatggatcaagaacaagtacgggatggatctgaaagttacacatctggggcagaagggcttcttgaatgccattgaaacagccctggctttcggcgatgtgatcttaatagagaacctggaagagaccattgaccccgtgctggaccctctcctgggtcgcaacaccattaagaaagggaaatacatccgcattggggacaaagaatgtgaattcaacaaaaactttagattaatccttcacacaaagctggcgaatccgcattataagccagaactgcaggcccagactaccctgctaaacttcactgtgacagaagatgggcttgaggcccagctgctcgctgaggttgtctcaattgagcgcccagatctggagaagctcaaactagttcttactaaacatcaaaacgatttcaagattgagttgaagtacttggaagatgacctgcttcttcggctctcagcggcagaaggatccttcctcgacgacacaaagctggtcgagagacttgaagccacgaaaactactgtggccgagatagagcacaaggtgatagaagccaaggagaatgagcgaaaaatcaacgaagctcgcgaatgttatcgaccggtggctgcccgagcaagcttgctttacttcgtgataaatgacctgcagaagattaacccactctaccagttcagcctcaaagctttcaatgttctgtttcatagagctatcgaacaagctgacaaagtggaagatatgcaaggccgaatttctattctaatggagtcaattacacacgcagtttttctgtacacttctcaagcactgttcgagaaggataagctgacgttcctgagtcagatggcttttcagattttgttaagaaagaaggaaatagatccactggaattggacttcctgctccgctttactgtggagcacacgcatctgagcccggtggactttttgacctctcagagctggagcgctatcaaagccatagccgtcatggaggagttcaggggcattgacagggatgtcgagggctctgctaagcagtggaggaagtgggtcgagtctgaatgtcctgaaaaggagaaattaccgcaggaatggaagaaaaagagccttattcaaaagcttatccttctacgagctatgcggcctgaccggatgacatacgctctgaggaatttcgtggaggaaaagctgggcgcaaaatacgtcgagcgtactaggctggatttggttaaggctttcgaagagagcagtcccgcaacccccatcttctttattcttagtcctggggtggacgcactgaaagatctggagattctcggaaaacggttgggcttcaccatcgatagtggtaaatttcataatgtgtctctggggcagggccaagagaccgtggccgaagtggctctggaaaaggcatcaaaggggggacattgggtcattctacagaatgtacatcttgtagctaagtggttggggacgcttgaaaaactgctggaacgcttcagccagggtagtcatcgagattaccgagtattcatgtcagccgaatctgccccaactcccgacgaacatatcataccccagggcctcctcgaaaacagtattaagattaccaatgagcctcctactggtatgctcgcaaacctgcatgccgcactctataacttcgatcaggacacactcgaaatctgcagcaaagagcaggagttcaagtctatcctcttttccctttgttattttcacgcctgcgtggccggacggttgcggtttggccctcagggctggtctagaagctaccctttcaatcctggggatttgaccatttgcgccagtgtgctgtataattatctagaggctaacagtaaagttccgtgggaggatttgcgctacctgttcggagaaattatgtatggaggccacatcaccgatgactgggatagaaaactctgccgcgtttaccttgaggaattcatgaaccctagccttacagaggatgagctcatgttggcacccggttttgctgcccctccgtatctggattatgctggctaccaccagtatatagaagagatgctgccccctgagtctcctgccctctacggtctccatcctaacgccgagattgagttcttgactgttacgagcaatacactgttccgcacccttttggaaatgcagcctagaaatgccctatcgggcgatgagcttgggcagagtaccgaggaaaaggtcaaaaatgtgcttgatgacatcctagagaagcttcccgaggaatttaacatggccgagattatgcaaaagaactcaaataggtctccatacgtgcttgtctgcttccaggaatgcgagcgaatgaacattctaatccgggagattaggataagcctcgagcagctagacctctccctcaaaggtgaactcgcgctgtctcctgctgtggaagcgcaacaattcgcactctcctacgatacagtgccagacacctggagtaaactggcataccccagcacctatggtttggcccagtggttcaatgatttacttttacggtgcagggagctcgatacctggactcaagaccttaccctgcccgctgtggtgtggttaagcggcttcttcaacccacagagtttcctgaccgccattatgcagaccatggccagaaagaacgagtggccactcgataagacccggcttacagccgacgtgactaaaaagacgaaggaagattatggacatcctcccagagagggtgcatatttgcacggcttgttcatggaaggcgctcgatgggacactcaagccggtacaattgttgaagcgcgactgaaagaacttgcctgccccatgcccgttatcttcgcaaaggctacaccagttgacagacaggaaaccaaacagacgtacgaatgtccagtataccgcacaaagctgcggggaccttcctacatctggactttcagactaaagtcagaagagaagactgcaaagtgggtcctcgctggagtggccctgctgctagaggcctac

SEQ ID NO: 97446 - DNA, 13572 bp, Artificial Sequence
  derived and/or modified sequence
atggccgcccaggtggccgccagagaggccagagacttcagagaggcccccaccctgagactgaccagcggcgccggcctggaggccgtgggcgccgtggagctggaggaggaggaggagaacgaggaggaggccgccgccagaagagccagaagcttcgcccaggacgccagagtgagattcctgggcggcagactggccatgatgctgggcttcaccgaggagaagtggagccagtacctggagagcgaggacaacagacaggtgctgggcgagttcctggagagcaccagccccgcctgcctggtgttcagcttcgccgccagcggcagactggccgccagccaggagatccccagagacgccaaccacaagctggtgttcatcagcaagaagatcaccgagagcatcggcgtgaacgacttcagccaggtggtgctgttcggcgagctgcccgccctgagcctgggccacgtgagcgccttcctggacgagatcctggtgcccgtgctgagcaacaagaacaaccacaagagctggagctgcttcaccagccaggacatggagtaccacatcgaggtgatgaagaagaagatgtacatcttcagaggcaagatgagcagaagaaccctgctgcccatccccaccgtggccggcaagatggacctggaccagaactgcagcgagaacaagccccccagcaacgagagaatcatcctgcacgccatcgagagcgtggtgatcgagtggagccaccagatccaggagatcatcgagagagacagcgtgcagagactgctgaacggcctgcacctgagcccccaggccgagctggacttctggatgatgagaagagagaacctgagctgcatctacgaccagctgcaggcccccgtggtgctgaagatggtgaagatcctgaccaccaagcagagcagctacttccccaccctgaaggacatcttcctggccgtggagaacgccctgctggaggcccaggacgtggagctgtacctgagacccctgagaagacacatccagtgcctgcaggagaccgagttcccccagaccagaatcctgatcgcccccctgttccacaccatctgcctgatctggagccacagcaagttctacaacacccccgccagagtgatcgtgctgctgcaggagttctgcaacctgttcatcaaccaggccaccgcctacctgagccccgaggacctgctgagaggcgagatcgaggagagcctggagaaggtgcaggtggccgtgaacatcctgaagaccttcaagaacagcttcttcaactacagaaagaagctggccagctacttcatgggcagaaagctgagaccctgggacttccagagccacctggtgttctgcagattcgacaagttcctggacagactgatcaagatcgaggacatcttcgccaccaccctggagttcgagaagctggagagactggagttcggcggcaccaagggcgccatcctgaacggccaggtgcacgagatgagcgaggagctgatggagctgtgcaagctgttcaagcagagcacctacgaccccagcgactgcaccaacatggagttcgagagcgactacgtggccttcaagagcaagaccctggagttcgacagaagactgggcaccatcatctgcgaggccttcttcaactgcaacggcctggaggccgccttcaagctgctgaccatcttcggcaacttcctggagaagcccgtggtgatggagatcttcagcctgcactacagcaccctggtgcacatgttcaacaccgagctggacgtgtgcaagcagctgtacaacgagcacatgaagcagatcgagtgcggccacgtggtgctgaacaagaacatgcccttcaccagcggcaacatgaagtgggcccagcaggtgctgcagagactgcagatgttctggagcaacttcgccagcctgagatacctgttcctgggcaaccccgaccacgccctggtgtaccagaagtacgtggagatgaccaccctgctggaccagttcgagagcagaatctacaacgagtggaagagcaacgtggacgagatctgcgagttcaacctgaaccagcccctggtgaagttcagcgccatcaacggcctgctgtgcgtgaacttcgaccccaagctggtggccgtgctgagagaggtgaagtacctgctgatgctgaagaagcaggacatccccgacagcgccctggccatcttcaagaagagaaacaccatcctgaagtacatcggcaacctggacctgctggtgcagggctacaacaagctgaagcagaccctgctggaggtggagtaccccctgatcgaggacgagctgagagccatcgacgagcagctgaccgccgccaccacctggctgacctggcaggacgactgctggggctacatcgagagagtgagagccgccaccagcgagctggagcacagagtggagagaacccagaagaacgtgaaggtgatccagcagaccatgagaggctgggccagatgcgtgctgccccccagaagagagcacagaagagaggccgccttcaccctggaggacaagggcgacctgttcaccaagaagtacaagctgatccagggcgacggctgcaagatccacaacctggtggaggagaacagaaagctgttcaaggccaaccccagcctggacacctggaagatctacgtggagttcatcgacgacatcgtggtggagggcttcttccaggccatcatgcacgacctggacttcttcctgaagaacaccgagaagcagctgaagcccgcccccttcttccaggcccagatgatcctgctgccccccgagatcgtgttcaagcccagcctggacagagaggccggcgacggcttctacgacctggtggaggagatgctgtgcaacagcttcagaatgagcgcccagatgaacagaatcgccacccacctggagatcaagaactaccagaacgacatggacaacatgctgggcctggccgaggtgagacaggagatcatgaacagagtggtgaacgtgatcaacaaggtgctggacttcagaaacaccctggagacccacacctacctgtgggtggacgacagagccgagttcatgaagcacttcctgctgtacggccacgccgtgagcagcgacgagatggacgcccacgccaacgaggagatccccgagcagccccccaccctggagcagttcaaggagcagatcgacatctacgaggccctgtacgtgcagatgagcaagttcgaggacttcagagtgttcgacagctggttcaaggtggacatgaagcccttcaaggtgagcctgctgaccatcatcaagaagtggagctggatgttccaggagcacctgctgagattcgtgatcgacagcctgaacgagctgcaggagttcatcaaggagaccgacagcggcctgcagagagagctgaacgagggcgaccacgacggcctggtggacatcatggtgcacctgctggccgtgagaagcagacagagagccaccgacgagctgttcgagcccctgaaggagaccatcaccctgctggagagctacggccagaagatgcccgagcaggtgtacatccagctggaggagctgcccgagagatgggagaccaccaagaagatcgccgccaccgtgagacacgaggtgagccccctgcacaacgccgaggtgaccctgatcagaaagaagtgcatcctgttcgacgccaagcaggccgagttcagagagagattcagacactacgcccccctgggcttcaacgccgagaacccctacaccgccctggacaaggccaacgaggagctggaggccctggaggaggagatgctgcagatgcaggagagcaccagactgttcgaggtggccctgcccgagtacaagcagatgaagcagtgcagaaaggagatcaagctgctgaagggcctgtgggacgtgatcatctacgtgagaagaagcatcgacaactggaccaagacccagtggagacagatccacgtggagcagatggacgtggagctgagaagattcgccaaggccagcagcatcaccgagatctggagcctgaacaaggaggtgagagtgtgggacgcctacaccggcctggagggcaccgtgaaggacatgaccgccagcctgagagccatcaccgagctgcagagccccgccctgagagacagacactggcaccagctgatgaaggccatcggcgtgaagttcctgatcaacgaggccaccaccctggccgacctgctggccctgagactgcacagagtggaggacgacgtgagaagaatcgtggacaaggccgtgaaggagctgggcaccgagaaggtgatcaccgagatcagccagacctgggccaccatgaagttcagctacgaggtgcactacagaaccggcatccccctgctgaagagcgacgagcagctgttcgagaccctggagcacaaccaggtgcagctgcagaccctgctgcagagcaagtacgtggagtacttcatcgagcaggtgctgagctggcagaacaagctgaacatcgccgacctggtgatcttcacctggatggaggtgcagagaacctggagccacctggagagcatcttcgtgtgcagcgaggacatcagaatccagctggtgaaggacgccagaagattcgacggcgtggacgccgagttcaaggagctgatgttcaagaccgccaaggtggagaacgtgctggaggccacctgcagacccaacctgtacgagaagctgaaggacctgcagagcagactgagcctgtgcgagaaggccctggccgagtacctggagaccaagagaatcgccttccccagattctacttcgtgagcagcgccgacctgctggacatcctgagcaagggcgcccagcccaagcaggtgacctgccacctggccaagctgttcgacagcatcgccgacctgcagttcgaggacaaccaggacgtgagcgcccacagagccgtgggcatgtacagcaaggagaaggagtacgtgcccttccaggccgagtgcgagtgcgtgggccacgtggagacctggctgctgcagctggagcagaccatgcaggagaccgtgagacacagcatcaccgaggccatcgtggcctacgaggagaagcccagagagctgtggatcttcgacttccccgcccaggtggccctgaccagcagccagatctggtggaccaccgacgtgggcatcgccttcagcagactggaggagggctacgagaccgccctgaaggacttccacaagaagcagatcagccagctgaacaccctgatcaccctgctgctgggcgagctgccccccggcgacagacagaagatcatgaccatctgcaccatcgacgtgcacgccagagacgtggtggccaagctgatcagccagaagcaggtggtggtgagcccccaggccttcacctggctgagccagctgagacacagatgggaggacacccagaagcactgcttcgtgaacatctgcgacgcccagttccagtacttctacgagtacctgggcaacagccccagactggtgatcacccccctgaccgacagatgctacatcaccctgacccagagcctgcacctgaccatgagcggcgcccccgccggccccgccggcaccggcaagaccgagaccaccaaggacctgggcagagccctgggcatgatggtgtacgtgttcaactgcagcgagcagatggactacaagagcatcggcaacatctacaagggcctggtgcagaccggcgcctggggctgcttcgacgagttcaacagaatcagcgtggaggtgctgagcgtggtggccgtgcaggtgaagatgatccacgacgccatcagaaacagaaagaagagattcgtgttcctgggcgaggccatcaccctgaagcccagcgtgggcatcttcatcaccatgaaccccggctacgccggcagaaccgagctgcccgagaacctgaaggccctgttcagaccctgcgccatggtggcccccgacatcgagctgatctgcgagatcctgctggtggccgagggcttcgtggacgccagagccctggccagaaagttcatcaccctgtacaccctgtgcaaggagctgctgagcaagcaggaccactacgactggggcctgagagccatcaagagcgtgctggtggtggccggcagcctgaagagaggcgacaagaacagacccgaggaccaggtgctgatgagagccctgagagacttcaacatgcccaagatcgtgaccgacgacatccccgtgttcctgggcctggtgggcgacctgttccccgccctggacgtgcccagaagaagaaagctgcacttcgagcagatggtgagacagagcaccctggagctgagactgcagcccgaggagagcttcatcctgaaggtggtgcagctggaggagctgctggccgtgagacacagcgtgttcgtggtgggcaacgccggcaccggcaagagcaagatcctgagaaccctgaacagaacctacgtgaacatgaagcagaagcccgtgtggaacgacctgaaccccaaggccgtgaccaccgacgagctgttcggcttcatccaccacgccaccagagagtggaaggacggcaagatcgtgtacagctacttcatcggcctgttcagcagcatcctgagagagcaggccaacctgaagcacgacggccccaagtggatcgtgctggacggcgacatcgaccccatgtggatcgagagcctgaacaccgtgatggacgacaacaaggtgctgaccctggccagcaacgagagaatcgccctgacccccttcatgagactgctgttcgagatccaccacctgagaagcgccacccccgccaccgtgagcagagccggcatcctgtacgtgaacccccaggacctgggctggaacccctacgtggccagctggatcgacagaagaagacaccagagcgagaaggccaacctgaccatcctgttcgacaagtacgtgcccgcctgcctggacaagctgagaaccagcttcaagaccatcaccagcatccccgagagcagcctggtgcagaccctgtgcgtgctgctggagtgcctgctgacccccgagaacgtgcccagcgacagccccaaggaggtgtacgaggtgtacttcgtgttcgcctgcatctgggccttcggcggcaccctgctgcaggaccagatcagcgactaccaggccgacttcagcagatggtggcagaaggagatgaaggccgtgaagttccccagccagggcaccatcttcgactactacgtggaccacaagaccaagaagctgctgccctgggccgacaagatcgcccagttcaccatggaccccgacgtgcccctgcagaccgtgctggtgcacaccaccgagaccgccagactgagatacttcatggagctgctgctggagaagggcaagcccctgatgctggtgggcaacgccggcgtgggcaagaccgtgttcgtgggcgacaccctggccagcctgagcgaggactacatcgtgagcagagtgcccttcaactactacaccaccagcaccgccctgcagaagatcctggagaagcccctggagaagaaggccggccacaactacggccccggcggcaacaagaagctgatctacttcatcgacgacatgaacatgcccgaggtggacctgtacggcaccgtgcagccccacaccctgatcagacagcacatcgactacggccactggtacgacagacagaaggtgatgctgaaggagatccacaactgccagtacgtggcctgcatgaaccccatggtgggcagcttcaccatcaaccccagactgcagagacacttcaccgtgttcgccttcaacttccccagcctggacgccctgaacaccatctacggccagatcttcagcttccacttccagcagcaggccttcgcccccagcatcctgagaagcggccccaccctgatccaggccaccatcgccttccaccagaccatgatgtgcaacttcctgcccaccgccatcaagttccactacatcttcaacctgagagacctgagcaacgtgttccagggcatcctgttcgccagccccgagtgcctgaagggccccctggacctgatccacctgtggctgcacgagagcgccagagtgtacggcgacaagctgatcgacaagaaggactgcgacctgttccagagaagaatgctggagaccgcctacaagtacttcgagggcatcgacagccacatgctgctgcagcagcccctgatctactgccacttcgccgacagaggcaaggacccccactacatgcccgtgaaggactgggaggtgctgaagaccatcctgaccgagaccctggacaactacaacgagctgaacgccgccatgcacctggtgctgttcgaggacgccatgcagcacgtgtgcagaatcagcagaatcctgagaaccccccagggctgcgccctgctggtgggcgtgggcggcagcggcaagcagagcctgagcagactggccgcctacctgagaggcctggaggtgttccagatcaccctgaccgagggctacggcatccaggagctgagagtggacctggccaacctgtacatcagaaccggcgccaagaacatgcccaccgtgttcctgctgaccgacgcccaggtgctggacgagagcttcctggtgctgatcaacgacctgctggccagcggcgagatccccgacctgttcagcgacgaggacgtggacaagatcatcagcggcatccacaacgaggtgcacgccctgggcatggtggacagcagagagaactgctggaagttcttcatggccagagtgagactgcagctgaagatcatcctgtgcttcagccccgtgggcagaaccctgagagtgagagccagaaagttccccgccatcgtgaactgcaccgccatcgactggttccacgcctggccccaggaggccctggtgagcgtgagcagaagattcatcgaggagaccaagggcatcgagcccgtgcacaaggacagcatcagcctgttcatggcccacgtgcacaccaccgtgaacgagatgagcaccagatactaccagaacgagagaagacacaactacaccacccccaagagcttcctggagcagatcagcctgttcaagaacctgctgaagaagaagcagaacgaggtgagcgagaagaaggagagactggtgaacggcatccagaagctgaagaccaccgccagccaggtgggcgacctgaaggccagactggccagccaggaggccgagctgcagctgagaaaccacgacgccgaggccctgatcaccaagatcggcctgcagaccgagaaggtgagcagagagaagaccatcgccgacgccgaggagagaaaggtgaccgccatccagaccgaggtgttccagaagcagagagagtgcgaggccgacctgctgaaggccgagcccgccctggtggccgccaccgccgccctgaacaccctgaacagagtgaacctgagcgagctgaaggccttccccaacccccccatcgccgtgaccaacgtgaccgccgccgtgatggtgctgctggcccccagaggcagagtgcccaaggacagaagctggaaggccgccaaggtgttcatgggcaaggtggacgacttcctgcaggccctgatcaactacgacaaggagcacatccccgagaactgcctgaaggtggtgaacgagcactacctgaaggaccccgagttcaaccccaacctgatcagaaccaagagcttcgccgccgccggcctgtgcgcctgggtgatcaacatcatcaagttctacgaggtgtactgcgacgtggagcccaagagacaggccctggcccaggccaacctggagctggccgccgccaccgagaagctggaggccatcagaaagaagctggtggacctggacagaaacctgagcagactgaccgccagcttcgagaaggccaccgccgagaaggtgagatgccaggaggaggtgaaccagaccaacaagaccatcaagctggccaacagactggtgaaggagctggaggccaagaagatcagatggggccagagcatcaagagcttcgaggcccaggagaagaccctgtgcggcgacgtgctgctgaccgccgccttcgtgagctacgtgggccccttcaccagacagtacagacaggagctggtgcactgcaagtgggtgcccttcctgcagcagaaggtgagcatccccctgaccgagggcctggacctgatcagcatgctgaccgacgacgccaccatcgccgcctggaacaacgagggcctgcccagcgacagaatgagcaccgagaacgccgccatcctgacccactgcgagagatggcccctggtgatcgacccccagcagcagggcatcaagtggatcaagaacaagtacggcatggacctgaaggtgacccacctgggccagaagggcttcctgaacgccatcgagaccgccctggccttcggcgacgtgatcctgatcgagaacctggaggagaccatcgaccccgtgctggaccccctgctgggcagaaacaccatcaagaagggcaagtacatcagaatcggcgacaaggagtgcgagttcaacaagaacttcagactgatcctgcacaccaagctggccaacccccactacaagcccgagctgcaggcccagaccaccctgctgaacttcaccgtgaccgaggacggcctggaggcccagctgctggccgaggtggtgagcatcgagagacccgacctggagaagctgaagctggtgctgaccaagcaccagaacgacttcaagatcgagctgaagtacctggaggacgacctgctgctgagactgagcgccgccgagggcagcttcctggacgacaccaagctggtggagagactggaggccaccaagaccaccgtggccgagatcgagcacaaggtgatcgaggccaaggagaacgagagaaagatcaacgaggccagagagtgctacagacccgtggccgccagagccagcctgctgtacttcgtgatcaacgacctgcagaagatcaaccccctgtaccagttcagcctgaaggccttcaacgtgctgttccacagagccatcgagcaggccgacaaggtggaggacatgcagggcagaatcagcatcctgatggagagcatcacccacgccgtgttcctgtacaccagccaggccctgttcgagaaggacaagctgaccttcctgagccagatggccttccagatcctgctgagaaagaaggagatcgaccccctggagctggacttcctgctgagattcaccgtggagcacacccacctgagccccgtggacttcctgaccagccagagctggagcgccatcaaggccatcgccgtgatggaggagttcagaggcatcgacagagacgtggagggcagcgccaagcagtggagaaagtgggtggagagcgagtgccccgagaaggagaagctgccccaggagtggaagaagaagagcctgatccagaagctgatcctgctgagagccatgagacccgacagaatgacctacgccctgagaaacttcgtggaggagaagctgggcgccaagtacgtggagagaaccagactggacctggtgaaggccttcgaggagagcagccccgccacccccatcttcttcatcctgagccccggcgtggacgccctgaaggacctggagatcctgggcaagagactgggcttcaccatcgacagcggcaagttccacaacgtgagcctgggccagggccaggagaccgtggccgaggtggccctggagaaggccagcaagggcggccactgggtgatcctgcagaacgtgcacctggtggccaagtggctgggcaccctggagaagctgctggagagattcagccagggcagccacagagactacagagtgttcatgagcgccgagagcgcccccacccccgacgagcacatcatcccccagggcctgctggagaacagcatcaagatcaccaacgagccccccaccggcatgctggccaacctgcacgccgccctgtacaacttcgaccaggacaccctggagatctgcagcaaggagcaggagttcaagagcatcctgttcagcctgtgctacttccacgcctgcgtggccggcagactgagattcggcccccagggctggagcagaagctaccccttcaaccccggcgacctgaccatctgcgccagcgtgctgtacaactacctggaggccaacagcaaggtgccctgggaggacctgagatacctgttcggcgagatcatgtacggcggccacatcaccgacgactgggacagaaagctgtgcagagtgtacctggaggagttcatgaaccccagcctgaccgaggacgagctgatgctggcccccggcttcgccgcccccccctacctggactacgccggctaccaccagtacatcgaggagatgctgccccccgagagccccgccctgtacggcctgcaccccaacgccgagatcgagttcctgaccgtgaccagcaacaccctgttcagaaccctgctggagatgcagcccagaaacgccctgagcggcgacgagctgggccagagcaccgaggagaaggtgaagaacgtgctggacgacatcctggagaagctgcccgaggagttcaacatggccgagatcatgcagaagaacagcaacagaagcccctacgtgctggtgtgcttccaggagtgcgagagaatgaacatcctgatcagagagatcagaatcagcctggagcagctggacctgagcctgaagggcgagctggccctgagccccgccgtggaggcccagcagttcgccctgagctacgacaccgtgcccgacacctggagcaagctggcctaccccagcacctacggcctggcccagtggttcaacgacctgctgctgagatgcagagagctggacacctggacccaggacctgaccctgcccgccgtggtgtggctgagcggcttcttcaacccccagagcttcctgaccgccatcatgcagaccatggccagaaagaacgagtggcccctggacaagaccagactgaccgccgacgtgaccaagaagaccaaggaggactacggccacccccccagagagggcgcctacctgcacggcctgttcatggagggcgccagatgggacacccaggccggcaccatcgtggaggccagactgaaggagctggcctgccccatgcccgtgatcttcgccaaggccacccccgtggacagacaggagaccaagcagacctacgagtgccccgtgtacagaaccaagctgagaggccccagctacatctggaccttcagactgaagagcgaggagaagaccgccaagtgggtgctggccggcgtggccctgctgctggaggcctag

SEQ ID NO: 97447 - DNA, 14188 bp, Artificial Sequence
  derived and/or modified sequence
ccggcctcgcgttccctcggacggttgcccaatggcagcccaggtggcagcccgggaggcgcgagacttcagagaagccccgacccttcgcctaacctcgggggccggcctggaggcagtgggcgctgtggagctcgaggaggaggaggagaacgaggaggaggcggcggccaggagagcgcggagtttcgcccaagacgcgcgggtgcgcttcctcggcggccgcctggcgatgatgctggggttcacggaggagaaatggagccagtatttggaaagcgaggacaaccggcaggttcttggggagtttctggaaagcaccagcccggcttgccttgtgtttagcttcgccgcctcggggcgccttgcggcttcccaggagattccaagagatgcaaaccataaacttgtttttatttccaagaagattactgaaagcattggagtaaatgacttttctcaagtggttttatttggagagttacctgcgttgtctcttggacatgtatctgctttccttgatgagattttagtgccagttctttctaataagaacaaccataagtcctggtcctgttttacttcacaagatatggaatatcacatagaagtcatgaaaaagaagatgtatatttttaggggcaaaatgtctagaagaactcttctaccaattcccactgttgcaggaaagatggatctggatcagaattgttcagagaacaagccaccgtcaaacgaaaggataatacttcatgcaattgaatctgtggttattgaatggtcacatcaaatccaagaaattatagaaagagattcagtgcagcgtttgttgaatggtcttcacttgtctcctcaagcagaactagatttctggatgatgaggagagaaaatctgtcatgcatttatgatcaacttcaggcacctgttgtcctcaaaatggttaagatcctgacaactaaacaaagcagctattttcctactctgaaggacatttttctggctgtggaaaatgctcttctcgaagcccaagatgtggaactttacctgagacctctgaggagacacatccagtgtctccaggagacggaattcccacagacacgcatattaatcgctccattatttcataccatctgtctgatctggagtcattccaagttttataacaccccagctcgggttatagttttattgcaagagttttgtaatctcttcattaaccaggcaacagcttacctttcacctgaggaccttttgaggggagaaatagaagagtcactggaaaaggtgcaggtggctgttaacatcttaaagactttcaaaaactcctttttcaactatagaaaaaaattggcaagctactttatgggaagaaagctgagaccatgggatttccagtctcatctggtgttttgcagatttgacaagtttcttgatcgtttaataaaaatagaggatatatttgccaccactttggaatttgaaaagctggaaagactggaatttggtggtaccaaaggagcaattttaaatggacaagtccacgagatgagtgaagaacttatggaactctgtaaactttttaaacagagcacttatgacccatctgattgcactaacatggagtttgaaagtgattatgtggcatttaagtccaaaactctggaatttgacagaaggcttgggacaattatttgtgaagctttctttaactgcaatggcttagaagctgcatttaagcttttgaccatatttggaaattttctagagaagccagttgtcatggaaattttcagcctacattacagcacactagtgcatatgtttaatacagagctggatgtgtgtaagcaactgtataatgaacacatgaaacagattgaatgtggtcatgtagttcttaacaagaacatgccatttacctcaggaaatatgaaatgggcccagcaggttctccaacgacttcaaatgttttggtcaaacttcgcatctctccgttatctatttttgggcaatcctgatcacgctttagtttatcaaaagtatgttgaaatgaccactttgcttgatcaatttgaaagtcgtatctataatgaatggaaaagtaatgtggatgaaatctgtgaattcaatttgaatcaacccttggttaaattcagtgccataaatggtcttctctgtgtcaattttgacccaaagctagtggctgtattgagagaagtgaaatatcttttgatgttgaagaaacaagacataccagattcagctttagccatcttcaagaaaaggaacactattttaaagtacattggaaatcttgaccttcttgtgcaagggtataataaactcaaacagacgctcctggaagttgaataccctctgattgaagatgagctgagggctattgacgagcagctgacagcagccacaacgtggctgacatggcaggatgactgctggggctacatcgagagggtgagggcagccacgtccgagttggagcacagagttgagcgcacacagaaaaacgtgaaggtgatccagcagaccatgaggggctgggccaggtgcgtgctacctcccaggagagagcacagacgagaggcagccttcaccttggaggacaagggtgatttgtttacaaaaaaatacaagttaatccaaggagatggctgcaagatccacaacttggtcgaggaaaataggaagctcttcaaagccaatccctctctggatacctggaaaatttatgtagaattcattgacgacattgtggtggaaggcttttttcaggctataatgcacgacttagacttctttctgaagaatacagagaaacaattgaaaccggcaccgttttttcaagcacaaatgatcttgttgcctcctgagattgtgtttaaaccttccctagacagagaggctggggatggcttctatgatcttgtagaagaaatgttatgcaatagttttagaatgtctgcccagatgaaccgaatagcaacacacctggaaattaaaaattatcagaatgatatggataacatgttaggcctggcagaggtcaggcaggagatcatgaacagagtggtgaatgtcatcaacaaagtcttagatttcagaaacaccctggagacccacacttacctctgggtggatgatcgagctgagtttatgaagcattttctcttgtatggccatgctgtgtcttccgatgaaatggatgctcatgcaaatgaagaaattcccgaacaaccaccaactcttgagcaattcaaagaacagattgacatttatgaagctttgtatgttcaaatgagcaaatttgaggactttagagtgtttgatagttggttcaaggtggacatgaagcctttcaaagtgagcttgttaaccataattaagaaatggagctggatgtttcaggagcatcttttgagatttgtcattgacagtctgaatgagctacaagaatttataaaggagacagattccggacttcagagagaattaaatgaaggtgatcatgatggtttagttgacatcatggtgcatcttctggctgtaagaagccgacagagagctactgatgaactctttgaacctctaaaagaaacgatcaccctcttggaaagctatggccagaagatgcctgagcaggtctatattcagctagaggaattacctgaaagatgggaaactaccaaaaagatcgcagcaactgtcagacatgaagtctcacctctccataatgcggaagtcactcttataaggaaaaaatgtattttgtttgacgcaaagcaggcagagttcagagagagattcagacactatgcccctcttggatttaatgcagaaaatccatacacagcgcttgataaggcaaatgaagagcttgaggccttagaagaagaaatgttgcagatgcaagaatctactcgtctttttgaagtggctcttccagagtacaaacaaatgaaacagtgtcgcaaagaaataaaattgctcaagggactgtgggatgtcattatttatgttcgaagaagcattgataattggactaaaacccagtggagacagattcatgtggaacagatggatgtagaactcagaaggtttgccaaggcgagttccataactgaaatttggtcactcaacaaggaagtccgcgtctgggatgcttacacgggcctggaaggcacagttaaggacatgacagcctccctgagggccatcacagagttacagagccctgccctcagggacaggcattggcaccagctgatgaaagctattggggtcaagtttttaataaatgaagccacaactttggcagatttgttagcactgcggttacacagagtggaagatgatgtccgaaggattgtggacaaggcggtgaaagagctggggactgagaaggttattactgaaatcagtcagacctgggcaaccatgaagttttcttacgaagttcactatcgaacaggcattccattactaaagtctgatgaacaactttttgaaactctagagcacaaccaagttcagttgcagactcttcttcaaagcaagtatgtagaatatttcattgagcaagtgttaagctggcaaaataaattaaacatagcagacttggtcatcttcacttggatggaagtccagcgaacttggtctcacctggaaagcatttttgtctgttcagaagatattcgaatccagcttgtgaaagatgctagaagatttgatggggtggatgctgaatttaaggagttaatgttcaagacagccaaagtagaaaatgtgttagaagcaacgtgcagacctaatctctatgaaaaacttaaagatttacagtccaggctttctctttgtgaaaaagctctcgctgaatacctggaaaccaagcgcatagcctttcctcgcttctatttcgtctcttctgctgatttacttgacattctctcaaaaggagctcagcctaaacaggtaacatgtcaccttgccaaacttttcgacagcattgcagatctgcagtttgaagacaatcaggatgtttctgcacacagggcagttggaatgtacagcaaagaaaaggagtatgtcccattccaagccgagtgtgaatgtgtgggccatgtggaaacatggcttctgcaacttgaacagactatgcaagaaacggtgcgtcattctataacagaagccatagtggcctacgaggaaaaacctagggaactgtggatttttgatttcccagctcaggttgcactaaccagctcacaaatatggtggaccacagatgtaggaatagccttcagtagactggaagaaggctacgaaacagccctgaaggatttccataaaaaacagatttctcagctgaatacactgattacacttttgctgggagaacttccacctggagacagacagaagatcatgacaatttgtaccatagatgtccatgccagagacgtggtggcaaaacttatttctcagaagcaagttgttgtcagtccccaagcttttacatggctgtctcaacttcgtcaccgatgggaggatacccagaaacactgctttgttaatatttgtgatgcccagttccagtacttctatgaatacttaggaaacagccctcgactagtgatcactcctctaactgacaggtgttatattaccttaactcaatcacttcatctaaccatgagtggggctcctgctggcccagctggtaccgggaaaacagagaccaccaaagacctaggacgtgcccttggcatgatggtctatgtattcaactgttcagagcaaatggactacaaatccataggcaatatctataagggattggtgcagacaggagcttggggctgctttgatgagttcaaccgaatctctgtggaagttctgtcagtggtggcagtacaagtgaaaatgattcatgatgccatcagaaacaggaagaagagatttgtatttcttggggaagctatcacactgaagccatcagttggaatatttattactatgaacccgggttatgctggtcgaaccgaattaccggaaaatctcaaagctcttttcagaccctgtgccatggtggcccctgacattgagctaatctgtgaaatcttgttagttgctgaaggttttgtggatgcgcgtgcattagcccgaaagttcattacgttgtacacgctttgcaaggagcttctctccaagcaggatcattacgactggggacttcgtgctattaagtctgtcttggttgtggctggatctctgaaacgaggagataaaaatagacccgaagatcaggtactcatgagagcattaagggatttcaatatgcccaaaatagtgactgacgacatcccagtgtttctgggcctggtcggtgacctgtttccagccctggatgtgccccggaggaggaagctgcactttgaacagatggtcaggcagtctaccctggagctccgcctgcagcctgaagagagcttcatcctcaaagttgtccagcttgaggaactgttggctgtgcggcactcggtctttgtagttggaaatgcaggcacaggaaagagtaagattttgagaacactgaaccgaacatatgttaacatgaaacagaagccggtttggaatgacttaaaccctaaagctgtgacaacagatgaactctttggtttcatacatcatgctacccgagaatggaaagatggcaagattgtttactcttattttataggtctcttctcatccattctacgagaacaagcaaatcttaagcatgatggaccaaaatggatagtcctggatggcgatattgaccccatgtggattgaatcactgaatactgtaatggatgataacaaggtgctgaccctcgccagcaatgagcgcattgcactcactcccttcatgaggcttctgtttgagatacatcacttaaggagcgcaaccccggccactgtttccagagctggtattctgtatgtgaacccacaagatctgggctggaatccgtatgtggccagttggatagacagaaggcggcatcaatcagaaaaggccaatttgactattctttttgataaatatgtccctgcatgcttggataaactgagaacaagctttaaaaccatcacttcaattcctgagagtagcctggtgcagactctatgtgttcttttggagtgcttgctgactcctgaaaatgtaccttctgacagcccaaaagaagtttatgaagtctattttgtatttgcttgtatctgggcttttggaggcaccctgctacaagatcagatttctgattatcaagctgacttcagtcggtggtggcagaaagagatgaaagcagtgaaatttccgtcgcagggaacaatctttgattattatgtggaccacaaaactaagaaattattgccctgggctgacaaaattgcccagtttactatggatccagatgtgcctctgcagacagttctcgttcacacaacagagacagctcgtcttagatatttcatggagttgttgcttgagaaaggaaaacctctaatgctagtaggaaatgcaggagtgggaaaaacagtctttgtaggtgacacattggcaagtctctctgaggattacatagtatcccgtgtgcctttcaactactacacgacatccacagctctgcaaaaaattcttgagaaacccctagagaaaaaagctggtcataactatggtcctggaggaaataaaaaattgatttattttatcgacgacatgaacatgcctgaagtggacttatatggcaccgttcagcctcacaccctgatccggcagcatattgattatggacattggtatgatagacagaaggtgatgcttaaagaaatccataactgccagtatgtcgcctgcatgaatccgatggtgggcagcttcaccatcaatcccaggctacagagacatttcacagtgtttgcattcaattttccatctttggatgcactaaacaccatctatggccaaatctttagcttccatttccaacagcaagcatttgctccatcaattctcaggagtggccccactttgatccaggcaacaatagcattccatcagacaatgatgtgtaactttttacccacggctattaaattccactacatctttaatctgagagatttatcaaacgtcttccaggggattttatttgcttctcctgagtgtttaaaaggtccacttgatttaatacatctgtggcttcatgaatctgcccgtgtttatggagacaaactgatagacaaaaaagattgtgatttgtttcagagaagaatgctggaaactgcttataaatattttgaaggtatagatagtcacatgctgcttcaacagcccctcatttattgccactttgctgatagagggaaggacccacattacatgccagtgaaggactgggaagtgctgaagacgattcttacagaaacgttagacaactacaatgaactaaatgctgccatgcacctagttttgtttgaagatgccatgcaacatgtgtgtcgcatcagccggatcttacgaacccctcagggctgtgctctcttggttggagttgggggcagtggcaagcagagcttgtccaggctggcagcttaccttcgtggccttgaggtctttcagatcactctgaccgagggctatggaatccaggaacttcgggtagatcttgccaatttgtacatccgaactggagccaagaacatgcccactgtgttcctgctgacagatgcccaggttctagatgagagcttcctcgtgctgattaatgacttgctggcatcaggagaaatcccagatctgttcagcgatgaagatgtggacaagataatttctggaattcataatgaagttcatgctctgggcatggtagactccagggaaaactgttggaaattctttatggccagggtgcgactacagctcaaaatcattttgtgtttctctccagttggtcgcacgctgagagttagagctcggaagttcccagccatagttaactgcacggctattgactggtttcatgcgtggccgcaggaggctctggtctccgtcagcaggaggttcattgaggaaaccaagggaattgagccagtgcacaaagactctattagccttttcatggcacatgttcacaccactgtaaatgaaatgagtaccagatattaccagaatgagagaagacacaactataccaccccaaagagttttctagaacaaatatcactgtttaagaacctgttgaagaagaagcaaaatgaggtatccgagaaaaaagaacgcctggtgaacggcatccaaaagctaaaaaccacagcctctcaggtgggagatctaaaagccagacttgcctctcaagaagccgagctgcaactgagaaatcatgatgccgaagctctgatcacaaagatcggccttcagacggagaaagtgagccgggaaaagaccatcgctgatgctgaggagcgaaaggtgacagccattcagactgaagtgttccagaaacagagagaatgtgaagctgacttactcaaggctgagcctgcactggtggctgctacagctgcactcaatacactcaacagggtcaacctcagtgagctgaaagcctttcccaaccctcccatcgcagttaccaatgttactgcagccgtgatggtccttctggctcctcggggaagagtgcccaaagaccgaagttggaaagcagctaaagtcttcatgggaaaggttgatgattttttgcaagcattaattaactatgacaaagagcacattccagagaactgtctaaaagtggtgaatgaacactatttgaaagacccagagtttaatccaaacctgattcgaaccaaatcttttgcagcagctggcctgtgtgcctgggtcatcaacatcattaaattctatgaggtctactgtgatgtggagccaaaacgccaagcattagcccaagcaaacttagaactggctgcagctactgaaaaactagaggctatcaggaaaaagcttgtggatctggatcgaaatctgagcagactcacggcttcatttgaaaaagcaacagctgagaaagtccggtgtcaagaagaggtgaaccaaaccaacaaaaccatcaaattagctaacagacttgtcaaggaacttgaggcaaagaagattcgctggggtcaatccattaagtcctttgaagctcaagagaagacactctgtggagatgttcttctcacggcggcatttgtgtcttacgtcggacccttcacaaggcagtatcgccaggagctggtgcactgcaagtgggttccctttcttcaacagaaggtttccattccactaaccgaaggcctggacttgatatccatgttgacggatgatgctacaattgccgcctggaataacgaaggactgcccagtgacagaatgtccaccgaaaatgccgctatcctaacacactgtgagcgctggcctctggtgatagatccccagcaacagggaattaagtggatcaagaataagtatggaatggacctgaaagtcacacatttgggccagaaagggtttttgaatgccattgaaactgctttggcctttggtgatgtcatcttaattgaaaatctcgaggaaacgatagatccagtcctggatccactacttggcaggaacacaattaaaaaaggaaagtatatcaggattggagataaagaatgtgaatttaacaagaactttcgccttatccttcacacaaaattggcaaatcctcactataagccggaattacaagctcagacaactctcctcaatttcacagtcacagaagatggtctagaagcccagctgctggcagaggttgtcagtattgaaaggccagatttggagaaacttaagttggtattgacaaagcaccaaaatgattttaaaattgagctcaagtatctggaagacgatctccttttgcgcctttctgcggcagagggaagctttctggatgacaccaaactggtagagagattggaggcaacaaagaccaccgtggcagagatagagcacaaggtgattgaagccaaagaaaatgaaagaaaaatcaacgaggcccgagaatgttacagaccagtggcagcaagagcatctcttctttattttgttattaatgacctccaaaaaatcaaccccctctaccaattctctttgaaggcttttaacgtgctgttccacagagcgatcgagcaggctgacaaggtggaagacatgcagggacgcatctctatcctgatggagagcatcacccatgctgtcttcctctacaccagccaggcgctgtttgagaaggacaagctcaccttcctgtcccagatggcttttcagattttgttgagaaagaaagagatagaccctcttgaattggatttcctgcttcgattcacagttgaacacactcatctgagtcccgttgacttcctaacttctcagtcatggagtgctatcaaggcaattgccgtcatggaagaatttcgaggcatagaccgagatgtggaaggatctgccaagcagtggaggaagtgggtagaatccgagtgtccagaaaaagaaaaattacctcaagaatggaagaagaaaagtttaatacagaagctgattcttctgagagcaatgcgccctgacagaatgacgtatgctctcagaaattttgtagaggaaaaactgggtgcgaagtatgtggagaggaccagattggacttagttaaagcattcgaagaaagcagcccagccacccccatattcttcatcctgtctccgggggtagatgcccttaaagacctggagattcttggcaaaagacttggctttacaattgactctggaaaattccacaatgtgtctttaggacaaggtcaggagacggtggcagaagtggccctggagaaagcttccaaaggaggacactgggtcatcctccaaaatgttcatttggtagccaagtggctaggaaccttggagaagctccttgaaagattcagccaaggaagccacagagattacagggttttcatgagtgctgagtctgcacctacaccagatgagcatatcatccctcaaggactcctggaaaattccattaagatcactaatgaacccccaacagggatgctggccaatttgcatgccgccctgtacaactttgatcaggatacacttgaaatatgctccaaggagcaggagtttaaaagcatccttttttctctctgctacttccacgcctgtgttgctgggagactgaggtttggcccccagggctggagccgaagctatccttttaatcctggagacctcaccatttgtgccagtgtcctctacaactacttagaggcaaactctaaagtcccatgggaagatctccgttatctctttggtgagatcatgtatggaggccacatcacagatgactgggatcgcaaactgtgtcgggtgtatttagaagaattcatgaatccatctctgactgaagatgaactgatgctggcaccaggttttgctgccccaccctacctagattatgcaggctaccaccagtacatagaggagatgcttcctccagaaagcccggcactgtatggcctccacccaaatgctgaaatagaattcctgacagtgacatccaacactctcttcagaactttgctggagatgcagcccaggaatgcactcagtggtgatgaactggggcagtctacagaagaaaaggttaagaatgtcttggatgacattttggagaaacttccagaagagttcaacatggcagagataatgcaaaaaaattcaaatagaagcccatatgttcttgtttgcttccaagaatgtgagaggatgaatattctcattcgggaaatacgtatatcacttgaacaactggaccttagtttgaagggggaattggcattatctcctgctgtggaagcccagcagtttgcattgagttatgacacggtaccagacacttggagcaaactggcttatccttctacttatggcctagcccagtggttcaatgacctcctcctgcgatgccgagaactcgatacttggacacaagaccttacccttccggctgtcgtgtggctctccggcttcttcaaccctcagtccttcttaactgcaatcatgcagacgatggctcgaaaaaatgagtggcccctggataaaacgcgcttgactgctgatgttaccaaaaaaacaaaggaagattatggacacccgccaagggaaggtgcatacctccacggactcttcatggagggcgcccgctgggacacccaagcaggaaccattgttgaagcccgtctcaaggagctggcatgccctatgccggtcatctttgcaaaagccacccccgtggacagacaagaaaccaaacagacctacgagtgccctgtgtatagaaccaaactgagaggccccagctacatctggaccttcaggctgaagagcgaagagaagactgcaaaatgggttctggctggagtggctctgcttctagaagcgtaaggtaacactggcattcctctagcctctgctggagtgcagtgaggattttctagcatgttgctgcactgttcccatgcacattattctaactttttagtaactcacacgtgcattcttttttcaacgctatccttagagtgaaagtcagaaaaaaatactagaaactaactcagggctgagcgtggtggcacacgactgtaatcccagttactcaggaggtaggagaatcacttgaacctaggaggcaaaggttgcagtgagccgaggttgcaccactgcactccctcctgggcaacagaacaagactccatctcaaaaaaaaaaaagtacatcataaaagtacatcatatgtgaacatgcaaaagcaatgcagccggaaagaacggagattttaatttttaacaaacaacaaattaaattattagcccttaaactctttcaaaatataaaagcagcaggccccaggtgagtcctgaaggaagaggctagcactctgtaaggcctccagtgtccagtgtctacaatgttgatggtccccttttgttcagtcaagttttaataaaaataaaactgttctacagttaa

SEQ ID NO: 97448 - protein, 1005 aa, Artificial Sequence
  derived and/or modified sequence
MLRTAGRDGLCRLSTYLEELEAVELKKFKLYLGTATELGEGKIPWGSMEKAGPLEMAQLLITHFGPEEAWRLALSTFERINRKDLWERGQREDLVRDTPPGGPSSLGNQSTCLLEVSLVTPRKDPQETYRDYVRRKFRLMEDRNARLGECVNLSHRYTRLLLVKEHSNPMQVQQQLLDTGRGHARTVGHQASPIKIETLFEPDEERPEPPRTVVMQGAAGIGKSMLAHKVMLDWADGKLFQGRFDYLFYINCREMNQSATECSMQDLIFSCWPEPSAPLQELIRVPERLLFIIDGFDELKPSFHDPQGPWCLCWEEKRPTELLLNSLIRKKLLPELSLLITTRPTALEKLHRLLEHPRHVEILGFSEAERKEYFYKYFHNAEQAGQVFNYVRDNEPLFTMCFVPLVCWVVCTCLQQQLEGGGLLRQTSRTTTAVYMLYLLSLMQPKPGAPRLQPPPNQRGLCSLAADGLWNQKILFEEQDLRKHGLDGEDVSAFLNMNIFQKDINCERYYSFIHLSFQEFFAAMYYILDEGEGGAGPDQDVTRLLTEYAFSERSFLALTSRFLFGLLNEETRSHLEKSLCWKVSPHIKMDLLQWIQSKAQSDGSTLQQGSLEFFSCLYEIQEEEFIQQALSHFQVIVVSNIASKMEHMVSSFCLKRCRSAQVLHLYGATYSADGEDRARCSAGAHTLLVQLRPERTVLLDAYSEHLAAALCTNPNLIELSLYRNALGSRGVKLLCQGLRHPNCKLQNLRLKRCRISSSACEDLSAALIANKNLTRMDLSGNGVGFPGMMLLCEGLRHPQCRLQMIQLRKCQLESGACQEMASVLGTNPHLVELDLTGNALEDLGLRLLCQGLRHPVCRLRTLWLKICRLTAAACDELASTLSVNQSLRELDLSLNELGDLGVLLLCEGLRHPTCKLQTLRLGICRLGSAACEGLSVVLQANHNLRELDLSFNDLGDWGLWLLAEGLQHPACRLQKLWLFGMDLNKMTHSRLAALRVTKPYLDIGC

SEQ ID NO: 97449 - protein, 1062 aa, Artificial Sequence
  derived and/or modified sequence
MLRTAGRDGLCRLSTYLEELEAVELKKFKLYLGTATELGEGKIPWGSMEKAGPLEMAQLLITHFGPEEAWRLALSTFERINRKDLWERGQREDLVRDTPPGGPSSLGNQSTCLLEVSLVTPRKDPQETYRDYVRRKFRLMEDRNARLGECVNLSHRYTRLLLVKEHSNPMQVQQQLLDTGRGHARTVGHQASPIKIETLFEPDEERPEPPRTVVMQGAAGIGKSMLAHKVMLDWADGKLFQGRFDYLFYINCREMNQSATECSMQDLIFSCWPEPSAPLQELIRVPERLLFIIDGFDELKPSFHDPQGPWCLCWEEKRPTELLLNSLIRKKLLPELSLLITTRPTALEKLHRLLEHPRHVEILGFSEAERKEYFYKYFHNAEQAGQVFNYVRDNEPLFTMCFVPLVCWVVCTCLQQQLEGGGLLRQTSRTTTAVYMLYLLSLMQPKPGAPRLQPPPNQRGLCSLAADGLWNQKILFEEQDLRKHGLDGEDVSAFLNMNIFQKDINCERYYSFIHLSFQEFFAAMYYILDEGEGGAGPDQDVTRLLTEYAFSERSFLALTSRFLFGLLNEETRSHLEKSLCWKVSPHIKMDLLQWIQSKAQSDGSTLQQGSLEFFSCLYEIQEEEFIQQALSHFQVIVVSNIASKMEHMVSSFCLKRCRSAQVLHLYGATYSADGEDRARCSAGAHTLLVQLRPERTVLLDAYSEHLAAALCTNPNLIELSLYRNALGSRGVKLLCQGLRHPNCKLQNLRLKRCRISSSACEDLSAALIANKNLTRMDLSGNGVGFPGMMLLCEGLRHPQCRLQMIQLRKCQLESGACQEMASVLGTNPHLVELDLTGNALEDLGLRLLCQGLRHPVCRLRTLWLKICRLTAAACDELASTLSVNQSLRELDLSLNELGDLGVLLLCEGLRHPTCKLQTLRLGICRLGSAACEGLSVVLQANHNLRELDLSFNDLGDWGLWLLAEGLQHPACRLQKLWLDSCGLTAKACENLYFTLGINQTLTDLYLTNNALGDTGVRLLCKRLSHPGCKLRVLWLFGMDLNKMTHSRLAALRVTKPYLDIGC

SEQ ID NO: 97450 - DNA, 3018 bp, Artificial Sequence
  derived and/or modified sequence
atgctgagaaccgccggcagagacggcctgtgcagactgagcacctacctggaggagctggaggccgtggagctgaagaagttcaagctgtacctgggcaccgccaccgagctgggcgagggcaagatcccctggggcagcatggagaaggccggccccctggagatggcccagctgctgatcacccacttcggccccgaggaggcctggagactggccctgagcaccttcgagagaatcaacagaaaggacctgtgggagagaggccagagagaggacctggtgagagacaccccccccggcggccccagcagcctgggcaaccagagcacctgcctgctggaggtgagcctggtgacccccagaaaggacccccaggagacctacagagactacgtgagaagaaagttcagactgatggaggacagaaacgccagactgggcgagtgcgtgaacctgagccacagatacaccagactgctgctggtgaaggagcacagcaaccccatgcaggtgcagcagcagctgctggacaccggcagaggccacgccagaaccgtgggccaccaggccagccccatcaagatcgagaccctgttcgagcccgacgaggagagacccgagccccccagaaccgtggtgatgcagggcgccgccggcatcggcaagagcatgctggcccacaaggtgatgctggactgggccgacggcaagctgttccagggcagattcgactacctgttctacatcaactgcagagagatgaaccagagcgccaccgagtgcagcatgcaggacctgatcttcagctgctggcccgagcccagcgcccccctgcaggagctgatcagagtgcccgagagactgctgttcatcatcgacggcttcgacgagctgaagcccagcttccacgacccccagggcccctggtgcctgtgctgggaggagaagagacccaccgagctgctgctgaacagcctgatcagaaagaagctgctgcccgagctgagcctgctgatcaccaccagacccaccgccctggagaagctgcacagactgctggagcaccccagacacgtggagatcctgggcttcagcgaggccgagagaaaggagtacttctacaagtacttccacaacgccgagcaggccggccaggtgttcaactacgtgagagacaacgagcccctgttcaccatgtgcttcgtgcccctggtgtgctgggtggtgtgcacctgcctgcagcagcagctggagggcggcggcctgctgagacagaccagcagaaccaccaccgccgtgtacatgctgtacctgctgagcctgatgcagcccaagcccggcgcccccagactgcagcccccccccaaccagagaggcctgtgcagcctggccgccgacggcctgtggaaccagaagatcctgttcgaggagcaggacctgagaaagcacggcctggacggcgaggacgtgagcgccttcctgaacatgaacatcttccagaaggacatcaactgcgagagatactacagcttcatccacctgagcttccaggagttcttcgccgccatgtactacatcctggacgagggcgagggcggcgccggccccgaccaggacgtgaccagactgctgaccgagtacgccttcagcgagagaagcttcctggccctgaccagcagattcctgttcggcctgctgaacgaggagaccagaagccacctggagaagagcctgtgctggaaggtgagcccccacatcaagatggacctgctgcagtggatccagagcaaggcccagagcgacggcagcaccctgcagcagggcagcctggagttcttcagctgcctgtacgagatccaggaggaggagttcatccagcaggccctgagccacttccaggtgatcgtggtgagcaacatcgccagcaagatggagcacatggtgagcagcttctgcctgaagagatgcagaagcgcccaggtgctgcacctgtacggcgccacctacagcgccgacggcgaggacagagccagatgcagcgccggcgcccacaccctgctggtgcagctgagacccgagagaaccgtgctgctggacgcctacagcgagcacctggccgccgccctgtgcaccaaccccaacctgatcgagctgagcctgtacagaaacgccctgggcagcagaggcgtgaagctgctgtgccagggcctgagacaccccaactgcaagctgcagaacctgagactgaagagatgcagaatcagcagcagcgcctgcgaggacctgagcgccgccctgatcgccaacaagaacctgaccagaatggacctgagcggcaacggcgtgggcttccccggcatgatgctgctgtgcgagggcctgagacacccccagtgcagactgcagatgatccagctgagaaagtgccagctggagagcggcgcctgccaggagatggccagcgtgctgggcaccaacccccacctggtggagctggacctgaccggcaacgccctggaggacctgggcctgagactgctgtgccagggcctgagacaccccgtgtgcagactgagaaccctgtggctgaagatctgcagactgaccgccgccgcctgcgacgagctggccagcaccctgagcgtgaaccagagcctgagagagctggacctgagcctgaacgagctgggcgacctgggcgtgctgctgctgtgcgagggcctgagacaccccacctgcaagctgcagaccctgagactgggcatctgcagactgggcagcgccgcctgcgagggcctgagcgtggtgctgcaggccaaccacaacctgagagagctggacctgagcttcaacgacctgggcgactggggcctgtggctgctggccgagggcctgcagcaccccgcctgcagactgcagaagctgtggctgttcggcatggacctgaacaagatgacccacagcagactggccgccctgagagtgaccaagccctacctggacatcggctgctag

SEQ ID NO: 97451 - DNA, 3189 bp, Artificial Sequence
  derived and/or modified sequence
atgctgagaaccgccggcagagacggcctgtgcagactgagcacctacctggaggagctggaggccgtggagctgaagaagttcaagctgtacctgggcaccgccaccgagctgggcgagggcaagatcccctggggcagcatggagaaggccggccccctggagatggcccagctgctgatcacccacttcggccccgaggaggcctggagactggccctgagcaccttcgagagaatcaacagaaaggacctgtgggagagaggccagagagaggacctggtgagagacaccccccccggcggccccagcagcctgggcaaccagagcacctgcctgctggaggtgagcctggtgacccccagaaaggacccccaggagacctacagagactacgtgagaagaaagttcagactgatggaggacagaaacgccagactgggcgagtgcgtgaacctgagccacagatacaccagactgctgctggtgaaggagcacagcaaccccatgcaggtgcagcagcagctgctggacaccggcagaggccacgccagaaccgtgggccaccaggccagccccatcaagatcgagaccctgttcgagcccgacgaggagagacccgagccccccagaaccgtggtgatgcagggcgccgccggcatcggcaagagcatgctggcccacaaggtgatgctggactgggccgacggcaagctgttccagggcagattcgactacctgttctacatcaactgcagagagatgaaccagagcgccaccgagtgcagcatgcaggacctgatcttcagctgctggcccgagcccagcgcccccctgcaggagctgatcagagtgcccgagagactgctgttcatcatcgacggcttcgacgagctgaagcccagcttccacgacccccagggcccctggtgcctgtgctgggaggagaagagacccaccgagctgctgctgaacagcctgatcagaaagaagctgctgcccgagctgagcctgctgatcaccaccagacccaccgccctggagaagctgcacagactgctggagcaccccagacacgtggagatcctgggcttcagcgaggccgagagaaaggagtacttctacaagtacttccacaacgccgagcaggccggccaggtgttcaactacgtgagagacaacgagcccctgttcaccatgtgcttcgtgcccctggtgtgctgggtggtgtgcacctgcctgcagcagcagctggagggcggcggcctgctgagacagaccagcagaaccaccaccgccgtgtacatgctgtacctgctgagcctgatgcagcccaagcccggcgcccccagactgcagcccccccccaaccagagaggcctgtgcagcctggccgccgacggcctgtggaaccagaagatcctgttcgaggagcaggacctgagaaagcacggcctggacggcgaggacgtgagcgccttcctgaacatgaacatcttccagaaggacatcaactgcgagagatactacagcttcatccacctgagcttccaggagttcttcgccgccatgtactacatcctggacgagggcgagggcggcgccggccccgaccaggacgtgaccagactgctgaccgagtacgccttcagcgagagaagcttcctggccctgaccagcagattcctgttcggcctgctgaacgaggagaccagaagccacctggagaagagcctgtgctggaaggtgagcccccacatcaagatggacctgctgcagtggatccagagcaaggcccagagcgacggcagcaccctgcagcagggcagcctggagttcttcagctgcctgtacgagatccaggaggaggagttcatccagcaggccctgagccacttccaggtgatcgtggtgagcaacatcgccagcaagatggagcacatggtgagcagcttctgcctgaagagatgcagaagcgcccaggtgctgcacctgtacggcgccacctacagcgccgacggcgaggacagagccagatgcagcgccggcgcccacaccctgctggtgcagctgagacccgagagaaccgtgctgctggacgcctacagcgagcacctggccgccgccctgtgcaccaaccccaacctgatcgagctgagcctgtacagaaacgccctgggcagcagaggcgtgaagctgctgtgccagggcctgagacaccccaactgcaagctgcagaacctgagactgaagagatgcagaatcagcagcagcgcctgcgaggacctgagcgccgccctgatcgccaacaagaacctgaccagaatggacctgagcggcaacggcgtgggcttccccggcatgatgctgctgtgcgagggcctgagacacccccagtgcagactgcagatgatccagctgagaaagtgccagctggagagcggcgcctgccaggagatggccagcgtgctgggcaccaacccccacctggtggagctggacctgaccggcaacgccctggaggacctgggcctgagactgctgtgccagggcctgagacaccccgtgtgcagactgagaaccctgtggctgaagatctgcagactgaccgccgccgcctgcgacgagctggccagcaccctgagcgtgaaccagagcctgagagagctggacctgagcctgaacgagctgggcgacctgggcgtgctgctgctgtgcgagggcctgagacaccccacctgcaagctgcagaccctgagactgggcatctgcagactgggcagcgccgcctgcgagggcctgagcgtggtgctgcaggccaaccacaacctgagagagctggacctgagcttcaacgacctgggcgactggggcctgtggctgctggccgagggcctgcagcaccccgcctgcagactgcagaagctgtggctggacagctgcggcctgaccgccaaggcctgcgagaacctgtacttcaccctgggcatcaaccagaccctgaccgacctgtacctgaccaacaacgccctgggcgacaccggcgtgagactgctgtgcaagagactgagccaccccggctgcaagctgagagtgctgtggctgttcggcatggacctgaacaagatgacccacagcagactggccgccctgagagtgaccaagccctacctggacatcggctgctag

SEQ ID NO: 97452 - DNA, 3544 bp, Artificial Sequence
  derived and/or modified sequence
attggtgagtggggcagggcaggagggaactgaagagtgagaaagcattatttcagcaaaaggtctttcctcccttgctctctcctccaaccactggctcagcctctccgcccgctgcctgtgaatgatgcaatggaaggtgtgctggggtcgccctgtgtcccgtgcataggagcatctcagcctccaggtcctctcctttggggctcacggcacccccatgctacgaaccgcaggcagggacggcctctgtcgcctgtccacctacttggaagaactcgaggctgtggaactgaagaagttcaagttatacctggggaccgcgacagagctgggagaaggcaagatcccctggggaagcatggagaaggccggtcccctggaaatggcccagctgctcatcacccacttcgggccagaggaggcctggaggttggctctcagcacctttgagcggataaacaggaaggacctgtgggagagaggacagagagaggacctggtgagggataccccacctggtggcccgtcctcacttgggaaccagtcaacatgccttctggaagtctctcttgtcactccaagaaaagatccccaggaaacctacagggactatgtccgcaggaaattccggctcatggaagaccgcaatgcgcgcctaggggaatgtgtcaacctcagccaccggtacacccggctcctgctggtgaaggagcactcaaaccccatgcaggtccagcagcagcttctggacacaggccggggacacgcgaggaccgtgggacaccaggctagccccatcaagatagagaccctctttgagccagacgaggagcgccccgagccaccgcgcaccgtggtcatgcaaggcgcggcagggataggcaagtccatgctggcacacaaggtgatgctggactgggcggacgggaagctcttccaaggcagatttgattatctcttctacatcaactgcagggagatgaaccagagtgccacggaatgcagcatgcaagacctcatcttcagctgctggcctgagcccagcgcgcctctccaggagctcatccgagttcccgagcgcctccttttcatcatcgacggcttcgatgagctcaagccttctttccacgatcctcagggaccctggtgcctctgctgggaggagaaacggcccacggagctgcttcttaacagcttaattcggaagaagctgctccctgagctatctttgctcatcaccacacggcccacggctttggagaagctccaccgtctgctggagcaccccaggcatgtggagatcctgggcttctctgaggcagaaaggaaggaatacttctacaagtatttccacaatgcagagcaggcgggccaagtcttcaattacgtgagggacaacgagcctctcttcaccatgtgcttcgtccccctggtgtgctgggtggtgtgtacctgcctccagcagcagctggagggtggggggctgttgagacagacgtccaggaccaccactgcagtgtacatgctctacctgctgagtctgatgcaacccaagccgggggccccgcgcctccagcccccacccaaccagagagggttgtgctccttggcggcagatgggctctggaatcagaaaatcctatttgaggagcaggacctccggaagcacggcctagacggggaagacgtctctgccttcctcaacatgaacatcttccagaaggacatcaactgtgagaggtactacagcttcatccacttgagtttccaggaattctttgcagctatgtactatatcctggacgagggggagggcggggcaggcccagaccaggacgtgaccaggctgttgaccgagtacgcgttttctgaaaggagcttcctggcactcaccagccgcttcctgtttggactcctgaacgaggagaccaggagccacctggagaagagtctctgctggaaggtctcgccgcacatcaagatggacctgttgcagtggatccaaagcaaagctcagagcgacggctccaccctgcagcagggctccttggagttcttcagctgcttgtacgagatccaggaggaggagtttatccagcaggccctgagccacttccaggtgatcgtggtcagcaacattgcctccaagatggagcacatggtctcctcgttctgtctgaagcgctgcaggagcgcccaggtgctgcacttgtatggcgccacctacagcgcggacggggaagaccgcgcgaggtgctccgcaggagcgcacacgctgttggtgcagctcagaccagagaggaccgttctgctggacgcctacagtgaacatctggcagcggccctgtgcaccaatccaaacctgatagagctgtctctgtaccgaaatgccctgggcagccggggggtgaagctgctctgtcaaggactcagacaccccaactgcaaacttcagaacctgaggctgaagaggtgccgcatctccagctcagcctgcgaggacctctctgcagctctcatagccaataagaatttgacaaggatggatctcagtggcaacggcgttggattcccaggcatgatgctgctttgcgagggcctgcggcatccccagtgcaggctgcagatgattcagttgaggaagtgtcagctggagtccggggcttgtcaggagatggcttctgtgctcggcaccaacccacatctggttgagttggacctgacaggaaatgcactggaggatttgggcctgaggttactatgccagggactgaggcacccagtctgcagactacggactttgtggctgaagatctgccgcctcactgctgctgcctgtgacgagctggcctcaactctcagtgtgaaccagagcctgagagagctggacctgagcctgaatgagctgggggacctcggggtgctgctgctgtgtgagggcctcaggcatcccacgtgcaagctccagaccctgcggttgggcatctgccggctgggctctgccgcctgtgagggtctttctgtggtgctccaggccaaccacaacctccgggagctggacttgagtttcaacgacctgggagactggggcctgtggttgctggctgaggggctgcaacatcccgcctgcagactccagaaactgtggttatttgggatggacctgaataaaatgacccacagtaggttggcagcgcttcgagtaacaaaaccttatttggacattggctgctgaatggtcctatctgctggctctcccctgagatctggacagaggaagatgggagggtgctcatcacccccccagcataatgatcagcctccttcctagagacagactcatgcagattgagatcaaaagtccctctgcttgggatcaaattaatgtttgacagagctggccaggcgtggtggctcatgtatgtaatcctagcacttcgagaggccgaggcaggtggatcacgaggtcaggagtttgagattagcctggccaagatggtgaaaccctgtctctactaaaaataaaaaaaaattagccagg

SEQ ID NO: 97453 - DNA, 3018 bp, Artificial Sequence
  derived and/or modified sequence
atgcttcgtaccgccggccgcgatgggttgtgccggctgagtacctatctcgaagagttagaggctgtagaactcaaaaagttcaagctttatctggggaccgccaccgaattgggagaaggcaagatcccctgggggagcatggagaaagctggccctcttgagatggcacaactcctcatcactcacttcgggcccgaagaagcatggaggctggctttatctactttcgaacgcatcaataggaaggacctttgggaacggggccagagagaggacctggtccgggacactccccctggcgggccatcctcccttgggaatcaaagcacgtgtctgcttgaagtgtccctagtgacccctcggaaggaccctcaggagacctatcgtgattacgtgagacggaaatttcgtctcatggaggatcgtaatgctcgcctgggggagtgcgtgaatctttcccacagatacaccagattactgctggtcaaggagcactctaacccgatgcaggtccaacagcagctactggatacaggaagaggccatgcgcggacagtggggcatcaggccagtcccatcaagatcgaaactctgtttgagcccgacgaggagcgaccagagcctccaaggacagttgtgatgcagggcgccgctggaatcggaaaaagtatgctagcccataaagtcatgttggactgggctgatggtaaattgttccagggccgcttcgactatttgttctacattaactgccgggaaatgaaccagagcgccactgagtgtagcatgcaggatctcatcttcagctgttggcccgagcccagcgcaccacttcaggaacttatcagggtacctgagagacttctcttcatcatcgacgggtttgacgagctcaagccgagctttcatgatccacaaggcccttggtgcctgtgttgggaggaaaagcggccaaccgagctgctcctcaattctcttattaggaaaaagttactgcctgaactgtcacttttaataaccacccgacccaccgctttggaaaagctgcacaggctactcgaacaccctcggcatgtcgaaattcttggctttagcgaagcagaacggaaagaatacttctataagtacttccacaacgcagagcaggcgggccaggtgtttaattatgttagggacaacgaacctttgtttacaatgtgtttcgtccctttggtctgctgggtggtctgtacatgcctgcagcagcagcttgaagggggaggcctgctgcggcagactagtagaactacaactgccgtgtacatgctgtacctgctgagccttatgcagccgaaacccggggccccgcgtcttcagccacccccaaaccaacgcggactttgcagtctcgctgccgacggtctttggaatcaaaaaattctctttgaagaacaggatctaaggaagcatggccttgacggtgaagatgtctcggccttcctgaacatgaacatattccagaaggacattaactgcgagagatattattcctttatccatttatctttccaggaatttttcgccgccatgtactacatcctggacgaaggcgaggggggagccggacccgaccaggatgtgacccgcctgcttacagagtacgctttttccgaaagatccttcctggccctgacatcacggtttcttttcgggctactgaacgaggagactcggtcccacctggagaagagcctctgttggaaggtctccccccatatcaaaatggatctgctgcagtggattcagagcaaagctcagagtgacggttccacactgcagcaaggctcacttgagttctttagctgcctttacgagatccaggaggaggaattcattcaacaggccctgtcacacttccaggtgatcgtcgtgtcgaacatcgcctctaagatggaacatatggtcagcagtttctgtctcaagcggtgtcgtagtgcgcaggttctacacctttacggagccacctattcagcagacggagaagaccgcgccagatgtagcgcgggcgcccatacgcttctcgtccagctccgccccgagcgaactgtgctcttggacgcctactccgagcacctagcagccgcgctttgtacaaaccccaacctgattgaactctcactatatcgcaacgctcttgggtctcgtggagttaagcttctatgtcaggggctccgccatcccaactgcaaattgcagaacctgcggctaaagcgctgtaggattagctcttccgcctgtgaggatctatcagcagctctcatcgcaaataagaatctgaccaggatggacctcagcggcaatggagtcggatttcctggaatgatgctcctctgtgaaggcctgagacaccctcagtgtaggctgcagatgattcagttgcggaagtgtcagctcgaatccggggcatgtcaagaaatggcatcagtgcttgggaccaatccacacctggttgagctggatctgactgggaatgctctcgaggacctcgggctgaggctactttgccaggggttaaggcatcctgtctgtaggctcaggaccttatggctgaaaatctgccggttaaccgccgcagcctgtgatgagctggcttccacgctgtctgtgaaccagagtctgcgcgaactggatctgagcctcaacgaactgggcgaccttggtgtgctgctgttgtgcgaaggactgaggcaccccacctgtaaactccagaccctcaggctcggcatttgtcgacttgggagcgccgcgtgcgaggggttatccgtggttctccaagccaatcacaatttgcgcgaactggatctgtcatttaacgatctcggagattggggcctttggcttctagccgaaggtcttcaacatcccgcctgcaggctccagaagctgtggctttttggcatggacctaaataaaatgacccactctcgcctggcagctttgcgtgtaactaaaccctacctagacatcggatgctag

SEQ ID NO: 97454 - DNA, 3189 bp, Artificial Sequence
  derived and/or modified sequence
atgttacgcacagctgggagggatggtctgtgtcgactgtccacctatctggaagaattagaagctgtggaattgaagaaattcaagctctacctgggtaccgccacagagctgggagaaggcaaaatcccctggggctctatggagaaagcaggccccctggaaatggcacaactattgatcactcatttcggccctgaggaagcgtggcggctcgcgctttcaactttcgagcgaatcaatcgcaaagacctgtgggaacgcgggcaaagggaggatttggtgagagataccccacctgggggccctagctcccttgggaaccaaagtacttgtctgcttgaggtatccctggttactccacgtaaggatcctcaggagacatacagagattatgttcgcaggaagttccgactaatggaggacaggaatgcgcggctaggagaatgcgtgaatctttcccataggtatacacgactgcttctcgttaaagaacatagcaaccccatgcaggttcagcagcagctgcttgacaccggtcggggtcatgcccgaacggtcgggcaccaggcctcacccattaaaattgaaacgctgtttgagccagacgaagaacggcctgagcctccaagaaccgtggtgatgcagggagcagccggaatcggcaaaagcatgctggctcacaaggtgatgctggactgggccgatggtaagttgttccagggtcgcttcgattatctcttttacatcaactgtcgagagatgaatcagagcgctacagaatgctctatgcaggacctcatcttcagttgttggcctgagccatcagcacctcttcaagaactgatccgcgtacctgagcgcctgctcttcatcattgatggcttcgacgagctcaaaccctcatttcacgacccccagggtccctggtgcctgtgctgggaggaaaaacgcccaactgagctcctactaaactcactgattagaaagaagctgctccccgagctctctttgctgatcacaacacggccaacagcccttgagaagctccacagactgctggagcatccgcgccatgttgagattctcggtttttcagaagctgaacggaaggagtatttctacaaatacttccacaacgcagaacaggctggacaggtgttcaactacgttcgggacaacgagcctctgtttaccatgtgtttcgtgccactggtgtgctgggtggtgtgcacatgcctccagcagcagcttgagggtggagggctgctgcgccaaacatcccgcaccactactgctgtatatatgttatatttgttatctttaatgcagccaaaacccggagcgcctcgcctgcagcctccacccaaccagcgcggcctgtgcagcctggcggcagatggtctgtggaaccagaaaatacttttcgaggagcaagatttgaggaaacatggcctcgacggggaagacgtgtctgctttcctcaatatgaatattttccagaaggacatcaattgtgaaaggtattatagttttatccatttatccttccaagaattcttcgctgcgatgtactacatattagatgagggcgagggtggcgccggtccggatcaagatgttaccagactgttgactgagtacgcgtttagcgagcgcagctttctggcgctgacctcccgcttcctgtttgggctactgaatgaggagactcggtcccatttggagaaatctctatgttggaaggtgagcccccatataaaaatggatctgctgcagtggatccagtcgaaagcacagagcgacggctctaccctgcaacaaggcagtctcgaattcttctcctgtctgtacgaaattcaggaagaagaattcattcagcaggccctgagccatttccaggtaattgtggtctcaaatatcgcaagtaaaatggaacacatggtgtcctctttctgcttaaagcggtgccggagcgcccaggtcctgcatctgtatggggccacgtatagtgccgatggggaagaccgagcccgatgttcagccggtgctcacactctgctggtgcagctgcgaccagagaggaccgttctcctggacgcctactccgaacatctggccgccgcactgtgtaccaaccctaatcttatcgaactttctctgtaccgcaacgccctcggatccaggggggtgaagttgctttgccagggtctgcgacacccgaattgtaaactccaaaaccttcgcctgaagagatgtagaatctcttcatcagcatgcgaggatctaagcgcggcacttatcgccaacaagaatctcacacggatggatttgagtggaaacggcgttggcttccctggcatgatgctgctttgcgagggcttgaggcacccgcagtgtcgtctccagatgatacagctcaggaagtgtcagcttgaatccggcgcgtgccaggaaatggcaagcgtgttgggaacgaatcctcaccttgtggagcttgacctgacaggaaacgccctggaggatctcgggctcagattgttgtgccaggggcttaggcatccggtgtgccgactcagaactctttggctcaaaatctgcaggttaactgcggcagcatgtgatgagctggcaagcactctgagcgtgaatcagtccttgcgcgagctcgatctgagtctcaatgagcttggtgatctgggggtacttctcttgtgcgaaggactgaggcacccaacgtgtaagctccagacactccggcttggcatctgccggctgggatctgccgcatgcgagggattgtctgttgtcttgcaggcaaaccacaacctgcgcgagcttgacttatcctttaatgaccttggagattggggactgtggttactagcagaaggcctacagcatcccgcatgcagacttcaaaagctgtggctggactcctgcggactaaccgcaaaagcctgcgagaacctctattttactctcgggattaaccagacactcacagacttgtatcttacaaacaatgctttgggtgacaccggcgtgagattattgtgtaaacgtctttctcatcccggctgtaaactgcgcgttctctggctgttcggcatggatttgaacaagatgacccacagccgactggccgccctgcgggtgactaagccctatcttgatatcggctgctag

SEQ ID NO: 97455 - DNA, 3018 bp, Artificial Sequence
  derived and/or modified sequence
atgctgaggacagctggaagagatggcctgtgccgcctgagcacctacctggaggagctggaggccgtggagctgaagaagttcaagctgtacctgggcacagccacagagctgggggagggcaagatcccctggggctccatggagaaggccggccccctggagatggcccagctgctgatcacccacttcggccctgaggaggcctggaggctggccctgagcacctttgagcgcatcaacaggaaggacctgtgggagcggggccagcgggaggacctggtgcgggacaccccacctgggggccccagcagcctgggcaaccagagcacctgcctgctggaggtgtccctggtgacccccaggaaggacccccaggagacctacagagattatgtgcggaggaagttccggctgatggaggacagaaatgcccggctgggagaatgtgtgaacctgagccaccgctacacccggctgctgctggtgaaggagcacagcaaccccatgcaggtgcagcagcagctgctggacaccggccggggccacgccaggacagtgggccaccaggccagccccatcaagattgagaccctgtttgagccagatgaggagaggcctgagccccccaggacagtggtgatgcagggcgctgctggcatcggcaagtccatgctggcccacaaggtgatgctggactgggcagatggcaagctgttccagggccgctttgactacctgttctacatcaactgccgggagatgaaccagagcgccacagaatgttccatgcaggacctgatcttcagctgctggccagagcccagcgcccccctgcaggagctgatccgggtgcctgagcggctgctcttcatcattgatggctttgatgagctgaagcccagcttccatgacccccagggcccctggtgcctgtgctgggaggagaagaggcccacagagctgctgctgaacagcctcatcaggaagaagctgctgcctgagctgagcctgctgatcaccacccggcccacagccctggagaagctgcaccggctgctggagcaccccaggcatgtggagatcctgggcttcagcgaggccgagaggaaggagtacttctacaagtacttccacaatgctgagcaggccggccaggtgttcaactacgtgcgggacaatgagcccctcttcaccatgtgctttgtgcccctggtgtgctgggtggtgtgcacctgcctgcagcagcagctggagggcggcggcctgctgcggcagaccagcaggaccaccacagctgtgtacatgctgtacctgctgagcctgatgcagcccaagccaggggccccccggctgcagcccccacccaaccagaggggcctgtgcagcctggccgcagatggcctgtggaaccagaagatcctgtttgaggagcaggacctgaggaagcacggcctggatggagaagatgtgtctgccttcctgaacatgaacatcttccagaaggacatcaactgtgagcgctactacagcttcatccacctgtccttccaggagttctttgctgccatgtactacatcctggatgaaggagagggcggggccggccctgaccaggatgtgacccggctgctgacagaatatgccttcagcgagaggagcttcctggccctgaccagccgcttcctgtttggcctgctgaatgaggagaccaggagccacctggagaagagcctgtgctggaaggtgagcccccacatcaagatggacctgctgcagtggatccagagcaaggcccagagtgatggcagcaccctgcagcagggcagcctggagttcttcagctgcctgtatgagatccaggaggaggagttcatccagcaggccctgagccacttccaggtgattgtggtgagcaacatcgccagcaagatggagcacatggtgtcctccttctgcctgaagcgctgccgcagcgcccaggtgctgcacctgtatggagccacctacagcgcagatggagaagatcgggcccgctgcagcgctggggcccacaccctgctggtgcagctgcggcctgagaggacagtgctgctggatgcctacagcgagcacctggccgccgccctgtgcaccaaccccaacctgattgagctgagcctgtacagaaatgccctgggcagccggggcgtgaagctgctgtgccagggcctgcggcaccccaactgcaagctgcagaacctgcggctgaagcgctgccgcatcagcagcagcgcctgtgaggacctgtctgctgccctgattgccaacaagaacctgaccaggatggacctgtctggaaatggagtgggcttccctggcatgatgctgctgtgtgagggcctgcggcacccccagtgccgcctgcagatgatccagctgaggaagtgccagctggagagcggggcctgccaggagatggcctctgtgctgggcaccaacccccacctggtggagctggacctgactggaaatgccctggaggacctgggcctgcggctgctgtgccagggcctgcggcaccctgtgtgccgcctgcggaccctgtggctgaagatctgccgcctgacagctgctgcctgtgatgagctggccagcaccctgtctgtgaaccagagcctgcgggagctggacctgagcctgaatgagctgggggacctgggcgtgctgctgctgtgtgagggcctgcggcaccccacctgcaagctgcagaccctgcggctgggcatctgccgcctgggcagcgctgcctgtgagggcctgtctgtggtgctgcaggccaaccacaacctgcgggagctggacctgtccttcaatgacctgggggactggggcctgtggctgctggccgagggcctgcagcacccagcctgccgcctgcagaagctgtggctgtttggcatggacctgaacaagatgacccacagccggctggccgccctgcgggtgaccaagccctacctggacatcggctgctag

SEQ ID NO: 97456 - DNA, 3189 bp, Artificial Sequence
  derived and/or modified sequence
atgctgaggacagctggaagagatggcctgtgccgcctgagcacctacctggaggagctggaggccgtggagctgaagaagttcaagctgtacctgggcacagccacagagctgggggagggcaagatcccctggggctccatggagaaggccggccccctggagatggcccagctgctgatcacccacttcggccctgaggaggcctggaggctggccctgagcacctttgagcgcatcaacaggaaggacctgtgggagcggggccagcgggaggacctggtgcgggacaccccacctgggggccccagcagcctgggcaaccagagcacctgcctgctggaggtgtccctggtgacccccaggaaggacccccaggagacctacagagattatgtgcggaggaagttccggctgatggaggacagaaatgcccggctgggagaatgtgtgaacctgagccaccgctacacccggctgctgctggtgaaggagcacagcaaccccatgcaggtgcagcagcagctgctggacaccggccggggccacgccaggacagtgggccaccaggccagccccatcaagattgagaccctgtttgagccagatgaggagaggcctgagccccccaggacagtggtgatgcagggcgctgctggcatcggcaagtccatgctggcccacaaggtgatgctggactgggcagatggcaagctgttccagggccgctttgactacctgttctacatcaactgccgggagatgaaccagagcgccacagaatgttccatgcaggacctgatcttcagctgctggccagagcccagcgcccccctgcaggagctgatccgggtgcctgagcggctgctcttcatcattgatggctttgatgagctgaagcccagcttccatgacccccagggcccctggtgcctgtgctgggaggagaagaggcccacagagctgctgctgaacagcctcatcaggaagaagctgctgcctgagctgagcctgctgatcaccacccggcccacagccctggagaagctgcaccggctgctggagcaccccaggcatgtggagatcctgggcttcagcgaggccgagaggaaggagtacttctacaagtacttccacaatgctgagcaggccggccaggtgttcaactacgtgcgggacaatgagcccctcttcaccatgtgctttgtgcccctggtgtgctgggtggtgtgcacctgcctgcagcagcagctggagggcggcggcctgctgcggcagaccagcaggaccaccacagctgtgtacatgctgtacctgctgagcctgatgcagcccaagccaggggccccccggctgcagcccccacccaaccagaggggcctgtgcagcctggccgcagatggcctgtggaaccagaagatcctgtttgaggagcaggacctgaggaagcacggcctggatggagaagatgtgtctgccttcctgaacatgaacatcttccagaaggacatcaactgtgagcgctactacagcttcatccacctgtccttccaggagttctttgctgccatgtactacatcctggatgaaggagagggcggggccggccctgaccaggatgtgacccggctgctgacagaatatgccttcagcgagaggagcttcctggccctgaccagccgcttcctgtttggcctgctgaatgaggagaccaggagccacctggagaagagcctgtgctggaaggtgagcccccacatcaagatggacctgctgcagtggatccagagcaaggcccagagtgatggcagcaccctgcagcagggcagcctggagttcttcagctgcctgtatgagatccaggaggaggagttcatccagcaggccctgagccacttccaggtgattgtggtgagcaacatcgccagcaagatggagcacatggtgtcctccttctgcctgaagcgctgccgcagcgcccaggtgctgcacctgtatggagccacctacagcgcagatggagaagatcgggcccgctgcagcgctggggcccacaccctgctggtgcagctgcggcctgagaggacagtgctgctggatgcctacagcgagcacctggccgccgccctgtgcaccaaccccaacctgattgagctgagcctgtacagaaatgccctgggcagccggggcgtgaagctgctgtgccagggcctgcggcaccccaactgcaagctgcagaacctgcggctgaagcgctgccgcatcagcagcagcgcctgtgaggacctgtctgctgccctgattgccaacaagaacctgaccaggatggacctgtctggaaatggagtgggcttccctggcatgatgctgctgtgtgagggcctgcggcacccccagtgccgcctgcagatgatccagctgaggaagtgccagctggagagcggggcctgccaggagatggcctctgtgctgggcaccaacccccacctggtggagctggacctgactggaaatgccctggaggacctgggcctgcggctgctgtgccagggcctgcggcaccctgtgtgccgcctgcggaccctgtggctgaagatctgccgcctgacagctgctgcctgtgatgagctggccagcaccctgtctgtgaaccagagcctgcgggagctggacctgagcctgaatgagctgggggacctgggcgtgctgctgctgtgtgagggcctgcggcaccccacctgcaagctgcagaccctgcggctgggcatctgccgcctgggcagcgctgcctgtgagggcctgtctgtggtgctgcaggccaaccacaacctgcgggagctggacctgtccttcaatgacctgggggactggggcctgtggctgctggccgagggcctgcagcacccagcctgccgcctgcagaagctgtggctggacagctgtggcctgacagccaaggcctgtgaaaatctctacttcaccctgggcatcaaccagaccctgacagacctgtacctgaccaacaatgccctgggggacaccggggtgcggctgctgtgcaagaggctgagccaccctggctgcaagctgcgggtgctgtggctgtttggcatggacctgaacaagatgacccacagccggctggccgccctgcgggtgaccaagccctacctggacatcggctgctag

SEQ ID NO: 97457 - DNA, 3715 bp, Artificial Sequence
  derived and/or modified sequence
attggtgagtggggcagggcaggagggaactgaagagtgagaaagcattatttcagcaaaaggtctttcctcccttgctctctcctccaaccactggctcagcctctccgcccgctgcctgtgaatgatgcaatggaaggtgtgctggggtcgccctgtgtcccgtgcataggagcatctcagcctccaggtcctctcctttggggctcacggcacccccatgctacgaaccgcaggcagggacggcctctgtcgcctgtccacctacttggaagaactcgaggctgtggaactgaagaagttcaagttatacctggggaccgcgacagagctgggagaaggcaagatcccctggggaagcatggagaaggccggtcccctggaaatggcccagctgctcatcacccacttcgggccagaggaggcctggaggttggctctcagcacctttgagcggataaacaggaaggacctgtgggagagaggacagagagaggacctggtgagggataccccacctggtggcccgtcctcacttgggaaccagtcaacatgccttctggaagtctctcttgtcactccaagaaaagatccccaggaaacctacagggactatgtccgcaggaaattccggctcatggaagaccgcaatgcgcgcctaggggaatgtgtcaacctcagccaccggtacacccggctcctgctggtgaaggagcactcaaaccccatgcaggtccagcagcagcttctggacacaggccggggacacgcgaggaccgtgggacaccaggctagccccatcaagatagagaccctctttgagccagacgaggagcgccccgagccaccgcgcaccgtggtcatgcaaggcgcggcagggataggcaagtccatgctggcacacaaggtgatgctggactgggcggacgggaagctcttccaaggcagatttgattatctcttctacatcaactgcagggagatgaaccagagtgccacggaatgcagcatgcaagacctcatcttcagctgctggcctgagcccagcgcgcctctccaggagctcatccgagttcccgagcgcctccttttcatcatcgacggcttcgatgagctcaagccttctttccacgatcctcagggaccctggtgcctctgctgggaggagaaacggcccacggagctgcttcttaacagcttaattcggaagaagctgctccctgagctatctttgctcatcaccacacggcccacggctttggagaagctccaccgtctgctggagcaccccaggcatgtggagatcctgggcttctctgaggcagaaaggaaggaatacttctacaagtatttccacaatgcagagcaggcgggccaagtcttcaattacgtgagggacaacgagcctctcttcaccatgtgcttcgtccccctggtgtgctgggtggtgtgtacctgcctccagcagcagctggagggtggggggctgttgagacagacgtccaggaccaccactgcagtgtacatgctctacctgctgagtctgatgcaacccaagccgggggccccgcgcctccagcccccacccaaccagagagggttgtgctccttggcggcagatgggctctggaatcagaaaatcctatttgaggagcaggacctccggaagcacggcctagacggggaagacgtctctgccttcctcaacatgaacatcttccagaaggacatcaactgtgagaggtactacagcttcatccacttgagtttccaggaattctttgcagctatgtactatatcctggacgagggggagggcggggcaggcccagaccaggacgtgaccaggctgttgaccgagtacgcgttttctgaaaggagcttcctggcactcaccagccgcttcctgtttggactcctgaacgaggagaccaggagccacctggagaagagtctctgctggaaggtctcgccgcacatcaagatggacctgttgcagtggatccaaagcaaagctcagagcgacggctccaccctgcagcagggctccttggagttcttcagctgcttgtacgagatccaggaggaggagtttatccagcaggccctgagccacttccaggtgatcgtggtcagcaacattgcctccaagatggagcacatggtctcctcgttctgtctgaagcgctgcaggagcgcccaggtgctgcacttgtatggcgccacctacagcgcggacggggaagaccgcgcgaggtgctccgcaggagcgcacacgctgttggtgcagctcagaccagagaggaccgttctgctggacgcctacagtgaacatctggcagcggccctgtgcaccaatccaaacctgatagagctgtctctgtaccgaaatgccctgggcagccggggggtgaagctgctctgtcaaggactcagacaccccaactgcaaacttcagaacctgaggctgaagaggtgccgcatctccagctcagcctgcgaggacctctctgcagctctcatagccaataagaatttgacaaggatggatctcagtggcaacggcgttggattcccaggcatgatgctgctttgcgagggcctgcggcatccccagtgcaggctgcagatgattcagttgaggaagtgtcagctggagtccggggcttgtcaggagatggcttctgtgctcggcaccaacccacatctggttgagttggacctgacaggaaatgcactggaggatttgggcctgaggttactatgccagggactgaggcacccagtctgcagactacggactttgtggctgaagatctgccgcctcactgctgctgcctgtgacgagctggcctcaactctcagtgtgaaccagagcctgagagagctggacctgagcctgaatgagctgggggacctcggggtgctgctgctgtgtgagggcctcaggcatcccacgtgcaagctccagaccctgcggttgggcatctgccggctgggctctgccgcctgtgagggtctttctgtggtgctccaggccaaccacaacctccgggagctggacttgagtttcaacgacctgggagactggggcctgtggttgctggctgaggggctgcaacatcccgcctgcagactccagaaactgtggctggatagctgtggcctcacagccaaggcttgtgagaatctttacttcaccctggggatcaaccagaccttgaccgacctttacctgaccaacaacgccctaggggacacaggtgtccgactgctttgcaagcggctgagccatcctggctgcaaactccgagtcctctggttatttgggatggacctgaataaaatgacccacagtaggttggcagcgcttcgagtaacaaaaccttatttggacattggctgctgaatggtcctatctgctggctctcccctgagatctggacagaggaagatgggagggtgctcatcacccccccagcataatgatcagcctccttcctagagacagactcatgcagattgagatcaaaagtccctctgcttgggatcaaattaatgtttgacagagctggccaggcgtggtggctcatgtatgtaatcctagcacttcgagaggccgaggcaggtggatcacgaggtcaggagtttgagattagcctggccaagatggtgaaaccctgtctctactaaaaataaaaaaaaattagccagg

SEQ ID NO: 97458 - DNA, 3018 bp, Artificial Sequence
  derived and/or modified sequence
atgctgcggaccgccggccgggacggcctgtgccggctgagcacctacctggaagagctagaggcagttgagctgaagaaatttaagctttatttgggaacagcaaccgagctgggcgaaggcaaaatcccctggggttccatggagaaggccggaccactggaaatggcacagttattaataacacattttggcccagaagaagcatggcgtttagcactgtccacattcgagcggatcaatagaaaagatctgtgggaaagagggcagagggaagacctggtgagagacactccacctgggggaccaagctctctcgggaaccagtcaacgtgcttgctggaggtgagtttggtgaccccacgaaaggacccacaggaaacatatcgggactatgtgcgaaggaaattcagattaatggaggatcggaacgctcgcctgggcgagtgcgtcaatcttagtcaccggtatacaagactccttcttgtgaaagaacactccaatcccatgcaggtgcaacagcagctcttggatacaggacgcggtcacgctagaactgttggccaccaggctagccccatcaaaatcgagacgctgttcgagcccgacgaagagcgaccagagccaccacgcacggtggttatgcaaggggcggctggcattggtaagtcaatgctagcgcataaagtgatgctcgactgggctgatgggaagctgttccaaggtcgctttgattatctgttctatatcaactgcagagaaatgaatcagtccgctacggaatgtagcatgcaagacctgattttcagttgttggcctgagcccagcgcacctctgcaggagctgattcgcgttcccgaacgccttctgttcattatcgacgggttcgacgagctcaaaccctcatttcacgatcctcagggcccatggtgtctttgctgggaggagaagcgtccgaccgaactcctgctcaatagtctaatccgcaagaaacttctccccgagctgagcctcctcatcacaacgaggccgaccgctttagagaaactacacaggctgctcgagcatccccggcacgtcgagatcctcggatttagcgaggccgaacggaaggagtacttctataaatactttcacaatgccgaacaggctggacaagtcttcaactacgtgagagacaacgagccactgttcacgatgtgttttgtgccgttggtgtgctgggtggtctgtacctgccttcaacagcagttggaggggggcggactcctgcgacaaacttcgcgtacaacaaccgcggtttatatgctctacctgctatcattaatgcaacctaagccgggtgctccgagacttcagcctccaccgaaccagcgcggactctgttcacttgcagctgatgggctgtggaatcaaaagatcttattcgaagagcaggacctgaggaagcatggcctcgacggagaggatgtctccgcttttcttaacatgaacatttttcaaaaggatattaattgcgaaaggtactacagtttcatccatttgtctttccaagagttcttcgccgctatgtactacatccttgacgagggcgagggaggggccggccctgatcaagacgtgaccaggctactgaccgaatacgcattttccgaaagatcattcctcgccctgacgtcacgctttctgttcgggctgctaaacgaggaaacccgcagtcacctggaaaaatccctatgctggaaggtgagcccccatatcaaaatggatctgctgcaatggattcagagtaaagcacaatccgatggttcgaccctgcagcagggctcactggaatttttctcctgtctttacgagatccaagaggaggagttcatccagcaggctctgagtcacttccaagtaatagttgtaagcaacatcgcctccaagatggaacatatggtttccagtttttgcctcaaaaggtgtcgttccgcgcaggttctacatctctacggggccacctactcagctgacggagaagacagagcccggtgtagcgcgggcgctcacactctactggtgcagctgcgtccagagcgtaccgtgttgctcgatgcatactctgagcatctcgccgcggctttatgcaccaatccgaatcttatcgagctctcactgtacaggaatgcgcttggatcccgcggtgtgaaacttctttgtcagggcctgaggcaccccaactgtaaacttcagaatttacgcctcaaacggtgtcggatatccagctccgcttgtgaagatctgagcgccgccctgattgccaataagaacttgactcgcatggatctgagcggaaatggtgtgggctttccgggaatgatgcttctgtgcgaggggctccggcacccacaatgtcggctgcagatgatacagcttaggaagtgtcagctagagagtggagcctgccaggagatggcctccgtccttgggaccaatccccacctcgtggagctcgatttgactggaaatgcactggaagatcttggtctcagactgctgtgtcaaggtctccggcacccggtctgtcgactgcgcacattgtggctcaagatctgccgactgactgccgccgcctgcgatgagctggcgtctaccctttctgttaaccagagtctgagagagttagacttaagtttgaacgagttgggcgacctgggggtgctgctgctttgtgaaggcttgaggcatcctacatgcaagcttcaaacccttagactgggaatctgtagactggggtcagcagcctgtgagggactgtcagtagtgctccaggccaaccacaatttaagggaactggacttatccttcaacgatctcggtgattggggcttgtggctcctcgctgaaggcctccaacatccagcctgtcgccttcagaagctgtggctgtttggcatggacctgaataagatgacacatagtcgcctggccgctctccgcgtgaccaagccatatctcgatattgggtgttag

SEQ ID NO: 97459 - DNA, 3189 bp, Artificial Sequence
  derived and/or modified sequence
atgctgcggaccgccggccgggacggcctgtgccggctgagcacctacctggaggagctggaggccgttgagctgaagaagtttaagttgtacctgggcacggctacggagttaggcgaaggaaaaataccgtggggctcaatggaaaaggcaggcccgttagagatggcgcagctactgattacccactttggcccggaggaagcctggagactggcactcagtacattcgagcgcatcaaccggaaggacctatgggagcgcggtcagagagaagacctggtgcgcgatacccctcctggcggtccctccagcttggggaatcagagcacttgtctccttgaggtaagcctggttacacctcgtaaggatccccaggaaacgtatcgcgactatgtgaggcgcaaattccggctgatggaggatcggaatgctcgccttggcgagtgcgtcaatctcagccatagatatacgaggctgctgctggtgaaggagcactccaacccaatgcaggtgcagcaacagcttctggacaccggtcgaggccacgcacgcacagtggggcatcaggctagccccatcaaaattgagactctctttgaacctgacgaggagcgccccgaaccacctaggactgttgtgatgcagggtgcagccgggatcggaaagtccatgctcgcgcacaaggtgatgctcgactgggcagatggtaaactgttccagggccgattcgattatctgttctatatcaactgtagagagatgaaccagtccgcgacagaatgcagcatgcaggacctgattttcagttgttggccagaacccagtgcaccattgcaggaactgatccgcgtccctgaaagacttctgtttatcatagacggcttcgatgaactcaagcccagcttccacgaccctcagggaccatggtgcctttgctgggaagaaaagagaccaacggagcttcttctaaattccctcataaggaagaaactgctgcccgagctgtccctcttaataaccactcgaccaaccgctctggagaaactgcataggcttctagagcatcctaggcatgtcgaaatcctggggtttagtgaggccgaacgaaaggagtatttttataaatatttccataatgccgaacaagcgggacaggtgttcaattacgttcgcgataacgagcccctgttcacaatgtgcttcgtacccctcgtgtgttgggtggtctgcacttgccttcagcagcagctcgagggcggggggctgcttagacagacctccaggaccactaccgcagtttacatgctgtatctcctgtccctgatgcagcctaagcccggagctccacgcttgcagcctccgcccaatcaaagaggcctgtgtagtctagctgccgacggactttggaaccagaaaatactattcgaggaacaggacctgcggaaacacgggctcgacggtgaagacgtttccgcctttctaaatatgaacatttttcaaaaagacattaattgcgaacgctattacagttttattcatctgtcttttcaggagtttttcgccgcaatgtattacatactcgatgaaggtgaaggcggggcaggacctgaccaggacgttacgaggctcctcacagagtacgctttttccgagaggtctttcctcgccctgacaagcagattcttatttgggctgcttaacgaggagacgaggtctcatcttgagaagagcctgtgctggaaggtcagcccccatattaaaatggatcttctgcagtggattcaatctaaggctcagagcgatggctcaactctccagcagggcagtctcgagtttttttcttgtctgtacgagatccaggaggaggagtttattcagcaagccctgtctcactttcaggtaatagttgtctctaatatcgcaagcaagatggagcacatggtgtctagcttttgcctcaaaagatgtaggtccgcacaagtcctgcatctgtacggcgcaacatatagcgccgatggtgaagaccgagccagatgctccgccggcgcccatactttgctggtgcagctgagacccgagcggaccgtccttctcgacgcatatagcgaacacctggcagcggccctttgcaccaacccaaacttaattgaactgtctctttaccgaaatgcccttgggtcacgtggagtgaagctactatgccagggtctgaggcatcccaattgcaaactgcagaatctccgtctcaagcgttgcagaatctcatcctcagcctgtgaggatctcagcgccgccctcattgcaaataaaaatcttacccgaatggacttgtcaggaaacggcgtcgggttcccggggatgatgctgctctgcgaaggtttgaggcatcctcaatgccgcctccagatgattcaactccgtaagtgtcagctggagtccggggcttgtcaggaaatggctagtgtgctcgggaccaacccgcacctcgtggagcttgatctcaccggcaatgctcttgaggatctcggtctgcggttactgtgccagggcctgcgccaccctgtctgcaggctccgaaccctgtggttaaagatctgtcgcttgacagccgcggcctgcgatgagctggcttccaccttgagcgttaatcagagccttagagagttggatctgagcctgaatgaacttggcgacctgggagtgctattactctgcgaagggctcaggcatcccacctgcaagctgcagactctcaggctggggatctgccgtctgggaagtgccgcttgtgaaggactctctgttgtgctacaggctaatcacaacttaagggagctcgacctgagcttcaacgacctcggggattggggcctgtggcttttggcagaagggctgcagcatcctgcctgtaggctccagaagctgtggctcgatagctgtggattaactgccaaggcatgcgagaacttatacttcacgttgggcattaaccagacgctgaccgacttatatctcactaataacgccttgggtgacaccggcgtgcggctattatgtaagagactcagccaccctggctgtaagctgcgcgtgttgtggctctttggaatggatctcaataagatgactcacagccgcttggcggcattgagggtgacaaaaccttatctggacataggttgttag

SEQ ID NO: 97460 - DNA, 3018 bp, Artificial Sequence
  derived and/or modified sequence
atgctgcgcaccgccggacgcgatggactgtgtcgacttagtacatacttggaggagttggaggcagtggaacttaagaaattcaaactgtacctgggaaccgcgacagaactaggcgagggcaagataccctgggggtcaatggaaaaggccggacctctagaaatggcgcaactcctgatcacccactttgggccagaggaggcttggagactggccctttcaaccttcgaacgaattaaccgaaaggacctctgggagcgaggacaacgtgaggacctagtaagagatactccacccggaggtccctctagccttggaaatcagagtacatgcttgctggaagtgagccttgtcaccccacggaaagacccccaggaaacttacagggactatgtgagacgcaagttccgccttatggaggatcggaatgctaggctcggcgagtgtgtaaacttgtcacaccgctataccaggctcttgctggtgaaggagcatagtaaccctatgcaggtccagcagcaactgcttgatacggggaggggacatgcgagaactgtaggacaccaagctagtcctatcaagattgaaaccctgtttgaaccggacgaggagcggccagaacccccacgtactgtggtcatgcagggcgctgccggaatcggaaaatccatgttagcccacaaggtgatgctagactgggcagatggtaagctgttccaggggagattcgattacctgttctacatcaactgccgtgaaatgaaccagtctgcgaccgagtgtagcatgcaggatctcatttttagctgttggcccgagcccagcgcaccactgcaggaactgattcgagtgcccgaacggctcctattcatcatcgatgggtttgacgaactcaaaccctccttccacgacccccaggggccttggtgcctctgttgggaggaaaagcgacctaccgagctgctactgaacagcctgattcggaagaagcttctgcctgagctttccctgctaataaccactcgcccaaccgccctggagaaacttcaccgtctgctggagcacccaagacatgttgaaatcctgggattttctgaagccgagcgtaaggagtacttctataaatattttcataacgctgagcaggctggacaagtatttaattatgttagagataatgagccactcttcactatgtgtttcgtccccctggtgtgttgggtcgtgtgcacatgcctgcaacagcagcttgagggtgggggattactgcgacagacatctcggaccacaacagccgtgtatatgctataccttctgagcctgatgcagccaaagcccggagcaccacgcctccagccgcctcccaaccagcgaggtctttgctctcttgcagccgacggactgtggaatcaaaaaatactcttcgaggaacaggacttgaggaagcatggactggatggcgaggacgtgtcagcttttcttaacatgaacatctttcagaaagacatcaattgcgagaggtactattctttcattcatctatcttttcaggagttcttcgccgctatgtattatatattagatgaaggggaaggcggagcagggccagatcaggacgtgacgaggctcctgacagaatatgctttttcagagaggtccttcttagcacttacttcccggttcctgtttggcctgctgaacgaggagacacgcagtcatctcgagaagtccctatgctggaaagtgagtcctcacatcaaaatggatctcctgcagtggatccaatccaaagcccaatctgacgggtccactctacagcagggaagcctggagtttttttcctgcctgtatgagatccaagaggaggaatttatacagcaggcgctgtcacatttccaagtgattgttgtttccaacatcgcaagcaaaatggagcacatggtaagctcgttttgccttaagaggtgccgcagtgcccaggtgctgcacctatatggcgcaacatactccgccgatggggaggatcgggcaaggtgcagcgccggagcccatactcttctggttcaactgcgccctgaaaggacagtgcttttggacgcttactcagagcatctggcggcagccctctgtacaaaccccaatctcatcgaattaagcttgtatcgcaatgccttaggctctcgcggtgtcaagctcttgtgtcaggggttgcgacaccctaactgtaaacttcagaacctgagattgaaaagatgtagaatctcatccagtgcttgcgaggatcttagtgcagcgcttatcgctaataaaaatctcacccgcatggatctgtctggaaatggtgtaggatttccaggaatgatgctgttgtgtgagggtcttcggcacccccagtgtaggctgcagatgattcagttgaggaagtgccagctggaaagcggggcatgtcaggaaatggcatcggtactggggactaacccgcaccttgtggagcttgacctgacaggaaacgcgttagaggacctggggttgaggcttctgtgccaaggactgaggcatcctgtatgcagactgagaacgctctggctcaagatttgtcgcctaaccgctgcagcttgtgacgagttggcctccaccctcagcgtaaaccagtcactgagagaactggacctgagccttaatgagttgggagaccttggcgtcttgcttctgtgtgagggcttgaggcaccctacctgtaagcttcagactttaagacttggcatttgtcggctgggatctgcggcatgtgagggccttagtgtggttttgcaggcaaatcacaacttgagagagctcgacctcagctttaacgatttgggcgattgggggctttggcttctggccgagggtctgcagcacccagcatgtcgtctccaaaaattatggcttttcggaatggatctgaacaaaatgactcactcacggctggcagccctgagagtcacaaaaccctacctagatataggctgctag

SEQ ID NO: 97461 - DNA, 3189 bp, Artificial Sequence
  derived and/or modified sequence
atgctgcgaacagcgggaagagacgggttatgccgactttctacctacttggaggaactcgaggccgtagagttgaaaaagttcaagctgtacctgggcacagctactgaactgggtgagggcaagatcccttgggggagcatggaaaaggcgggaccgctcgagatggcccagcttctgatcacccacttcgggcctgaggaggcgtggcggttggctttgtccacatttgaacgtattaatagaaaggatttgtgggagcgcggtcagcgggaagatctggtcagagatacccctcctggaggcccttcctcactcgggaatcagtccacgtgcttgctcgaggttagcctggttacaccccgaaaggacccacaggaaacctacagggattacgtgcgcaggaaatttagacttatggaagaccggaacgcccgacttggagaatgcgtcaatctttctcacagatacactaggctattattagtaaaggaacactccaaccccatgcaggtccaacaacaactcctggataccggaaggggacacgccaggaccgttggtcaccaggcttcgcctatcaagatcgagactctgtttgagcctgatgaagagagacctgaacctccgagaacggtggtcatgcagggagctgccggaatcggcaaaagcatgctggcccacaaagtgatgctggattgggctgatgggaagctgttccaaggaaggttcgattacctattctatattaattgtcgcgagatgaatcagtctgcaaccgagtgttctatgcaggacctgattttctcatgttggccagagccatctgcacccctccaggaactgattagagtaccggagaggctcctgtttattatcgacgggtttgacgaactgaaaccgagttttcacgatccccagggtccgtggtgtctgtgttgggaagaaaagaggcccaccgagctgctcctcaatagcctgattcgcaaaaaactgctgcccgaacttagcctgttgattacaacacggcctactgcgctggagaaacttcaccggctgttggagcaccccagacacgtggagatcctcggtttctccgaggccgagagaaaggaatacttttataagtacttccacaatgctgagcaggcagggcaagtgtttaattacgtgagagacaatgagccactgttcactatgtgctttgtgcctctggtatgttgggttgtctgtacctgcctgcaacaacagcttgagggcggtgggctgctcagacagacctctagaaccaccacagcagtgtatatgctttatctactgtccctgatgcaacccaagcctggggctcctaggcttcagcctccaccaaatcagcggggattatgcagtcttgctgccgacggactgtggaaccaaaaaattctttttgaagagcaggacctgcgaaaacacgggttggacggagaggacgtgtctgccttcttgaatatgaacatcttccaaaaagatatcaactgtgaaagatactactccttcattcacctatctttccaggagttttttgccgcaatgtactatattttggacgaaggggagggcggtgcgggtcccgatcaggacgttaccaggctgttgaccgagtatgcattcagtgagagatctttcctcgccttgactagtcggtttttgttcggcttactgaatgaggagaccagaagccatctcgagaaatccctgtgttggaaagtctccccccatatcaagatggacctgcttcagtggatccaatcgaaagcccagtctgatggatctacgctccagcaaggttccctggaatttttctcttgcctgtatgagatccaagaagaagagttcatccagcaagcactctcacactttcaggtgatagtagtgtctaacatcgcgtccaaaatggagcacatggtgagctctttctgcctgaagagatgcagatccgcccaggtgcttcacctgtatggtgcaacatactcagccgatggggaagatagagcgagatgctctgctggcgcacacactttgttggtgcagctcaggcctgaaagaactgtgctcctggacgcctatagcgagcacttggccgcagccctgtgcaccaatcccaatctgattgaactttccctgtatcgtaacgcgctgggttcccgtggggtcaagttgctttgtcaggggctgagacatcccaactgcaagctacagaatctgagattaaaaagatgcaggatttccagttctgcttgcgaagatttgtctgccgcactgatcgctaataagaatcttactaggatggatctcagtgggaatggagtcggctttcccggaatgatgttgctgtgtgaaggactgcggcacccgcagtgtcgattgcagatgatccagctcaggaaatgccaacttgagagcggagcatgccaggaaatggccagtgtgctgggcaccaatccacatctggtggagcttgatttgacaggcaacgcactggaggatctgggcctccggctgctctgccagggattgaggcatccagtgtgccggctgaggacattatggctgaaaatatgccgactgacagccgcagcgtgcgatgagctggcatccactctgtctgtgaaccagtctctgagagagttagatttgagcctgaacgaactcggcgatttgggagtcctgctgctgtgcgaaggtctacgtcatccaacctgcaagttgcaaacactccggcttggtatctgccgactggggagcgctgcttgcgaagggttgtctgttgttctgcaggcaaaccacaatctccgggaactggatctctctttcaacgacctgggagattgggggctgtggctgcttgcagagggcctccagcatccagcgtgtcgcctgcaaaagctgtggctcgacagctgcggactgacggctaaagcatgtgagaacttatattttacacttggaattaaccagactctgaccgatctgtatctgactaataacgctttaggtgataccggcgtgcgacttctgtgtaagcgattgtcccaccccggatgtaaacttagagtgctatggctgtttggcatggatctgaacaagatgactcattctagactggcggcacttcgcgtgaccaaaccttacctagacatcgggtgttag

SEQ ID NO: 97462 - protein, 1004 aa, Artificial Sequence
  derived and/or modified sequence
MLRTAGRDGLCRLSTYLEELEAVELKKFKLYLGTATELGEGKIPWGSMEKAGPLEMAQLLITHFGPEEAWRLALSTFERINRKDLWERGQREDLVRDTPPGGPSSLGNQSTCLLEVSLVTPRKDPQETYRDYVRRKFRLMEDRNARLGECVNLSHRYTRLLLVKEHSNPMQVQQQLLDTGRGHARTVGHQASPIKIETLFEPDEERPEPPRTVVMQGAAGIGKSMLAHKVMLDWADGKLFQGRFDYLFYINCREMNQSATECSMQDLIFSCWPEPSAPLQELIRVPERLLFIIDGFDELKPSFHDPQGPWCLCWEEKRPTELLLNSLIRKKLLPELSLLITTRPTALEKLHRLLEHPRHVEILGFSEAERKEYFYKYFHNAEQAGQVFNYVRDNEPLFTMCFVPLVCWVVCTCLQQQLEGGGLLRQTSRTTTAVYMLYLLSLMQPKPGAPRLQPPPNQRGLCSLAADGLWNQKILFEEQDLRKHGLDGEDVSAFLNMNIFQKDINCERYYSFIHLSFQEFFAAMYYILDEGEGGAGPDQDVTRLLTEYAFSERSFLALTSRFLFGLLNEETRSHLEKSLCWKVSPHIKMDLLQWIQSKAQSDGSTLQQGSLEFFSCLYEIQEEEFIQQALSHFQVIVVSNIASKMEHMVSSFCLKRCRSAQVLHLYGATYSADGEDRARCSAGAHTLLVQLPERTVLLDAYSEHLAAALCTNPNLIELSLYRNALGSRGVKLLCQGLRHPNCKLQNLRLKRCRISSSACEDLSAALIANKNLTRMDLSGNGVGFPGMMLLCEGLRHPQCRLQMIQLRKCQLESGACQEMASVLGTNPHLVELDLTGNALEDLGLRLLCQGLRHPVCRLRTLWLKICRLTAAACDELASTLSVNQSLRELDLSLNELGDLGVLLLCEGLRHPTCKLQTLRLDSCGLTAKACENLYFTLGINQTLTDLYLTNNALGDTGVRLLCKRLSHPGCKLRVLWLFGMDLNKMTHSRLAALRVTKPYLDIGC

SEQ ID NO: 97463 - DNA, 864 bp, Artificial Sequence
  derived and/or modified sequence
atgagccaggcctggtggcacaccagcgtgagccccgccacccaggaggccaaggccggcggcctgctgcagcccagaagacagagactgtggctgaagagatgcagaatcagcagcagcgcctgcgaggacctgagcgccgccctgatcgccaacaagaacctgaccagaatggacctgagcggcaacggcgtgggcttccccggcatgatgctgctgtgcgagggcctgagacacccccagtgcagactgcagatgatccagctgagaaagtgccagctggagagcggcgcctgccaggagatggccagcgtgctgggcaccaacccccacctggtggagctggacctgaccggcaacgccctggaggacctgggcctgagactgctgtgccagggcctgagacaccccgtgtgcagactgagaaccctgtggctgaagatctgcagactgaccgccgccgcctgcgacgagctggccagcaccctgagcgtgaaccagagcctgagagagctggacctgagcctgaacgagctgggcgacctgggcgtgctgctgctgtgcgagggcctgagacaccccacctgcaagctgcagaccctgagactggacagctgcggcctgaccgccaaggcctgcgagaacctgtacttcaccctgggcatcaaccagaccctgaccgacctgtacctgaccaacaacgccctgggcgacaccggcgtgagactgctgtgcaagagactgagccaccccggctgcaagctgagagtgctgtggctgttcggcatggacctgaacaagatgacccacagcagactggccgccctgagagtgaccaagccctacctggacatcggctgctag

SEQ ID NO: 97464 - DNA, 3015 bp, Artificial Sequence
  derived and/or modified sequence
atgctgagaaccgccggcagagacggcctgtgcagactgagcacctacctggaggagctggaggccgtggagctgaagaagttcaagctgtacctgggcaccgccaccgagctgggcgagggcaagatcccctggggcagcatggagaaggccggccccctggagatggcccagctgctgatcacccacttcggccccgaggaggcctggagactggccctgagcaccttcgagagaatcaacagaaaggacctgtgggagagaggccagagagaggacctggtgagagacaccccccccggcggccccagcagcctgggcaaccagagcacctgcctgctggaggtgagcctggtgacccccagaaaggacccccaggagacctacagagactacgtgagaagaaagttcagactgatggaggacagaaacgccagactgggcgagtgcgtgaacctgagccacagatacaccagactgctgctggtgaaggagcacagcaaccccatgcaggtgcagcagcagctgctggacaccggcagaggccacgccagaaccgtgggccaccaggccagccccatcaagatcgagaccctgttcgagcccgacgaggagagacccgagccccccagaaccgtggtgatgcagggcgccgccggcatcggcaagagcatgctggcccacaaggtgatgctggactgggccgacggcaagctgttccagggcagattcgactacctgttctacatcaactgcagagagatgaaccagagcgccaccgagtgcagcatgcaggacctgatcttcagctgctggcccgagcccagcgcccccctgcaggagctgatcagagtgcccgagagactgctgttcatcatcgacggcttcgacgagctgaagcccagcttccacgacccccagggcccctggtgcctgtgctgggaggagaagagacccaccgagctgctgctgaacagcctgatcagaaagaagctgctgcccgagctgagcctgctgatcaccaccagacccaccgccctggagaagctgcacagactgctggagcaccccagacacgtggagatcctgggcttcagcgaggccgagagaaaggagtacttctacaagtacttccacaacgccgagcaggccggccaggtgttcaactacgtgagagacaacgagcccctgttcaccatgtgcttcgtgcccctggtgtgctgggtggtgtgcacctgcctgcagcagcagctggagggcggcggcctgctgagacagaccagcagaaccaccaccgccgtgtacatgctgtacctgctgagcctgatgcagcccaagcccggcgcccccagactgcagcccccccccaaccagagaggcctgtgcagcctggccgccgacggcctgtggaaccagaagatcctgttcgaggagcaggacctgagaaagcacggcctggacggcgaggacgtgagcgccttcctgaacatgaacatcttccagaaggacatcaactgcgagagatactacagcttcatccacctgagcttccaggagttcttcgccgccatgtactacatcctggacgagggcgagggcggcgccggccccgaccaggacgtgaccagactgctgaccgagtacgccttcagcgagagaagcttcctggccctgaccagcagattcctgttcggcctgctgaacgaggagaccagaagccacctggagaagagcctgtgctggaaggtgagcccccacatcaagatggacctgctgcagtggatccagagcaaggcccagagcgacggcagcaccctgcagcagggcagcctggagttcttcagctgcctgtacgagatccaggaggaggagttcatccagcaggccctgagccacttccaggtgatcgtggtgagcaacatcgccagcaagatggagcacatggtgagcagcttctgcctgaagagatgcagaagcgcccaggtgctgcacctgtacggcgccacctacagcgccgacggcgaggacagagccagatgcagcgccggcgcccacaccctgctggtgcagctgcccgagagaaccgtgctgctggacgcctacagcgagcacctggccgccgccctgtgcaccaaccccaacctgatcgagctgagcctgtacagaaacgccctgggcagcagaggcgtgaagctgctgtgccagggcctgagacaccccaactgcaagctgcagaacctgagactgaagagatgcagaatcagcagcagcgcctgcgaggacctgagcgccgccctgatcgccaacaagaacctgaccagaatggacctgagcggcaacggcgtgggcttccccggcatgatgctgctgtgcgagggcctgagacacccccagtgcagactgcagatgatccagctgagaaagtgccagctggagagcggcgcctgccaggagatggccagcgtgctgggcaccaacccccacctggtggagctggacctgaccggcaacgccctggaggacctgggcctgagactgctgtgccagggcctgagacaccccgtgtgcagactgagaaccctgtggctgaagatctgcagactgaccgccgccgcctgcgacgagctggccagcaccctgagcgtgaaccagagcctgagagagctggacctgagcctgaacgagctgggcgacctgggcgtgctgctgctgtgcgagggcctgagacaccccacctgcaagctgcagaccctgagactggacagctgcggcctgaccgccaaggcctgcgagaacctgtacttcaccctgggcatcaaccagaccctgaccgacctgtacctgaccaacaacgccctgggcgacaccggcgtgagactgctgtgcaagagactgagccaccccggctgcaagctgagagtgctgtggctgttcggcatggacctgaacaagatgacccacagcagactggccgccctgagagtgaccaagccctacctggacatcggctgctag

SEQ ID NO: 97465 - DNA, 2619 bp, Artificial Sequence
  derived and/or modified sequence
agtccctttttcttgagagagtgtggctctgtcaccaaggctggagtgcaggggcacaatctcagctcactgcaacctccaccttgcgtgtctcagcctcctgagcagctgggaccacaggagtgtgccaccacacccagctaatttttgtatttttttagtagagatggggtgtcaccatgttggccaggctggtctcaaactctcggcctcagcctcccaaagtgctgggattataggtgtgagccaccacacccagcctctatatcccttttatcggtggacccaacaatcttctgtagacagaagactgtgtgaataagccaatggtcccaagagagcacgcatcctaatgagaacggagacagataataaagagggaaacaagtaaaccaactatcaatgattaggagcgtcagatagagccaggtgcagcctggacaacatgatgagatccccatctctaaaaatataaaataaattagctggtcatgatggtgcacacctgtagccccagcttctcagtaggctgaggtgggaggattgcttaagcctgggaggtcaagcctacagtgagccatgatctcaccatgcactccagcctagacaacagggcaaggccctctaaaaaaaaaaatgaaaagatagcatgctttggccggatgtggtggctcacgcctgtaatcccagcacttcaggaggttgaggcgggcagatcacctgaggtcaggagtacgagatcagcctggccaacacggtgaaaccccatctctactaaaaatacaaaattaactgggcgtggtggctcatgcctgtaatcccagctactctggaggctgaggcaggagaatcgcttgaacccaggaggcggaggttgtggtgagctgagattgcgccattgcactccagcctgggcaacaagagcgaaactccgtctcaaaaaaggatagcatgcttcataaacggtgaaatgacatgcaaaggccatagttgtcaagcaccagtaacaccagagagtggcctgtctttccttcaagcagaccagagaggaccgttctgctggacgcctacagtgaacatctggcagcggccctgtgcaccaatccaaacctgatagagctgtctctgtaccgaaatgccctgggcagccggggggtgaagctgctctgtcaaggactcagacaccccaactgcaaacttcagaacctgagcactttgggaggcccagatggggaggatcacttgacccaggagttcaagaccagcctggccaacatggtgaaaccccatctctactaaaaataccaaaatgagccaggcatggtggcacacgtctgtaagcccagctactcaggaggccaaggcaggaggattgcttcaacccaggaggcagaggttgtggctgaagaggtgccgcatctccagctcagcctgcgaggacctctctgcagctctcatagccaataagaatttgacaaggatggatctcagtggcaacggcgttggattcccaggcatgatgctgctttgcgagggcctgcggcatccccagtgcaggctgcagatgattcagttgaggaagtgtcagctggagtccggggcttgtcaggagatggcttctgtgctcggcaccaacccacatctggttgagttggacctgacaggaaatgcactggaggatttgggcctgaggttactatgccagggactgaggcacccagtctgcagactacggactttgtggctgaagatctgccgcctcactgctgctgcctgtgacgagctggcctcaactctcagtgtgaaccagagcctgagagagctggacctgagcctgaatgagctgggggacctcggggtgctgctgctgtgtgagggcctcaggcatcccacgtgcaagctccagaccctgcggctggatagctgtggcctcacagccaaggcttgtgagaatctttacttcaccctggggatcaaccagaccttgaccgacctttacctgaccaacaacgccctaggggacacaggtgtccgactgctttgcaagcggctgagccatcctggctgcaaactccgagtcctctggttatttgggatggacctgaataaaatgacccacagtaggttggcagcgcttcgagtaacaaaaccttatttggacattggctgctgaatggtcctatctgctggctctcccctgagatctggacagaggaagatgggagggtgctcatcacccccccagcataatgatcagcctccttcctagagacagactcatgcagattgagatcaaaagtccctctgcttgggatcaaattaatgtttgacagagctggccaggcgtggtggctcatgtatgtaatcctagcacttcgagaggccgaggcaggtggatcacgaggtcaggagtttgagattagcctggccaagatggtgaaaccctgtctctactaaaaataaaaaaaaattagccaggcatggtggcgggcacctgtagtcccagctactcaggaggctgaggcaggagaatcgcttgaacccgggaggtggaggttgcagtgagccgagatcgcgccactgcactccagcctgggcgacagagtgggactccatctc

SEQ ID NO: 97466 - DNA, 864 bp, Artificial Sequence
  derived and/or modified sequence
atgagccaagcctggtggcatacaagtgtaagccccgccactcaggaagccaaagcgggcggactcttgcagccaaggcggcaaagactgtggctcaagaggtgccgcatttcttcgagcgcctgcgaagatctgtctgctgccctgattgccaataagaacctgacacgaatggatctgagcggcaacggcgtcgggttccctggaatgatgctgttgtgcgaggggctcaggcacccccagtgcaggctgcagatgatccaactacgaaaatgtcaactagagagcggggcttgccaggagatggcttccgtgctggggaccaatcctcaccttgtcgagttagatcttacggggaatgctctggaggatcttggtcttagactcctgtgccaaggacttaggcaccctgtatgcagactgcgaaccttgtggctaaaaatttgcaggcttaccgccgctgcctgtgatgaactggcctccacgctgtccgtgaaccaaagcttgcgagaattagacttatcactgaatgagctgggggatttgggggtactcctgctatgtgaggggctcagacaccctacatgcaagctgcagactctgagactggattcatgcggactcacagcaaaagcctgcgagaacctgtactttactctgggcataaaccagactctcaccgatctctacctgacaaataacgctttgggcgacacaggggtgagattattgtgcaaacggcttagccatcctggctgcaaactgcgcgtgttgtggctgtttgggatggacctcaacaaaatgacgcactcaaggctagccgcgctgagggtgaccaagccatacttagatattgggtgctag

SEQ ID NO: 97467 - DNA, 3015 bp, Artificial Sequence
  derived and/or modified sequence
atgctgcggaccgctggacgcgatggactatgtcggttatccacctacttagaagaactcgaagcagtcgagctgaagaaattcaaactgtatctgggtacggccaccgaattaggggaaggcaaaatcccctggggatcaatggagaaagccggccccttggagatggcccagctgttaatcacccattttggccccgaagaagcctggcggctggctctgtcgacctttgaacgcatcaacagaaaagacttgtgggagcgggggcagcgtgaggatctggtgcgcgatacaccccctggggggcctagtagtctcgggaaccagtccacctgtttactggaagtctctctcgtgaccccacgaaaagatccacaggaaacctacagggactacgttcggcgtaaatttaggctgatggaggatcgaaacgcccggctgggcgagtgcgtgaacttgtcccacagatataccaggcttctgctggttaaagaacactccaatccaatgcaagtccagcaacaactcttggatactggacgaggacacgcacggaccgtgggacatcaggccagccccatcaagatcgagacactgtttgaacctgatgaggaacgacccgaaccgcctagaacagtcgtgatgcagggcgccgcagggatcggcaagtcaatgctcgcccacaaggtgatgctggattgggccgacggtaagctgtttcaagggaggtttgattatctgttttatatcaactgccgcgaaatgaaccagtctgccactgaatgctcaatgcaggatctaatttttagctgttggccagaacctagcgccccgctccaggagctgatacgggtgcccgaacgtcttctgttcatcatagacggctttgacgaactaaaaccttcctttcatgatccacaggggccctggtgcctgtgctgggaggagaaacgccctaccgagcttctccttaattctctgatccgcaaaaaactcctgcctgagttatctctgcttatcaccacccggccaaccgccctggaaaagctgcaccgactactggagcatccccgtcatgtggagatccttggtttctccgaagccgagcgtaaggagtacttctacaagtatttccataatgctgagcaggcgggacaggttttcaattatgtccgcgacaacgagccattgtttacgatgtgttttgtgccactggtgtgctgggtagtgtgtacttgcttacaacagcagttggaaggcggaggcctgctgagacagacttctcggactaccaccgcggtttatatgctatatctactatctctcatgcagccgaagcccggagctcctcgcctgcagccaccaccaaaccaacggggactctgcagcctggccgctgacggcctctggaatcagaaaatccttttcgaagagcaggacttgcggaagcacggccttgatggcgaggacgtgtccgccttcctgaatatgaacatcttccagaaagatattaactgtgaacggtactacagcttcatccacctcagcttccaggagtttttcgcagcaatgtattacatcctcgacgagggcgagggcggcgcagggcccgaccaggacgtgacccgactgttaaccgagtatgccttctcagaacgttccttcctggccctgacatccaggttcctattcggtctcctgaatgaggagactaggtctcaccttgagaaaagtctatgctggaaagtgtctccacacatcaaaatggacctgctacagtggatccagtccaaggcacagagtgacgggtctacgttgcagcaggggtctctcgagttcttttcatgcctgtatgagatacaggaggaggagttcattcagcaggctctgagccactttcaagtgatcgttgtaagcaacatagccagtaaaatggagcacatggtttcaagcttttgcctaaagcgatgtcggtcagcccaagtgctccacctgtatggagccacctactccgcagatggcgaggatcgcgctaggtgtagtgcaggtgcccatacgcttctagtccagctgcctgagcgtacagttctgctggatgcttattccgaacacctcgctgcagctttatgtacgaacccgaacctgattgaactaagcctgtatcgcaatgcgctcggcagccgcggggttaagctgctatgtcaggggcttcggcaccctaactgtaagttgcagaatctccgattaaagaggtgccgcattagtagttccgcttgtgaggatctgagcgccgccttgatcgccaacaagaatctgactcgaatggacctatctggaaacggggtggggtttcccggcatgatgttgctgtgcgagggtctcaggcatccccaatgccgcctccagatgatccagctaaggaagtgtcagctcgagtcaggagcttgtcaggaaatggcaagtgtgctgggcacaaatcctcacctcgtggaactggatcttaccgggaacgccctggaggacttaggactgagactactatgtcaaggactcaggcacccagtgtgtcgcttacgaactctctggctgaaaatttgtcggctgactgctgcagcgtgtgatgagctggcttctaccctgtccgtgaatcagtcgctgagagaactggacctgtctctgaacgaactcggcgacctcggggtgctcctgctgtgcgaggggctaagacacccaacctgtaaactccaaactttgcgcctggactcatgcggcttgactgcgaaggcctgcgagaatctatactttacactgggaattaatcagactctgacagacttgtatctgaccaataatgctttaggtgataccggggttagactcctgtgcaagcgattaagtcatcccggttgtaagctgagagtcttgtggctgttcggcatggatctgaataaaatgactcattccaggctggccgcattgagggtgacaaaaccttacctggatatcgggtgctag

SEQ ID NO: 97468 - DNA, 864 bp, Artificial Sequence
  derived and/or modified sequence
atgagccaggcctggtggcacacctctgtgtccccagccacccaggaggccaaggccggcggcctgctgcagccccggcggcagaggctgtggctgaagcgctgccgcatcagcagcagcgcctgtgaggacctgtctgctgccctgattgccaacaagaacctgaccaggatggacctgtctggaaatggagtgggcttccctggcatgatgctgctgtgtgagggcctgcggcacccccagtgccgcctgcagatgatccagctgaggaagtgccagctggagagcggggcctgccaggagatggcctctgtgctgggcaccaacccccacctggtggagctggacctgactggaaatgccctggaggacctgggcctgcggctgctgtgccagggcctgcggcaccctgtgtgccgcctgcggaccctgtggctgaagatctgccgcctgacagctgctgcctgtgatgagctggccagcaccctgtctgtgaaccagagcctgcgggagctggacctgagcctgaatgagctgggggacctgggcgtgctgctgctgtgtgagggcctgcggcaccccacctgcaagctgcagaccctgcggctggacagctgtggcctgacagccaaggcctgtgagaacctgtacttcaccctgggcatcaaccagaccctgacagacctgtacctgaccaacaatgccctgggggacacaggagtgcggctgctgtgcaagaggctgagccaccctggctgcaagctgcgggtgctgtggctgtttggcatggacctgaacaagatgacccacagccggctggccgccctgcgggtgaccaagccctacctggacatcggctgctag

SEQ ID NO: 97469 - DNA, 3015 bp, Artificial Sequence
  derived and/or modified sequence
atgctgaggacagctggaagagatggcctgtgccgcctgagcacctacctggaggagctggaggccgtggagctgaagaagttcaagctgtacctgggcacagccacagagctgggggagggcaagatcccctggggctccatggagaaggccggccccctggagatggcccagctgctgatcacccacttcggccctgaggaggcctggaggctggccctgagcacctttgagcgcatcaacaggaaggacctgtgggagcggggccagcgggaggacctggtgcgggacaccccacctgggggccccagcagcctgggcaaccagagcacctgcctgctggaggtgtccctggtgacccccaggaaggacccccaggagacctacagagattatgtgcggaggaagttccggctgatggaggacagaaatgcccggctgggagaatgtgtgaacctgagccaccgctacacccggctgctgctggtgaaggagcacagcaaccccatgcaggtgcagcagcagctgctggacaccggccggggccacgccaggacagtgggccaccaggccagccccatcaagattgagaccctgtttgagccagatgaggagaggcctgagccccccaggacagtggtgatgcagggcgctgctggcatcggcaagtccatgctggcccacaaggtgatgctggactgggcagatggcaagctgttccagggccgctttgactacctgttctacatcaactgccgggagatgaaccagagcgccacagaatgttccatgcaggacctgatcttcagctgctggccagagcccagcgcccccctgcaggagctgatccgggtgcctgagcggctgctcttcatcattgatggctttgatgagctgaagcccagcttccatgacccccagggcccctggtgcctgtgctgggaggagaagaggcccacagagctgctgctgaacagcctcatcaggaagaagctgctgcctgagctgagcctgctgatcaccacccggcccacagccctggagaagctgcaccggctgctggagcaccccaggcatgtggagatcctgggcttcagcgaggccgagaggaaggagtacttctacaagtacttccacaatgctgagcaggccggccaggtgttcaactacgtgcgggacaatgagcccctcttcaccatgtgctttgtgcccctggtgtgctgggtggtgtgcacctgcctgcagcagcagctggagggcggcggcctgctgcggcagaccagcaggaccaccacagctgtgtacatgctgtacctgctgagcctgatgcagcccaagccaggggccccccggctgcagcccccacccaaccagaggggcctgtgcagcctggccgcagatggcctgtggaaccagaagatcctgtttgaggagcaggacctgaggaagcacggcctggatggagaagatgtgtctgccttcctgaacatgaacatcttccagaaggacatcaactgtgagcgctactacagcttcatccacctgtccttccaggagttctttgctgccatgtactacatcctggatgaaggagagggcggggccggccctgaccaggatgtgacccggctgctgacagaatatgccttcagcgagaggagcttcctggccctgaccagccgcttcctgtttggcctgctgaatgaggagaccaggagccacctggagaagagcctgtgctggaaggtgagcccccacatcaagatggacctgctgcagtggatccagagcaaggcccagagtgatggcagcaccctgcagcagggcagcctggagttcttcagctgcctgtatgagatccaggaggaggagttcatccagcaggccctgagccacttccaggtgattgtggtgagcaacatcgccagcaagatggagcacatggtgtcctccttctgcctgaagcgctgccgcagcgcccaggtgctgcacctgtatggagccacctacagcgcagatggagaagatcgggcccgctgcagcgctggggcccacaccctgctggtgcagctgcctgagaggacagtgctgctggatgcctacagcgagcacctggccgccgccctgtgcaccaaccccaacctgattgagctgagcctgtacagaaatgccctgggcagcagaggagtgaagctgctgtgccagggcctgcggcaccccaactgcaagctgcagaacctgcggctgaagcgctgccgcatcagcagcagcgcctgtgaggacctgtctgctgccctgattgccaacaagaacctgaccaggatggacctgtctggaaatggagtgggcttccctggcatgatgctgctgtgtgagggcctgcggcacccccagtgccgcctgcagatgatccagctgaggaagtgccagctggagagcggggcctgccaggagatggcctctgtgctgggcaccaacccccacctggtggagctggacctgactggaaatgccctggaggacctgggcctgcggctgctgtgccagggcctgcggcaccctgtgtgccgcctgcggaccctgtggctgaagatctgccgcctgacagctgctgcctgtgatgagctggccagcaccctgtctgtgaaccagagcctgcgggagctggacctgagcctgaatgagctgggggacctgggcgtgctgctgctgtgtgagggcctgcggcaccccacctgcaagctgcagaccctgcggctggacagctgtggcctgacagccaaggcctgtgaaaatctctacttcaccctgggcatcaaccagaccctgacagacctgtacctgaccaacaatgccctgggggacaccggggtgcggctgctgtgcaagaggctgagccaccctggctgcaagctgcgggtgctgtggctgtttggcatggacctgaacaagatgacccacagccggctggccgccctgcgggtgaccaagccctacctggacatcggctgctag

SEQ ID NO: 97470 - DNA, 3465 bp, Artificial Sequence
  derived and/or modified sequence
ctctctcctccaaccactggctcagcctctccgcccgctgcctgtgaatgatgcaatggaaggtgtgctggggtcgccctgtgtcccgtgcataggagcatctcagcctccaggtcctctcctttggggctcacggcacccccatgctacgaaccgcaggcagggacggcctctgtcgcctgtccacctacttggaagaactcgaggctgtggaactgaagaagttcaagttatacctggggaccgcgacagagctgggagaaggcaagatcccctggggaagcatggagaaggccggtcccctggaaatggcccagctgctcatcacccacttcgggccagaggaggcctggaggttggctctcagcacctttgagcggataaacaggaaggacctgtgggagagaggacagagagaggacctggtgagggataccccacctggtggcccgtcctcacttgggaaccagtcaacatgccttctggaagtctctcttgtcactccaagaaaagatccccaggaaacctacagggactatgtccgcaggaaattccggctcatggaagaccgcaatgcgcgcctaggggaatgtgtcaacctcagccaccggtacacccggctcctgctggtgaaggagcactcaaaccccatgcaggtccagcagcagcttctggacacaggccggggacacgcgaggaccgtgggacaccaggctagccccatcaagatagagaccctctttgagccagacgaggagcgccccgagccaccgcgcaccgtggtcatgcaaggcgcggcagggataggcaagtccatgctggcacacaaggtgatgctggactgggcggacgggaagctcttccaaggcagatttgattatctcttctacatcaactgcagggagatgaaccagagtgccacggaatgcagcatgcaagacctcatcttcagctgctggcctgagcccagcgcgcctctccaggagctcatccgagttcccgagcgcctccttttcatcatcgacggcttcgatgagctcaagccttctttccacgatcctcagggaccctggtgcctctgctgggaggagaaacggcccacggagctgcttcttaacagcttaattcggaagaagctgctccctgagctatctttgctcatcaccacacggcccacggctttggagaagctccaccgtctgctggagcaccccaggcatgtggagatcctgggcttctctgaggcagaaaggaaggaatacttctacaagtatttccacaatgcagagcaggcgggccaagtcttcaattacgtgagggacaacgagcctctcttcaccatgtgcttcgtccccctggtgtgctgggtggtgtgtacctgcctccagcagcagctggagggtggggggctgttgagacagacgtccaggaccaccactgcagtgtacatgctctacctgctgagtctgatgcaacccaagccgggggccccgcgcctccagcccccacccaaccagagagggttgtgctccttggcggcagatgggctctggaatcagaaaatcctatttgaggagcaggacctccggaagcacggcctagacggggaagacgtctctgccttcctcaacatgaacatcttccagaaggacatcaactgtgagaggtactacagcttcatccacttgagtttccaggaattctttgcagctatgtactatatcctggacgagggggagggcggggcaggcccagaccaggacgtgaccaggctgttgaccgagtacgcgttttctgaaaggagcttcctggcactcaccagccgcttcctgtttggactcctgaacgaggagaccaggagccacctggagaagagtctctgctggaaggtctcgccgcacatcaagatggacctgttgcagtggatccaaagcaaagctcagagcgacggctccaccctgcagcagggctccttggagttcttcagctgcttgtacgagatccaggaggaggagtttatccagcaggccctgagccacttccaggtgatcgtggtcagcaacattgcctccaagatggagcacatggtctcctcgttctgtctgaagcgctgcaggagcgcccaggtgctgcacttgtatggcgccacctacagcgcggacggggaagaccgcgcgaggtgctccgcaggagcgcacacgctgttggtgcagctaccagagaggaccgttctgctggacgcctacagtgaacatctggcagcggccctgtgcaccaatccaaacctgatagagctgtctctgtaccgaaatgccctgggcagccggggggtgaagctgctctgtcaaggactcagacaccccaactgcaaacttcagaacctgaggctgaagaggtgccgcatctccagctcagcctgcgaggacctctctgcagctctcatagccaataagaatttgacaaggatggatctcagtggcaacggcgttggattcccaggcatgatgctgctttgcgagggcctgcggcatccccagtgcaggctgcagatgattcagttgaggaagtgtcagctggagtccggggcttgtcaggagatggcttctgtgctcggcaccaacccacatctggttgagttggacctgacaggaaatgcactggaggatttgggcctgaggttactatgccagggactgaggcacccagtctgcagactacggactttgtggctgaagatctgccgcctcactgctgctgcctgtgacgagctggcctcaactctcagtgtgaaccagagcctgagagagctggacctgagcctgaatgagctgggggacctcggggtgctgctgctgtgtgagggcctcaggcatcccacgtgcaagctccagaccctgcggctggatagctgtggcctcacagccaaggcttgtgagaatctttacttcaccctggggatcaaccagaccttgaccgacctttacctgaccaacaacgccctaggggacacaggtgtccgactgctttgcaagcggctgagccatcctggctgcaaactccgagtcctctggttatttgggatggacctgaataaaatgacccacagtaggttggcagcgcttcgagtaacaaaaccttatttggacattggctgctgaatggtcctatctgctggctctcccctgagatctggacagaggaagatgggagggtgctcatcacccccccagcataatgatcagcctccttcctagagacagactcatgcagattgagatcaaaagtccctctgcttgggatcaaattaatgtttgacagagctggccaggcgtggtggctcatgtatgtaatcctagcacttcgagaggccgaggcaggtggatcacgaggtcaggagtttgagattagcctggccaagatggtgaaaccctgtctctactaaaaataaaaaaaaattagccaggc

SEQ ID NO: 97471 - DNA, 864 bp, Artificial Sequence
  derived and/or modified sequence
atgagccaggcctggtggcacaccagcgtgagccccgccacccaggaggccaaagctggtggccttttgcagcccagaagacaacgtctgtggctcaaacgttgccgcatctccagcagcgcctgcgaagatttgtctgcagcattaatcgccaataagaatcttacacgaatggatctttcgggtaacggagtgggttttcccgggatgatgctgttatgtgaaggattgaggcacccacagtgtcgcttgcagatgattcagttaagaaaatgccagttggagagcggagcctgtcaggagatggcatcagtcctggggacaaacccacatttagtggaactcgacttgaccggcaatgctttggaggacctgggccttagactgctctgccagggattaaggcatcccgtctgtcgcttgaggactctatggttgaagatctgccgactcactgccgcagcctgtgacgagctagcctctaccctgagcgtaaaccagtccctcagagaactggacctctctctgaatgagctgggcgatcttggagtgctgcttttgtgtgaaggcctgcggcatccaacttgcaaactccagaccctccgcttagactcttgcggcctgaccgcaaaagcatgtgagaatctttatttcaccctgggcattaaccaaacacttactgacctctacctgactaataacgccctcggcgatactggtgtgcgactcctgtgtaaacgcctgtcacatccaggatgcaaactgcgcgtgctgtggcttttcggaatggatttaaataagatgacccattcacgccttgcggctttgcgcgtcacaaagccatacctcgacatcggttgttag

SEQ ID NO: 97472 - DNA, 3015 bp, Artificial Sequence
  derived and/or modified sequence
atgctgcggaccgccggccgggacggcctgtgccggctgagcacctacctggaggagctggaggctgtggaactgaagaaatttaaactctacctgggtacagccaccgagctgggcgagggcaagatcccttgggggtccatggaaaaggctgggcccttggaaatggcccagttactgatcacacactttggacccgaagaggcgtggagactcgctctgagtactttcgaacggatcaataggaaggacctatgggagagggggcagcgcgaagatctcgttagagatacgccccccggcggccccagtagcttaggtaatcagagtacgtgtctcctcgaggtttctctggtgactccaagaaaggatccacaagaaacctatagagattatgtgcgtcgtaagttccggctcatggaggataggaatgcccgtctgggggaatgcgttaatctgtcccaccgttatactagactcttgctcgtgaaggagcacagcaaccccatgcaggtacagcagcagcttctggacacaggcagagggcatgccaggactgtgggacaccaagcctcccccattaaaattgaaaccttatttgagcccgacgaggagagacccgaaccgcctcgaactgtagtcatgcagggagctgcaggcattgggaaaagcatgctggcccacaaggtcatgcttgactgggcagatgggaaattgtttcagggtcgtttcgattatctcttttatattaactgtagagagatgaatcaaagcgccactgaatgtagtatgcaggacttgatctttagctgttggccagagcccagcgcaccattgcaggagctgattcgcgtgccggagcggctcctctttattattgatgggtttgacgagcttaaaccttcgttccacgacccacagggcccctggtgtctatgttgggaagaaaaacggcctacagaactgctcctgaactccctcattcggaagaagctcttacctgaattgtccctgttgattaccactcggcctacggcattagaaaaacttcaccggcttctggaacatccaaggcatgtcgaaattctgggcttctccgaggctgagcggaaggaatatttttataagtactttcacaacgctgagcaagcaggccaggtgtttaattatgtgcgggacaatgagccccttttcaccatgtgcttcgtccctctcgtgtgctgggtagtctgcacgtgccttcagcagcaattggagggcggcggtctgttgcggcagacaagcaggaccaccacagcagtgtacatgctgtatttgctgtcactgatgcagcccaagcctggtgcgcccaggttgcagcccccaccaaaccagagggggctgtgctccctggccgctgacggactatggaaccaaaaaatcctgttcgaagagcaggatcttcggaaacatggcctggacggtgaagacgtgagcgcattcctaaacatgaacatctttcagaaagatattaattgcgaacggtactatagttttatccatctctcgttccaggagtttttcgcggccatgtactacattctggacgaaggcgaaggcggcgcagggccagaccaggatgttactaggctcctgacagaatacgccttctctgaacggagttttctagcgctcaccagcagattcctcttcggcctccttaacgaggagacacgatcccatctggagaagagtctctgctggaaagtgtccccacatatcaagatggacttactgcagtggatccagtctaaggctcagagcgacggatcgactttgcagcagggctctcttgagttctttagctgtctgtacgagattcaggaggaggagtttattcaacaggcgctttctcatttccaggtgatcgtggtctcgaacatcgcctcaaagatggagcacatggtatcatccttctgtctgaagcggtgccgatctgcgcaggtgctacacctgtatggggccacgtattcagccgacggagaggaccgcgcccgttgttccgcaggagctcacaccctactggtgcaactgccagaaagaaccgtgcttctcgatgcgtattctgagcatctagcggcagctttatgtactaacccgaacctcattgaactctccttgtaccggaatgccctgggatcgcggggagttaaacttctgtgccaggggttacgacatcctaattgcaaacttcaaaacctgcggttaaaacggtgcaggatctcgagcagcgcttgtgaggacttgtccgccgcactcatcgctaacaagaatctcacgcggatggacctgagcggtaacggggtcggcttccctggcatgatgctgctgtgtgaagggcttcgtcacccccagtgcagacttcagatgatccaactgcggaagtgccagctcgaatctggggcctgccaagagatggcctctgttctgggaaccaatccacacctagttgaactggacctgacagggaatgcattggaagacttaggtctgaggctgctctgccagggtctccgtcacccggtgtgtaggttacgcactctttggcttaagatctgtcggctgaccgcagctgcctgcgacgagttggccagcacccttagcgttaatcaatctctccgagagttggatctgtccctaaacgaactcggtgacctgggcgtgctgctgctgtgcgagggacttcgccatcccacctgtaaattgcaaactcttagactcgacagctgtggcctgacagctaaggcctgtgaaaatctttacttcactttaggtattaaccaaacattgacagatctctatcttactaataatgctcttggagacaccggcgtacgcttgctctgcaagcggcttagccatccaggttgtaagctccgagtgctgtggctgtttgggatggacctgaacaagatgacgcactcgagactggccgccctcagggtaacgaaaccctatttagatatcggatgttag

SEQ ID NO: 97473 - DNA, 864 bp, Artificial Sequence
  derived and/or modified sequence
atgtcacaagcctggtggcacacttccgtgtcccctgccacacaagaggctaaggccggtggcctgctacaacccagacgacaacgcctctggctcaagcgctgtaggatttcatctagtgcctgcgaagaccttagtgcagccttgattgctaacaagaatctgaccagaatggaccttagcggcaatggtgtaggattccctggcatgatgctgctgtgcgagggccttcgccatcctcagtgcaggctgcagatgattcaactacgaaagtgtcagctagagtccggtgcctgccaggagatggcttccgtcctcgggacaaatccacacttagtggagctcgatcttactggtaacgcactcgaggacttgggcctccgtctactctgtcaaggtcttagacatcctgtatgccgtcttcgcaccttatggctgaaaatctgtaggctcacagccgcagcatgcgatgaattggcatccacgttatctgtgaaccaatcccttcgcgagctcgatctctcgttaaacgaactcggcgacctcggcgtgctccttctgtgtgagggactgcgacatcccacatgtaagctgcaaactttaaggctggactcatgcggcctaaccgccaaggcttgtgagaacctgtattttaccctgggcataaaccagacacttaccgacctgtatctaaccaataacgcactgggcgatactggcgtgaggctgctctgcaagcgtttgtctcaccccggttgtaaactgcgggtgctctggctgtttggaatggacctgaataaaatgacccattcccggctggcggcattacgagtgacaaagccctatcttgatatcggctgctag

SEQ ID NO: 97474 - DNA, 3015 bp, Artificial Sequence
  derived and/or modified sequence
atgctgaggactgctggccgtgacgggttgtgccggctctccacctatctggaggaactggaggctgttgaattgaaaaaatttaagctgtacctgggcaccgctactgaactgggcgaaggtaaaatcccatgggggagtatggaaaaggccggaccccttgagatggcacagctgctcattacccacttcgggcctgaggaagcctggcgcctggcactatctacattcgagcggatcaacaggaaggacctctgggaacgaggacaacgggaagaccttgtccgcgacacacccccagggggaccgtcaagcctcggaaaccaatccacatgcttgctggaagtgagcctggtaactcccaggaaggatccccaggagacttatagggactatgtaaggagaaaatttaggcttatggaagaccgcaacgccagattgggggaatgtgtaaacctgagccatcggtacacccggctcctgctggttaaggaacattctaacccgatgcaagtccaacagcagctgctggataccggcagggggcatgctagaactgtcggacaccaggcttcccccatcaagattgaaactctgtttgagccggatgaggagcggcctgagccgccacggacagtagtgatgcagggggctgcgggtatcggaaagtccatgctagctcacaaggtcatgttggactgggccgatggaaagctgtttcaggggagattcgactatctgttctacatcaattgtagggagatgaaccagagcgcaacagagtgttccatgcaagatctcattttttcttgctggcccgagccgtctgccccactgcaggagctgatccgggtgccagagagattgctgttcattattgatgggtttgatgagctgaagcctagtttccatgatccccagggaccctggtgcttatgctgggaggaaaagcggccaacagagttactcctgaacagtctcattcgcaagaaactgttacccgagctgagtctgctcatcacaaccaggccaacggccctggaaaagttgcataggctgctggagcacccgcgacatgtcgagattctcgggtttagtgaggccgagcggaaggagtatttctataaatatttccataacgccgagcaggccggtcaggttttcaattatgtgagagataacgagcccttatttaccatgtgttttgttcccctggtttgctgggtcgtgtgcacctgtttgcagcagcagctcgaaggcggaggactgttgagacaaacatcgcgcactacaacagccgtgtatatgctctacctgctgtctctgatgcagcctaaaccaggtgccccaagactgcagccacctcctaatcaacggggtctctgctcactggccgcagatggtctgtggaaccagaaaatattattcgaggaacaggatctccgaaaacacgggctcgacggggaagacgtatcggccttcctgaatatgaatatttttcagaaagatatcaactgcgaaaggtattactcgtttattcacctttcctttcaggagttttttgccgctatgtactatattttagatgaaggtgaagggggagccggaccagatcaagacgtcacgcggctgctgacagaatatgccttctccgaacggagtttcctggccctgacttcaaggttcctgtttggtctcctcaatgaggagacacgttcacatttagagaaatccctctgctggaaggtcagcccccacatcaagatggacttactccagtggatccaatccaaagcccagtccgacggaagcacccttcagcagggctccctggaattcttcagctgcctgtatgagatccaggaggaggagttcatccaacaagccctgtctcacttccaggtcatagtggtctccaatatcgcatcaaaaatggagcacatggtgagctccttttgcctgaaaagatgcagatctgcccaggtgctccacctgtacggggcaacgtattcagcggacggggaagatcgcgctcggtgtagtgcaggagcccacacactgctcgtgcaactacccgagagaacagtgctccttgatgcatacagcgagcacctggccgctgccctttgtaccaatcctaacctgatcgagctgtccctgtatcgcaacgccctggggtccaggggcgttaaactgctctgtcaggggttaaggcatcctaactgtaagttacagaacttgcggctgaagcggtgtagaatctcctcctctgcctgtgaggatctttctgccgcactgatcgccaataagaacctcacaaggatggatctgtccgggaatggagtcgggtttcctgggatgatgctgctttgcgagggcctacggcacccacagtgccggctacagatgattcagttacggaagtgccagctggagtccggagcttgtcaggagatggcctcggtgctggggacaaatcctcatctcgttgagctcgatttgactggcaatgcactggaggacctcggtcttcgacttctatgccagggactgcggcatccggtctgtcggcttaggactttgtggcttaaaatctgtagactgacagcagccgcatgcgacgagctcgcaagcaccctctcagtgaaccagtcgctgagagaattagatctgtcactcaatgagctaggggaccttggagtgctgcttctgtgcgagggtctgagacatcctacctgcaagttacagacactgaggctggacagttgtggcctaaccgccaaggcatgcgaaaatctgtacttcacactggggatcaatcagacgttaaccgatctctacctaaccaataacgccctgggcgacactggagtgcgactcctctgtaagcgtctgtcgcatcctggctgtaagctgcgggttctgtggctctttgggatggatctcaataaaatgacacattccagactcgctgctctccgggtgaccaaaccttacttagacattggatgttag

SEQ ID NO: 97475 - protein, 289 aa, Artificial Sequence
  derived and/or modified sequence
MFESFNVPGLYIAVQAVLALAASWTSRQVGERTLTGTVIDSGDGVTHVIPVAEGYVIGSCIKHIPIAGRDITYFIQQLLRDREVGIPPEQSLETAKAVKERYSYVCPDLVKEFNKYDTDGSKWIKQYTGINAISKKEFSIDVGYERFLGPEIFFHPEFANPDFTQPISEVVDEVIQNCPIDVRRPLYKNIVLSGGSTMFRDFGRRLQRDLKRTVDARLKLSEELSGGRLKPKPIDVQVITHHMQRYAVWFGGSMLASTPEFYQVCHTKKDYEEIGPSICRHNPVFGVMS

SEQ ID NO: 97476 - DNA, 1104 bp, Artificial Sequence
  derived and/or modified sequence
atgaagggcgtagatgatctcgacttctttattggagacgaggccatcgagaaacctacctacgcaaccaagtggccaatcaggcacgggattgttgaagattgggacttgatggagcgcttcatggagcaggttatcttcaagtatctcagagcggaaccagaggaccactatttcctgttaacggaacccccactgaacactccggaaaacagagagtatacagccgagatcatgtttgaaagctttaacgtaccagggctatatatcgcggtgcaggccgtgctcgcactggctgcaagttggacaagccgacaagtgggtgagaggactctgaccgggaccgtgatagactccggcgatggtgtcacccacgtaattccagtggccgaggggtatgtcattggcagctgcattaagcacatcccaatagccggaagagacatcacatacttcattcagcaactgctgagagatcgcgaggtcggaattccaccagagcaaagcctcgaaacggccaaggccgtgaaggaaagatattcgtacgtctgtcccgatctggtgaaggaattcaataaatacgacacagatgggagcaaatggatcaagcaatacacaggaatcaacgccatttccaagaaggagttctccatcgatgtcggttatgaacgattccttggccccgagatctttttccatccagagtttgccaacccggattttacgcagcccatttctgaagtggtcgatgaggtcattcagaactgtccaatcgatgtgcggcggccgctttataaaaacattgtactgagtggtggttccacaatgttcagagatttcgggaggcggctccagagagatctcaaaaggaccgtcgatgcccggttaaaattatccgaggaactctcagggggcagattgaaaccaaagcccatcgatgtgcaagtaattacacatcacatgcaacggtatgccgtgtggtttgggggctccatgcttgcgagcacacccgaattctatcaggtatgtcacaccaaaaaagactacgaggagataggaccttctatctgcagacataatcccgtctttggcgtgatgtcctag

SEQ ID NO: 97477 - DNA, 1071 bp, Artificial Sequence
  derived and/or modified sequence
atgctggagattcagaatcactctctgagttccttaccatggcccatcaggcacggtattgtcgaggattgggacctgatggaacgattcatggaacaggtcattttcaaatacctgcgggccgagccagaagaccattacttcctgctgacagagcctccgctcaataccccagaaaatcgcgagtataccgcagagatcatgtttgaaagttttaacgtgcctgggctttatattgcagtgcaagcagtgttagctctcgctgcctcctggacgagccgtcaagttggagagagaactcttacaggcacggttatcgacagcggggacggcgtcacccacgtgattcccgtggccgagggatatgtgatcggctcttgcatcaagcatattcccatcgctggacgcgatataacctactttatccagcagctcctgcgggacagagaggtgggtattcctccagagcagagccttgagacggctaaggcggtgaaggagcgctatagctatgtgtgcccggatctcgtaaaagaattcaataaatacgacactgacggttccaagtggatcaagcagtacaccgggattaacgccatttctaagaaagaattctccattgatgtgggctacgagaggttcctgggtcccgagattttctttcatccagagtttgccaacccagacttcacacagccgatctcggaggtggtagacgaagtgatacagaattgccctattgacgtgaggaggccgctgtataagaacattgtgttgtctggcggttcgaccatgtttcgggactttggccgtcgcctgcaacgggatcttaaaaggaccgtcgatgcaaggctaaagctgtcagaagagctttccggcgggagactgaagcccaaacccatcgatgtgcaggtgatcacacatcacatgcaacgatacgcagtttggttcggcgggtcgatgctcgcctcgacaccagagttttaccaggtttgtcacacaaagaaggactatgaagagattgggccttccatttgccgacataatcctgtcttcggtgtgatgtcttag

SEQ ID NO: 97478 - DNA, 870 bp, Artificial Sequence
  derived and/or modified sequence
atgttcgaatcatttaacgtcccgggcctttatattgcggttcaggccgtcctggctctggcggcgagttggacctcccggcaggtgggtgagcgaaccctgacaggcactgtgattgattcaggagacggagtcacccacgtcattccagtcgctgagggttacgtgatcggttcctgtataaagcatattccgatcgcaggccgcgacattacttattttatccagcagctgctgcgtgatagggaggttggcattccccctgagcaaagcctggagacagctaaagctgtgaaagaacggtatagttacgtgtgcccagacctagtaaaagaattcaataagtatgataccgacggctcgaagtggattaaacagtacacaggaattaacgccatctccaaaaaggaattctcgatcgatgtcggctatgagagattcctcggacctgagatcttctttcaccctgaatttgccaatccggacttcacacagcccatctcggaggttgttgacgaggtgatacagaactgtcctatcgacgtgagaaggccactgtacaagaacattgttcttagtggtggtagcaccatgtttagagatttcggacgacgactacaacgcgacctaaaaagaacagtggatgcgcgcctcaaactgtcggaagaactgtcaggcggtcgccttaaaccgaagccaatcgatgttcaggtgattactcaccatatgcagcgatatgctgtgtggttcggtggcagtatgttggcctctactccagaattttatcaggtctgtcacaccaagaaagactacgaggagattggcccctccatatgcaggcacaacccagtgtttggggtcatgtcctag

SEQ ID NO: 97479 - DNA, 1104 bp, Artificial Sequence
  derived and/or modified sequence
atgaagggcgtggatgacctggacttcttcatcggagatgaggccatcgagaagcccacctacgccaccaagtggcccatcagacatggaattgtggaggactgggacctgatggagcgcttcatggagcaggtgatcttcaagtacctgcgggcagagcctgaggaccactacttcctgctgacagagccccccctgaacaccccagagaaccgggagtacacagctgagatcatgtttgagagcttcaacgtgcccggcctgtacatcgctgtgcaggccgtgctggccctggccgcctcctggaccagccggcaggtgggggagaggaccctgactggaacagtgattgattctggagatggagtgacccacgtgattcctgtggccgagggctacgtgattggcagctgcatcaagcacatccccatcgccggccgggacatcacctacttcatccagcagctgctgcgggaccgggaggtgggcatccccccagagcagagcctggagacagccaaggctgtgaaggagcgctacagctatgtgtgcccagacctggtgaaggagttcaacaagtatgacacagatggcagcaagtggatcaagcagtacacaggcatcaatgccatcagcaagaaggagttcagcattgatgtgggctatgagcgcttcctgggccctgagatcttcttccaccctgagtttgccaacccagacttcacccagcccatcagcgaggtggtggatgaggtgatccagaactgccccattgatgtgagaagacccctgtacaagaacatcgtgctgagcggcggcagcaccatgttccgggactttggccggcggctgcagagggacctgaagaggacagtggatgcccggctgaagctgtctgaggagctgagcggcggccgcctgaagcccaagcccattgatgtgcaggtgatcacccaccacatgcagagatatgctgtgtggtttggaggctccatgctggccagcaccccagagttctaccaggtgtgccacaccaagaaggactatgaggagatcggccccagcatctgccgccacaaccctgtgtttggagtgatgtcctag

SEQ ID NO: 97480 - DNA, 1071 bp, Artificial Sequence
  derived and/or modified sequence
atgctggagatccagaaccacagcctgagcagcctgccctggcccatccgccacggcatcgtggaggactgggacctgatggagcgcttcatggagcaggtgatcttcaagtacctgcgggcagagcctgaggaccactacttcctgctgacagagccccccctgaacaccccagaaaatcgggagtacacagctgagatcatgtttgagagcttcaacgtgcccggcctgtacatcgctgtgcaggccgtgctggccctggccgcctcctggaccagccggcaggtgggggagaggaccctgaccggcaccgtcatcgacagcggagatggagtgacccacgtgattcctgtggccgagggctacgtgattggcagctgcatcaagcacatccccatcgccggccgggacatcacctacttcatccagcagctgctgcgggaccgggaggtgggcatccccccagagcagagcctggagacagccaaggctgtgaaggagcgctacagctatgtgtgcccagacctggtgaaggagttcaacaagtatgacacagatggcagcaagtggatcaagcagtacacaggcatcaatgccatcagcaagaaggagttcagcattgatgtgggctatgagcgcttcctgggccctgagatcttcttccaccctgagtttgccaacccagacttcacccagcccatcagcgaggtggtggatgaagtcatccagaactgccccattgatgtgcggcggcccctgtacaagaacatcgtgctgagcggcggcagcaccatgttccgggactttggaagaaggctgcagagggacctgaagaggacagtggatgcccggctgaagctgtctgaggagctgagcggcggccgcctgaagcccaagcccattgatgtgcaggtgatcacccaccacatgcagagatatgctgtgtggtttggaggctccatgctggccagcaccccagagttctaccaggtgtgccacaccaagaaggactatgaggagatcggccccagcatctgccgccacaaccctgtgtttggagtgatgtcctag

SEQ ID NO: 97481 - DNA, 870 bp, Artificial Sequence
  derived and/or modified sequence
atgtttgagagcttcaacgtgcccggcctgtacatcgctgtgcaggccgtgctggccctggccgcctcctggaccagccggcaggtgggggagaggaccctgactggaacagtgattgattctggagatggagtgacccacgtgattcctgtggccgagggctacgtgattggcagctgcatcaagcacatccccatcgccggccgggacatcacctacttcatccagcagctgctgcgggaccgggaggtgggcatccccccagagcagagcctggagacagccaaggctgtgaaggagcgctacagctatgtgtgcccagacctggtgaaggagttcaacaagtatgacacagatggcagcaagtggatcaagcagtacacaggcatcaatgccatcagcaagaaggagttcagcattgatgtgggctatgagcgcttcctgggccctgagatcttcttccaccctgagtttgccaacccagacttcacccagcccatcagcgaggtggtggatgaggtgatccagaactgccccattgatgtgagaagacccctgtacaagaacatcgtgctgagcggcggcagcaccatgttccgggactttggccggcggctgcagagggacctgaagaggacagtggatgcccggctgaagctgtctgaggagctgagcggcggccgcctgaagcccaagcccattgatgtgcaggtgatcacccaccacatgcagagatatgctgtgtggtttggaggctccatgctggccagcaccccagagttctaccaggtgtgccacaccaagaaggactatgaggagatcggccccagcatctgccgccacaaccctgtgtttggagtgatgtcctag

SEQ ID NO: 97482 - DNA, 1104 bp, Artificial Sequence
  derived and/or modified sequence
atgaagggcgtggacgacctggacttcttcatcggcgacgaggccattgagaaacccacgtatgctactaagtggccgataagacacggaatcgttgaagattgggacctgatggagagattcatggagcaggttatctttaaatatcttagggccgaaccagaagaccactactttctgctgacagaaccacccctgaatacacctgaaaaccgagaatacacggcggaaataatgttcgagtccttcaacgtccctggactctatattgccgtgcaggccgtgctggcacttgctgcctcctggactagcaggcaggtgggggaacgcaccttgacaggcaccgttatcgatagtggagatggggtgacccacgtgatccctgttgccgaaggctacgttatcggaagttgcattaaacacatacccattgctggtcgggacataacttattttatccagcagctgttgcgagacagggaagttgggattccacccgagcagagtttggagactgctaaagccgttaaagagcgttatagctacgtgtgtcctgacctggtcaaggaatttaataagtatgacacagatggatctaagtggataaagcaatatacaggtatcaatgccatcagcaagaaagaatttagtatcgatgtggggtacgagagattcctaggcccggagatattctttcatccagaatttgccaatcctgattttactcagcccatttccgaggtcgtcgacgaggtgatccagaattgtccaatagatgtcaggagacctctctacaagaatattgttctgagcgggggatccacaatgttcagggactttggtcggcggttgcaacgtgatttaaaacggaccgtggatgcacggctgaaactgtctgaggaactgtccggcggacggctcaagccaaaaccaattgacgtgcaggtgataactcaccatatgcagcgctatgccgtatggtttggaggctcaatgctggcgtccacacccgagttttatcaggtatgtcacacaaagaaagattacgaggaaattggccccagcatctgtagacataatcccgtgttcggcgtgatgtcatag

SEQ ID NO: 97483 - DNA, 1071 bp, Artificial Sequence
  derived and/or modified sequence
atgctggagatccagaaccacagcctgagcagcctgccctggcccatccggcacggtattgtggaagactgggacctaatggaacgatttatggaacaggtgatcttcaaataccttagggccgagcctgaagaccattactttttacttaccgagcctccattgaacactcccgagaatagagaatacaccgccgagatcatgttcgaaagctttaatgttcctggtctctatatcgcagtccaggccgttctggccctggctgccagttggacctctcgccaggttggagagagaactctcactggcaccgtgatcgactccggagacggtgtcacccatgtgatccctgtggccgagggatacgtgattggatcatgtatcaaacacatcccaatcgccgggcgggacatcacctacttcattcagcagcttttgcgcgatcgcgaggtcggcatacccccagaacagagcttggaaacagcaaaggccgtaaaggagaggtactcctatgtctgtcccgatctggtcaaggaattcaataagtacgacaccgacggaagcaaatggataaagcaatatacaggaatcaacgcgatttctaagaaagagttttctatagacgtcggctatgagaggtttttaggccccgagattttcttccatcctgaattcgccaatccagatttcacccagcctatttcagaggtcgtcgacgaagtcatccagaactgcccaatcgacgttaggaggcctctatataagaacattgtactttccggaggatccactatgttcagggatttcggtaggagattacagagggacctcaaaagaactgtagatgcccggcttaagctgagtgaagaactgagcggaggacgtctgaagcccaagcccatcgacgtgcaggtgatcacccatcacatgcaacgatacgcagtgtggtttggggggagtatgttggcatccacccctgaattttaccaggtctgtcacaccaagaaggattacgaggagattggcccctcaatttgtagacacaatcccgtgttcggcgtcatgagctag

SEQ ID NO: 97484 - DNA, 870 bp, Artificial Sequence
  derived and/or modified sequence
atgttcgagagcttcaacgtgcccggcctgtacatcgccgtgcaggctgtactggctcttgcagctagttggacctcccggcaggttggtgaaagaaccctgactgggactgtcatagacagtggtgacggtgttacgcacgtaattcctgtggctgagggctatgtcatcggctcctgtatcaaacacatcccgatagccggacgagatatcacttactttatccagcagttgctacgagacagggaagttggcatcccccccgaacagagtctggaaacagcaaaggccgttaaggagcggtattcttacgtctgtcccgacctggtaaaggaattcaacaaatacgacacagatggctctaagtggattaaacagtacacagggattaatgctatctcaaaaaaagagtttagcatcgatgtgggatatgagaggtttcttggtccagaaatcttcttccatcctgaattcgccaaccctgatttcacccagccaatctcggaagttgtggacgaggtaatccagaattgccctattgacgtgcggcgacccctgtacaagaacattgttttatcaggaggtagcactatgttccgcgattttggacggcggttacaaagggatctgaagcgtaccgtggatgcacgactgaagctgagtgaggagctgtcaggagggagactgaaacccaaaccaatcgacgtgcaggtcattacacaccatatgcagagatatgcagtgtggttcggtggatctatgcttgccagcacacccgagttctatcaggtatgtcatactaaaaaggactatgaagaaattggcccatcaatctgtagacataatcccgttttcggggttatgtcctag

SEQ ID NO: 97485 - DNA, 1104 bp, Artificial Sequence
  derived and/or modified sequence
atgaagggtgtcgacgaccttgatttctttatcggagacgaggccatcgagaagccgacgtacgcaaccaagtggccaattcgccacgggatcgtggaggattgggatctgatggaacgttttatggagcaagtgatttttaaatatctgcgggcagaaccagaggatcactattttctcctcaccgaacccccactgaacactcctgagaacagagaatatacggctgagatcatgttcgagagcttcaatgtccctggactctacatcgctgtccaggcagtgctggcactggcagccagttggacctcaagacaggttggagaacggacattgactgggacagttatcgactcaggagacggcgtgacacacgtcatacctgttgctgagggatatgtcatcgggagttgtattaagcatattccaattgccggaagagatataacctacttcatacagcagctcctacgggaccgggaagttggcatccctcccgaacagagcctcgagacagctaaggccgttaaagagcgctattcctatgtctgcccagatctagtgaaagaattcaataagtatgataccgatgggtccaaatggatcaaacagtacacagggatcaacgccatctctaagaaggagtttagtatcgatgttgggtatgagaggtttttaggaccagagattttcttccatcctgagttcgcaaacccagatttcactcagccaatctcggaggtcgtcgatgaagtcatacagaattgccctatagatgtgcgtcggcctctgtacaagaatattgtcttaagtggcggatctactatgttccgagattttggacgcaggttacagcgcgacttgaagcgtactgttgatgcccgtctcaaactcagcgaagagctgagtggcggacgtctgaagcccaaacccattgatgtgcaggttatcacacaccatatgcaacgttacgcagtgtggtttggtggatccatgctcgccagtaccccagagttctaccaggtgtgccacactaagaaggactatgaagagattgggccatcaatctgccgccacaatcccgtctttggtgtcatgtcctag

SEQ ID NO: 97486 - DNA, 1071 bp, Artificial Sequence
  derived and/or modified sequence
atgctggaaatccagaatcatagcttaagtagcctgccgtggcccattcgccacgggatcgtggaggactgggatctcatggagcggtttatggagcaagtcatttttaagtatcttcgggcagagcctgaagaccactacttcctgttgacggagcccccactgaacactcccgagaatagggagtatacggccgaaatcatgttcgaatcattcaatgtgcccggtctatatattgccgtccaagcggtattggcactcgctgcttcatggacaagtcgtcaggtcggtgagagaaccctcactggtaccgtaattgactccggcgacggagtgactcatgtgatcccggtggccgaaggatacgtgatcggctcttgtataaaacatatcccgattgcaggaagagatattacgtattttattcagcagctcctgcgcgatagggaggtgggtattccacctgagcaatccctcgagactgccaaagctgtgaaagagaggtatagttatgtttgtcctgacctggttaaggaatttaacaagtacgataccgatggatctaagtggatcaagcagtacacaggcatcaatgctattagcaaaaaggagttctccatcgacgtaggttatgaacgctttcttggtcctgagattttttttcatcccgagtttgccaaccctgatttcacccaaccaatctccgaggtagtggatgaagtgatacaaaactgccctattgacgtcaggaggcccttatataaaaatatcgttctctctggcggttccactatgttccgcgattttggccgacgactccagagggatttaaaaagaaccgtggacgccaggctcaaactttcagaagagctgtctggaggccgactgaagcccaagcccatcgacgtacaggtgattacccatcacatgcagagatacgcggtatggttcggcggatcaatgcttgcatcaacccctgagttttaccaggtgtgtcatacgaagaaggactatgaagaaatcggtccgagtatttgcagacacaacccggtgtttggagtcatgtcttag

SEQ ID NO: 97487 - DNA, 870 bp, Artificial Sequence
  derived and/or modified sequence
atgtttgagtccttcaatgtgcctgggctgtacatcgctgttcaagctgtgctagcattagccgcatcgtggacatcccgccaggtgggggaaaggacactcacggggactgtgatcgacagcggcgatggcgtcacacacgtaattcccgtggcagaagggtacgtgattggctcctgcataaagcacattcctattgctggaagagacatcacctattttatccagcaactgctaagagaccgggaggtcggcattcctccagaacaaagcctggaaaccgccaaggcagtgaaggagcgctattcctacgtttgcccagacctggtgaaggaattcaacaagtacgataccgacgggagcaaatggatcaagcagtacactggcatcaatgccatctccaagaaagagtttagcatcgacgtcggatatgagaggttcctggggcctgagattttcttccaccctgagttcgccaatcctgatttcacacagccaatcagtgaggtcgttgacgaggtaatccagaactgcccaatagatgttagaagacctttgtataagaatatcgtgttgtccggtggctccaccatgttccgcgacttcgggaggagattacagagggacctcaagaggactgtcgatgcacggctgaaactttcagaggagctatcagggggaaggttgaaacccaagccaattgacgtgcaggtaataacacaccacatgcagcggtacgcagtctggttcggaggcagtatgcttgcctcaactcctgagttctatcaggtctgccacactaagaaggactatgaggagattggcccatccatctgccgccataatccagtatttggggtgatgagctag

SEQ ID NO: 97488 - DNA, 1417 bp, Artificial Sequence
  derived and/or modified sequence
gaccgagcctgctgctttcttgctactgcttcggcttcccggctaccccccggacggtgaaggcggcccagctgtggatggtcagatagcccttgtctcccgccgccaatctctggcccctagcagcacggagcagacggcggcagcagcagcagcaggcgaggaggaagatggcgggacggctgccggcctgtgtggtggactgtggcacggggtatacaaaactaggatatgctggaaatacagaaccacagtttatcatcccttccttggccaatccgccatggtatagttgaagattgggacttaatggaaaggtttatggagcaagtgatctttaaatatttaagggcagaacctgaagaccattattttcttttgactgaacctccattgaatactccagaaaacagggaatatactgctgaaataatgtttgagtccttcaatgttccaggcttgtacattgctgtgcaggctgttcttgccttagctgcatcttggacctcaagacaagtaggagaacggacgttgaccggtacggtaatagacagtggagatggtgtcactcatgtcattcctgtggctgaagggtatgtgattggcagctgtattaaacacattccaatcgcaggacgagatataacatattttattcagcaactgctgagagaccgagaagtaggaatccctccagaacaatccttggaaactgctaaggcagtaaaggagcgctatagttatgtctgcccagatttagtaaaagaatttaacaagtatgatacagatgggtcaaaatggattaaacagtatactggaatcaatgctatctcaaagaaagagttttctatcgatgttggttatgagagatttttgggacctgaaatcttttttcatccagagtttgctaatccagactttacacaacctatctcagaagttgtagatgaagtaattcagaattgtcctattgatgtcagacgtcctctctacaagaatattgtcctctctggaggttcaaccatgttcagggactttggacgtcgcttgcaaagagatttgaaaagaactgtagatgcccggctgaaattaagtgaggaattgagtggtggtagattgaagccaaaacctattgatgtacaagtcattacacaccacatgcagcgatatgcagtttggtttggaggatcaatgctggcttccacgcctgagttctaccaagtatgccacaccaaaaaggattatgaagaaattggacctagcatttgtcgtcacaatccagtgtttggagtcatgtcgtaaaattggcttcatagttattggggttagggaggtggggaagagataatctttctgattacctgttttgtctggatggctggttttgaggttttaaacctgacttgaaatagtaaca

SEQ ID NO: 97489 - DNA, 1557 bp, Artificial Sequence
  derived and/or modified sequence
gctttcttgctactgcttcggcttcccggctaccccccggacggtgaaggcggcccagctgtggatggtcagatagcccttgtctcccgccgccaatctctggcccctagcagcacggagcagacggcggcagcagcagcagcaggcgaggagggtgatgaagcaatagaaaaacctacatatgcaacaaagtggccaatccgccatggtatagttgaagattgggacttaatggaaaggtttatggagcaagtgatctttaaatatttaagggcagaacctgaagaccattattttcttttgactgaacctccattgaatactccagaaaacagggaatatactgctgaaataatgtttgagtccttcaatgttccaggcttgtacattgctgtgcaggctgttcttgccttagctgcatcttggacctcaagacaagtaggagaacggacgttgaccggtacggtaatagacagtggagatggtgtcactcatgtcattcctgtggctgaagggtatgtgattggcagctgtattaaacacattccaatcgcaggacgagatataacatattttattcagcaactgctgagagaccgagaagtaggaatccctccagaacaatccttggaaactgctaaggcagtaaaggagcgctatagttatgtctgcccagatttagtaaaagaatttaacaagtatgatacagatgggtcaaaatggattaaacagtatactggaatcaatgctatctcaaagaaagagttttctatcgatgttggttatgagagatttttgggacctgaaatcttttttcatccagagtttgctaatccagactttacacaacctatctcagaagttgtagatgaagtaattcagaattgtcctattgatgtcagacgtcctctctacaagaatattgtcctctctggaggttcaaccatgttcagggactttggacgtcgcttgcaaagagatttgaaaagaactgtagatgcccggctgaaattaagtgaggaattgagtggtggtagattgaagccaaaacctattgatgtacaagtcattacacaccacatgcagcgatatgcagtttggtttggaggatcaatgctggcttccacgcctgagttctaccaagtatgccacaccaaaaaggattatgaagaaattggacctagcatttgtcgtcacaatccagtgtttggagtcatgtcgtaaaattggcttcatagttattggggttagggaggtggggaagagataatctttctgattacctgttttgtctggatggctggttttgaggttttaaacctgacttgaaatagtaacaccaaacatgattatacaggaatattttaataagtgtatcaccatgcagatgtagaagagagcgaaagtgattgtgtttttctttagattgaatatttgaatcttatgtgtaacaaaaagaagtgggttttagttctttctgtgccctgatattttgtatattaatgaattatccaagattcgatgggatttatcagtgtgtagatagctctataatgc

SEQ ID NO: 97490 - DNA, 1104 bp, Artificial Sequence
  derived and/or modified sequence
atgaagggcgtggacgacctggacttcttcatcggcgacgaggccatcgagaagcccacctacgccaccaagtggcccatcagacacggcatcgtggaggactgggacctgatggagagattcatggagcaggtgatcttcaagtacctgagagccgagcccgaggaccactacttcctgctgaccgagccccccctgaacacccccgagaacagagagtacaccgccgagatcatgttcgagagcttcaacgtgcccggcctgtacatcgccgtgcaggccgtgctggccctggccgccagctggaccagcagacaggtgggcgagagaaccctgaccggcaccgtgatcgacagcggcgacggcgtgacccacgtgatccccgtggccgagggctacgtgatcggcagctgcatcaagcacatccccatcgccggcagagacatcacctacttcatccagcagctgctgagagacagagaggtgggcatcccccccgagcagagcctggagaccgccaaggccgtgaaggagagatacagctacgtgtgccccgacctggtgaaggagttcaacaagtacgacaccgacggcagcaagtggatcaagcagtacaccggcatcaacgccatcagcaagaaggagttcagcatcgacgtgggctacgagagattcctgggccccgagatcttcttccaccccgagttcgccaaccccgacttcacccagcccatcagcgaggtggtggacgaggtgatccagaactgccccatcgacgtgagaagacccctgtacaagaacatcgtgctgagcggcggcagcaccatgttcagagacttcggcagaagactgcagagagacctgaagagaaccgtggacgccagactgaagctgagcgaggagctgagcggcggcagactgaagcccaagcccatcgacgtgcaggtgatcacccaccacatgcagagatacgccgtgtggttcggcggcagcatgctggccagcacccccgagttctaccaggtgtgccacaccaagaaggactacgaggagatcggccccagcatctgcagacacaaccccgtgttcggcgtgatgagctag

SEQ ID NO: 97491 - DNA, 1071 bp, Artificial Sequence
  derived and/or modified sequence
atgctggagatccagaaccacagcctgagcagcctgccctggcccatcagacacggcatcgtggaggactgggacctgatggagagattcatggagcaggtgatcttcaagtacctgagagccgagcccgaggaccactacttcctgctgaccgagccccccctgaacacccccgagaacagagagtacaccgccgagatcatgttcgagagcttcaacgtgcccggcctgtacatcgccgtgcaggccgtgctggccctggccgccagctggaccagcagacaggtgggcgagagaaccctgaccggcaccgtgatcgacagcggcgacggcgtgacccacgtgatccccgtggccgagggctacgtgatcggcagctgcatcaagcacatccccatcgccggcagagacatcacctacttcatccagcagctgctgagagacagagaggtgggcatcccccccgagcagagcctggagaccgccaaggccgtgaaggagagatacagctacgtgtgccccgacctggtgaaggagttcaacaagtacgacaccgacggcagcaagtggatcaagcagtacaccggcatcaacgccatcagcaagaaggagttcagcatcgacgtgggctacgagagattcctgggccccgagatcttcttccaccccgagttcgccaaccccgacttcacccagcccatcagcgaggtggtggacgaggtgatccagaactgccccatcgacgtgagaagacccctgtacaagaacatcgtgctgagcggcggcagcaccatgttcagagacttcggcagaagactgcagagagacctgaagagaaccgtggacgccagactgaagctgagcgaggagctgagcggcggcagactgaagcccaagcccatcgacgtgcaggtgatcacccaccacatgcagagatacgccgtgtggttcggcggcagcatgctggccagcacccccgagttctaccaggtgtgccacaccaagaaggactacgaggagatcggccccagcatctgcagacacaaccccgtgttcggcgtgatgagctag

SEQ ID NO: 97492 - DNA, 870 bp, Artificial Sequence
  derived and/or modified sequence
atgttcgagagcttcaacgtgcccggcctgtacatcgccgtgcaggccgtgctggccctggccgccagctggaccagcagacaggtgggcgagagaaccctgaccggcaccgtgatcgacagcggcgacggcgtgacccacgtgatccccgtggccgagggctacgtgatcggcagctgcatcaagcacatccccatcgccggcagagacatcacctacttcatccagcagctgctgagagacagagaggtgggcatcccccccgagcagagcctggagaccgccaaggccgtgaaggagagatacagctacgtgtgccccgacctggtgaaggagttcaacaagtacgacaccgacggcagcaagtggatcaagcagtacaccggcatcaacgccatcagcaagaaggagttcagcatcgacgtgggctacgagagattcctgggccccgagatcttcttccaccccgagttcgccaaccccgacttcacccagcccatcagcgaggtggtggacgaggtgatccagaactgccccatcgacgtgagaagacccctgtacaagaacatcgtgctgagcggcggcagcaccatgttcagagacttcggcagaagactgcagagagacctgaagagaaccgtggacgccagactgaagctgagcgaggagctgagcggcggcagactgaagcccaagcccatcgacgtgcaggtgatcacccaccacatgcagagatacgccgtgtggttcggcggcagcatgctggccagcacccccgagttctaccaggtgtgccacaccaagaaggactacgaggagatcggccccagcatctgcagacacaaccccgtgttcggcgtgatgagctag

SEQ ID NO: 97493 - protein, 579 aa, Artificial Sequence
  derived and/or modified sequence
MTRLERSSHRTVICKVPGELVAREGKCASRARESEIPSEEGYCDFNSRPNENSYCYQLLRQLNEQRKKGILCDVSIVVSGKIFKAHKNILVAGSRFFKTLYCFSNKESPNQNNTTHLDIAAVQGFSVILDFLYSGNLVLTSQNAIEVMTVASYLQMSEVVQTCRNFIKDALNISIKSEAPESVVVDYNNRKPVNRDGLSSSRDQKIASFWATRNLTNLASNVKIENDGCNVDEGQIENYQMNDSSWVQDGSPEMAENESEGQTKVFIWNNMGSQGIQETGKTRRKNQTTKRFIYNIPPNNETNLEDCSVMQPPVAYPEENTLLIKEEPDLDGALLSGPDGDRNVNANLLAEAGTSQDGGDAGTSHDFKYGLMPGPSNDFKYGLIPGTSNDFKYGLIPGASNDFKYGLLPESWPKQETWENGESSLIMNKLKCPHCSYVAKYRRTLKRHLLIHTGVRSFSCDICGKLFTRREHVKRHSLVHKKDKKYKCMVCKKIFMLAASVGIRHGSRRYGVCVDCADKSQPGGQEGVDQGQDTEFPRDEEYEENEVGEADEELVDDGEDQNDPSRWDESGEVCMSLDD

SEQ ID NO: 97494 - DNA, 1740 bp, Artificial Sequence
  derived and/or modified sequence
atgaccagactggagagaagcagccacagaaccgtgatctgcaaggtgcccggcgagctggtggccagagagggcaagtgcgccagcagagccagagagagcgagatccccagcgaggagggctactgcgacttcaacagcagacccaacgagaacagctactgctaccagctgctgagacagctgaacgagcagagaaagaagggcatcctgtgcgacgtgagcatcgtggtgagcggcaagatcttcaaggcccacaagaacatcctggtggccggcagcagattcttcaagaccctgtactgcttcagcaacaaggagagccccaaccagaacaacaccacccacctggacatcgccgccgtgcagggcttcagcgtgatcctggacttcctgtacagcggcaacctggtgctgaccagccagaacgccatcgaggtgatgaccgtggccagctacctgcagatgagcgaggtggtgcagacctgcagaaacttcatcaaggacgccctgaacatcagcatcaagagcgaggcccccgagagcgtggtggtggactacaacaacagaaagcccgtgaacagagacggcctgagcagcagcagagaccagaagatcgccagcttctgggccaccagaaacctgaccaacctggccagcaacgtgaagatcgagaacgacggctgcaacgtggacgagggccagatcgagaactaccagatgaacgacagcagctgggtgcaggacggcagccccgagatggccgagaacgagagcgagggccagaccaaggtgttcatctggaacaacatgggcagccagggcatccaggagaccggcaagaccagaagaaagaaccagaccaccaagagattcatctacaacatcccccccaacaacgagaccaacctggaggactgcagcgtgatgcagccccccgtggcctaccccgaggagaacaccctgctgatcaaggaggagcccgacctggacggcgccctgctgagcggccccgacggcgacagaaacgtgaacgccaacctgctggccgaggccggcaccagccaggacggcggcgacgccggcaccagccacgacttcaagtacggcctgatgcccggccccagcaacgacttcaagtacggcctgatccccggcaccagcaacgacttcaagtacggcctgatccccggcgccagcaacgacttcaagtacggcctgctgcccgagagctggcccaagcaggagacctgggagaacggcgagagcagcctgatcatgaacaagctgaagtgcccccactgcagctacgtggccaagtacagaagaaccctgaagagacacctgctgatccacaccggcgtgagaagcttcagctgcgacatctgcggcaagctgttcaccagaagagagcacgtgaagagacacagcctggtgcacaagaaggacaagaagtacaagtgcatggtgtgcaagaagatcttcatgctggccgccagcgtgggcatcagacacggcagcagaagatacggcgtgtgcgtggactgcgccgacaagagccagcccggcggccaggagggcgtggaccagggccaggacaccgagttccccagagacgaggagtacgaggagaacgaggtgggcgaggccgacgaggagctggtggacgacggcgaggaccagaacgaccccagcagatgggacgagagcggcgaggtgtgcatgagcctggacgactag

SEQ ID NO: 97495 - DNA, 1740 bp, Artificial Sequence
  derived and/or modified sequence
atgacccgtctggagcgaagcagccaccggactgtgatctgtaaagtgccaggcgagctggtggcgagagagggaaagtgcgcctcccgagcaagggaaagtgaaatcccctccgaggaggggtattgtgacttcaattctcgacctaatgaaaactcttattgctatcagttgctgaggcagctgaatgagcagcgtaaaaagggcatcttgtgtgatgtcagcattgttgtgtcaggaaaaattttcaaagctcataagaacattctagtagcagggagcaggtttttcaagaccctctattgtttcagcaataaggaatccccaaatcaaaacaacacgacacacctcgacatcgccgctgtccagggcttttccgtgatactcgattttctgtatagcgggaatctagtgttgacctcccagaatgctatcgaggtaatgaccgtggcatcatatttacagatgagcgaagtcgtgcaaacgtgcaggaactttatcaaggacgctttaaacatcagtatcaagtcggaagctcctgaatctgtggttgtggattataacaaccgcaaacccgtgaatagagacggcctcagtagctccagagaccaaaaaattgccagcttttgggctacacgcaacctgaccaatctcgctagcaatgtaaagattgagaacgacggatgtaacgtggacgaagggcagattgaaaattatcagatgaatgactcaagctgggtgcaggatgggtcaccagaaatggctgagaatgagagtgaaggccagacaaaagtgttcatttggaataacatggggagccagggtatccaggaaaccgggaagaccagacgcaaaaaccagaccaccaaacggttcatttataacatccctcccaataacgaaactaatcttgaggattgttcagtgatgcagccgcccgtggcctaccccgaagagaatacactattgatcaaggaggagccagatctcgatggggctctgctctctggcccagatggagaccggaacgtgaacgctaatctactagctgaggctggaacgtctcaggacggaggggatgccggcaccagtcacgattttaagtacggcttgatgccaggaccatccaatgattttaagtacgggctcatccccggcacatcaaatgacttcaagtatgggctcatcccaggagcctccaatgacttcaagtatggcctgctgcccgaaagctggccaaagcaggagacatgggagaacggtgagagcagcctgatcatgaataagctgaagtgcccacattgcagctacgtggccaaataccgacggacgcttaagagacacctactgatccataccggtgtccgctcattctcttgtgatatatgtggcaagctgtttactcggagggaacacgtgaaaagacattcgttagtgcacaaaaaagacaaaaagtacaagtgcatggtatgcaaaaaaattttcatgcttgccgcgagtgtggggatcaggcatggctctagacgatacggcgtctgcgtagactgtgccgacaagtctcagcccggcggccaagaaggggtggatcagggccaggacaccgaatttccaagagatgaggaatatgaggagaacgaagtgggtgaggcagacgaagagttggtcgacgatggcgaagatcagaacgaccctagtaggtgggatgaatcaggggaggtgtgtatgagcctcgatgattag

SEQ ID NO: 97496 - DNA, 1740 bp, Artificial Sequence
  derived and/or modified sequence
atgacccggctggagaggagcagccacaggacagtcatctgcaaggtgcctggagagctggtggcccgggagggcaaatgtgccagccgggcccgggagagcgagatccccagcgaggagggctactgtgacttcaacagccggcccaatgaaaattcctactgctaccagctgctgcggcagctgaatgagcagaggaagaagggcatcctgtgtgatgtgtccatcgtggtgtctgggaagatcttcaaggcccacaagaacatcctggtggccggcagccgcttcttcaagaccctgtactgcttcagcaacaaggagagccccaaccagaacaacaccacccacctggacattgctgctgtgcagggcttcagcgtcatcctggacttcctgtacagcggcaacctggtgctgaccagccagaatgccatcgaggtgatgacagtggccagctacctgcagatgtctgaggtggtgcagacctgcaggaacttcatcaaggatgccctgaacatcagcatcaagtctgaggcccctgagagcgtggtggtggactacaacaacaggaagcctgtgaacagagatggcctgagcagcagccgggaccagaagatcgccagcttctgggccaccaggaacctgaccaacctggccagcaatgtgaagattgaaaatgatggctgcaatgtggatgagggccagatcgagaactaccagatgaatgacagctcctgggtgcaggacggcagccctgagatggccgagaatgaaagtgagggccagaccaaggtgttcatctggaacaacatgggcagccagggcatccaggagaccgggaagaccaggaggaagaaccagaccaccaagcgcttcatctacaacatcccccccaacaatgagaccaacctggaggactgcagcgtgatgcagccccctgtggcctacccagaggagaacaccctgctgatcaaggaggagccagacctggatggagccctgctgagcggcccagatggagacagaaatgtgaatgccaacctgctggccgaggccggcaccagccaggatggaggagatgctggcaccagccatgacttcaagtatggcctgatgcctggccccagcaatgacttcaagtatggcctcatccctggcaccagcaatgacttcaagtatggcctcatccctggggccagcaatgacttcaagtatggcctgctgcctgagagctggcccaagcaggagacctgggagaatggagagagcagcctcatcatgaacaagctgaagtgcccccactgcagctatgtggccaagtacagaaggaccctgaagaggcacctgctgatccacactggagtgcgctccttcagctgtgacatctgtgggaagctgttcacccggcgggagcacgtgaagaggcacagcctggtgcacaagaaggacaagaagtacaagtgcatggtgtgcaagaagatcttcatgctggccgcctctgtgggcatcagacatggcagccgccgctatggagtgtgtgtggactgtgccgacaagagccagcccggcggccaggagggcgtggaccagggccaggacacagagttccccagagatgaggagtatgaggagaatgaggtgggggaggctgatgaggagctggtggatgatggagaggaccagaatgaccccagccgctgggatgagagcggggaggtgtgcatgagcctggatgactag

SEQ ID NO: 97497 - DNA, 1740 bp, Artificial Sequence
  derived and/or modified sequence
atgacccggctggagcggagcagccaccggaccgtgatctgcaaggtcccaggcgagctggttgcaagggagggcaagtgtgcaagcagggcacgcgaaagtgaaatcccttcagaggagggatactgcgatttcaacagcagacctaacgagaacagctactgctaccagctcctcaggcagttgaatgagcagcgcaagaagggaatcctgtgtgatgtctcgatagtagttagcggcaagatattcaaagcccataagaacattctggtggctggttcccggtttttcaagaccctgtactgttttagcaataaggagagccctaatcagaataacaccactcatctcgatatcgccgcagtgcaaggtttctccgtaattctggacttcctctattcaggcaatctggtgcttacatcacaaaatgccattgaggttatgaccgttgcaagttacctccaaatgagcgaagtggtgcagacatgccggaacttcattaaggatgccctcaacatttcaatcaagagcgaagctcctgagtccgtggtcgtggactataataatagaaaacccgttaaccgggatggcctgagctctagcagggaccagaagatcgccagcttctgggccacgcgaaaccttaccaatctggcctcaaacgtaaaaatcgagaacgacggctgtaacgtggacgagggacagatcgagaactaccaaatgaacgactcaagttgggtgcaagatggatctcctgaaatggctgagaacgagtcagaaggacaaaccaaagtgtttatatggaacaatatgggatcccaagggattcaggaaactggaaaaactcgtcgcaagaatcagaccactaaaagatttatttacaatataccccccaacaatgagacaaatctggaggactgttccgtcatgcagcctccagtggcctatccagaggagaatacactccttattaaggaagagcctgacttggatggcgccctgctctccggtccggacggcgaccgaaatgtgaatgccaacctgctcgccgaggccggcaccagccaagacggcggtgatgctggtacaagtcatgatttcaaatatggcctgatgcctggaccatcaaacgatttcaaatatggacttatccccggcacctctaatgatttcaaatacggactgatcccaggcgcaagcaatgacttcaagtatggcctgttacctgagagttggccaaagcaggagacatgggagaatggcgagagttctctcataatgaataaactcaagtgcccacactgttcgtatgtggccaaataccggaggaccttgaaaagacatttgctgatccacacaggcgtgagaagcttctcctgcgacatctgcgggaagctgtttacaagaagggaacacgtcaagcgacatagcctggtacacaagaaggacaagaagtacaagtgcatggtgtgcaagaaaattttcatgctggctgcttccgtgggaatcagacacggctccagaagatatggcgtttgtgtggattgtgctgacaaatcgcagcccgggggccaggagggggtggatcagggccaggacacagaatttcctcgcgatgaagaatacgaggaaaacgaggtcggggaggcagatgaggagctcgttgatgacggcgaggaccagaacgacccctcccgatgggatgaatcaggcgaagtctgtatgagtctggatgactag

SEQ ID NO: 97498 - DNA, 1740 bp, Artificial Sequence
  derived and/or modified sequence
atgaccaggctggagaggtcatctcatcggacagtcatttgtaaggtcccaggagaacttgtggccagggagggtaaatgcgccagtagggcaagggaatccgagatcccgagcgaggagggatactgcgattttaatagcagaccaaatgaaaattcttattgctaccagctgttgcgacagctcaatgaacagcggaagaagggcatcctctgtgatgtcagcatcgtcgtgtcaggcaagatctttaaggcacacaagaacatattggtcgcgggatcacgcttttttaagaccctgtattgtttctctaataaagagtcccccaaccagaataacacgactcatctagacattgcggctgtgcaaggcttttctgtgatactcgattttctctatagcggaaatctcgtcttaacaagccagaatgccatagaggtgatgaccgtagcgtcctacctgcaaatgtccgaagttgtccagacctgtcgcaatttcatcaaagatgcactgaacatcagcattaaatccgaagcacccgaatccgttgtagtcgactataacaatagaaaaccggtgaatcgcgacggcctgtccagcagccgtgaccaaaagatcgcttcattctgggccaccaggaatctgacaaacctggcctcaaatgttaagatagagaatgatggatgtaacgtggatgaagggcagattgaaaattaccagatgaatgactcatcctgggtccaggatggctcccctgaaatggcagagaacgaatcagaaggccaaaccaaagtgttcatatggaataacatgggctcccaaggtatccaggagaccggcaagactcgacgcaagaatcagaccaccaagcgcttcatctacaacatcccacccaataatgaaacgaatctggaagactgtagtgtgatgcaaccaccggtcgcttatccggaggaaaataccctgttgatcaaggaagaaccagatctagacggagctctgttaagtggcccagacggagatagaaatgtcaacgccaacctattggctgaagccggaacatcacaggacggcggagatgccggtacttcccacgacttcaaatacggtctaatgcccggaccgtcaaacgattttaagtatgggctgattcccggaacctctaatgacttcaaatacgggctcattcctggagcctccaacgactttaaatatgggttgctgcccgagagctggccaaagcaggagacctgggaaaatggagaatcttctttaataatgaataaactcaaatgccctcattgttcctacgttgcaaagtaccggcgaacacttaagcgtcacttgcttatccacactggggtgcgctctttcagttgcgacatctgtggaaagctcttcacccgtagggagcatgttaagcgacactcccttgtgcataagaaagacaaaaagtataagtgcatggtctgtaaaaaaatctttatgctagctgccagcgttggaatccgccatggctccaggagatatggcgtttgcgtcgactgtgctgacaagtcccagccgggaggtcaggaaggcgtggatcagggacaagacactgagtttccaagggatgaagaatacgaagagaatgaagtcggagaggccgatgaggaactagtggatgatggtgaggatcagaacgatccctctcgctgggatgagtctggagaggtttgcatgtccctggatgattag

SEQ ID NO: 97499 - DNA, 2181 bp, Artificial Sequence
  derived and/or modified sequence
gaaatgactactgtccggggcccgaggtgctgcctcgcacaatgcatcaaaggaggttgtgtccgtggtcgtaacctcttcgcgtgaaaggcaccgcctggtccagtctttgtgaaggaacaaaataagttcacttccttgggcaccgccacccaccctcagcaaatgacaaggctggagcgcagctcccaccgcacagttatttgcaaagtcccaggtgaactcgtggcgagagaaggaaaatgcgcgtcccgggcgcgggagtcagaaataccatcagaggaggggtactgtgactttaatagtaggccaaatgagaactcttattgctatcaacttctgcgacaactaaatgaacagagaaagaaaggtattctttgtgatgtcagcattgtggtaagcggaaaaatcttcaaagctcataagaacatcctggttgcaggcagccgtttctttaagactttatattgcttttcaaacaaagaaagccctaaccaaaacaatactacccacttagatattgctgcagttcaaggtttttcagtcatcttggacttcttgtattctggtaacctggtgctcacaagccaaaatgccattgaagttatgaccgtggccagctatcttcaaatgagtgaagttgttcaaacttgccgaaatttcattaaagatgccttaaatataagcattaaatcagaagctccagagtctgtagttgtggactataataatagaaaaccagttaatagagatggtctgtcttcatcacgggatcaaaaaattgccagtttttgggcaacacggaatcttaccaatttggcaagtaatgtaaagattgaaaatgatggttgtaatgtcgacgagggccaaatagaaaactaccaaatgaatgacagtagttgggtccaggatggatctcctgaaatggctgaaaatgaatctgaaggtcaaacaaaagtgtttatttggaataatatgggctcccagggaattcaagagactggcaaaacaaggaggaaaaaccaaactacaaaaagatttatttataatattccacctaataatgaaacgaatttagaagattgctcagtaatgcagccacctgttgcctatccagaagaaaatacactactcatcaaggaagaaccagatttagatggtgctctactctcggggccagatggtgataggaatgtgaatgcaaatttattggctgaagctggcactagtcaagatggaggtgatgctggtacttcacatgatttcaagtatggtttgatgcctggtccttcaaatgatttcaagtatggattgataccaggtacttcaaatgatttcaagtatggattgataccaggtgcttcaaatgatttcaagtatggattattgccagaatcttggccaaaacaagaaacctgggaaaatggtgaatcatctctaatcatgaacaagttaaaatgccctcattgtagctatgtagccaaatacagacgaacactaaaaaggcacttgctcattcacacaggagtgagatcatttagctgtgatatttgtggaaaactgtttactcgaagagaacatgtaaaaagacattccctggtgcataaaaaggataaaaaatacaaatgtatggtgtgtaagaagatcttcatgttagcagccagtgttggaataagacatggatctcgacgttatggtgtttgtgtagactgtgcagataaatcacagccaggagggcaagaaggtgtagatcagggacaggatacagaattccctcgggatgaagaatacgaggagaatgaagtaggagaagctgatgaagagctagttgatgatggagaagatcagaatgatccctctcgatgggatgaatcaggagaagtttgtatgtctctagatgattaactgacctactatactcctcaaggatgctgcatttggacctaatatgaatcgacaatttggattgttgaacttgaaggcttgcaaaatatggtacatgctggatagtagttatgttgctgtgaaaactgtagggtcaaagccttatagcaaaaaaaatttttttttatatttgcacaggactatacagcaaacaaccatgtggttggattacatggagtccccacatactcagtcagttatcaaagtaaaatattttttatttataggatatacagt

SEQ ID NO: 97500 - protein, 326 aa, Artificial Sequence
  derived and/or modified sequence
MRNWLVLLCPCVLGAALHLWLRLRSPPPACASGAGPAGGVSLLLPRLECNGAVSAHPNLHLPGSRDSPASASQVAGITDQLALFPQWKSTHYDVVVGVLSARNNHELRNVIRSTWMRHLLQHPTLSQRVLVKFIIGAHGCEVPVEDREDPYSCKLLNITNPVLNQEIEAFSLSEDTSSGLPEDRVVSVSFRVLYPIVITSLGVFYDANDVGFQRNITVKLYQAEQEEALFIARFSPPSCGVQVNKLWYKPVEQFILPESFEGTIVWESQDLHGLVSRNLHKVTVNDGGGVLRVITAGEGALPHEFLEGVEGVAGGFIYTIQGKFAS

SEQ ID NO: 97501 - protein, 321 aa, Artificial Sequence
  derived and/or modified sequence
MRNWLVLLCPCVLGAALHLWLRLRSPPPACASGAGPAGGVSLLLPRLECNGAVSAHPNLHLPGSRDSPASASQVAGITDQLALFPQWKSTHYDVVVGVLSARNNHELRNVIRSTWMRHLLQHPTLSQRVLVKFIIGAHGCEVPVEDREDPYSCKLLNITNPVLNQEIEAFSLSEDTSSGLPEDRVVSVSFRVLYPIVITSLGVFYDANDVGFQRNITVKLYQAEQEEALFIARFSPPSCGVQVNKLWYKPVEQFILPESFEGTIVWESQDLHGLVSRNLHKVTVNDGGGVLRVITAGEGALPHEFLEGVEGVAGGFIYTIQ

SEQ ID NO: 97502 - DNA, 981 bp, Artificial Sequence
  derived and/or modified sequence
atgagaaactggctggtgctgctgtgcccctgcgtgctgggcgccgccctgcacctgtggctgagactgagaagccccccccccgcctgcgccagcggcgccggccccgccggcggcgtgagcctgctgctgcccagactggagtgcaacggcgccgtgagcgcccaccccaacctgcacctgcccggcagcagagacagccccgccagcgccagccaggtggccggcatcaccgaccagctggccctgttcccccagtggaagagcacccactacgacgtggtggtgggcgtgctgagcgccagaaacaaccacgagctgagaaacgtgatcagaagcacctggatgagacacctgctgcagcaccccaccctgagccagagagtgctggtgaagttcatcatcggcgcccacggctgcgaggtgcccgtggaggacagagaggacccctacagctgcaagctgctgaacatcaccaaccccgtgctgaaccaggagatcgaggccttcagcctgagcgaggacaccagcagcggcctgcccgaggacagagtggtgagcgtgagcttcagagtgctgtaccccatcgtgatcaccagcctgggcgtgttctacgacgccaacgacgtgggcttccagagaaacatcaccgtgaagctgtaccaggccgagcaggaggaggccctgttcatcgccagattcagcccccccagctgcggcgtgcaggtgaacaagctgtggtacaagcccgtggagcagttcatcctgcccgagagcttcgagggcaccatcgtgtgggagagccaggacctgcacggcctggtgagcagaaacctgcacaaggtgaccgtgaacgacggcggcggcgtgctgagagtgatcaccgccggcgagggcgccctgccccacgagttcctggagggcgtggagggcgtggccggcggcttcatctacaccatccagggcaagttcgccagctag

SEQ ID NO: 97503 - DNA, 966 bp, Artificial Sequence
  derived and/or modified sequence
atgagaaactggctggtgctgctgtgcccctgcgtgctgggcgccgccctgcacctgtggctgagactgagaagccccccccccgcctgcgccagcggcgccggccccgccggcggcgtgagcctgctgctgcccagactggagtgcaacggcgccgtgagcgcccaccccaacctgcacctgcccggcagcagagacagccccgccagcgccagccaggtggccggcatcaccgaccagctggccctgttcccccagtggaagagcacccactacgacgtggtggtgggcgtgctgagcgccagaaacaaccacgagctgagaaacgtgatcagaagcacctggatgagacacctgctgcagcaccccaccctgagccagagagtgctggtgaagttcatcatcggcgcccacggctgcgaggtgcccgtggaggacagagaggacccctacagctgcaagctgctgaacatcaccaaccccgtgctgaaccaggagatcgaggccttcagcctgagcgaggacaccagcagcggcctgcccgaggacagagtggtgagcgtgagcttcagagtgctgtaccccatcgtgatcaccagcctgggcgtgttctacgacgccaacgacgtgggcttccagagaaacatcaccgtgaagctgtaccaggccgagcaggaggaggccctgttcatcgccagattcagcccccccagctgcggcgtgcaggtgaacaagctgtggtacaagcccgtggagcagttcatcctgcccgagagcttcgagggcaccatcgtgtgggagagccaggacctgcacggcctggtgagcagaaacctgcacaaggtgaccgtgaacgacggcggcggcgtgctgagagtgatcaccgccggcgagggcgccctgccccacgagttcctggagggcgtggagggcgtggccggcggcttcatctacaccatccagtag

SEQ ID NO: 97504 - DNA, 981 bp, Artificial Sequence
  derived and/or modified sequence
atgcgcaactggcttgtcttgctgtgtccgtgtgtgttaggcgctgccttgcacctatggcttaggctacgctccccacccccggcatgtgcctctggcgccggtcctgccggcggggtttccttgctcctgccacggttggagtgcaacggcgcagtcagtgcccatccaaatctgcacctgcctggttctagggattcgcccgcctcagcctcacaggttgccggtattacagaccaattggcactgtttccgcaatggaagtcaactcactatgacgtcgtggtgggggttctaagtgcacgcaacaatcatgaattgaggaatgtcattcgatcaacatggatgagacacttactgcaacaccccacactgtcacaaagggtgctcgtaaagttcatcatcggtgcccacggatgtgaagtgccggtcgaagatagagaggacccatattcttgtaagctcctcaacatcaccaaccctgtcctgaatcaggagatcgaggcattcagcctttccgaggatactagcagtgggctgccagaagacagagtggtttctgttagcttcagggtgctctacccaatcgtgattacttccctgggggtgttttatgacgccaacgatgtgggcttccagagaaatataacagtcaagctctaccaagccgagcaggaggaagcgttattcatcgccagattctcccctccttcttgtggcgtgcaagtgaataaactgtggtacaagcctgtggagcaattcatattacctgagagcttcgagggcaccattgtgtgggaatctcaagatctgcacggactggtaagtaggaacctgcataaagtgactgtgaacgacggcggaggagtgctccgcgtcatcactgctggagagggcgccctgccccatgagttcttggaaggcgtggagggcgttgcagggggattcatatacaccatacaaggaaaattcgcttcatag

SEQ ID NO: 97505 - DNA, 966 bp, Artificial Sequence
  derived and/or modified sequence
atgcggaattggctcgtgttactttgtccttgtgtgctgggcgccgcgctgcatctttggctcagactgagatccccccctcctgcatgcgccagcggagccgggcctgcagggggagtgagcctcctcctgccaagattggagtgtaacggggccgttagcgctcatcctaatttgcatctcccgggcagccgcgacagccctgcgtccgcaagtcaagttgctggcataaccgaccaattggcgttgtttcctcagtggaaatccacacactacgacgtggtcgttggagtgctttctgcgaggaacaaccacgagctaaggaatgtgataagaagcacttggatgagacacctcctacaacaccctacactgtcacagagagtgctagtgaagttcattatcggcgctcatggctgtgaagtacctgtggaagatagagaggacccgtacagctgcaaactactgaacattaccaacccggtgttaaaccaggagattgaggcttttagtttatctgaagacacctcttctggcctgcctgaagacagggttgtttctgtctctttccgcgttctatatccgatagtaatcacaagtctcggagtcttctatgacgcaaatgacgtgggttttcagcgaaacattaccgtaaaactgtatcaggcagaacaggaggaagccctgttcattgcacggttttccccacccagctgcggggtgcaggtgaataagttatggtataagcctgtggagcagtttatcctgccagaatcctttgaaggcactatagtgtgggagtcgcaagacctgcacgggcttgtgtccaggaacctgcacaaggtcaccgtgaatgacggaggcggcgtgctcagggttattaccgcaggggagggcgcactgccccacgagttcctcgaaggtgtggagggtgttgccggcggcttcatatacacaatccagtag

SEQ ID NO: 97506 - DNA, 981 bp, Artificial Sequence
  derived and/or modified sequence
atgaggaactggctggtgctgctgtgcccctgtgtgctgggcgccgccctgcacctgtggctgcggctgcggagccccccaccagcctgtgccagcggggccggccctgctggaggagtgtccctgctgctgccccggctggagtgcaatggagctgtgtctgcccaccccaacctgcacctgcccggcagccgggacagccctgccagcgccagccaggtggccggcatcacagaccagctggccctcttcccccagtggaagagcacccactatgatgtggtggtgggcgtgctgagcgccaggaacaaccacgagctgagaaatgtcatccgcagcacctggatgaggcacctgctgcagcaccccaccctgagccagagggtgctggtgaagttcatcattggagcccacggctgtgaggtgcctgtggaggaccgggaggacccctacagctgcaagctgctgaacatcaccaaccctgtgctgaaccaggagattgaggccttcagcctgtctgaggacaccagcagcggcctgcctgaggacagagtggtgtctgtgtccttccgggtgctgtaccccatcgtcatcaccagcctgggcgtcttctatgatgccaatgatgtgggcttccagaggaacatcaccgtgaagctgtaccaggccgagcaggaggaggccctcttcatcgcccgcttcagcccccccagctgtggggtgcaggtgaacaagctgtggtacaagcctgtggagcagttcatcctgcctgagagctttgagggcaccatcgtgtgggagagccaggacctgcacggcctggtgtccaggaacctgcacaaggtgacagtgaatgatggcggcggcgtgctgcgggtcatcacagctggggagggcgccctgccccatgagttcctggagggcgtggagggcgtggccggcggcttcatctacaccatccagggcaagtttgccagctag

SEQ ID NO: 97507 - DNA, 966 bp, Artificial Sequence
  derived and/or modified sequence
atgaggaactggctggtgctgctgtgcccctgtgtgctgggcgccgccctgcacctgtggctgcggctgcggagccccccaccagcctgtgccagcggggccggccctgctggaggagtgtccctgctgctgccccggctggagtgcaatggagctgtgtctgcccaccccaacctgcacctgcccggcagccgggacagccctgccagcgccagccaggtggccggcatcacagaccagctggccctcttcccccagtggaagagcacccactatgatgtggtggtgggcgtgctgagcgccaggaacaaccacgagctgagaaatgtcatccgcagcacctggatgaggcacctgctgcagcaccccaccctgagccagagggtgctggtgaagttcatcattggagcccacggctgtgaggtgcctgtggaggaccgggaggacccctacagctgcaagctgctgaacatcaccaaccctgtgctgaaccaggagattgaggccttcagcctgtctgaggacaccagcagcggcctgcctgaggacagagtggtgtctgtgtccttccgggtgctgtaccccatcgtcatcaccagcctgggcgtcttctatgatgccaatgatgtgggcttccagaggaacatcaccgtgaagctgtaccaggccgagcaggaggaggccctcttcatcgcccgcttcagcccccccagctgtggggtgcaggtgaacaagctgtggtacaagcctgtggagcagttcatcctgcctgagagctttgagggcaccatcgtgtgggagagccaggacctgcacggcctggtgtccaggaacctgcacaaggtgacagtgaatgatggcggcggcgtgctgcgggtcatcacagctggggagggcgccctgccccatgagttcctggagggcgtggagggcgtggccggcggcttcatctacaccatccagtag

SEQ ID NO: 97508 - DNA, 981 bp, Artificial Sequence
  derived and/or modified sequence
atgcggaactggctggtgctgctgtgcccctgcgtgctgggcgccgccctgcacttgtggttacgcctgaggtctccacctccagcatgtgcttcaggggctggtcccgccggaggagttagtctgctcctcccccggctggagtgcaatggagcggtgtccgcacaccctaacctccatctcccaggctcaagggacagccctgcatctgcatcacaggttgccggcataacggaccagctcgcactgttcccccagtggaagtcgactcactacgatgtggtagtgggcgtgctcagcgcgcgcaacaatcacgagttacggaacgtgatacggtccacctggatgcggcatctcctgcagcacccgacccttagccagagggtgctggtgaagttcattatcggtgctcacggctgtgaggtgcccgttgaggacagagaagatccctattcctgcaagctgctaaatatcaccaatcctgtgctcaatcaggagattgaggctttctctttatccgaggatacaagcagcggactgcccgaggatcgtgtggtttccgtgagcttccgcgtcctgtacccgatcgtaattacctcccttggggtgttctacgatgctaacgacgtcggcttccagcggaatattaccgtaaagctgtatcaggctgagcaggaagaagctctgtttatcgcacgcttttctccaccctcctgtggcgtgcaggttaataagttgtggtacaagcctgtcgagcagtttattctgcccgagtcttttgaaggcacaatcgtatgggagtctcaggaccttcacggtctggtgtccagaaacctccacaaggttacagtgaacgatggcggcggagttctccgcgtgattactgcaggagagggcgctttgccgcatgagtttctcgaaggtgtcgaaggcgtggcaggcggctttatctacaccattcaaggcaaattcgcgagctag

SEQ ID NO: 97509 - DNA, 966 bp, Artificial Sequence
  derived and/or modified sequence
atgcggaactggctggtgctgctgtgcccctgcgtgctgggcgccgcgctgcatctgtggttgcgcttgagaagtccccctcccgcctgcgccagcggagcgggccctgccggaggcgtttctctgctgctgccacggctcgaatgtaacggcgccgtgtccgctcatccaaatctacacctacctggctcgcgtgactcaccggcctctgcttcacaagtggctggaattactgatcaactcgctcttttccctcagtggaaatccacacactacgatgtagttgtaggcgtgctctctgcacggaataaccacgaattaaggaatgtgatacgttctacttggatgagacacctgcttcagcatcccactttgtctcaaagagtgctggttaagtttatcattggcgctcatggttgcgaggtcccagtggaagaccgcgaggacccctacagctgcaagttattgaacatcacaaatccagtgctaaatcaggagatcgaagccttttcacttagtgaggacacctcctccggtctgcccgaagacagggttgttagcgtgtctttccgggtgctgtatcctattgtaattacaagtctcggcgtcttttatgatgctaacgacgtggggttccagagaaatatcacggtcaagttatatcaggcagagcaagaggaagctttattcatcgccagattctctcctccctcatgcggtgtccaggtgaacaagttatggtacaagccagttgagcaatttatcctgcctgagagcttcgagggcaccattgtgtgggaaagtcaagacttacacggcctggtatcaagaaacctacacaaagtaactgtgaacgatggaggcggcgtgctgcgtgtcattaccgctggggaaggggctctacctcatgagttcctcgaaggtgtggagggggtcgccggaggattcatatacacaatccagtag

SEQ ID NO: 97510 - DNA, 981 bp, Artificial Sequence
  derived and/or modified sequence
atgagaaactggctggtgctcctctgcccatgcgtgctgggggcagccttgcatctgtggttacgtttaagatccccacctcccgcatgcgcctcaggcgctggtcctgcgggtggagtctcactgctgctgccaagactcgagtgtaacggggcagtttctgcacaccctaacttgcaccttccgggttccagggattctccagcttctgcttcccaagtagccggtatcaccgaccagctggctctgtttccgcagtggaagagcactcattacgatgtggtggtgggggtcctatccgcaagaaacaatcacgaactcaggaatgttatcagatctacgtggatgcggcacctccttcagcaccccacactctctcagagggtgctggtgaagttcattataggcgcacatggatgtgaagtgcccgtagaggatcgagaggatccttattcctgtaagctcctgaacattaccaaccccgtgctgaatcaggaaatcgaggcgtttagcctaagcgaagacacgtctagtggcctgcccgaagaccgggtggtgagcgtgtcctttagggttctatatccaatcgtgattacctctttgggggtgttctacgatgcgaacgacgtcggattccaaagaaacatcacggtgaagctctaccaggctgagcaggaagaggcgcttttcatagctaggtttagccccccaagctgcggggttcaggtgaataaactgtggtataaacctgtggaacagttcattctcccagagagttttgaagggaccatcgtctgggagtctcaggacctgcacggtctggtctcacggaatctgcataaggttacagtgaacgacggcggaggagtacttcgtgtaattaccgcaggggaaggtgctctcccccacgaattcctggaaggagttgaaggcgttgcaggaggctttatttacacgatccaaggcaaattcgccagttag

SEQ ID NO: 97511 - DNA, 966 bp, Artificial Sequence
  derived and/or modified sequence
atgagaaattggctggtcctgctctgtccctgtgtcctgggtgcagccttgcatctgtggctgcggctgcgttctccaccacctgcctgcgcatcaggtgcaggtccagcgggtggtgtatctctgctgctgccacgtttagagtgtaatggagccgtgagtgcacacccgaatctgcacttgcctggctcccgtgattcccccgcaagtgccagtcaagtggccggtatcaccgatcagctcgccctgttcccacaatggaagagcacacattacgacgtggtggtcggagtgctttccgcacgaaacaatcacgagctaaggaacgtgatcaggtctacatggatgaggcacttgctccaacaccccactctgagccagagggttctcgtaaaattcattatcggggcacatggctgtgaggtgccagtggaagatcgggaggacccttacagctgcaaattgttaaacataaccaatcctgtgctgaatcaggaaatcgaagcatttagcctgagcgaggacaccagctccgggctcccggaggatcgggtggtcagtgtgtcatttagagtcctttatcctattgtgatcacatcccttggcgtattctatgacgctaatgatgttggttttcagcgaaatattacggtgaagctgtatcaggctgagcaagaagaagccctgttcattgccaggttcagtcctccctcttgcggcgtgcaggtcaacaaactctggtacaaaccagtggaacagttcatactcccagaatcctttgagggaactatcgtctgggaatcccaagacctccacggactggtcagtcggaatttacacaaggttactgttaacgacggagggggagtgctacgcgtgatcactgctggtgagggggctctgccacacgaatttctcgaaggagtcgagggcgtggctggaggcttcatatacactatccagtag

SEQ ID NO: 97512 - DNA, 1874 bp, Artificial Sequence
  derived and/or modified sequence
ggaggagcggggccgggagctgcgaggagccctccagacgtcgccgagcgcgagggcgggcgtgctcggagtggtcgctcgtcagccgccgcccctcagtctccgcacttgcaggtcccctccctctccgccgggacgcgggagagcccggctcgcggcgggggcggccaatgcgaaactggctggtgctgctgtgcccgtgtgtgctcggggccgcgctgcacctctggctgcggctgcgctccccgccgcccgcctgcgcctccggggccggccctgcaggtggagtctcactcttgttgcccaggctggagtgcaatggcgcggtctcggctcaccccaacctccacctcccgggttcaagagattctcctgcctcagcctcccaagtagctgggataacagatcagttggccttatttcctcagtggaaatctactcactatgatgtggtagttggcgtgttgtcagctcgcaataaccatgaacttcgaaacgtgataagaagcacctggatgagacatttgctacagcatcccacattaagtcaacgtgtgcttgtgaagttcataataggtgctcatggctgtgaagtgcctgtggaagacagggaagatccttattcctgtaaactactcaacatcacaaatccagttttgaatcaggaaattgaagcgttcagtctgtccgaagacacttcatcggggctgcctgaggatcgagttgtcagcgtgagtttccgagttctctaccccatcgttattaccagtcttggagtgttctacgatgccaatgatgtgggtttccagaggaacatcactgtcaaactttatcaggcagaacaagaggaggccctcttcattgctcgcttcagtcctccaagctgtggtgtgcaggtgaacaagctgtggtacaagcccgtggaacaattcatcttaccagagagctttgaaggtacaatcgtgtgggagagccaagacctccacggccttgtgtcaagaaatctccacaaagtgacagtgaatgatggagggggagttctcagagtcattacagctggggagggtgcattgcctcatgaattcttggaaggtgtggagggagttgcaggtggttttatatatactattcagggtaagtttgctagttgaaacttgaaaagtacactgaatgtcttacacttaatctttatacttgagagaaaaggattttttcttttttgtcttttaaaaaactttattcagataaaattcacccttttaaagtggttcagtggttttagtgtattcttagagttctacaaccggctccacctcccaaaaggaaaccccacacccattagcagttactcctcattcttacctccccaaccccccaccccctaacaactactgatgcactttctttctctatggatttgcctgttttgaacatttcacataaatggaaatgcacagtacgtactctgtgtgtcagtttctttgctgtaacatgtgttccaggtctgtccattttgtatgtatcagtacttcttttttatgatcatataatattctattgcatcgatatgccctattttattcattcattaatggatggacatttagattgcttctactttttgaatatgaataattctgtagtaaacatgtaggtacaagtttttgtgtggtcatatatttccatttctcttaaatgtctaggagtagaagacctgggtcatataattgtgtgtttaatcacttgaggcactgccaggttgttttctaaagcagcagcccactttacatttccatagtcagtatatgaggattctagtttctccatattcttgtcaacacttaataaattgtctgtcttttaaaatataccaa

SEQ ID NO: 97513 - protein, 212 aa, Artificial Sequence
  derived and/or modified sequence
MGPPSASPHRECIPWQGLLLTASLLNFWNPPTTAKLTIESMPLSVAEGKEVLLLVHNLPQHLFGYSWYKGERVDGNSLIVGYVIGTQQATPGAAYSGRETIYTNASLLIQNVTQNDIGFYTLQVIKSDLVNEEATGQFHVYQENAPGLPVGAVAGIVTGVLVGVALVAALVCFLLLAKTGRPWSLPQLCLLDVPSLHCPGPPTQPQDSSFHL

SEQ ID NO: 97514 - DNA, 639 bp, Artificial Sequence
  derived and/or modified sequence
atgggcccccccagcgccagcccccacagagagtgcatcccctggcagggcctgctgctgaccgccagcctgctgaacttctggaacccccccaccaccgccaagctgaccatcgagagcatgcccctgagcgtggccgagggcaaggaggtgctgctgctggtgcacaacctgccccagcacctgttcggctacagctggtacaagggcgagagagtggacggcaacagcctgatcgtgggctacgtgatcggcacccagcaggccacccccggcgccgcctacagcggcagagagaccatctacaccaacgccagcctgctgatccagaacgtgacccagaacgacatcggcttctacaccctgcaggtgatcaagagcgacctggtgaacgaggaggccaccggccagttccacgtgtaccaggagaacgcccccggcctgcccgtgggcgccgtggccggcatcgtgaccggcgtgctggtgggcgtggccctggtggccgccctggtgtgcttcctgctgctggccaagaccggcagaccctggagcctgccccagctgtgcctgctggacgtgcccagcctgcactgccccggcccccccacccagccccaggacagcagcttccacctgtag

SEQ ID NO: 97515 - DNA, 534 bp, Artificial Sequence
  derived and/or modified sequence
atgggcccccccagcgccagcccccacagagagtgcatcccctggcagggcctgctgctgaccgccagcctgctgaacttctggaacccccccaccaccgccaagctgaccatcgagagcatgcccctgagcgtggccgagggcaaggaggtgctgctgctggtgcacaacctgccccagcacctgttcggctacagctggtacaagggcgagagagtggacggcaacagcctgatcgtgggctacgtgatcggcacccagcaggccacccccggcgccgcctacagcggcagagagaccatctacaccaacgccagcctgctgatccagaacgtgacccagaacgacatcggcttctacaccctgcaggtgatcaagagcgacctggtgaacgaggaggccaccggccagttccacgtgtaccccgagctgcccaagcccagcatcagcagcaacaacagcaaccccaaggaggacaaggacgccgtggccttcacctgcgagcccgagatccacagcaccacctgcctgtag

SEQ ID NO: 97516 - DNA, 639 bp, Artificial Sequence
  derived and/or modified sequence
atggggcccccatctgccagcccccatcgagaatgtatcccctggcagggtttactcttaactgcaagcctcctgaatttttggaaccccccaaccacagctaaactcaccattgagtccatgcccctctccgtggccgaaggcaaggaagtgctgctgttggtgcacaatctgcctcagcatctgttcgggtattcttggtacaaaggtgagagagtagatggcaatagtctgattgtcggatatgtgattggcacccagcaagccacaccgggagccgcatatagtggccgagagaccatctacactaacgcatcactcctcattcaaaatgtgactcagaatgatatcggcttctataccctgcaagtgatcaagtctgacctcgtcaacgaagaggcaacaggtcagtttcacgtataccaagagaatgctcctggtctccctgttggcgccgtcgctgggatcgtgaccggagtcttggtgggagtggctctagtggcagcgttagtttgcttccttctgttagcaaagactggtaggccgtggtccttgcctcaactatgcctgctcgacgtccccagtttacattgccccggtcctccaactcagccgcaagacagctccttccacctttag

SEQ ID NO: 97517 - DNA, 534 bp, Artificial Sequence
  derived and/or modified sequence
atgggccccccttcagccagccctcatagagagtgcatcccatggcaagggctcctgctgaccgcttctctcctgaatttctggaatcctccaaccactgccaaactcacaattgagtccatgcccctttccgtcgccgagggcaaggaggtgctgctgctggtccataatctccctcaacacctttttggctatagctggtacaaaggtgagcgggtggacggtaacagcctgatcgtgggatatgtcatcgggactcaacaggccacccccggcgccgcgtattccggcagagaaactatatacacaaacgctagccttcttatccagaacgtaacccagaatgatattggcttttatacacttcaagtgatcaaaagcgacctagtcaacgaggaagctaccgggcagtttcatgtgtacccggagctccccaaaccctccatctcctcaaataacagtaatcctaaagaagacaaagatgctgtggcctttacgtgcgaaccagagattcacagcactacctgcctctag

SEQ ID NO: 97518 - DNA, 639 bp, Artificial Sequence
  derived and/or modified sequence
atgggccccccatctgccagcccccaccgggagtgcatcccctggcagggcctgctgctgacagccagcctgctgaacttctggaacccccccaccacagccaagctgaccatcgagagcatgcccctgtctgtggccgagggcaaggaggtgctgctgctggtgcacaacctgccccagcacctgtttggctacagctggtacaagggggagcgggtggatggcaacagcctgattgtgggctacgtgattggcacccagcaggccaccccaggagctgcctacagcggccgggagaccatctacaccaatgccagcctgctgatccagaatgtgacccagaatgacatcggcttctacaccctgcaggtgatcaagagtgacctggtgaatgaggaggccaccggccagttccacgtgtaccaggagaatgcccctggcctgcctgtgggcgctgtggccggcatcgtgactggagtgctggtgggcgtggccctggtggccgccctggtgtgcttcctgctgctggccaagacaggccggccctggagcctgccccagctgtgcctgctggatgtgcccagcctgcactgccccggcccccccacccagccccaggacagcagcttccacctgtag

SEQ ID NO: 97519 - DNA, 534 bp, Artificial Sequence
  derived and/or modified sequence
atgggccccccatctgccagcccccaccgggagtgcatcccctggcagggcctgctgctgacagccagcctgctgaacttctggaacccccccaccacagccaagctgaccatcgagagcatgcccctgtctgtggccgagggcaaggaggtgctgctgctggtgcacaacctgccccagcacctgtttggctacagctggtacaagggggagcgggtggatggcaacagcctgattgtgggctacgtgattggcacccagcaggccaccccaggagctgcctacagcggccgggagaccatctacaccaatgccagcctgctgatccagaatgtgacccagaatgacatcggcttctacaccctgcaggtgatcaagagtgacctggtgaatgaggaggccaccggccagttccacgtgtacccagagctgcccaagcccagcatcagcagcaacaacagcaaccccaaggaggacaaggatgctgtggccttcacctgtgagcctgagatccacagcaccacctgcctgtag

SEQ ID NO: 97520 - DNA, 639 bp, Artificial Sequence
  derived and/or modified sequence
atgggcccccccagcgccagcccccaccgggagtgcatcccctggcaaggcctgctgctgaccgcttcactgctcaacttctggaatccgcccactactgcgaagttaactattgaatcaatgcctctcagcgtggcggaaggaaaagaagtcctgttgctggttcacaatttacctcaacatttatttggatacagctggtacaaaggtgagcgtgtcgatggcaactcactgatcgtcggatatgtcattggcacacagcaggccactcccggagcagcgtacagcgggcgggagacaatctacaccaacgcttccctgcttatccaaaatgtaacccagaacgatatcgggttctatacgttacaggtgattaagtccgatctcgtcaatgaagaggccaccggccagtttcatgtgtaccaggagaatgctcctggcctgcccgtgggagcagtcgcaggtattgttacaggcgtcctcgtgggcgtggccctagtggctgctctagtgtgctttcttctcctcgccaagaccggcaggccttggtcattgccccaactctgcttgctcgacgtgcccagtctccattgcccaggtccccccacccaacctcaggactcttcttttcacctatag

SEQ ID NO: 97521 - DNA, 534 bp, Artificial Sequence
  derived and/or modified sequence
atgggcccccccagcgccagcccccaccgggagtgcatcccctggcaaggtttgctcttaactgcttccctgctaaatttttggaaccccccgacaaccgcaaagctgaccattgagtctatgccactttcagttgcagagggcaaggaagtcttgctcctcgtgcataatttgccgcaacaccttttcgggtacagctggtataaaggtgaacgtgtcgacggcaacagtctcattgtgggttatgtgataggtactcagcaggcaacacccggcgcagcttattccggacgggaaactatctacaccaatgctagcctgctcatccagaacgttacacaaaatgacatcggcttttatactctgcaggtcatcaaaagtgatttggtgaacgaagaggcaacggggcagtttcatgtgtacccagagctgcctaaaccatcaatctcctcgaataattcgaatcctaaagaagataaggatgccgtggcttttacctgcgaacctgaaattcatagtaccacttgcctgtag

SEQ ID NO: 97522 - DNA, 639 bp, Artificial Sequence
  derived and/or modified sequence
atggggcctcctagtgctagcccccatcgggaatgtatcccgtggcagggtctgctgcttacggctagtctgctgaatttctggaacccccctacgaccgccaagctgacgattgaatccatgcccctgtccgtggccgagggtaaggaagtcctcttgttagtgcataacctgcctcaacacttattcggttactcatggtacaagggcgagagagtagacggaaatagccttatcgtggggtacgtgattggcacccaacaggcaacccctggagccgcatactctggcagggagacgatttacacaaacgcctcgctgctgattcagaacgtgacccaaaacgacattggcttctataccctgcaggtgatcaaaagcgaccttgtcaatgaagaggcgacaggacagtttcatgtctatcaggaaaacgcccctggcttgcctgttggcgcagtggcaggaatagtgacaggcgtgctggtgggagtggccttggtggccgcactggtatgctttctattgttagcgaaaaccggccgaccatggtccctgccccagctgtgcttgctggacgttcctagccttcactgtccgggtcccccaacgcagcctcaagactcttcatttcacctatag

SEQ ID NO: 97523 - DNA, 534 bp, Artificial Sequence
  derived and/or modified sequence
atggggccaccttccgcatcccctcaccgggagtgcatcccttggcagggcttgttgcttactgcctccctgctgaacttctggaatcccccaaccactgcgaagctcactatcgaatctatgcccctatctgtcgcagagggcaaagaggtgcttctactggtccacaatctccctcaacacctgtttggttatagctggtataaaggagaacgcgtggacggaaactcgctgatcgtgggatacgtaattggaacccagcaggctacacccggagcagcatattccggacgcgagacaatctatacgaatgccagtctcctcatccagaatgtgacgcagaatgacatcggtttttatacactacaagtgattaagtccgacctggtgaacgaagaagccaccggccagttccacgtctatcctgaactccctaaaccgagtatctcctctaataatagtaatccaaaggaggacaaggatgccgtcgcattcacttgtgaacctgaaatccactcgacgacatgtctgtag

SEQ ID NO: 97524 - DNA, 1098 bp, Artificial Sequence
  derived and/or modified sequence
acagtagccctgactacagcattcctggagcccaggctcttttccacagaggaggaaagagcaggcagcagagaccatggggcccccctcagcctctccccacagagaatgcatcccctggcaggggcttctgctcacagcctcacttctaaacttctggaacccgcccaccactgccaagctcactattgaatccatgccgctcagtgtcgcagaggggaaggaggtgcttctacttgtccacaatctgccccagcatctttttggctacagctggtacaaaggggaaagagtggatggcaacagtctaattgtaggatatgtaataggaactcaacaagctaccccaggggccgcatacagcggtcgagagacaatatacaccaatgcatccctgctgatccagaatgtcacccagaatgacataggattctacaccctacaagtcataaagtcagatcttgtgaatgaagaagcaactggacagttccatgtataccaagaaaatgccccaggccttcctgtgggggccgtcgccggcatcgtgaccggggtcctggtcggagtggcgctggtggccgcgctggtgtgtttcctgctccttgccaaaactggaaggccgtggtccctcccacagctctgccttctcgatgtcccctctctccactgcccaggcccccctacccaaccccaggacagcagcttccatctatgaggaattgctaaaacatgacacaaacatttactgccggatggaccacaaagcagaagtggcttcttagcttccgccaggagctgctcctgtgggttgatggagagtccccaaggcccccagccctggggatggggaaggacatgaagcctgagccagagaaccagctataagtcctgagaagacactggtgtctggggacagggagggatgggggtccctgatgaatatctggagacctcgacagcctgccctaggccctgggtgggtcaggacaaaggcctctcatcaccgcagaaagcgggggcttgcagggaaagtgaatgggcctgtggcccacctggggtcacttggaaaggatctgaataaaggggacccttcctctc

SEQ ID NO: 97525 - DNA, 1022 bp, Artificial Sequence
  derived and/or modified sequence
tcctggagcccaggctcttttccacagaggaggaaagagcaggcagcagagaccatggggcccccctcagcctctccccacagagaatgcatcccctggcaggggcttctgctcacagcctcacttctaaacttctggaacccgcccaccactgccaagctcactattgaatccatgccgctcagtgtcgcagaggggaaggaggtgcttctacttgtccacaatctgccccagcatctttttggctacagctggtacaaaggggaaagagtggatggcaacagtctaattgtaggatatgtaataggaactcaacaagctaccccaggggccgcatacagcggtcgagagacaatatacaccaatgcatccctgctgatccagaatgtcacccagaatgacataggattctacaccctacaagtcataaagtcagatcttgtgaatgaagaagcaactggacagttccatgtataccaagaaaatgccccaggccttcctgtgggggccgtcgccggcatcgtgaccggggtcctggtcggagtggcgctggtggccgcgctggtgtgtttcctgctccttgccaaaactggaaggccgtggtccctcccacagctctgccttctcgatgtcccctctctccactgcccaggcccccctacccaaccccaggacagcagcttccatctatgagaagtggcttcttagcttccgccaggagctgctcctgtgggttgatggagagtccccaaggcccccagccctggggatggggaaggacatgaagcctgagccagagaaccagctataagtcctgagaagacactggtgtctggggacagggagggatgggggtccctgatgaatatctggagacctcgacagcctgccctaggccctgggtgggtcaggacaaaggcctctcatcaccgcagaaagcgggggcttgcagggaaagtgaatgggcctgtggcccacctggggtcacttggaaaggatctgaataaaggggacccttcctc

SEQ ID NO: 97526 - DNA, 639 bp, Artificial Sequence
  derived and/or modified sequence
atggggcccccatccgcctctccgcaccgtgagtgcattccatggcaggggctgctgcttaccgcatcactgttgaacttttggaatccccccactacagcgaaactgaccatagagtctatgccactttctgtggctgaagggaaagaagtattgcttttagtccacaatctcccacagcacttattcgggtactcgtggtataaaggcgaaagagtggacgggaactccttgatcgtcgggtacgtgatcggaactcaacaggctacacctggtgccgcgtactccggccgcgaaacaatctacacaaatgccagcctcttgatacagaatgtgacacagaacgatatcggcttttatacactgcaggtgatcaagtcagatctggtgaatgaggaggccacaggccagttccatgtttaccaggagaatgcccccggactgcccgtaggcgctgtcgctgggatcgtgactggtgtgctcgtgggagtcgcccttgttgcggctttggtttgttttcttctgcttgccaagaccggacgcccctggtctctcccccagctgtgcttgctcgacgtgccaagtcttcattgtcccggaccgccaacccagccacaggattcgtccttccacctgtag

SEQ ID NO: 97527 - DNA, 639 bp, Artificial Sequence
  derived and/or modified sequence
atgggcccccccagcgccagcccccaccgggagtgcatcccctggcaggggttgttgttgacagctagtttacttaatttctggaacccaccgactaccgccaagttaacaatcgaatcgatgcctctatcagttgctgaaggtaaggaagtgctgttgctggtacacaatcttccacaacatctgtttggatactcatggtacaaaggcgaacgcgtagatggcaacagtttaattgtgggatacgtgattggaacccaacaagcaacccccggtgccgcatacagcggccgcgagaccatctacacgaacgccagcctcttgatacagaacgtgacgcagaacgatattggattttacaccttgcaagtgataaaatcagacctggttaatgaggaggcaacgggtcagttccacgtgtaccaagaaaatgcccctggcctgcctgtgggagcggtggccggaattgtgactggtgtgcttgtgggagtggccctggttgctgctctggtgtgctttctgttactcgctaaaacagggcggccctggtctctgccacagctttgtctcctcgacgtccccagcctccactgccccggtccgcccacccagccacaggactcatctttccacctgtag

SEQ ID NO: 97528 - DNA, 639 bp, Artificial Sequence
  derived and/or modified sequence
atgggtccgccatccgccagcccacacagagaatgcatcccttggcagggcctcttgttaaccgccagcctgctcaacttctggaatccgccaaccaccgcgaaactgacaattgagtccatgcctttaagtgtggccgagggaaaagaagtcctgctactcgtgcacaacctccctcagcatttattcggctatagctggtataagggagagcgcgtggacggcaatagccttatcgttggttacgtgatcggaacccaacaggcaacccccggagcagcatacagcggtagagaaactatctatacaaatgcatctcttttgattcagaacgtgacacaaaatgacataggcttttacacccttcaggtcatcaagagcgacctggtgaatgaggaggcaacagggcagtttcacgtgtatcaggaaaatgccccaggactccctgttggcgctgtcgcaggtatagtgacaggagtcctggtgggcgtggctcttgttgcagccttggtttgcttcctgctgttggctaagaccggcaggccttggagcctgccccagctttgtctgctggatgttccttctttgcactgtcccggaccgcctacccagccgcaggactcttccttccacttatag

SEQ ID NO: 97529 - protein, 392 aa, Artificial Sequence
  derived and/or modified sequence
MAIATSVYVVPPPARPCPTSGPPAGPCPPSPDLIYKIPRASGTQLAAPRDALEVYDVPPTALRVPSSGPYDCPASFSHPLTRVAPQPPGEDDAPPSPEPPGALASHDQDTLAQLLARSPPPPHRPRLPSAESLSRRPLPALPVPEAPSPSPVPSPAPGRKGSIQDRPLPPPPPRLPGYGGPKVEGDPEGREMEDDPAGHHNEYEGIPMAEEYDYVHLKGMDKAQGSRPPDQACTGDPELPERGMPAPQEALSPGEPLVVSTGDLQLLYFYAGQCQSHYSALQAAVAALMSSTQANQPPRLFVPHSKRVVVAAHRLVFVGDTLGRLAASAPLRAQVRAAGTALGQALRATVLAVKGAALGYPSSPAIQEMVQCVTELAGQALQFTTLLTSLAP

SEQ ID NO: 97530 - DNA, 222 bp, Artificial Sequence
  derived and/or modified sequence
atgagctaccagcagcagcagtgcaagcagccctgccagcccccccccgtttgtccaacaccaaagtgccctgagccttgcccaccccccaaatgccccgagccgtatctgccacctccctgcccgcccgagcattgcccacctcccccttgccaggataaatgtcccccagtccagccatatcccccttgccaacagaagtatccacctaagtctaaatag

SEQ ID NO: 97531 - DNA, 1179 bp, Artificial Sequence
  derived and/or modified sequence
atggctatcgctacctctgtttatgttgtcccaccacccgcccgaccatgtcccacttcaggcccgcccgctggcccttgcccgccctcacccgatctaatttataagatcccaagggcatccggtacacagcttgctgcgcctcgcgacgcactggaagtttatgacgtgccgcccactgccttacgggtaccctccagtgggccctacgattgtcctgcttcgttctctcatcctctgacaagagtcgccccacagcctccaggtgaggacgatgccccacccagccctgagcctcctggcgcactcgcttcccatgatcaggacacactggctcagctgctggccagatcgccaccacctccccacaggccccggctgccctcagcggaatccctgagtaggaggcccctaccggctctgccagtgcccgaggcacctagccccagcccagtaccaagcccggctcctggccgaaaggggtccatccaagacagacccctcccacctccaccgccaagacttcccgggtacgggggtccgaaggttgagggggatcccgagggaagggaaatggaagatgacccagccggtcaccacaacgaatatgaaggaatcccaatggccgaggagtatgactacgtacacctgaagggaatggacaaggcgcagggatctcggccccctgatcaagcctgcacaggcgatcctgagcttcctgaacgtggcatgcctgctccacaggaggccctgagtcctggagaacctctggtggtatcaaccggtgacctgcagctactgtacttttacgcaggccagtgtcaaagtcactactccgcactgcaagcggccgtggcggccctcatgtcatcaacacaggccaatcagcctcctcgcctgttcgtccctcacagcaagcgcgtcgttgtggcggcccacagactggtgttcgtaggtgataccctgggaagactcgcagcttcagccccactgcgagctcaggtgagggcagccgggacggccctaggccaggccctgcgcgcgaccgtgctggctgtaaagggtgccgccttggggtacccctcaagcccagccatccaggagatggtacagtgcgtgacagaactagcggggcaggccctgcagtttacaaccctcctcacctccctggcaccttag

SEQ ID NO: 97532 - DNA, 1179 bp, Artificial Sequence
  derived and/or modified sequence
atggccatcgccacctctgtgtatgtggtgcccccaccagcccggccctgccccaccagcggccccccagctggcccctgcccccccagcccagacctgatctacaagatcccccgggccagcggcacccagctggccgcccccagagatgccctggaggtgtatgatgtgcccccaacagccctgcgggtgcccagcagcggcccctatgactgcccagccagcttcagccaccccctgaccagggtggccccccagcccccaggagaagatgatgccccacccagccctgagcccccaggggccctggccagccatgaccaggacaccctggcccagctgctggcccggagccccccaccaccccaccggccccggctgcccagcgctgagagcctgagcagaagacccctgcctgccctgcctgtgcctgaggcccccagccccagccctgtgcccagccctgcccctggcaggaagggcagcatccaggaccggcccctgcccccacctccaccccggctgcccggctacggcggccccaaggtggagggggaccctgagggccgggagatggaggatgatcctgctggccaccacaatgaatatgagggcatccccatggccgaggagtatgactatgtgcacctgaagggcatggacaaggcccagggcagccggcccccagaccaggcctgcaccggggaccctgagctgcctgagcggggcatgcctgccccccaggaggccctgagccctggagagcccctggtggtgtccactggagacctgcagctgctgtacttctacgccggccagtgccagagccactacagcgccctgcaggccgctgtggccgccctgatgagcagcacccaggccaaccagcccccccggctgtttgtgccccacagcaagagggtggtggtggccgcccaccggctggtgtttgtgggggacaccctgggccgcctggccgccagcgcccccctgcgggcccaggtgcgggccgccggcacagccctgggccaggccctgcgggccaccgtgctggccgtgaagggggccgccctgggctaccccagcagccctgccatccaggagatggtgcagtgtgtgacagagctggccggccaggccctgcagttcaccaccctgctgaccagcctggccccctag

SEQ ID NO: 97533 - DNA, 1179 bp, Artificial Sequence
  derived and/or modified sequence
atggccatcgccaccagcgtgtacgtggtgcccccccccgcccggccatgtccgacttctgggcccccagccggcccatgtcccccaagtccagacctgatttataagatccccagagcctccggaacccagctggccgcgcctcgggacgctcttgaggtttacgatgttccaccaaccgcactgagagtgccttcttctggcccctatgactgcccagcatctttctcccacccccttacaagggtcgccccacagcccccgggggaggatgacgcacctcctagccctgagccaccaggcgccctggccagccacgaccaggacactctggcccagctgctggctcgctctcctccaccgccacaccggccacgcctgccgagcgcagaatccctgagccgaaggccactgccagcattgcccgttcccgaagcccccagcccctcacctgttccatcaccagctcccggacggaagggttccattcaggacagaccgctgccccctccgccgcctcggctgcccggctacgggggtcccaaagtcgagggcgatccagagggtagggaaatggaagatgatcctgcaggacaccacaatgagtatgagggaataccaatggccgaagagtatgactacgttcatttaaagggcatggataaggcccaggggagcagacccccggaccaggcttgtactggtgacccagagctgccggaaaggggcatgccagccccacaggaagccctcagtcccggtgagcccttagtcgtgagcaccggcgatcttcaattgctgtacttctatgccggtcagtgccagtcccactactcagccctccaagccgctgtggctgccctgatgtcgagcactcaggccaaccagccacctagactcttcgtgccacactctaagcgcgtggtggtggcagctcaccgcctcgtgtttgtgggtgacacactgggtcggttggctgccagcgcaccacttcgggctcaggttcgcgctgctggaaccgctctgggccaggcattacgggctactgtgctcgccgtgaagggagccgcattaggctacccctcgagccccgctattcaggaaatggtccagtgtgtgactgaattagccggacaggccctgcagttcacaacgctgctcaccagcttagccccctag

SEQ ID NO: 97534 - DNA, 1179 bp, Artificial Sequence
  derived and/or modified sequence
atggccattgctaccagcgtctacgttgtcccacccccagcacgcccttgtcccaccagcggaccacccgctggcccttgtcccccatcccccgaccttatctacaagatcccccgtgcttccgggactcaacttgcggctccaagggatgctctcgaggtgtacgatgtgcctcccaccgcgcttcgcgtgcccagctccggtccgtacgattgtccagccagcttttcccaccccctgacaagagtggccccacagccacctggggaagacgatgctcccccttctccagaaccaccaggcgctctggccagtcacgatcaggacacactggcccagctgcttgcccgttctccgcctcctccccacaggcctaggttgcccagcgctgaaagtctgtcccgcagaccattaccggctcttcctgtacccgaagcccctagtccctcccccgtaccctcccctgcaccgggtaggaagggaagtatccaagacagaccattgccacccccacccccacgtctacctggctacgggggacccaaggtcgagggcgatcctgaaggcagggagatggaggacgacccggcaggacaccacaacgagtatgagggcattccaatggcagaggagtatgattatgttcatcttaagggcatggacaaggctcagggctccaggccacccgatcaagcttgtacaggtgacccagagctgcccgagagaggcatgcccgcaccgcaggaagcactcagtccgggtgagcctctggtagtgtccactggggatctgcagttgctgtacttctacgccggtcagtgtcagagtcattatagcgctcttcaggcggctgtggctgccctcatgagctccacacaggccaatcagccacctcggctttttgtgccccattctaaacgtgttgttgtggccgcacacaggcttgttttcgtgggagacacgttgggtagattggctgcgtccgctccactgcgtgcccaggttagggccgcagggacagccctgggccaggctcttagggcgacagtgctggctgtgaagggcgctgccctcggatatcccagcagcccggctatccaggaaatggttcagtgtgtcactgagctcgcgggacaggccctgcagtttacgactcttctgaccagcctcgccccatag

SEQ ID NO: 97535 - DNA, 1179 bp, Artificial Sequence
  derived and/or modified sequence
atggccatcgccaccagcgtgtacgtggtgcccccccccgccagaccctgccccaccagcggcccccccgccggcccctgcccccccagccccgacctgatctacaagatccccagagccagcggcacccagctggccgcccccagagacgccctggaggtgtacgacgtgccccccaccgccctgagagtgcccagcagcggcccctacgactgccccgccagcttcagccaccccctgaccagagtggccccccagccccccggcgaggacgacgccccccccagccccgagccccccggcgccctggccagccacgaccaggacaccctggcccagctgctggccagaagccccccccccccccacagacccagactgcccagcgccgagagcctgagcagaagacccctgcccgccctgcccgtgcccgaggcccccagccccagccccgtgcccagccccgcccccggcagaaagggcagcatccaggacagacccctgcccccccccccccccagactgcccggctacggcggccccaaggtggagggcgaccccgagggcagagagatggaggacgaccccgccggccaccacaacgagtacgagggcatccccatggccgaggagtacgactacgtgcacctgaagggcatggacaaggcccagggcagcagaccccccgaccaggcctgcaccggcgaccccgagctgcccgagagaggcatgcccgccccccaggaggccctgagccccggcgagcccctggtggtgagcaccggcgacctgcagctgctgtacttctacgccggccagtgccagagccactacagcgccctgcaggccgccgtggccgccctgatgagcagcacccaggccaaccagccccccagactgttcgtgccccacagcaagagagtggtggtggccgcccacagactggtgttcgtgggcgacaccctgggcagactggccgccagcgcccccctgagagcccaggtgagagccgccggcaccgccctgggccaggccctgagagccaccgtgctggccgtgaagggcgccgccctgggctaccccagcagccccgccatccaggagatggtgcagtgcgtgaccgagctggccggccaggccctgcagttcaccaccctgctgaccagcctggccccctag

SEQ ID NO: 97536 - DNA, 1706 bp, Artificial Sequence
  derived and/or modified sequence
gctagcctgcctctcatttgggaagttttgtgggttttctttctcctcctccaaccttggcggaggccacgactcaggcgccacagctgggggctagaggccgcggaccatggtgcggggcagccaccgctgaagtcagcaaaaccgagcctggcctgaggcaggctgcgcgggaggccaaagccatggccattgccacgtcggtgtatgtggtgccgcccccagctcggccctgtccaacctcaggacctccagctggaccttgcccaccctctcctgacctcatctacaaaatccccagagctagtgggacccagctggctgctcccagagatgccttggaggtctacgatgtgccccccaccgccctccgggtgccctccagtggcccctatgactgccctgcctccttttcccaccctctgacccgggttgccccgcagccccctggagaggatgatgctcccccttctccagagccccctggagccttggcctcccatgaccaggacaccctggcccagcttctggccagaagccccccacccccacacaggccccggctcccctcagctgagagcctgtcccgccgccctctgcctgccctgcctgtccctgaggcccccagcccctccccagtgccctctcctgccccaggccggaagggcagcatccaggaccggcctctgcccccacccccaccccgcctgcctggttatggaggccccaaggtcgagggggatccagagggcagggagatggaggatgacccagcaggacaccacaatgagtacgagggcattccgatggccgaggagtatgactatgtccacctgaagggcatggacaaagctcagggatctaggcccccggatcaggcctgcacaggggatcctgaactgcccgagagggggatgccggcgccgcaggaggccctgtccccaggggagccactggttgtgtccaccggagatctgcagctcctgtacttctatgctgggcaatgccagagccactactcagccctgcaggcagccgtggcagccctgatgtccagtacccaggctaatcagcccccgcgccttttcgtgccccacagcaagagggtggtggtggctgctcatcgcctggtgtttgttggggacaccctgggccggctggcagcctctgcccctctgagagcacaggtcagggctgcaggtacagcactgggccaggcattgcgggccactgtgctggctgtcaagggagctgccctgggctacccatccagccctgccatccaagagatggtgcagtgtgtaacagaactggcagggcaggccctgcaattcactaccctgctcactagcctggctccatgaaggtcctttggcacagctctgctcctcccctgcctgccaaagcccccctttaggccttgggtggctggaaggctttgttaagggactaggagaaatgggggtatctttcccctttcctgccctttctgctcatctcaacctctcacagaggtgtcttctccccctaacctacagctttttgtacaagccattttgtgtaaattatttatatttaatattattccctgctttgtcaggagcaggtactaggctctggggcagtgaggaactagatccttctctcctcagcctagggtggaggtcactgcactaccacccacctctggaagactggctgtgaaa

SEQ ID NO: 97537 - DNA, 438 bp, Artificial Sequence
  derived and/or modified sequence
atgttacttcttctactgctgcccttactttggggcagggagagagttgagggccagaagagtaaccgaaaagattattcactgaccatgcagagttccgtcacagttcaggaaggaatgtgcgtgcatgtgaggtgttcatttagttaccccgtggattcccagaccgatagcgaccccgtgcacggttactggttcagagctggaaacgacatctcttggaaagctcctgtggcaaccaataaccctgcctgggccgttcaggaggaaactcgagaccgcttccatcttttgggcgacccacaaaccaagaattgcacgcttagtatcagagacgctagaatgagcgacgccggaagatatttttttagaatggagaagggcaatataaagtggaactataagtacgaccagttgtccgtgaacgtgaccgaatag

SEQ ID NO: 97538 - DNA, 438 bp, Artificial Sequence
  derived and/or modified sequence
atgctgctgctgctgctgctgcccctgctgtggggccgggagcgggtggagggccagaagagcaacaggaaggactacagcctgaccatgcagagctctgtgacagtgcaggagggcatgtgtgtgcacgtgcgctgcagcttctcctaccctgtggacagccagacagacagcgaccctgtgcacggctactggttccgggctggaaatgacatctcctggaaggcccctgtggccaccaacaacccagcctgggccgtgcaggaggagacccgggaccgcttccacctgctgggggacccccagaccaagaactgcaccctgagcatcagagatgccaggatgtctgatgctggccgctacttcttcaggatggagaagggcaacatcaagtggaactacaagtatgaccagctgtctgtgaatgtgacagaatag

SEQ ID NO: 97539 - DNA, 438 bp, Artificial Sequence
  derived and/or modified sequence
atgctgctgctgctgctgctgcccctgctgtggggccgggagcgggttgaaggacagaagtccaacaggaaggactactccctgaccatgcagtcatctgtaactgtgcaggagggcatgtgtgtgcacgtgaggtgttccttctcgtatcctgtggacagtcagaccgactctgaccccgttcatgggtactggttccgcgcagggaacgatatctcttggaaagcccccgtcgctactaacaaccctgcctgggctgtccaggaagaaacccgggaccgcttccaccttctcggggacccccagacgaaaaattgcaccctgagcatacgcgatgctcgaatgtccgacgctggcaggtactttttcagaatggagaaagggaacatcaagtggaactataagtacgaccagttgtccgtgaacgttacagagtag

SEQ ID NO: 97540 - DNA, 438 bp, Artificial Sequence
  derived and/or modified sequence
atgttgcttttgctgttactcccccttctgtggggtcgtgagagagtagaaggccaaaaatctaatcggaaagactactcgttgacaatgcagtctagcgtgaccgtgcaggaagggatgtgcgttcacgtgagatgctccttctcctatccagttgattctcaaacggattctgaccccgttcatggctactggttccgcgcaggcaatgacatcagctggaaagccccagttgcaaccaataatcccgcttgggcagttcaggaagagactagggatcgcttccacctgttgggggaccctcagacgaagaattgtacgctcagcatccgtgacgcgcgaatgtctgacgccggtcgctacttctttaggatggagaaggggaacattaaatggaactataagtacgaccaacttagcgtgaacgtgacagaatag

SEQ ID NO: 97541 - DNA, 713 bp, Artificial Sequence
  derived and/or modified sequence
atgctgctgctgctgctgctgcccctgctctgggggagggagagggtggaaggacagaagagtaaccggaaggattactcgctgacgatgcagagttccgtgaccgtgcaagagggcatgtgtgtccatgtgcgctgctccttctcctacccagtggacagccagactgactctgacccagttcatggctactggttccgggcagggaatgatataagctggaaggctccagtggccacaaacaacccagcttgggcagtgcaggaggaaactcgggaccgattccacctccttggggacccacagaccaaaaattgcaccctgagcatcagagatgccagaatgagtgatgcggggagatacttctttcgtatggagaaaggaaatataaaatggaattataaatatgaccagctctctgtgaacgtgacagagtgaggtcctgcaggaagaaatcggcaaggccagcagcggacgtgggagacataggcatgaaggatgcaaacaccatcaggggctcagcctctcagggtaacctgactgagtcctgggcagatgataacccccgacaccatggcctggctgcccactcctcaggggaggaaagagagatccagtatgcacccctcagctttcataagggggagcctcaggacctatcaggacaagaagccaccaacaatgagtactcagagatcaagatccccaagtaa

SEQ ID NO: 97542 - DNA, 438 bp, Artificial Sequence
  derived and/or modified sequence
atgctgctgctgctgctgctgcccctgctgtggggcagagagagagtggagggccagaagagcaacagaaaggactacagcctgaccatgcagagcagcgtgaccgtgcaggagggcatgtgcgtgcacgtgagatgcagcttcagctaccccgtggacagccagaccgacagcgaccccgtgcacggctactggttcagagccggcaacgacatcagctggaaggcccccgtggccaccaacaaccccgcctgggccgtgcaggaggagaccagagacagattccacctgctgggcgacccccagaccaagaactgcaccctgagcatcagagacgccagaatgagcgacgccggcagatacttcttcagaatggagaagggcaacatcaagtggaactacaagtacgaccagctgagcgtgaacgtgaccgagtag

SEQ ID NO: 97543 - protein, 245 aa, Artificial Sequence
  derived and/or modified sequence
MEWDNGTGQALGLPPTTCVYRENFKQLLLPPVYSAVLAAGLPLNICVITQICTSRRALTRTAVYTLNLALADLLYACSLPLLIYNYAQGDHWPFGDFACRLVRFLFYANLHGSILFLTCISFQRYLGICHPLAPWHKRGGRRAAWLVCVAVWLAVTTQCLPTAIFAATGIQRNRTVCYDLSPPALATHYMPYGMALTVIGFLLPFAALLACYCLLACRLCRQDGPAEPVAQERRGKAARMAVVVA

SEQ ID NO: 97544 - DNA, 987 bp, Artificial Sequence
  derived and/or modified sequence
atggaatgggacaatgggaccggacaggccctgggcttgccccccaccacctgcgtttaccgcgaaaactttaaacagcttcttctaccaccagtctattctgccgtgctcgccgccggtttgccattgaatatctgtgtcatcacgcagatctgtaccagtcgccgcgctctgacacggactgctgtgtacacattaaatctggccctggcggatctgctgtacgcttgttcacttccgctcctgatatataattatgctcagggtgatcattggccttttggtgactttgcttgtcggttggtgcgcttcctgttttacgcgaacctgcacgggtcaatcctgttcctgacatgcatcagcttccaacgctatttaggcatctgtcatcctctggccccttggcataaacgtggcgggaggcgtgcggcttggttggtgtgtgtagctgtatggctggctgtgacaacacagtgcctgcctactgcaatctttgctgcaacgggaattcaaaggaatagaaccgtctgctacgacctgagcccacctgcccttgccacccattacatgccctatggtatggccctgaccgtgataggttttctgcttcccttcgctgcgctgctggcatgctactgtcttctggcttgccgactgtgtaggcaggatggacctgctgaacctgtagctcaggaaagaaggggaaaggcagctcgtatggccgtcgttgtggcagccgcgtttgctatcagtttcctccctttccacatcaccaagacagcttatctggcagttagaagcacacctggcgtgccttgcaccgtcctcgaagcctttgcagcagcctacaaaggaacccgtcccttcgctagcgcaaacagtgtcctggaccccattctgttctattttacccagaagaagtttcggagacgcccacatgagcttctccagaaactaaccgctaaatggcaacggcagggcagatag

SEQ ID NO: 97545 - DNA, 987 bp, Artificial Sequence
  derived and/or modified sequence
atggagtgggacaatggcaccgggcaggccctgggcctgccccccaccacttgcgtgtaccgagagaatttcaaacaattgctcctgccacccgtgtacagtgccgttctcgccgcgggtcttcccctcaatatctgcgtcatcacacaaatttgtacaagccgccgggccctgactaggaccgcagtgtacacactgaacctagccctcgcagatctgctctatgcatgcagcctgccactcctcatctacaactatgcgcagggcgaccattggccttttggcgatttcgcatgccgactggtcagattcttgttctatgccaatttacatggcagcatactttttcttacttgtatctcttttcaacggtaccttggaatttgtcacccattggccccatggcacaaacggggagggagacgggccgcttggttggtctgcgtcgcagtctggctggcagtgaccacccagtgcctgcccacagcaatcttcgccgcaactggtattcagagaaacagaactgtgtgctatgacctttctccacccgccctcgccacacattacatgccatatggaatggcactgacggtgatcggctttttactgccttttgccgctcttttggcttgctactgtctgttggcttgtcgactgtgtcggcaggatggcccggccgagccagtcgcacaggaacgccgtgggaaggcggcacggatggcagtggtcgtcgccgccgcattcgctatttctttcctgccattccacattaccaagacagcctacctcgcagtccgctcgactcccggagtgccatgcaccgtgctggaagcattcgccgcggcctataaaggaaccaggcccttcgccagcgccaatagtgttctggatcccatcctgttttacttcactcagaagaaatttcgaaggagacctcacgagttgttgcagaaacttacggctaaatggcagcgacaaggtaggtag

SEQ ID NO: 97546 - DNA, 987 bp, Artificial Sequence
  derived and/or modified sequence
atggagtgggataatgggaccgggcaggctctggggctgccccccaccacctgtgtctacagggaaaattttaagcagttgctgctgccgccagtatactctgccgtgctggctgcgggactgccattaaatatttgtgttatcacgcagatatgcaccagtcggcgagccttgacgcggacggcagtgtacacactcaacctggccctcgcggatttgctgtacgcctgctctttacctctgctcatctacaattatgcccagggggaccattggccgtttggggactttgcctgtagactggttaggttcctgttctatgccaatctgcatggcagcattctatttctgacttgtatctcctttcagcgatatctgggaatctgccatccactcgccccatggcataagcgggggggtagaagagctgcctggctcgtttgcgtggctgtatggcttgctgtaactactcagtgcctcccaaccgcgatttttgcagcaacaggcattcagcggaaccgaaccgtgtgctacgacctgtcgccgccagctcttgctacccactatatgccatacggaatggctttgactgttatcggcttcctgttgccgtttgccgcattgctggcctgctattgtttgctcgcttgtaggctgtgccgccaagatggcccagccgagccagtagcccaagaacggcgtggaaaagccgccaggatggccgtggttgtggcagccgccttcgccatcagcttcctaccttttcacataacaaaaacagcatatctcgcagtgcgatctacacctggtgtgccctgtacagtgcttgaggccttcgcagcagcatataagggcactcggcctttcgcctctgctaatagtgtgctagacccgatcctgttttattttacccagaagaagtttaggcgcagaccacacgagctccttcagaaattgacggccaagtggcagcggcaaggccgatag

SEQ ID NO: 97547 - DNA, 987 bp, Artificial Sequence
  derived and/or modified sequence
atggagtgggataatggcactggtcaagccttaggactgccgccaaccacctgtgtgtaccgggagaacttcaagcagctgctccttccaccggtatacagcgccgtgctagctgcagggctgcctctcaacatttgtgtcataactcaaatctgtacttcacgtcgcgccctgacccgtacagctgtgtacactcttaatctggccttggccgacttgctatatgcatgttccctgccactcctcatctacaactacgcccagggcgaccactggcctttcggagattttgcctgcaggttggtgcgctttctcttttacgcaaaccttcatgggtctatactgttcctgacttgcattagcttccaacggtatctcgggatttgtcacccccttgcaccctggcataaacgcgggggccgccgtgcggcctggttggtttgcgtagcagtctggttggcggtaacgactcaatgcctgcccactgccatctttgcggccacagggattcagagaaatagaactgtgtgctatgacttgtcccctccagctttagccacacactatatgccctatggaatggcccttacagtgattggcttcctgctaccgttcgcagctttgctggcctgttactgcctcctggcgtgtcggctatgtcggcaagacgggccggccgagccagttgcccaggaacgtcgcggcaaggccgcccggatggccgtggtagtggcagctgcctttgctatcagctttctcccatttcatatcactaaaactgcctacctggccgtgcgttccaccccaggggtcccatgcaccgtgcttgaagcttttgctgcagcttataaaggtactcgaccattcgcgtcagccaattcggtcctagacccgatcttattttactttacccagaaaaagtttaggcgcaggccccacgaattgttgcagaaactgacggctaagtggcagcgacagggacgttag

SEQ ID NO: 97548 - DNA, 738 bp, Artificial Sequence
  derived and/or modified sequence
atggagtgggataatggcacaggccaggcactgggattgcctcccactacttgtgtataccgggagaacttcaaacagctgctcctacctccagtgtatagcgccgtgctcgccgcgggcctccccctcaatatttgtgtcattactcaaatctgcactagccggagggccctcacgcgtaccgctgtgtacactctcaacctggcactagccgacctactctatgcctgttcgttgcccctcctcatatataattacgcccagggtgatcactggccatttggggatttcgcgtgcaggttggttcgcttcctgttttacgctaatctacacggttccattctgtttttaacttgcatttctttccaacgctacctgggcatatgtcacccactggctccatggcacaaaagaggtggccgccgggccgcctggctggtctgtgttgcagtgtggttagccgtcaccacccaatgtctcccaaccgccatatttgcagccacaggcattcagcgaaataggacagtctgctacgatctatccccgccagcccttgcaacacactatatgccttacggcatggccttgacagtgatcggctttctgctcccattcgccgccctgctggcgtgttactgcctcctggcatgtcggttgtgcagacaggacggccccgccgagccggtggcacaagagagaaggggcaaggcagctcggatggctgtagttgttgcctag

SEQ ID NO: 97549 - DNA, 987 bp, Artificial Sequence
  derived and/or modified sequence
atggagtgggacaatggaactggacaggcgttaggactgccccctacaacttgtgtttacagggagaactttaagcagctgttgctgccccccgtgtactctgctgtgctcgcagccgggcttcccctgaatatttgtgtgatcacgcagatatgcacctctagacgcgccctgacccggactgctgtgtacaccctcaatttggctctagctgacttgctgtatgcatgctccctgccactgttaatatataattatgcccaaggcgaccactggcccttcggtgatttcgcgtgcaggcttgtgaggttcttgttctacgccaacctgcatgggtccattcttttcttgacctgcatcagcttccagagatatctggggatctgtcatccactggcaccttggcacaagcggggcgggagaagagcagcttggctcgtttgcgtcgctgtgtggctggccgtgaccactcaatgtctgcccaccgcaatttttgctgcgaccggcatccagagaaaccgtaccgtctgttacgatttgtctccaccagcccttgcgacccattacatgccatacgggatggctctgactgtgataggattcctcctcccattcgccgcattgctagcgtgttactgtctgcttgcctgtcggctgtgccgacaggacggcccggccgaacctgttgcccaggaaaggcgggggaaagccgctcgcatggctgttgtggtcgcagctgcgttcgccatttcgtttctcccatttcatattactaaaactgcctacctggccgtgaggagcaccccaggggttccctgtacagttctggaggccttcgccgcggcctataaaggtactcgcccatttgctagcgcaaattccgtgttagacccaatactattctacttcacgcagaaaaaatttcgtcggcgcccccacgaactactgcagaagctgacggcaaagtggcaaagacaaggcaggtag

SEQ ID NO: 97550 - DNA, 987 bp, Artificial Sequence
  derived and/or modified sequence
atggaatgggataatgggacaggccaagctctgggattgcctcccacgacctgcgtctatcgggagaacttcaaacagctacttcttccacccgtgtattccgctgtgttggccgcaggtcttcctttgaatatctgtgttattactcagatttgtacatcccggcgggctcttacaaggacggccgtctatactctcaacctggccttggcggatctgttgtatgcatgttctctgcccctgctcatctacaactacgcccaaggagaccactggccatttggcgatttcgcttgtcggttggttcggtttctcttctatgccaacctgcatgggagcatactattcctgacatgtatttcatttcagagatacctggggatatgccaccccttagcaccatggcacaagcgcggtgggcgtcgcgctgcttggttggtgtgcgtggccgtgtggcttgccgtgacaacccagtgcctgcctaccgccatctttgccgccacggggattcagaggaatcggaccgtgtgctacgacctgtcaccacccgcactagcaactcattacatgccttacggcatggccttgacagtcatcggcttcctactgccattcgccgctctgttggcttgttattgcctcttggcttgtaggttgtgccgccaggatggccccgcagagccggtagcacaggagcgacgagggaaggctgcacggatggccgtggtcgtggcagctgctttcgccatcagttttctgccatttcacataacaaaaaccgcatacctggccgtgcgatcaacacccggcgtcccctgtacggtactggaagcgttcgccgccgcttacaaaggaactcgtccctttgcctccgccaactccgtgttggatccgattctcttctatttcacacaaaagaagtttcgccggcgcccacacgagctcctgcagaagctgacagcaaagtggcaaagacaggggcgttag

SEQ ID NO: 97551 - DNA, 987 bp, Artificial Sequence
  derived and/or modified sequence
atggagtgggacaacggcacagggcaggcccttggcctgcctcctacaacctgtgtgtatcgagaaaattttaagcaactcctgttaccccccgtgtactcagcggtacttgccgctggacttccgctcaacatatgcgtgattacacagatttgtacaagccggcgggcgctgacacgcacagctgtttacactcttaatctggccttggccgacctgctctacgcctgcagcctgcctttgttgatttacaactatgcccaaggagatcattggccttttggcgacttcgcttgcaggctcgtacgctttttgttctatgcaaatctccatggcagcattctgtttttgacttgcatctcatttcaacgatacctcggaatctgccatccactggctccctggcataaacgcgggggccgcagggctgcctggttagtgtgcgtggcagtgtggttagccgtgacgacccagtgcttgcccactgctatcttcgccgcaactggaattcagaggaatcgtacggtgtgttacgatctatcgccacccgccttagccacacattacatgccttacggaatggccctgaccgtgattggatttctgctgcctttcgctgccttgctcgcgtgctactgcctgcttgcctgcaggctctgtcggcaagatggccccgccgagccagtggcacaggaaaggcgtggaaaagccgcgcggatggctgtggtcgtcgccgctgctttcgctataagctttctcccatttcatattaccaaaacagcctatctggccgttagatcaactcctggtgtaccttgcacagtcctggaagcatttgcggctgcatacaaaggaactcggcctttcgcaagtgcaaatagcgtgctcgatcccattctgttctattttacccagaaaaaatttcgacggcggccacatgaacttctgcagaagctgacagcaaagtggcagagacagggtcgatag

SEQ ID NO: 97552 - DNA, 987 bp, Artificial Sequence
  derived and/or modified sequence
atggagtgggacaatgggactggtcaagcactcggtctcccgcccactacatgtgtctatcgtgagaatttcaagcagttattactgccacccgtgtattcagcggtgcttgctgccggcctcccactgaacatatgtgtgattactcagatttgcacttcccgaagggccttaacaagaaccgctgtgtataccctcaacctcgcgctcgcggacctcttgtatgcctgtagcctaccactcctgatttacaattacgcccagggcgatcactggccattcggcgattttgcctgccggttagtacgtttcctgttttacgccaacctccatggtagcatcctcttcctgacatgcatatctttccagagatacctcggaatatgtcatcccctggccccatggcacaaaagagggggccgcagagcagcctggctcgtctgtgtagctgtttggctcgcggtgacgacccaatgtttgcccacagcaatattcgccgctaccggcattcagcggaatagaacggtatgctacgacttgtcccctcctgccctggccacccactacatgccttatggcatggcattgactgtgattggatttctccttcctttcgccgccctgctggcttgctattgcctgctggcatgtcggctctgtcggcaggatggtcccgccgagcccgtagcccaggaacggcgcggcaaagctgcaagaatggcggtggtggttgccgccgcctttgccatttccttcttgccatttcatatcaccaagactgcttacctcgcagtccgctccaccccaggcgtcccctgcactgtcctggaagccttcgcagccgcctataaaggtacccgcccctttgcttccgcgaattccgtcctggatccaattctgttctatttcacccagaagaaatttagaagacgaccacacgagttacttcaaaagctcacagcaaaatggcagagacagggacgctag

SEQ ID NO: 97553 - DNA, 387 bp, Artificial Sequence
  derived and/or modified sequence
atggaatgggataatgggaccgggcaggcactgggcttgcctccaaccacttgcgtgtaccgagagaactttaagcaattacttctccctccggtgtatagtgccgtactggcagccggtcttcctcttaacatctgtgttattactcagatttgtacctctcgacgcgccctgacacggactgctgtgtataccctgaatctggccctggccgatctcctgtacgcctgctctctgccattgctcatttataactacgcgcaaggagatcattggccatttggagatttcgcttgtcgccttgtgcgcttcctgttctacgctaatctccatgggtcaatcttatttctgacttgtatcagcttccagcggtatctgggcatttag

SEQ ID NO: 97554 - DNA, 987 bp, Artificial Sequence
  derived and/or modified sequence
atggagtgggacaatggaacaggccaggccctgggcctgccccccaccacctgtgtgtaccgggagaacttcaagcagctgctgctgccccctgtgtacagcgctgtgctggccgccggcctgcccctgaacatctgtgtgatcacccagatctgcaccagcagaagagccctgaccaggacagctgtgtacaccctgaacctggccctggccgacctgctgtatgcctgcagcctgcccctgctgatctacaactatgcccagggcgaccactggccctttggagactttgcctgccgcctggtgcgcttcctgttctacgccaacctgcacggcagcatcctcttcctgacctgcatctccttccagcgctacctgggcatctgccaccccctggccccctggcacaagagaggaggaagaagagctgcctggctggtgtgtgtggccgtgtggctggccgtgaccacccagtgcctgcccacagccatctttgctgccaccggcatccagaggaacagaacagtgtgctatgacctgagccccccagccctggccacccactacatgccctacggcatggccctgactgtgattggcttcctgctgccctttgctgccctgctggcctgctactgcctgctggcctgccgcctgtgccggcaggacggccctgctgagcctgtggcccaggagcggcggggcaaggccgccaggatggctgtggtggtggccgccgcctttgccatctccttcctgcccttccacatcaccaagacagcctacctggccgtgcgcagcaccccaggagtgccctgcaccgtgctggaggcctttgctgctgcctacaagggcacccggccctttgccagcgccaacagcgtgctggaccccatcctcttctacttcacccagaagaagttcagaagaagacctcatgagctgctgcagaagctgacagccaagtggcagaggcagggccgctag

SEQ ID NO: 97555 - DNA, 738 bp, Artificial Sequence
  derived and/or modified sequence
atggagtgggacaatggaacaggccaggccctgggcctgccccccaccacctgtgtgtaccgggagaacttcaagcagctgctgctgccccctgtgtacagcgctgtgctggccgccggcctgcccctgaacatctgtgtgatcacccagatctgcaccagcagaagagccctgaccaggacagctgtgtacaccctgaacctggccctggccgacctgctgtatgcctgcagcctgcccctgctgatctacaactatgcccagggcgaccactggccctttggagactttgcctgccgcctggtgcgcttcctgttctacgccaacctgcacggcagcatcctcttcctgacctgcatctccttccagcgctacctgggcatctgccaccccctggccccctggcacaagagaggaggaagaagagctgcctggctggtgtgtgtggccgtgtggctggccgtgaccacccagtgcctgcccacagccatctttgctgccaccggcatccagaggaacagaacagtgtgctatgacctgagccccccagccctggccacccactacatgccctacggcatggccctgactgtgattggcttcctgctgccctttgctgccctgctggcctgctactgcctgctggcctgccgcctgtgccggcaggacggccctgctgagcctgtggcccaggagcggcggggcaaggccgccaggatggctgtggtggtggcctag

SEQ ID NO: 97556 - DNA, 387 bp, Artificial Sequence
  derived and/or modified sequence
atggagtgggacaatggaacaggccaggccctgggcctgccccccaccacctgtgtgtaccgggagaacttcaagcagctgctgctgccccctgtgtacagcgctgtgctggccgccggcctgcccctgaacatctgtgtgatcacccagatctgcaccagcagaagagccctgaccaggacagctgtgtacaccctgaacctggccctggccgacctgctgtatgcctgcagcctgcccctgctgatctacaactatgcccagggcgaccactggccctttggagactttgcctgccgcctggtgcgcttcctgttctacgccaacctgcacggcagcatcctcttcctgacctgcatctccttccagcgctacctgggcatctag

SEQ ID NO: 97557 - DNA, 987 bp, Artificial Sequence
  derived and/or modified sequence
atggagtgggacaacggcaccggccaggccctgggcctgccccccaccacgtgcgtttatcgcgaaaattttaagcagctgctgttgccccctgtctactctgctgtgttggcggcagggttgccactgaacatttgcgtcataacacagatctgtacatcacggcgggctctaaccaggacagcagtgtacacacttaacctggcactcgctgatttgctgtacgcatgttcgctgcccttgctgatatacaattacgcccagggagatcactggccctttggtgattttgcatgccgcctggtgagatttcttttttacgccaatttacatggatcaatcctgttcttgacatgtataagctttcagaggtacctaggaatctgtcacccactggcgccgtggcacaaacgcgggggccgacgtgccgcctggcttgtgtgcgtggctgtgtggttggccgtaacaacccagtgccttcctactgctatattcgcagccaccggaatccagcgcaaccggaccgtgtgctacgacctctctcctcccgccctggccacgcattatatgccgtacggtatggccctgactgttatcggatttctgctcccattcgccgcacttctcgcatgctactgtctgcttgcatgtcgattgtgtcgacaagacggacccgcagagccagtcgcgcaggaacggagaggcaaagctgcacgtatggccgtggtcgtggccgccgccttcgccatttctttcctgcctttccatattactaaaaccgcataccttgctgtccgcagcacccccggtgtaccttgcactgtattggaggcctttgcagctgcctataaagggacaagaccgtttgcatcagcaaacagcgtgttggatccgattctgttctatttcactcagaagaagtttcgacggaggcctcacgaactgttgcaaaaattgacagccaagtggcagcgccaggggcggtag

SEQ ID NO: 97558 - DNA, 987 bp, Artificial Sequence
  derived and/or modified sequence
atggagtgggacaacggcaccggccaggccctgggcctgccccccactacttgcgtttaccgagaaaatttcaagcagttgctgctacctcccgtttattcggccgtacttgccgccggacttcccttaaatatctgcgtgataacccaaatctgtacgagccgcagggcacttactcgcacggccgtgtatactctcaatttggctctggctgatttgctgtacgcctgtagtttgccgctgctgatatataattacgctcagggcgaccactggccttttggcgattttgcttgtcggttggttcgttttctattttacgcaaatctccacgggagcatcctgtttttgacttgcatatctttccagaggtacttgggtatatgccacccactggccccctggcacaagcggggcgggcgcagagctgcctggttggtttgcgtggccgtgtggttagccgtcactacacagtgtctccctacggccattttcgctgctacaggaatccaacggaatcgcactgtatgctatgacttgagcccgcccgctctggccactcactatatgccttatggcatggctcttaccgtgattggcttcctcctgcctttcgctgcactcctggcttgctattgcctgctggcatgtcggctgtgccgacaggatgggccggctgagccagtggctcaagaacgtcgcggtaaggcagcacgaatggcagttgtggtggcagcagccttcgctatcagtttcctcccctttcatatcacaaaaaccgcttatctggccgtccgttctacacctggcgtgccttgtactgttttggaggctttcgccgctgcctataagggaacccgcccctttgcaagtgccaactctgtgttggatccaatattgttctactttacccaaaagaagtttagaagacgaccacatgagctcctgcagaaactgactgcgaaatggcagagacaagggcggtag

SEQ ID NO: 97559 - DNA, 987 bp, Artificial Sequence
  derived and/or modified sequence
atggagtgggacaacggcaccggccaggccctgggcctgccccccacgacatgcgtgtatcgggagaactttaaacaactactcctgcctccggtgtacagcgccgtgctcgctgcaggactgccgctgaacatctgtgtgatcacacagatttgcactagccgcagagccctgacgaggacagctgtgtacaccctcaacctcgctctggccgacctgctgtacgcctgctcactgccgttgctcatctataattacgcacaaggagaccactggccatttggcgactttgcatgcaggctggttcgattcttgttctacgctaatctgcatggaagtatactgtttctgacctgtatttcattccaacggtatctcggcatctgtcatccactggccccctggcacaagaggggtgggaggcgcgccgcttggctcgtttgcgtggccgtatggttggcagtgaccacccagtgcttgcctacggccattttcgctgcaacaggtattcagagaaaccggactgtctgctacgacttgtctccccccgctctcgcaacgcactacatgccgtacgggatggccctcaccgtcatcggattcctgcttccttttgccgctctgcttgcctgttattgtctgctggcctgtagattatgccgtcaggatggacctgctgagcctgtcgcccaggagaggcgcggcaaagccgcaagaatggcagtggtagtggctgccgcattcgccattagttttcttccctttcacataacgaagactgcttacttagccgtccgatcgacaccaggagtaccgtgcaccgtgttggaagccttcgccgcagcatacaaggggacacgacccttcgcttctgcgaactcggtattggacccaatactgttctacttcacccagaagaagttccgcaggaggcctcatgaattattgcagaaactgacggccaaatggcagagacagggaagatag

SEQ ID NO: 97560 - DNA, 987 bp, Artificial Sequence
  derived and/or modified sequence
atggagtgggacaacggcaccggccaggccctgggcctgccccccacgacctgcgtgtatcgggagaattttaaacagttgctcctgccacctgtatatagcgctgtactcgccgctgggttgcccttgaacatatgcgtaattacacagatatgtacgtctagacgagccttgacgagaacggccgtgtatacactgaatctggccttagccgacctcctctatgcctgtagtctcccacttcttatctacaattatgctcagggcgaccactggccttttggagattttgcttgccggctggttaggttcctcttttatgctaatctccacggcagcattctcttcctcacgtgcataagtttccagcggtatctcggtatctgccaccctctggcaccctggcataagaggggcggacgtcgcgcggcgtggttggtctgtgttgctgtttggctcgccgtgaccacccagtgcttgccaaccgccatcttcgcagccaccgggatccagcgcaatcgtaccgtgtgctacgatctgtctccacccgctctggcaacccattacatgccatacggcatggctctgacagtgatcgggttcttactaccctttgcagccctgctagcctgttattgcctgctggcctgtaggctctgtaggcaggatggccctgctgagccagttgcccaggagcgacgtgggaaagccgctagaatggccgtggtggtcgctgcggccttcgccatctcatttcttcccttccacatcacgaagactgcttaccttgctgtacgctccaccccaggtgtgccttgtaccgtacttgaagcattcgccgcagcttataaggggactcgaccctttgcctccgcaaacagcgtgctcgacccgattctgttttacttcactcaaaagaagttcagacgaagaccccatgaactcctgcagaagctgactgccaaatggcaacgccagggtaggtag

SEQ ID NO: 97561 - DNA, 738 bp, Artificial Sequence
  derived and/or modified sequence
atggagtgggacaacggcaccggccaggccctgggcctgccccccacaacctgtgtgtatcgggagaacttcaagcagctgcttctcccccccgtctatagcgctgtgctcgcagcaggacttcccctaaacatttgtgttattactcaaatctgtaccagtagacgtgcactcacacgaaccgccgtgtacactctgaacctggcgctggcagacctgctctatgcatgtagtctgcctctcttgatatataattatgcccaaggggaccactggcctttcggcgattttgcttgccggctcgttaggttcctcttctacgccaacctccatggcagtatcctgtttttgacctgcatcagctttcagaggtatttagggatctgtcatcctctagccccatggcacaagagagggggtcgcagagcagcatggctggtctgtgtcgccgtgtggctggctgtcactactcagtgcctgcccacagcaatcttcgccgcaaccggtatacaacgcaataggaccgtctgctatgatctgagtccgccagctctcgccacgcattacatgccttacgggatggcactgactgtcattggctttctcctgcctttcgcggcccttctcgcatgttattgccttctggcctgccgattatgcagacaggacgggcctgccgagccagtggcccaggaacgccgcgggaaggcagccagaatggctgttgtcgtagcatag

SEQ ID NO: 97562 - DNA, 987 bp, Artificial Sequence
  derived and/or modified sequence
atggagtgggacaacggcaccggccaggccctgggcctgccccccactacatgtgtctatagagagaatttcaagcagttgttgttgccaccggtgtattctgcggtgctggctgcaggcctgcccttaaatatctgcgtgatcacccagatttgtacctcccggcgagcccttactcgaaccgcagtgtatacattgaatctggctctcgccgacctactctatgcctgctccctaccactgctcatctacaactacgctcagggcgaccactggcctttcggcgactttgcttgtagactcgttaggtttctgttttacgccaatcttcacggttctatcttgttcctgacatgcatttctttccagcggtatctggggatctgtcacccactcgccccctggcataagcgaggaggacgccgagccgcttggctggtgtgtgtggctgtctggcttgcggtgacaactcagtgccttcccacggctatctttgctgctactgggatccaacggaaccggacagtttgttacgatttgtcaccccctgcactcgccactcactatatgccctatggaatggcactgacagttattggatttctgctgccttttgccgctctgctggcatgctattgccttctggcctgtcggctttgcaggcaggacggtccggccgagccggttgcccaggagagaagaggaaaagccgccagaatggcagtagttgttgccgccgcctttgccattagttttttaccatttcacattacaaagacagcttacttggctgtgcgttccaccccgggcgtgccatgtactgtgctcgaagcgtttgcagcagcctataaaggcacccgcccatttgcctcagctaatagcgtgctggatcctattctgttttatttcacccagaagaaatttcgcaggaggcctcacgagcttttacagaagttgaccgccaagtggcaaaggcaggggcgctag

SEQ ID NO: 97563 - DNA, 987 bp, Artificial Sequence
  derived and/or modified sequence
atggagtgggacaacggcaccggccaggccctgggcctgccccccactacatgtgtatatcgggagaatttcaaacagttgcttctcccccccgtatactcagccgttttagcagccgggctccctctgaacatatgtgtgattacgcaaatatgtaccagtcgcagggctcttacgcgcaccgccgtttacaccctgaatttagcactggcagacctgctgtacgcttgcagtctgccactactgatctacaactacgcccaaggcgaccactggccctttggagacttcgcctgccgactcgtccgctttctgttctacgcaaaccttcacggctctatattgttcctgacctgcatctccttccagcgttacctcgggatctgtcatccgctcgccccatggcacaaaagaggagggaggcgggcggcctggctcgtgtgtgtcgcagtgtggctcgccgtgacaacccaatgcctgcccacagcaatattcgccgctacagggatccagcgaaatagaacagtatgctatgacctgtctccgcccgccctcgctacgcactacatgccgtacggcatggccttgacggtcatcggcttccttcttcctttcgcagctttactggcctgctattgtctcctggcctgccgcttatgtcgtcaagatggccctgccgagcccgtcgctcaagaaagacgcgggaaggctgcacgcatggcagttgtggtcgccgcagctttcgccatatcttttctcccgtttcacataacaaagacagcctacctcgccgtgagaagcactccaggtgtaccgtgtacagtattagaagccttcgcggcggcctacaaaggcaccagaccgttcgcatctgcaaatagcgtgttagatcccatcttattctacttcactcagaagaaattcagaagacgcccccatgaactgctgcagaagctgactgcaaagtggcagcggcaggggaggtag

SEQ ID NO: 97564 - DNA, 987 bp, Artificial Sequence
  derived and/or modified sequence
atggagtgggacaacggcaccggccaggccctgggcctgccccccacaacctgtgtgtaccgagagaactttaaacagctcctcctcccgcctgtatactccgcagtactcgccgccggcctgcctttaaacatctgtgtgattactcagatctgcacttctcgcagggctcttaccagaacagcagtgtacactctgaatttagcgttggctgatttgctgtacgcttgttctcttccattgctgatatataattatgcccaaggcgatcactggccttttggcgattttgcttgccgcctggtgcgcttcctgttctacgccaacctgcatggctcaatcctgtttctcacatgcatcagtttccagaggtatctcggaatctgccatccattagccccttggcacaagaggggaggcaggcgggctgcatggcttgtctgtgtggccgtgtggttggccgtgaccacccagtgcctgcccaccgcaatcttcgccgctaccgggatccaacggaacaggactgtgtgctacgatctttctccccctgccctggctacacactacatgccctacgggatggccctaactgttataggatttttgttaccatttgcagctctgctcgcctgctattgccttctcgcatgcaggctgtgcaggcaagatgggccggccgaaccggttgcccaagagcgcagaggcaaggctgcaaggatggcggtggtggtggccgctgcttttgccatttcgttcctgccatttcacatcaccaaaacagcttacctcgccgtgagaagcacgcctggcgtgccgtgtaccgtgctggaagccttcgccgctgcctacaagggcacgaggcctttcgcctctgccaactcggtgctcgacccaatcctcttctacttcacccaaaaaaaattccgccggcgaccccacgaactgttgcagaaattaaccgccaaatggcagcgccagggccgctag

SEQ ID NO: 97565 - DNA, 987 bp, Artificial Sequence
  derived and/or modified sequence
atggagtgggacaacggcaccggccaggccctgggcctgccccccactacttgcgtgtaccgtgaaaattttaagcagttgcttctaccaccagtctactctgctgtgctggctgcaggcttgccactgaacatttgtgtcatcacccaaatctgcaccagtaggcgagccctgacacggacagcagtttataccctcaaccttgccttggccgatctactctacgcgtgttccctgcctctattgatttacaattacgctcaaggcgatcactggccattcggggactttgcatgtaggctcgtgaggtttttgttctacgccaatttgcacgggtcaatactttttctcacatgcatctcatttcaacgctacctgggaatatgtcatcctctcgcaccatggcataaacgcggcggcagaagagctgcttggcttgtatgcgtcgctgtttggctagcagtcactactcagtgcctgcccactgccattttcgcagcaacaggcattcaacggaatcggacagtctgttatgatctgagccctccagctctcgccactcactatatgccgtacgggatggcacttacagtcatcgggttcttgctgcctttcgcagctctgttagcgtgctattgcctgttagcatgcagactctgccgccaagatggtccggctgaaccagtcgctcaggagcggaggggaaaagccgccagaatggcggtagttgttgcagctgcatttgccatctcattcctgccattccatatcaccaagactgcctacctggcagtgcgcagcacccctggcgttccctgcactgtcctcgaagcatttgcagccgcatataaggggacaagaccgtttgcttctgcaaatagcgtgctggaccccattcttttctacttcacacaaaagaagttccggcgaagaccacacgagcttctccaaaaattgaccgcgaaatggcaacgccaggggaggtag

SEQ ID NO: 97566 - DNA, 387 bp, Artificial Sequence
  derived and/or modified sequence
atggagtgggacaacggcaccggccaggccctgggcctgccccccaccacctgtgtatatagagagaactttaagcaacttctgctacctccggtgtacagcgcagttctcgccgccggccttcctctgaatatctgcgttatcacccagatatgtacctcccggagggctctcacacgcaccgctgtgtatacccttaatttggctcttgccgacttgctgtatgcatgctcactgcctctccttatttacaattacgcacaaggagaccactggccctttggtgactttgcctgtcgcctcgttagatttctcttctacgctaatcttcacggctccatactattcctgacatgtatctctttccaaaggtatctgggcatctag

SEQ ID NO: 97567 - DNA, 987 bp, Artificial Sequence
  derived and/or modified sequence
atggaatgggataacgggaccggccaagcgttgggtttgcctccaaccacttgtgtgtaccgcgagaacttcaagcagctcttactacctccagtgtattctgcggtactggccgctgggcttcctctgaacatttgcgtcatcacccaaatctgtacatcccgtagagctctcacccgaacagcggtatatacactgaatctcgccctggcagaccttctttatgcttgctcgttgccactgctgatctacaactatgctcagggagatcattggccatttggcgacttcgcctgccgactggtgaggtttttgttctacgcaaatttgcatggcagtattctcttcttgacgtgcatttcatttcagaggtacctgggcatctgtcaccccctcgcaccatggcacaaaagagggggacggcgtgcagcttggctggtgtgtgtggccgtgtggctggccgtcactacacagtgcttaccaacagcaatcttcgcggcaaccgggatccagcgaaatcgaaccgtttgttatgacctgtccccacctgccttggctacccactacatgccatacggcatggccctgactgtcataggcttcctactgcccttcgctgcgctgttagcctgctattgcctgctcgcttgccgcctttgtcgtcaggatggccctgcagagcctgtcgcccaagagcgaagaggcaaggccgctagaatggccgttgtcgtggcggctgccttcgccatctcctttttgccattccacatcacaaaaaccgcctacctcgctgtacggagcacacccggagtcccatgcaccgtcctcgaggcttttgctgcagcctacaaaggaacacggccttttgcctctgccaattcagtgctggatccaatccttttctactttacacagaaaaaattcagaaggcgcccacatgagttgcttcagaaactgactgcgaaatggcagcggcagggacggtag

SEQ ID NO: 97568 - DNA, 987 bp, Artificial Sequence
  derived and/or modified sequence
atggagtgggacaatggcactggtcaagctctcggactcccgccaaccacgtgtgtttacagagagaattttaaacagctgctgctgcctcctgtctatagcgcggtgctcgcagccggtctgccactcaacatttgcgttatcacccagatctgcacctctcgccgagccctgacaagaactgccgtgtacaccctgaaccttgcacttgcagacctcctgtatgcctgctcattgccactccttatctataattatgcccagggtgatcactggcccttcggcgattttgcttgccggctggtcaggttccttttctatgcaaacttgcatggttcaatccttttcctgacttgcatctccttccagcgttatttgggcatctgtcatcccctggccccatggcacaagcggggagggaggagagcggcatggctcgtttgcgtagcagtctggctggctgtcaccactcaatgcctgcccactgccatatttgccgcaaccgggattcagagaaatagaactgtgtgctacgatctgtcccctccagcccttgcgacgcattatatgccttacggaatggccttgactgtgatcgggttcctcttaccttttgccgcactgcttgcttgttactgtctactggcctgccgcctctgcaggcaggacgggccagcggagcccgtagcacaagagaggcgtggcaaagccgcaaggatggcagtcgtcgtagccgctgcattcgcgatttcttttctgcctttccacatcacgaagacagcttacctggccgtgcgctctaccccgggagtcccttgtaccgtactggaagccttcgccgctgcttataagggcacaaggccctttgccagcgcgaactctgtgctcgaccctatcctcttctactttactcagaagaagttccggcgacgaccgcacgagcttctccagaagcttactgcgaaatggcagcgacaagggcgatag

SEQ ID NO: 97569 - DNA, 987 bp, Artificial Sequence
  derived and/or modified sequence
atggagtgggacaatggaacagggcaggccttgggattgccccctaccacctgtgtgtatagagagaattttaaacaactcctcctcccaccagtgtacagcgccgtgctggccgcaggcctgcctcttaatatatgcgttatcactcagatatgtacttctaggcgcgctctgactcgcaccgcagtttatacccttaacctggccctcgcagatctcctttacgcgtgtagcctcccgcttctgatctacaactatgcacagggagaccattggccatttggcgattttgcctgcagactggtgcgatttctcttttatgctaatcttcacggcagtattttgtttttaacttgtatctcattccagcggtaccttgggatctgccaccctcttgcaccttggcataagagaggaggccgaagggctgcctggctagtctgtgtggcggtatggttagctgtgactactcagtgtttgcccacggcgatattcgcggctaccggcatccagaggaatcgcactgtatgctatgacctgtcacccccagctcttgccacacattacatgccgtacggcatggccctcactgttatcgggtttttgttgcccttcgccgctctccttgcttgctactgccttttagcttgtagattgtgtcgccaggatgggccagcagagcccgtggcccaagagagacgtggaaaggccgctcggatggcagtggtagtggccgcagcattcgcaatctctttcctgcccttccatattacgaagaccgcttacctcgccgttcggtccacccctggcgtcccctgcacagttctagaggcctttgcggcagcctataaaggtacccgcccattcgcatcagccaactctgtgctggatcctatattgttttattttacccaaaagaaattccggagacgtcctcacgaactgcttcagaagctcactgctaaatggcaacgacaaggaaggtag

SEQ ID NO: 97570 - DNA, 987 bp, Artificial Sequence
  derived and/or modified sequence
atggagtgggacaatggcacaggccaggcgctggggctgccccctacaacatgcgtataccgagaaaacttcaagcaactactcctgccgcctgtgtattccgctgtgctggcggctggcctacccctaaacatctgtgtaattacacagatctgtactagccggagagccctcacaagaaccgccgtgtacactctgaatctggccctcgccgacctgctttatgcttgttccctgcccctgctgatttacaattatgctcagggcgaccactggccatttggggacttcgcatgtcgcctagtgagattcctcttctatgccaacttacatggatccatcctgttcctaacctgcatctcattccagcgctatctgggcatctgccatccacttgcaccttggcacaagaggggcggaaggcgcgctgcctggcttgtgtgcgtcgctgtctggctcgcagtcacaacccaatgcctgcccaccgctatctttgccgctactggcattcaacggaatagaaccgtgtgctacgatttatccccgccagcccttgccactcactacatgccctacgggatggcgctgacagtgattggatttctgctgccgtttgcagcacttttggcctgctactgcctcctggcctgccggttatgcagacaggacggtcccgctgaaccggtagctcaggagaggagaggtaaagccgctcgcatggcagtggtggtggccgctgcattcgccatctcctttctaccatttcacatcactaagacagcctatctggcagtccggtctacccccggagtgccttgtacagtccttgaggccttcgccgctgcctataagggtacccgaccctttgcaagtgccaacagtgtcctggacccaatcctgttctattttacacaaaaaaagttcaggcggaggccacacgagttacttcagaagttaacagcaaagtggcaaaggcaggggagatag

SEQ ID NO: 97571 - DNA, 738 bp, Artificial Sequence
  derived and/or modified sequence
atggagtgggataacggaaccgggcaggctctcggattacctcccacaacctgcgtgtaccgggaaaactttaaacagcttctattaccgcctgtgtacagcgccgtactggcggctggtttgcccctgaacatttgcgtgattacacagatatgcacctctaggcgagcactcaccaggacagcagtgtatacccttaatctcgcattagctgatctgctctacgcgtgttcgctgcctctgctaatctacaactatgctcagggagatcactggcccttcggcgacttcgcctgtagattagttcggttcctattctacgccaatttgcatggctccatcctcttcctgacgtgcataagcttccagcgctatctgggcatctgccacccactggcgccatggcataagcgcggaggaaggagagcagcatggctggtgtgcgtggccgtctggttagcagtcacgacgcagtgcctgcctacagctattttcgctgccaccggtatccagagaaacagaaccgtgtgctatgatctcagcccacctgccttggccacccactatatgccttacgggatggcactgactgttatagggttcctgttaccatttgccgctctcctggcatgctactgtctcctggcctgtaggctgtgccggcaggatggtccagccgaacccgtcgcacaggagaggcgcggaaaagctgcacggatggccgtggtggtcgcatag

SEQ ID NO: 97572 - DNA, 987 bp, Artificial Sequence
  derived and/or modified sequence
atggaatgggacaatgggaccgggcaggcactcggtctcccacccacaacctgcgtataccgggagaacttcaagcagctactcctccccccagtgtactcagctgtgttagcggcaggacttcctttgaatatctgcgttatcacacagatatgtacgagccggcgagccctgactagaacagccgtctataccctgaacctggctctggctgacttgctttacgcctgcagcctccccctgctgatctacaattacgcccaaggtgatcattggcccttcggcgactttgcatgcagactcgtacggttcctcttttatgctaacctccacggctccattcttttcttaacttgtatctcctttcagagatatctgggcatatgtcatccattggctccatggcacaagcgaggaggcagacgcgcagcatggctggtgtgcgtcgcagtgtggctagccgtgacaacgcagtgtctgcccacagcaatcttcgcggctacaggcattcagcgaaatcggaccgtgtgctatgatctgtcccccccagctctggctacccactacatgccatacggcatggctcttacagtgattggctttcttttgccctttgccgctctgttggcgtgctattgcttactcgcatgccgcttgtgccggcaggacggccctgccgagcctgtggcccaggagaggcgcggtaaggcggctcgcatggcggtggtcgttgctgccgctttcgccatctcattcctgccctttcacattacaaaaacagcatacctcgccgtcagatctactcccggagtgccatgtaccgtgctcgaagcatttgcggctgcgtacaaaggcacaaggcctttcgctagcgctaactccgtcctcgatcccatcctattttattttacccagaagaagttccggcgacgacctcatgagcttctgcagaagctgaccgcaaagtggcagaggcagggcaggtag

SEQ ID NO: 97573 - DNA, 987 bp, Artificial Sequence
  derived and/or modified sequence
atggaatgggacaatgggacaggccaggcacttggccttcctccaaccacttgtgtgtatcgagagaacttcaaacagctgttgcttccacccgtgtatagcgcagtgctggctgcgggtctcccgttgaatatatgtgtgatcactcagatctgcacatccagaagggccctgactcggacagcagtgtatactctcaacctagctctggcggatttactgtatgcatgcagcctgcctttactgatctataattacgctcagggcgatcactggccattcggtgactttgcatgcaggttggtgagattcctgttttacgcaaacctgcatggctctatcttattcctcacatgcatcagtttccagcggtaccttgggatttgccaccccctcgccccatggcataagcgcggaggcaggagggccgcttggctcgtgtgcgtagctgtgtggctcgccgtcactactcagtgcctccctacagcaatcttcgcagctactggcatccagagaaacagaactgtctgttacgatttgtcaccacccgcactggcgacacattatatgccctacggcatggctctaactgtcattgggttcctgctcccctttgctgctttgctggcctgttattgcctgttagcgtgtcgcctctgccgccaggacgggcctgccgaacccgtcgcccaagagagacggggaaaggctgcacgcatggcagtcgtggttgccgcagctttcgctatttctttccttccatttcatatcaccaaaactgcctatcttgcggtccgctccacaccaggagttccttgcactgtactagaggctttcgctgccgcttacaaaggaaccaggccattcgccagtgcaaattccgttctcgaccccatactgttttactttacccagaagaaatttagacggaggccccacgaacttctacagaaactaactgccaagtggcagaggcagggtaggtag

SEQ ID NO: 97574 - DNA, 987 bp, Artificial Sequence
  derived and/or modified sequence
atggagtgggataatggtactgggcaagcattgggactacccccaacaacctgtgtgtaccgagagaattttaagcagttgctcttaccacccgtctacagcgccgttctagcagcagggttgcctctgaacatctgtgtcatcacacaaatatgcacctccagacgcgcactgacacgcacagccgtgtatacgctcaacctggctctagcggatctcttatatgcatgttccctccctctgttaatctacaactatgctcagggagatcattggccgtttggagacttcgcatgcaggttagtgaggttcctgttctatgccaacctgcatgggagcatattgttcctgacttgcatcagcttccagcggtatttgggtatctgtcatccgctggccccttggcataagcgcggaggcaggcgggcagcctggcttgtctgcgtggcagtttggctggccgtcactactcaatgtcttccaacagccattttcgcggctaccggaatccagcggaatcggactgtatgttatgacctcagtccccctgcactcgccacacactatatgccgtatggcatggctcttactgtaattggcttcttgctcccatttgcagcgttattggcctgctattgcttgttggcctgtagactgtgccgacaagatggaccagccgaacccgtagctcaagagcggcgagggaaagcagccagaatggcggtggtggtggctgcggcattcgctatcagcttcctgccatttcatatcaccaaaacagcgtatctggccgtgcgatctacaccaggcgttccttgcacggtcttggaggccttcgctgcggcatacaagggcacccgcccttttgcatccgctaactcagttttagaccccattttattctacttcacgcaaaaaaagttcagacgcagaccacatgagctgttacagaaactgacggccaaatggcagcggcagggcaggtag

SEQ ID NO: 97575 - DNA, 987 bp, Artificial Sequence
  derived and/or modified sequence
atggagtgggacaacggaacagggcaagctctgggtctgcctcccactacttgtgtctacagggaaaacttcaagcagctcctcctgcctccagtttatagtgctgtgctcgctgccggtttacctttaaacatttgtgtgatcactcagatttgtacgagccggagagccctgacaaggactgctgtgtatactctaaatttggctcttgccgacctcctctacgcttgcagtctgcctctcctgatttataactatgcccagggtgaccactggccattcggggatttcgcctgccgacttgtccgctttctattttacgctaatctccacggatctatcctgttcttaacgtgcatctccttccagcgctacctagggatctgtcatcctttggccccttggcacaaacgcggaggcagacgcgctgcatggcttgtctgcgttgctgtttggttggcggtcacaacacagtgtctcccgacagccatattcgccgctactggaattcagcgaaacaggactgtctgctacgatctttctccacccgcactggctacacactatatgccctacggaatggcattaacagtgattgggttcctgctgccattcgccgctttactcgcatgctactgcctcctggcctgcaggctctgtcgacaggacggtccagccgagccggtcgcccaggagcggagaggcaaggctgcaaggatggctgtcgtcgtggctgcagcatttgccatctcgttccttccattccatatcactaagacagcctatttagctgtgaggtccactccaggcgtgccttgcacagttctggaggcatttgctgcagcatacaaaggaacccgaccctttgcctcggccaattctgtgctcgaccctattctgttctactttacgcagaagaagttccgcagaagacctcatgaattactccagaagttgacagctaaatggcagcggcagggaagatag

SEQ ID NO: 97576 - DNA, 387 bp, Artificial Sequence
  derived and/or modified sequence
atggaatgggacaacgggacgggccaggctcttggtcttcccccaacaacatgcgtttacagggagaatttcaaacagctgctcctcccccctgtgtacagcgccgttttggcagctggcctgccacttaatatatgcgtgatcacccagatttgcaccagccgcagagccctgacaaggactgcagtgtacaccctgaacctggcattggccgacttgctctacgcttgcagcctcccattgctaatctataactatgcccagggcgaccattggccattcggtgacttcgcatgtaggctcgtgcggtttctgttctacgctaatctgcatggttctatattatttctgacctgtatttctttccagagatatctggggatatag

SEQ ID NO: 97577 - DNA, 987 bp, Artificial Sequence
  derived and/or modified sequence
atggagtgggacaacggcaccggccaggccctgggcctgccccccaccacctgcgtgtacagagagaacttcaagcagctgctgctgccccccgtgtacagcgccgtgctggccgccggcctgcccctgaacatctgcgtgatcacccagatctgcaccagcagaagagccctgaccagaaccgccgtgtacaccctgaacctggccctggccgacctgctgtacgcctgcagcctgcccctgctgatctacaactacgcccagggcgaccactggcccttcggcgacttcgcctgcagactggtgagattcctgttctacgccaacctgcacggcagcatcctgttcctgacctgcatcagcttccagagatacctgggcatctgccaccccctggccccctggcacaagagaggcggcagaagagccgcctggctggtgtgcgtggccgtgtggctggccgtgaccacccagtgcctgcccaccgccatcttcgccgccaccggcatccagagaaacagaaccgtgtgctacgacctgagcccccccgccctggccacccactacatgccctacggcatggccctgaccgtgatcggcttcctgctgcccttcgccgccctgctggcctgctactgcctgctggcctgcagactgtgcagacaggacggccccgccgagcccgtggcccaggagagaagaggcaaggccgccagaatggccgtggtggtggccgccgccttcgccatcagcttcctgcccttccacatcaccaagaccgcctacctggccgtgagaagcacccccggcgtgccctgcaccgtgctggaggccttcgccgccgcctacaagggcaccagacccttcgccagcgccaacagcgtgctggaccccatcctgttctacttcacccagaagaagttcagaagaagaccccacgagctgctgcagaagctgaccgccaagtggcagagacagggcagatag

SEQ ID NO: 97578 - DNA, 738 bp, Artificial Sequence
  derived and/or modified sequence
atggagtgggacaacggcaccggccaggccctgggcctgccccccaccacctgcgtgtacagagagaacttcaagcagctgctgctgccccccgtgtacagcgccgtgctggccgccggcctgcccctgaacatctgcgtgatcacccagatctgcaccagcagaagagccctgaccagaaccgccgtgtacaccctgaacctggccctggccgacctgctgtacgcctgcagcctgcccctgctgatctacaactacgcccagggcgaccactggcccttcggcgacttcgcctgcagactggtgagattcctgttctacgccaacctgcacggcagcatcctgttcctgacctgcatcagcttccagagatacctgggcatctgccaccccctggccccctggcacaagagaggcggcagaagagccgcctggctggtgtgcgtggccgtgtggctggccgtgaccacccagtgcctgcccaccgccatcttcgccgccaccggcatccagagaaacagaaccgtgtgctacgacctgagcccccccgccctggccacccactacatgccctacggcatggccctgaccgtgatcggcttcctgctgcccttcgccgccctgctggcctgctactgcctgctggcctgcagactgtgcagacaggacggccccgccgagcccgtggcccaggagagaagaggcaaggccgccagaatggccgtggtggtggcctag

SEQ ID NO: 97579 - DNA, 387 bp, Artificial Sequence
  derived and/or modified sequence
atggagtgggacaacggcaccggccaggccctgggcctgccccccaccacctgcgtgtacagagagaacttcaagcagctgctgctgccccccgtgtacagcgccgtgctggccgccggcctgcccctgaacatctgcgtgatcacccagatctgcaccagcagaagagccctgaccagaaccgccgtgtacaccctgaacctggccctggccgacctgctgtacgcctgcagcctgcccctgctgatctacaactacgcccagggcgaccactggcccttcggcgacttcgcctgcagactggtgagattcctgttctacgccaacctgcacggcagcatcctgttcctgacctgcatcagcttccagagatacctgggcatctag

SEQ ID NO: 97580 - DNA, 2398 bp, Artificial Sequence
  derived and/or modified sequence
gtcagcattggtgtaaaggactggagcttcagggttctcgggattcgagtcctggccctgctgcttgccagctctgtgctgtggcaagttacttcctctccccaggtctctcggtttcctcatctgctgcctctccagacttctgccagaacattgcacgcgacagtttcaggcacagaactgactggcagcaggggctgctccacgagtgggaatttgctccagcacttcacggactgcaagcgaggcacttgctaactcttggcctccctgaacataggaaacccacctgggcagccatggaatgggacaatggcacaggccaggctctgggcttgccacccaccacctgtgtctaccgcgagaacttcaagcaactgctgctgccacctgtgtattcggcggtgctggcggctggcctgccgctgaacatctgtgtcattacccagatctgcacgtcccgccgggccctgacccgcacggccgtgtacaccctaaaccttgctctggctgacctgctatatgcctgctccctgcccctgctcatctacaactatgcccaaggtgatcactggccctttggcgacttcgcctgccgcctggtccgcttcctcttctatgccaacctgcacggcagcatcctcttcctcacctgcatcagcttccagcgctacctgggcatctgccacccgctggccccctggcacaaacgtgggggccgccgggctgcctggctagtgtgtgtagccgtgtggctggccgtgacaacccagtgcctgcccacagccatcttcgctgccacaggcatccagcgtaaccgcactgtctgctatgacctcagcccgcctgccctggccacccactatatgccctatggcatggctctcactgtcatcggcttcctgctgccctttgctgccctgctggcctgctactgtctcctggcctgccgcctgtgccgccaggatggcccggcagagcctgtggcccaggagcggcgtggcaaggcggcccgcatggccgtggtggtggctgctgcctttgccatcagcttcctgccttttcacatcaccaagacagcctacctggcagtgcgctcgacgccgggcgtcccctgcactgtattggaggcctttgcagcggcctacaaaggcacgcggccgtttgccagtgccaacagcgtgctggaccccatcctcttctacttcacccagaagaagttccgccggcgaccacatgagctcctacagaaactcacagccaaatggcagaggcagggtcgctgagtcctccaggtcctgggcagccttcatatttgccattgtgtccggggcaccaggagccccaccaaccccaaaccatgcggagaattagagttcagctcagctgggcatggagttaagatccctcacaggacccagaagctcaccaaaaactatttcttcagccccttctctggcccagaccctgtgggcatggagatggacagacctgggcctggctcttgagaggtcccagtcagccatggagagctggggaaaccacattaaggtgctcacaaaaatacagtgtgacgtgtactgtcatcaaggggtatgctccatgctttgagtcaccaatgaagcgggtgagggaagatgagagggggaggtgagagcttctgggaaggggcatttgagctgggttttgagggatgattatgagctctctggagaggagtgatattccatttatttagaaagcctttactgacaccttgtgctcaggcctgtgttggttctggggccctagaagaaccagtcctagccctggtccatacgggctcccaactgctggaagtacagactggcacagcaacatcagggttgtgacagagggaagcatggctggggggagggggtacacagacagtgcccatgacccagtccaaggagtcaggaaagagctctctgaggagggagcatctgagccagatgttgagggctgagtgggaacttggcaagcagaagtggggagcactttaatgcaacccaggtatgctccatgcatatccagctgggccagcctcgtgctgggctctgccctgggcagacaggcagagggccagagcagaggacacatggccttgcgtgtgtgaaagctgagaaaatgggagctgtgcttcagctaccctccagacaagggcaagagttagccagatgctccaggcagtgggaagccaatggagggattaagcggcggaagcttcttagaagaggcagggggcgaagtgcagtggctcatgcctgtaatctcagcaatttgggaggccaaggaaggaggaatgcttgagcccaagagttttagaccagcctgggcaacacagtaagaccctgtttctacaaaaaaatataaaaaa

SEQ ID NO: 97581 - DNA, 2351 bp, Artificial Sequence
  derived and/or modified sequence
accggtggtcagagtgaaacagaacagaacgggaggtttcacaatgtccttccatacaatctctggaatctatagataacaacagctgctaggtcaggggtcgaattttaactaccaggcttaggtcaggcaggcccaggcctggtttcgggtctggttccttggtttcgggtctggttccttggtttcaggtctggtttttaggcgccgggctacctgcctttagtttcgcttctctttccttttccgagtataaaacagtatgagagggtctctctcctccctcagtgccatcctcatccctgggtgggagttgtctggatccatagggttggagccacagataacagagccattaatctcggggtctcagcctctcttaacggaccttccaggcactgctgagaaaaccaggttaatggtttcctgcggcagcaatgagcagaagcagggccatctccagactccagagaagccaggagagggctggggtgataatggggaggaggataaaaaacagccacccaatgcgtgccttccctgtgccaggcccttgtcctgaaatgttatctcactccatcctcccaacagtcccttgggctaaattggtgatgctgcttgtttgagtgagcaaacagagggtgaatgaagtgacttgcgggcagctgggtagaggatgagtcagcattggtgtaaaggactggagcttcagggttctcgggattcgagtcctggccctgctgcttgccagctctgtgctgtggcaagttacttcctctccccaggtctctcggtttcctcatctgctgcctctccagacttctgccagaacattgcacgcgacagtttcaggcacagaactgactggcagcaggggctgctccacgagtgggaatttgctccagcacttcacggactgcaagcgaggcacttgctaactcttggataacaagacctctgccagaagaaccatggctttggaaggcggagttcaggctgaggagatgggtgcggtcctcagtgagcccctgcctccctgaacataggaaacccacctgggcagccatggaatgggacaatggcacaggccaggctctgggcttgccacccaccacctgtgtctaccgcgagaacttcaagcaactgctgctgccacctgtgtattcggcggtgctggcggctggcctgccgctgaacatctgtgtcattacccagatctgcacgtcccgccgggccctgacccgcacggccgtgtacaccctaaaccttgctctggctgacctgctatatgcctgctccctgcccctgctcatctacaactatgcccaaggtgatcactggccctttggcgacttcgcctgccgcctggtccgcttcctcttctatgccaacctgcacggcagcatcctcttcctcacctgcatcagcttccagcgctacctgggcatctgccacccgctggccccctggcacaaacgtgggggccgccgggctgcctggctagtgtgtgtagccgtgtggctggccgtgacaacccagtgcctgcccacagccatcttcgctgccacaggcatccagcgtaaccgcactgtctgctatgacctcagcccgcctgccctggccacccactatatgccctatggcatggctctcactgtcatcggcttcctgctgccctttgctgccctgctggcctgctactgtctcctggcctgccgcctgtgccgccaggatggcccggcagagcctgtggcccaggagcggcgtggcaaggcggcccgcatggccgtggtggtggctgctgcctttgccatcagcttcctgccttttcacatcaccaagacagcctacctggcagtgcgctcgacgccgggcgtcccctgcactgtattggaggcctttgcagcggcctacaaaggcacgcggccgtttgccagtgccaacagcgtgctggaccccatcctcttctacttcacccagaagaagttccgccggcgaccacatgagctcctacagaaactcacagccaaatggcagaggcagggtcgctgagtcctccaggtcctgggcagccttcatatttgccattgtgtccggggcaccaggagccccaccaaccccaaaccatgcggagaattagagttcagctcagctgggcatggagttaagatccctcacaggacccagaagctcaccaaaaactatttcttcagccccttctctggcccagaccctgtgggcatggagatggacagacctgggcctggctcttgagaggtcccagtcagccatggagagctggggaaaccacattaaggtgctcacaaaaatacagtgtgacgtgtactgtc

SEQ ID NO: 97582 - protein, 199 aa, Artificial Sequence
  derived and/or modified sequence
MANRGPAYGLSREVQQKIEKQYDADLEQILIQWITTQCRKDVGRPQPGRENFQNWLKDGTVLCELINALYPEGQAPVKKIQASTMAFKQMEQISQFLQAAERYGINTTDIFQTVDLWEGKNMACVQRTLMNLGGLAVARDDGLFSGDPNWFPKKSKENPRNFSDNQLQEGKNVIGLQMGTNRGASQAGMTGYGMPRQIL

SEQ ID NO: 97583 - protein, 220 aa, Artificial Sequence
  derived and/or modified sequence
MSAFSLALALVSSPQPPPPIGMANRGPAYGLSREVQQKIEKQYDADLEQILIQWITTQCRKDVGRPQPGRENFQNWLKDGTVLCELINALYPEGQAPVKKIQASTMAFKQMEQISQFLQAAERYGINTTDIFQTVDLWEGKNMACVQRTLMNLGGLAVARDDGLFSGDPNWFPKKSKENPRNFSDNQLQEGKNVIGLQMGTNRGASQAGMTGYGMPRQIL

SEQ ID NO: 97584 - protein, 187 aa, Artificial Sequence
  derived and/or modified sequence
MANRGPAYGLSREVQQKIEKQYDADLEQILIQWITTQCRKDVGRPQPGRENFQNWLKDGTVLCELINALYPEGQAPVKKIQASTMAFKQMEQISQFLQAAERYGINTTDIFQTVDLWEGKNMACVQRTLMNLGGLAVARDDGLFSGDPNWFPKKSKENPRNFSDNQLQEGKNVIGLQMGTNRGASQA

SEQ ID NO: 97585 - DNA, 663 bp, Artificial Sequence
  derived and/or modified sequence
atgagcgccttcagcctggccctggccctggtgagcagcccccagccccccccccccatcggcatggccaacagaggccccgcctacggcctgagcagagaggtgcagcagaagatcgagaagcagtacgacgccgacctggagcagatcctgatccagtggatcaccacccagtgcagaaaggacgtgggcagaccccagcccggcagagagaacttccagaactggctgaaggacggcaccgtgctgtgcgagctgatcaacgccctgtaccccgagggccaggcccccgtgaagaagatccaggccagcaccatggccttcaagcagatggagcagatcagccagttcctgcaggccgccgagagatacggcatcaacaccaccgacatcttccagaccgtggacctgtgggagggcaagaacatggcctgcgtgcagagaaccctgatgaacctgggcggcctggccgtggccagagacgacggcctgttcagcggcgaccccaactggttccccaagaagagcaaggagaaccccagaaacttcagcgacaaccagctgcaggagggcaagaacgtgatcggcctgcagatgggcaccaacagaggcgccagccaggccggcatgaccggctacggcatgcccagacagatcctgtag

SEQ ID NO: 97586 - DNA, 663 bp, Artificial Sequence
  derived and/or modified sequence
atgagcgccttcagcttagccttggcccttgtctcatctcctcagcctcccccgccaatagggatggctaatcgcgggcctgcctatggcctttctagagaggttcaacagaagattgagaagcagtatgacgcagaccttgaacagatcttaattcagtggattactacgcaatgtaggaaggatgtcggccgaccccagcccggtcgggagaattttcagaattggctgaaagacgggacagtgctctgcgagctgatcaacgccctgtatcctgagggacaggcaccagtgaaaaaaatccaggccagcaccatggcttttaaacagatggaacagatttcacagttcctgcaggccgctgaacgatacggcattaacaccaccgatatctttcagaccgtagacctctgggagggtaaaaatatggcctgcgtgcagcggactctaatgaacctcgggggactggctgttgccagagacgatggactttttagcggagaccctaactggtttcccaagaagtcaaaggagaaccctagaaattttagtgacaaccagctgcaggagggcaaaaatgtcatcggattgcaaatgggaacgaataggggcgcctcccaagctggtatgactgggtatggaatgccaaggcaaatcttgtag

SEQ ID NO: 97587 - DNA, 663 bp, Artificial Sequence
  derived and/or modified sequence
atgtctgccttcagcctggccctggccctggtgagcagcccccagcccccaccacccatcggcatggccaacagaggccctgcctacggcctgagccgggaggtgcagcagaagattgagaagcagtatgatgctgacctggagcagatcctgatccagtggatcaccacccagtgcaggaaggatgtgggccggccccagcccggccgggagaacttccagaactggctgaaggatggcaccgtgctgtgtgagctgatcaatgccctgtacccagagggccaggcccctgtgaagaagatccaggccagcaccatggccttcaagcagatggagcagatcagccagttcctgcaggccgctgagagatatggcatcaacaccacagacatcttccagacagtggacctgtgggagggcaagaacatggcctgtgtgcagaggaccctgatgaacctgggcggcctggccgtggccagagatgatggcctcttcagcggggaccccaactggttccccaagaagagcaaggagaaccccaggaacttcagtgacaaccagctgcaggagggcaagaatgtgattggcctgcagatgggcaccaacagaggagccagccaggccggcatgacaggctacggcatgccccggcagatcctgtag

SEQ ID NO: 97588 - DNA, 663 bp, Artificial Sequence
  derived and/or modified sequence
atgagcgccttcagcctggccctggccctggtgagcagcccccagcctcccccacccatcggaatggcgaatcgggggccagcctacgggctgtcccgtgaggttcagcagaagattgaaaaacagtacgacgctgatctggaacagatcctgatacaatggatcacaacccagtgccggaaggatgtgggacggcctcagccaggacgggagaactttcagaattggctgaaagacggcactgtgctgtgcgaactcatcaacgctctgtacccggaagggcaggcaccagttaaaaagattcaagcctcaacaatggcatttaagcaaatggagcagatatctcagttcctgcaggcggctgagaggtatggcatcaataccaccgacattttccaaaccgttgacctgtgggaaggcaaaaacatggcttgcgtgcagaggactttgatgaatcttggtgggctggctgtcgctagagacgatggtttgttttctggggatcctaattggttcccgaaaaaaagcaaagaaaatccccgcaacttctccgataaccagctacaagagggcaaaaacgtgatcggactgcagatgggcacaaacagaggtgcctctcaggcaggaatgacgggatatggtatgccaagacaaattctgtag

SEQ ID NO: 97589 - DNA, 663 bp, Artificial Sequence
  derived and/or modified sequence
atgtccgctttctcgctcgcgctcgctctcgtttcctctccacagcctccccctcccatcggtatggcaaaccggggtcctgcttacggactgtccagagaagtgcagcagaagatcgagaaacagtatgatgcagacttggaacagatcctgatccagtggattacgacccaatgtcgaaaagatgtaggcagaccgcagccaggacgagagaatttccagaattggctgaaagacggaaccgtcctctgtgaactcattaacgcgttgtatcctgaaggacaggcaccagttaaaaagatacaggcttccacaatggcctttaaacagatggagcagatctcacagtttctgcaggccgctgagcgctatgggattaatactacggatatttttcagaccgtagacctgtgggagggaaagaacatggcgtgtgtgcaacgaacactgatgaatctggggggtttggccgtggcccgagatgacggcctcttctcgggagatcctaattggtttccaaagaaaagtaaggagaatcctcggaatttctccgataaccagctgcaggaaggcaaaaacgtgatcgggctgcagatgggcacaaacagaggcgctagccaggcaggcatgaccgggtacggcatgcctcggcaaatcctctag

SEQ ID NO: 97590 - DNA, 709 bp, Artificial Sequence
  derived and/or modified sequence
cctccccccgcgccctgtgcctcctggggctacctgaagccggtgtcctgggagatctctccccgcagccaccgccacccattggaatggccaacaggggacctgcatatggcctgagccgggaggtgcagcagaagattgagaaacaatatgatgcagatctggagcagatcctgatccagtggatcaccacccagtgccgaaaggatgtgggccggccccagcctggacgcgagaacttccagaactggctcaaggatggcacggtgctatgtgagctcattaatgcactgtaccccgaggggcaggccccagtaaagaagatccaggcctccaccatggccttcaagcagatggagcagatctctcagttcctgcaagcagctgagcgctatggcattaacaccactgacatcttccaaactgtggacctctgggaaggaaagaacatggcctgtgtgcagcggacgctgatgaatctgggtgggctggcagtagcccgagatgatgggctcttctctggggatcccaactggttccctaagaaatccaaggagaatcctcggaacttctcggataaccagctgcaagagggcaagaacgtgatcgggttacagatgggcaccaaccgcggggcgtctcaggcaggcatgactggctacgggatgccacgccagatcctctgatcccaccccaggccttgcccctg

SEQ ID NO: 97591 - DNA, 1603 bp, Artificial Sequence
  derived and/or modified sequence
cggtggtgaggggctgccctacggtggttcccttaattgtgggccgccccccatccttgctgctggctgtggcacctcgctctgtgggctggtgccctcactgtgctgctctttgagaacactccctgtcccaaatctgagttgggaagttctcctgtgttccatctgcacggtggatggagagtccctttgtcttcccaattaaacaccctagccaagaaccctgaagtcctccctgcccccacccatgtccgccttttctttggctttggctttggtgagctccccgcagccaccgccacccattggaatggccaacaggggacctgcatatggcctgagccgggaggtgcagcagaagattgagaaacaatatgatgcagatctggagcagatcctgatccagtggatcaccacccagtgccgaaaggatgtgggccggccccagcctggacgcgagaacttccagaactggctcaaggatggcacggtgctatgtgagctcattaatgcactgtaccccgaggggcaggccccagtaaagaagatccaggcctccaccatggccttcaagcagatggagcagatctctcagttcctgcaagcagctgagcgctatggcattaacaccactgacatcttccaaactgtggacctctgggaaggaaagaacatggcctgtgtgcagcggacgctgatgaatctgggtgggctggcagtagcccgagatgatgggctcttctctggggatcccaactggttccctaagaaatccaaggagaatcctcggaacttctcggataaccagctgcaagagggcaagaacgtgatcgggttacagatgggcaccaaccgcggggcgtctcaggcaggcatgactggctacgggatgccacgccagatcctctgatcccaccccaggccttgcccctgccctcccacgaatggttaatatatatgtagatatatattttagcagtgacattcccagagagccccagagctctcaagctcctttctgtcagggtggggggttcagcctgtcctgtcacctctgaggtgcctgctggcatcctctcccccatgcttactaatacattcccttccccatagccatcaaaactggaccaactggcctcttcctttcccctgggaccaaaatttaggggcctcagtccctcaccgccatgccctggcctattctgtctctccttcttccccctggcctgttctgtctctgagctctgtgtcctccgttcattccatggctgggagtcactgatgctgcctctgccttctgatgctggactggccttgcttctacaagtatgcttctcccacagctgtggctgcaggaacttaatttatagggaggagcctgtggcagctgctgccccagccacagctgcactgactgtgctcaccacacatctggggcagccttccctggcaggggccctcgtggcttctcattttccattcccttcactgtggctaaggggtggggtgaggggatggagagggagggctgcctaccatggtctggggcttgaggaagatgagtttgttgatttaaataaagaatttgtcatttttgaatgga

SEQ ID NO: 97592 - DNA, 1604 bp, Artificial Sequence
  derived and/or modified sequence
tggaggctgaggtactcacgggtggagaccactgcagccgcctttgtagattcagactccccgaacctttaacccttgctctggtctactgtccctctgtctcaagcagtcctccctccttctgcgctgcggcgcctttaaaccttcttggcccttgccccgccccgggtccgccccgtctgaggcgggaccctcctgaaaatccccggctgggcagggcgcaccacttgcagctgcagcccttgccttgagtcagtgcgccgctctccagcccgcttgaacgctccccgcagccaccgccacccattggaatggccaacaggggacctgcatatggcctgagccgggaggtgcagcagaagattgagaaacaatatgatgcagatctggagcagatcctgatccagtggatcaccacccagtgccgaaaggatgtgggccggccccagcctggacgcgagaacttccagaactggctcaaggatggcacggtgctatgtgagctcattaatgcactgtaccccgaggggcaggccccagtaaagaagatccaggcctccaccatggccttcaagcagatggagcagatctctcagttcctgcaagcagctgagcgctatggcattaacaccactgacatcttccaaactgtggacctctgggaaggaaagaacatggcctgtgtgcagcggacgctgatgaatctgggtgggctggcagtagcccgagatgatgggctcttctctggggatcccaactggttccctaagaaatccaaggagaatcctcggaacttctcggataaccagctgcaagagggcaagaacgtgatcgggttacagatgggcaccaaccgcggggcgtctcaggcaggcatgactggctacgggatgccacgccagatcctctgatcccaccccaggccttgcccctgccctcccacgaatggttaatatatatgtagatatatattttagcagtgacattcccagagagccccagagctctcaagctcctttctgtcagggtggggggttcagcctgtcctgtcacctctgaggtgcctgctggcatcctctcccccatgcttactaatacattcccttccccatagccatcaaaactggaccaactggcctcttcctttcccctgggaccaaaatttaggggcctcagtccctcaccgccatgccctggcctattctgtctctccttcttccccctggcctgttctgtctctgagctctgtgtcctccgttcattccatggctgggagtcactgatgctgcctctgccttctgatgctggactggccttgcttctacaagtatgcttctcccacagctgtggctgcaggaacttaatttatagggaggagcctgtggcagctgctgccccagccacagctgcactgactgtgctcaccacacatctggggcagccttccctggcaggggccctcgtggcttctcattttccattcccttcactgtggctaaggggtggggtgaggggatggagagggagggctgcctaccatggtctggggcttgaggaagatgagtttgttgatttaaataaagaatttgtcatttttgaatgga

SEQ ID NO: 97593 - DNA, 801 bp, Artificial Sequence
  derived and/or modified sequence
agacagggcgtccgtctggagcagggactcagggactgagccccacccgcgggctccatcgctgagtcctcactggggcgaggggaaaaaagggcgtcggactttagctggctggccccgagtgaccccgggtcgtggcgccggccctgggccagctcgtgctcctgggctttcccgcgcgacccttcacttcctggttccaggagcacgtctccccgcagccaccgccacccattggaatggccaacaggggacctgcatatggcctgagccgggaggtgcagcagaagattgagaaacaatatgatgcagatctggagcagatcctgatccagtggatcaccacccagtgccgaaaggatgtgggccggccccagcctggacgcgagaacttccagaactggctcaaggatggcacggtgctatgtgagctcattaatgcactgtaccccgaggggcaggccccagtaaagaagatccaggcctccaccatggccttcaagcagatggagcagatctctcagttcctgcaagcagctgagcgctatggcattaacaccactgacatcttccaaactgtggacctctgggaaggaaagaacatggcctgtgtgcagcggacgctgatgaatctgggtgggctggcagtagcccgagatgatgggctcttctctggggatcccaactggttccctaagaaatccaaggagaatcctcggaacttctcggataaccagctgcaagagggcaagaacgtgatcgggttacagatgggcaccaaccgcggggcgtctcaggcag

SEQ ID NO: 97594 - protein, 883 aa, Artificial Sequence
  derived and/or modified sequence
MDTSRLGVLLSLPVLLQLATGGSSPRSGVLLRGCPTHCHCEPDGRMLLRVDCSDLGLSELPSNLSVFTSYLDLSMNNISQLLPNPLPSLRFLEELRLAGNALTYIPKGAFTGLYSLKVLMLQNNQLRHVPTEALQNLRSLQSLRLDANHISYVPPSCFSGLHSLRHLWLDDNALTEIPVQAFRSLSALQAMTLALNKIHHIPDYAFGNLSSLVVLHLHNNRIHSLGKKCFDGLHSLETLDLNYNNLDEFPTAIRTLSNLKELHFYDNPIQFVGRSAFQHLPELRTLTLNGASQITEFPDLTGTANLESLTLTGAQISSLPQTVCNQLPNLQVLDLSYNLLEDLPSFSVCQKLQKIDLRHNEIYEIKVDTFQQLLSLRSLNLAWNKIAIIHPNAFSTLPSLIKLDLSSNLLSSFPITGLHGLTHLKLTGNHALQSLISSENFPELKVIEMPYAYQCCAFGVCENAYKISNQWNKGDNSSMDDLHKKDAGMFQAQDERDLEDFLLDFEEDLKALHSVQCSPSPGPFKPCEHLLDGWLIRIGVWTIAVLALTCNALVTSTVFRSPLYISPIKLLIGVIAAVNMLTGVSSAVLAGVDAFTFGSFARHGAWWENGVGCHVIGFLSIFASESSVFLLTLAALERGFSVKYSAKFETKAPFSSLKVIILLCALLALTMAAVPLLGGSKYGASPLCLPLPFGEPSTMGYMVALILLNSLCFLMMTIAYTKLYCNLDKGDLENIWDCSMVKHIALLLFTNCILNCPVAFLSFSSLINLTFISPEVIKFILLVVVPLPACLNPLLYILFNPHFKEDLVSLRKQTYVWTRSKHPSLMSINSDDVEKQSCDSTQALVTFTSSSITYDLPPSSVPSPAYPVTESCHLSSVAFVPCL

SEQ ID NO: 97595 - DNA, 2652 bp, Artificial Sequence
  derived and/or modified sequence
atggatacctctcggctaggggttctgctgtcccttccagtactactgcagctggcaaccgggggtagctccccacggtccggcgtgctgctgcgcgggtgcccgactcattgccattgtgagccagacggacggatgctcctccgcgtcgactgttccgacctcggattgtccgaactgccttccaatttatctgtctttactagttaccttgacctgtccatgaacaacatctcacaactcctccctaacccacttcctagccttcggttcctggaggaattgcgcttggcaggcaacgcgctgacctatatccctaaaggggcctttaccgggctgtattccctcaaggtcctgatgttgcagaacaatcaactccgccatgtgcccacggaagccctacagaatctgcgaagtctgcagtccttgagacttgatgccaatcatatttcatacgtgcctcctagttgtttcagcggcctgcacagtcttcggcacctgtggctggatgataatgcactgacagaaatccccgttcaagcatttcgatctctttcagctcttcaagccatgaccctggccctaaacaaaatccatcatatcccagattacgcctttggcaatttgagcagtctggttgtgctacacctacacaacaatagaattcacagtctgggcaagaaatgcttcgatggattgcacagccttgagactcttgatctcaactacaacaatctagacgaatttcctaccgctataagaaccctttctaacctgaaagagctccacttttacgacaatccgattcagtttgtaggacggtcagcgttccagcacttaccagaacttcgtacccttactttgaatggagctagccagatcaccgagttcccagacttgactggcactgcaaacttagagtcgttaaccctgactggagcacagatctctagtctgccacagaccgtttgcaatcagctgccaaatctgcaggtgttggaccttagttataacctgttagaagatctcccttctttttccgtctgccagaagctacagaaaattgatctccgccacaacgagatttatgagattaaagtggacacatttcagcagctattatctctgcggagtcttaacttggcatggaataagatcgccatcatccaccccaacgcgtttagcacactaccgtcgctgataaagctggacttatcctccaacctgctgtcatcttttcccattaccggattgcacggccttacccaccttaaactcactggcaatcatgctctgcagtcacttattagcagtgaaaatttccctgagctgaaagtgatagagatgccgtacgcttatcagtgttgtgcctttggagtgtgtgaaaacgcctacaaaatcagcaatcaatggaataagggtgataacagcagtatggatgatctccacaagaaagacgctggaatgtttcaggcccaggatgagcgcgatctagaggactttcttcttgattttgaggaagatctgaaagccctacacagcgtgcaatgcagtccctcaccaggacccttcaaaccgtgtgagcacctcctggatgggtggcttatcagaataggtgtgtggacaattgccgttctggcactaacctgcaatgccttggtgacttctaccgtttttagatctcccctttacatttccccgattaagctgctgataggggtgatagcagcagtgaacatgctgacaggagtgtcatccgcagtgcttgctggcgtggatgcgttcactttcgggtctttcgccagacatggtgcatggtgggagaatggagtcgggtgtcatgtgatcggattcctgtcaatctttgccagtgaatcctcagtgtttcttctcacgctggccgcgctggaaagaggctttagtgttaagtactccgcaaagtttgagacaaaggcccccttttctagccttaaggtgattatccttctctgtgccctgctggcattgactatggctgccgtgccactcctcggcggatccaaatatggagcttccccgctgtgcctgcctctaccgttcggggagcccagcacaatgggctacatggtagccttgatcctgctgaactccttgtgcttccttatgatgaccattgcctatacaaagttgtactgtaacctcgataagggcgacttagagaatatctgggattgctctatggtcaagcacatcgcacttctcctcttcactaactgcattctgaactgcccggtggcattcttgtcattcagctctttgattaaccttacgttcataagccctgaggtgatcaagttcattttattagtggttgttccactgcccgcctgcttgaatccactactctacatcctttttaacccccattttaaagaggacctggttagtctaaggaagcagacctatgtgtggaccagatccaagcacccatcactgatgtctattaacagcgatgatgtagaaaagcagtcttgtgacagcacccaagcccttgtgacgtttacgtcctcaagcatcacgtatgacctgccaccatctagtgttcctagcccagcctaccctgtcacggagtcctgtcacctgtcctccgttgctttcgtgccttgcttgtag

SEQ ID NO: 97596 - DNA, 2652 bp, Artificial Sequence
  derived and/or modified sequence
atggacaccagccggctgggcgtgctgctgagcctgcctgtgctgctgcagctggccaccggcggcagcagccccaggtctggagtgctgctgcggggctgccccacccactgccactgtgagccagatggccgcatgctgctgcgggtggactgcagcgacctgggcctgtctgagctgcccagcaacctgtctgtgttcaccagctacctggacctgtccatgaacaacatcagccagctgctgcccaaccccctgcccagcctgcgcttcctggaggagctgcggctggccggaaatgccctgacctacatccccaagggggccttcaccggcctgtacagcctgaaggtgctgatgctgcagaacaaccagctgcggcacgtgcccacagaggccctgcagaacctgcggagcctgcagagcctgcggctggatgccaaccacatctcctatgtgccccccagctgcttcagcggcctgcacagcctgcggcacctgtggctggatgacaatgccctgacagagatccctgtgcaggccttccgcagcctgagcgccctgcaggccatgaccctggccctgaacaagatccaccacatcccagactatgccttcggcaacctgagcagcctggtggtgctgcacctgcacaacaaccgcatccacagcctgggcaagaagtgctttgatggcctgcacagcctggagaccctggacctgaactacaacaacctggatgagttccccacagccatccgcaccctgagcaacctgaaggagctgcacttctatgacaaccccatccagtttgtgggccgcagcgccttccagcacctgcctgagctgcggaccctgaccctgaatggagccagccagatcacagagttcccagacctgactggaacagccaacctggagagcctgaccctgaccggggcccagatcagcagcctgccccagacagtgtgcaaccagctgcccaacctgcaggtgctggacctgagctacaacctgctggaggacctgcccagcttctctgtgtgccagaagctgcagaagattgacctgcggcacaatgagatctatgagatcaaggtggacaccttccagcagctgctgagcctgcggagcctgaacctggcctggaacaagatcgccatcatccaccccaatgccttcagcaccctgcccagcctcatcaagctggacctgagcagcaacctgctgagcagcttccccatcaccggcctgcacggcctgacccacctgaagctgactggaaaccacgccctgcagagcctcatcagcagcgagaacttccctgagctgaaggtgattgagatgccctatgcctaccagtgctgtgccttcggcgtgtgtgaaaatgcctacaagatcagcaaccagtggaacaagggggacaacagctccatggatgacctgcacaagaaggatgctggcatgttccaggcccaggatgagcgggacctggaggacttcctgctggactttgaggaggacctgaaggccctgcacagcgtgcagtgcagccccagccctggccccttcaagccctgtgagcacctgctggatggctggctgatccgcatcggcgtgtggaccatcgctgtgctggccctgacctgcaatgccctggtgaccagcacagtgttccgcagccccctgtacatcagccccatcaagctgctgattggagtgattgctgctgtgaacatgctgactggagtgagcagcgctgtgctggccggcgtggatgccttcaccttcggcagctttgcccggcatggagcctggtgggagaatggagtgggctgccacgtgattggcttcctgagcatctttgccagcgagagctctgtgttcctgctgaccctggccgccctggagcggggcttctctgtgaagtacagcgccaagtttgagaccaaggcccccttcagcagcctgaaggtgatcatcctgctgtgtgccctgctggccctgaccatggctgctgtgcccctgctgggcggcagcaagtacggggccagccccctgtgcctgcccctgccctttggagagcccagcaccatgggctacatggtggccctgatcctgctgaacagcctgtgcttcctgatgatgaccatcgcctacaccaagctgtactgcaacctggacaagggggacctggagaacatctgggactgcagcatggtgaagcacatcgccctgctgctcttcaccaactgcatcctgaactgccctgtggccttcctgtccttcagcagcctcatcaacctgaccttcatcagccctgaggtgatcaagttcatcctgctggtggtggtgcccctgcctgcctgcctgaaccccctgctgtacatcctcttcaacccccacttcaaggaggacctggtgtccctgaggaagcagacctacgtgtggaccaggagcaagcaccccagcctgatgagcatcaacagtgatgatgtggagaagcagagctgtgacagcacccaggccctggtgaccttcaccagcagcagcatcacctatgacctgccccccagctctgtgcccagccctgcctaccctgtgacagagagctgccacctgagctctgtggcctttgtgccctgcctgtag

SEQ ID NO: 97597 - DNA, 2800 bp, Artificial Sequence
  derived and/or modified sequence
ctgctctccgcccgcgtccggctcgtggccccctacttcgggcaccatggacacctcccggctcggtgtgctcctgtccttgcctgtgctgctgcagctggcgaccgggggcagctctcccaggtctggtgtgttgctgaggggctgccccacacactgtcattgcgagcccgacggcaggatgttgctcagggtggactgctccgacctggggctctcggagctgccttccaacctcagcgtcttcacctcctacctagacctcagtatgaacaacatcagtcagctgctcccgaatcccctgcccagtctccgcttcctggaggagttacgtcttgcgggaaacgctctgacatacattcccaagggagcattcactggcctttacagtcttaaagttcttatgctgcagaataatcagctaagacacgtacccacagaagctctgcagaatttgcgaagccttcaatccctgcgtctggatgctaaccacatcagctatgtgcccccaagctgtttcagtggcctgcattccctgaggcacctgtggctggatgacaatgcgttaacagaaatccccgtccaggcttttagaagtttatcggcattgcaagccatgaccttggccctgaacaaaatacaccacataccagactatgcctttggaaacctctccagcttggtagttctacatctccataacaatagaatccactccctgggaaagaaatgctttgatgggctccacagcctagagactttagatttaaattacaataaccttgatgaattccccactgcaattaggacactctccaaccttaaagaactacatttctatgacaatcccatccagtttgttgggagatctgcttttcaacatttacctgaactaagaacactgactctgaatggtgcctcacaaataactgaatttcctgatttaactggaactgcaaacctggagagtctgactttaactggagcacagatctcatctcttcctcaaaccgtctgcaatcagttacctaatctccaagtgctagatctgtcttacaacctattagaagatttacccagtttttcagtctgccaaaagcttcagaaaattgacctaagacataatgaaatctacgaaattaaagttgacactttccagcagttgcttagcctccgatcgctgaatttggcttggaacaaaattgctattattcaccccaatgcattttccactttgccatccctaataaagctggacctatcgtccaacctcctgtcgtcttttcctataactgggttacatggtttaactcacttaaaattaacaggaaatcatgccttacagagcttgatatcatctgaaaactttccagaactcaaggttatagaaatgccttatgcttaccagtgctgtgcatttggagtgtgtgagaatgcctataagatttctaatcaatggaataaaggtgacaacagcagtatggacgaccttcataagaaagatgctggaatgtttcaggctcaagatgaacgtgaccttgaagatttcctgcttgactttgaggaagacctgaaagcccttcattcagtgcagtgttcaccttccccaggccccttcaaaccctgtgaacacctgcttgatggctggctgatcagaattggagtgtggaccatagcagttctggcacttacttgtaatgctttggtgacttcaacagttttcagatcccctctgtacatttcccccattaaactgttaattggggtcatcgcagcagtgaacatgctcacgggagtctccagtgccgtgctggctggtgtggatgcgttcacttttggcagctttgcacgacatggtgcctggtgggagaatggggttggttgccatgtcattggttttttgtccatttttgcttcagaatcatctgttttcctgcttactctggcagccctggagcgtgggttctctgtgaaatattctgcaaaatttgaaacgaaagctccattttctagcctgaaagtaatcattttgctctgtgccctgctggccttgaccatggccgcagttcccctgctgggtggcagcaagtatggcgcctcccctctctgcctgcctttgccttttggggagcccagcaccatgggctacatggtcgctctcatcttgctcaattccctttgcttcctcatgatgaccattgcctacaccaagctctactgcaatttggacaagggagacctggagaatatttgggactgctctatggtaaaacacattgccctgttgctcttcaccaactgcatcctaaactgccctgtggctttcttgtccttctcctctttaataaaccttacatttatcagtcctgaagtaattaagtttatccttctggtggtagtcccacttcctgcatgtctcaatccccttctctacatcttgttcaatcctcactttaaggaggatctggtgagcctgagaaagcaaacctacgtctggacaagatcaaaacacccaagcttgatgtcaattaactctgatgatgtcgaaaaacagtcctgtgactcaactcaagccttggtaacctttaccagctccagcatcacttatgacctgcctcccagttccgtgccatcaccagcttatccagtgactgagagctgccatctttcctctgtggcatttgtcccatgtctctaattaatatgtgaaggaaaatgttttcaaaggttgagaacctgaaaatgtgagattgagtatatcagagcagtaattaataagaagagctgaggtgaaactcgg

SEQ ID NO: 97598 - DNA, 2652 bp, Artificial Sequence
  derived and/or modified sequence
atggacaccagccggctgggcgtgctgctgagcctgcccgtgctgctgcagctggcgaccggtggaagttcgcccagatcgggcgtgttactccgaggctgtccgacacactgtcactgtgaaccggatggcaggatgctgttacgcgttgattgctccgatctggggctgtctgagctcccctccaatctcagcgtcttcacctcctacctcgatctatccatgaataatatctcccagctgttgcccaacccactcccctctctccggtttctcgaagaattgagacttgccggtaatgccctcacatacatacctaaaggagcattcaccgggctctattccctcaaggtgctgatgcttcaaaataatcaactaagacatgtgcctacagaggcccttcagaatttaaggtccttgcagtccctaaggcttgatgctaaccacatttcatatgtccctccgagctgttttagcggccttcactctctgcgacatctctggttggatgacaacgcactgactgagatccccgtccaagcttttcggtctctctcagctttgcaggctatgacgctggcgcttaataagatccaccatattcccgactatgccttcggaaatctgtcttccttagtggtacttcatctgcacaacaatcgaatccactcgcttggtaagaaatgcttcgacggcctccattcactggagaccctggaccttaactataacaatcttgacgagtttcccaccgcaatacgaacactgtctaacctcaaagagctccatttttatgacaatcccattcagtttgtcggcagaagcgctttccagcacctgccggagttgcgaaccttaactttgaacggcgctagccaaattaccgaatttccagacctcactgggaccgctaacttggagtccctaaccctgacaggcgcccagattagctcgcttccgcagactgtatgcaaccagctgcccaacttgcaagtcctggatcttagctacaacctgcttgaggacctgccctctttctcggtgtgtcaaaagctccagaagattgacctgcggcacaatgagatctatgagattaaagtggacacattccagcagctgttaagcctgagaagccttaatcttgcttggaacaagattgccatcatccaccctaacgccttcagtaccttacccagcctaattaagttagacctgagcagtaatctcctgtcatcgttccccataactggtttgcacggactgactcacctgaagttgacaggaaaccacgccctgcaaagtctgatttctagtgagaattttcccgagcttaaggttattgaaatgccatacgcttaccaatgctgcgcctttggtgtatgcgaaaatgcctataaaatctccaaccagtggaataagggtgacaactccagcatggacgacttacacaagaaggacgcagggatgttccaggcccaggatgagagggatctggaggactttctccttgactttgaagaggacttgaaggcgctgcattcagtgcaatgttcaccatctccaggacccttcaaaccctgcgagcacctgctggatgggtggttaatccgaatcggagtctggacgatcgctgtcctggccctgacgtgtaatgctttggtcaccagcaccgtttttcgctctccactatatatctcgccaatcaagctcctgattggagtgatcgcggcggttaacatgttaaccggagtatcaagtgcagttctcgctggggttgacgcattcacatttgggtcttttgcaagacacggcgcttggtgggagaacggagtaggatgtcacgtgattggcttcctcagcatctttgcctctgagtctagtgttttcctgttgacactggctgcattagaacgtgggttttcagtcaaatattccgccaagtttgaaactaaagcaccattctctagcctcaaagtaatcatcctcttgtgcgccctcctggccctgacaatggccgccgtccccctactcgggggttctaaatatggtgctagtcccctttgcctcccattgccgtttggcgaaccctctaccatggggtatatggtcgcattgatcctgttaaactctctttgcttcttgatgatgacaatcgcctacacgaagctatactgcaacctggataaaggcgacctcgagaacatatgggactgctcaatggtcaaacatattgcactccttctgtttaccaattgcatcctcaactgccctgtggcctttctgagtttcagtagccttattaacctcaccttcatcagtccagaggttattaagtttatactgcttgtggtggtacccctcccagcttgtctcaatcccctgctgtacatcttgtttaatcctcatttcaaggaagacctggtctcccttagaaaacagacatatgtatggactcgttctaagcatccttccctcatgagtattaacagtgacgacgtcgaaaagcaaagctgcgacagcacacaagcattagtgacctttacgagttctagtatcacctatgacctgccaccttccagtgttccgtcccccgcctaccccgttacagaatcctgtcacctgtccagcgttgctttcgttccatgcctttag

SEQ ID NO: 97599 - DNA, 2652 bp, Artificial Sequence
  derived and/or modified sequence
atggatacatccaggctcggagtgctgctgagcttgcccgttttgctgcagcttgcaacaggcggtagtagcccaagaagtggagtgctgctccggggatgtccgacacactgtcattgcgagcctgatgggaggatgctccttcgagtggattgttctgacctgggattaagcgaactgccaagtaatctgagcgtttttacttcatacctcgatctgtccatgaacaacatctcccagctgctcccaaatcccctgccgtccctgcggttcctcgaagaactgcgcctggcagggaacgctctgacttatattcccaagggggcatttactggtctttacagtttgaaggtgctgatgttacaaaataatcagttgcggcatgttcctacagaggctttgcagaatctgcggtcactgcaaagcctacggttagacgccaatcatatctcttatgtacctccttcttgcttctcaggtctccattctctgagacacttatggcttgatgataatgcactgaccgaaatacccgtgcaggcatttcggtctcttagtgccctccaggctatgacactcgctcttaataagatccatcacatccccgactacgctttcggaaacttgtcctctctcgttgtgcttcacttacacaataaccgcatccattccttgggaaagaaatgcttcgatggcctccactctttagaaacactagatctgaactataataacctggatgaatttccaaccgccatccgcacgctgtccaatctcaaagagttgcatttttacgataaccccatccagttcgtgggcagatccgccttccagcatctacccgaacttcgaacgctcactctaaatggggcttcacagatcaccgaattccccgatttgaccggcactgcaaacctcgagtctcttacccttactggagctcagatctcaagcctgccccaaaccgtctgcaatcagctccccaaccttcaggtactggacctaagctacaatctattagaagacctcccttccttcagcgtgtgtcagaaactgcagaagatagacttacgccataatgaaatctatgaaataaaagttgacactttccagcaattgctatcactgcgatccctcaatctggcctggaacaagattgcgataatccaccccaacgcgttctctacactgccttcactgattaagcttgacctttctagcaatttgttatcctcattcccgatcaccggcctgcacggcttaacccacctgaagttaaccggaaaccacgctttgcagagcctgatatctagcgagaattttccggaattgaaggtgattgaaatgccctatgcataccaatgctgcgcttttggcgtgtgtgagaacgcctacaagattagtaatcagtggaataaaggagacaattcatcgatggacgaccttcacaagaaagacgctggcatgttccaggctcaggacgaaagagatctcgaggatttcctgctcgacttcgaagaggatctaaaggccctacacagcgtccagtgctcacccagcccaggcccattcaagccatgtgagcatctcctcgacggctggttgattcgcatcggcgtttggactatcgcagtactcgcccttacatgcaacgcgctggtgacctcaaccgtatttcggagccccctttatatcagcccaatcaagctcctaataggcgtgatcgctgcagtgaatatgttgacaggcgtctccagcgccgtgttagccggtgtggacgccttcaccttcggatcctttgcaaggcatggagcctggtgggagaacggtgtaggctgccatgtcatcggtttcctgagtatcttcgcctcagaatcaagtgtatttttgcttaccctagccgcactggaacgagggtttagcgtgaaatactcagccaaattcgagaccaaagccccattttcatctctgaaggtgatcatcttgctttgcgcattactggccttgacgatggctgccgtgcctctgctcggcggatctaagtacggtgccagtcctctgtgcctgcctctaccttttggtgaaccttctacaatgggttacatggtggccctgatcctgctaaacagcctgtgcttcctaatgatgaccatcgcctatacgaagctctattgtaacctcgataaaggcgacctcgagaacatttgggattgttccatggtgaagcatatcgccttgcttttgtttactaactgcatcctgaactgtccagtcgccttcctctctttcagcagcctgattaacctgaccttcattagccctgaggttattaaatttatcctcctggtggtggtacctctcccggcatgcctgaatccgttactgtatatcctgtttaaccctcatttcaaggaggacctggtgagcctgcggaagcagacctatgtatggacccggagcaaacaccccagcctaatgtccatcaacagtgacgatgtggagaagcagtcatgtgattctacacaggctctcgtcaccttcacatcttcttcgattacctacgatcttccaccttcctcagtaccgagcccggcatacccagtgaccgaaagctgccacttatcctctgttgcattcgtgccctgcctctag

SEQ ID NO: 97600 - DNA, 2652 bp, Artificial Sequence
  derived and/or modified sequence
atggacaccagcagactgggcgtgctgctgagcctgcccgtgctgctgcagctggccaccggcggcagcagccccagaagcggcgtgctgctgagaggctgccccacccactgccactgcgagcccgacggcagaatgctgctgagagtggactgcagcgacctgggcctgagcgagctgcccagcaacctgagcgtgttcaccagctacctggacctgagcatgaacaacatcagccagctgctgcccaaccccctgcccagcctgagattcctggaggagctgagactggccggcaacgccctgacctacatccccaagggcgccttcaccggcctgtacagcctgaaggtgctgatgctgcagaacaaccagctgagacacgtgcccaccgaggccctgcagaacctgagaagcctgcagagcctgagactggacgccaaccacatcagctacgtgccccccagctgcttcagcggcctgcacagcctgagacacctgtggctggacgacaacgccctgaccgagatccccgtgcaggccttcagaagcctgagcgccctgcaggccatgaccctggccctgaacaagatccaccacatccccgactacgccttcggcaacctgagcagcctggtggtgctgcacctgcacaacaacagaatccacagcctgggcaagaagtgcttcgacggcctgcacagcctggagaccctggacctgaactacaacaacctggacgagttccccaccgccatcagaaccctgagcaacctgaaggagctgcacttctacgacaaccccatccagttcgtgggcagaagcgccttccagcacctgcccgagctgagaaccctgaccctgaacggcgccagccagatcaccgagttccccgacctgaccggcaccgccaacctggagagcctgaccctgaccggcgcccagatcagcagcctgccccagaccgtgtgcaaccagctgcccaacctgcaggtgctggacctgagctacaacctgctggaggacctgcccagcttcagcgtgtgccagaagctgcagaagatcgacctgagacacaacgagatctacgagatcaaggtggacaccttccagcagctgctgagcctgagaagcctgaacctggcctggaacaagatcgccatcatccaccccaacgccttcagcaccctgcccagcctgatcaagctggacctgagcagcaacctgctgagcagcttccccatcaccggcctgcacggcctgacccacctgaagctgaccggcaaccacgccctgcagagcctgatcagcagcgagaacttccccgagctgaaggtgatcgagatgccctacgcctaccagtgctgcgccttcggcgtgtgcgagaacgcctacaagatcagcaaccagtggaacaagggcgacaacagcagcatggacgacctgcacaagaaggacgccggcatgttccaggcccaggacgagagagacctggaggacttcctgctggacttcgaggaggacctgaaggccctgcacagcgtgcagtgcagccccagccccggccccttcaagccctgcgagcacctgctggacggctggctgatcagaatcggcgtgtggaccatcgccgtgctggccctgacctgcaacgccctggtgaccagcaccgtgttcagaagccccctgtacatcagccccatcaagctgctgatcggcgtgatcgccgccgtgaacatgctgaccggcgtgagcagcgccgtgctggccggcgtggacgccttcaccttcggcagcttcgccagacacggcgcctggtgggagaacggcgtgggctgccacgtgatcggcttcctgagcatcttcgccagcgagagcagcgtgttcctgctgaccctggccgccctggagagaggcttcagcgtgaagtacagcgccaagttcgagaccaaggcccccttcagcagcctgaaggtgatcatcctgctgtgcgccctgctggccctgaccatggccgccgtgcccctgctgggcggcagcaagtacggcgccagccccctgtgcctgcccctgcccttcggcgagcccagcaccatgggctacatggtggccctgatcctgctgaacagcctgtgcttcctgatgatgaccatcgcctacaccaagctgtactgcaacctggacaagggcgacctggagaacatctgggactgcagcatggtgaagcacatcgccctgctgctgttcaccaactgcatcctgaactgccccgtggccttcctgagcttcagcagcctgatcaacctgaccttcatcagccccgaggtgatcaagttcatcctgctggtggtggtgcccctgcccgcctgcctgaaccccctgctgtacatcctgttcaacccccacttcaaggaggacctggtgagcctgagaaagcagacctacgtgtggaccagaagcaagcaccccagcctgatgagcatcaacagcgacgacgtggagaagcagagctgcgacagcacccaggccctggtgaccttcaccagcagcagcatcacctacgacctgccccccagcagcgtgcccagccccgcctaccccgtgaccgagagctgccacctgagcagcgtggccttcgtgccctgcctgtag

SEQ ID NO: 97601 - protein, 835 aa, Artificial Sequence
  derived and/or modified sequence
MDTSRLGVLLSLPVLLQLATGGSSPRSGVLLRGCPTHCHCEPDGRMLLRVDCSDLGLSELPSNLSVFTSYLDLSMNNISQLLPNPLPSLRFLEELRLAGNALTYIPKGAFTGLYSLKVLMLQNNQLRHVPTEALQNLRSLQSLHLHNNRIHSLGKKCFDGLHSLETLDLNYNNLDEFPTAIRTLSNLKELGFHSNNIRSIPEKAFVGNPSLITIHFYDNPIQFVGRSAFQHLPELRTLTLNGASQITEFPDLTGTANLESLTLTGAQISSLPQTVCNQLPNLQVLDLSYNLLEDLPSFSVCQKLQKIDLRHNEIYEIKVDTFQQLLSLRSLNLAWNKIAIIHPNAFSTLPSLIKLDLSSNLLSSFPITGLHGLTHLKLTGNHALQSLISSENFPELKVIEMPYAYQCCAFGVCENAYKISNQWNKGDNSSMDDLHKKDAGMFQAQDERDLEDFLLDFEEDLKALHSVQCSPSPGPFKPCEHLLDGWLIRIGVWTIAVLALTCNALVTSTVFRSPLYISPIKLLIGVIAAVNMLTGVSSAVLAGVDAFTFGSFARHGAWWENGVGCHVIGFLSIFASESSVFLLTLAALERGFSVKYSAKFETKAPFSSLKVIILLCALLALTMAAVPLLGGSKYGASPLCLPLPFGEPSTMGYMVALILLNSLCFLMMTIAYTKLYCNLDKGDLENIWDCSMVKHIALLLFTNCILNCPVAFLSFSSLINLTFISPEVIKFILLVVVPLPACLNPLLYILFNPHFKEDLVSLRKQTYVWTRSKHPSLMSINSDDVEKQSCDSTQALVTFTSSSITYDLPPSSVPSPAYPVTESCHLSSVAFVPCL

SEQ ID NO: 97602 - DNA, 2508 bp, Artificial Sequence
  derived and/or modified sequence
atggacaccagtagactgggtgtgctgctgagcctgcctgttctgctgcagcttgcaacgggaggatccagccccaggagcggcgtgctcctaagaggttgccccacccactgccattgcgaaccggacggccgaatgctgttacgcgtggattgctcagatcttggtctgtctgaattaccttccaacctgtctgtctttacaagttacctggacctgtctatgaataacatctcccagttacttcccaatccactacccagccttaggtttttagaagagctgagactcgcggggaacgccctgacctacatccccaaaggagcattcacgggcctgtattctctgaaagtgctgatgctccagaacaatcagctgagacatgtacctacggaggctctccagaatctccgtagtctgcagtcactacaccttcacaataatagaatccattccctgggtaagaaatgcttcgacggtcttcattccctggagacgctagacctaaactataacaacttggacgagttcccgaccgcgatccgcacactcagcaacctcaaggagttggggtttcactcaaacaacatacgcagtatcccagagaaagcatttgtcgggaatcctagccttatcaccatacacttttacgataaccccatccagtttgtcgggagatccgcattccagcacctgcccgaactgcggacacttacactgaatggcgcctctcagattactgaattccccgatctcactggcaccgccaatttggaaagtctgacactgactggggctcagatctcttccctgccccaaaccgtgtgtaaccagctcccgaatctccaagtgctcgatctctcctacaatctgctggaagatctgccgtcattcagtgtctgccagaagctccaaaagattgatctcagacataacgaaatctacgaaatcaaagtggatacttttcagcaactgctgtcattacgcagcctgaacttggcatggaacaaaatagccataatccaccccaacgccttctccacactgccatccctgattaaactggatctatctagcaatctcctttcctcattccctataactggcctgcacggcttaactcacctgaagttaacaggcaaccacgcgctgcagtcgctgatctctagcgagaattttccagaacttaaagtcatcgaaatgccttacgcataccagtgttgtgcatttggggtctgcgagaatgcatacaaaatatctaatcagtggaataaaggcgacaattcctctatggatgatctccataaaaaagatgctggcatgtttcaggcacaagatgagcgagatctcgaagactttctcctggattttgaagaggaccttaaagcgcttcactccgttcagtgctcgccgagcccagggccctttaagccctgtgagcacctgctcgacgggtggctcatcaggattggtgtctggaccatcgctgtgctggctttgacctgtaacgccctggtgacaagcaccgtgtttaggtctcccctatacataagcccaatcaagttactcatcggagttattgcggccgtcaatatgctaactggggtctcgtcggctgtactcgcaggggttgacgccttcacgtttggttccttcgcgcggcacggggcctggtgggagaatggggttggttgccacgttattggattcctttccatctttgcttccgaatcaagtgtgttcctgctgactctggccgccctggagcgcgggttcagcgtgaaatactccgcaaaatttgagactaaagccccattcagctcactgaaggtcataattcttctttgcgctctgctcgcactcaccatggccgcagttcccctgctcggaggcagcaagtatggcgcttcccctctgtgcctacctctcccttttggcgagccaagtaccatggggtacatggtagccctcatcctgctcaattctctctgtttcctcatgatgactatcgcttataccaagctgtactgtaacctggacaaaggcgacctcgaaaatatctgggactgctccatggtaaagcacatcgccctgcttctgtttacaaattgtatattgaactgtcccgttgcttttctctccttttcatccctgattaacttaacctttatctcccccgaggtgatcaaattcatactgttagtggtggtaccactgcccgcctgtctgaaccccttgttatacattctttttaatcctcattttaaggaagatctcgtaagtctgcgcaagcagacttatgtttggaccaggtctaaacatccttcccttatgagtatcaatagcgatgacgttgaaaaacaatcctgcgactccacccaggctcttgtgacctttacatctagctctatcacgtatgacctccccccctcatcagtccctagcccggcctaccccgtcaccgaaagctgtcacctaagttccgtcgcgtttgtgccttgcttatag

SEQ ID NO: 97603 - DNA, 2508 bp, Artificial Sequence
  derived and/or modified sequence
atggacaccagccggctgggcgtgctgctgagcctgcctgtgctgctgcagctggccaccggcggcagcagccccaggtctggagtgctgctgcggggctgccccacccactgccactgtgagccagatggccgcatgctgctgcgggtggactgcagcgacctgggcctgtctgagctgcccagcaacctgtctgtgttcaccagctacctggacctgtccatgaacaacatcagccagctgctgcccaaccccctgcccagcctgcgcttcctggaggagctgcggctggccggaaatgccctgacctacatccccaagggggccttcaccggcctgtacagcctgaaggtgctgatgctgcagaacaaccagctgcggcacgtgcccacagaggccctgcagaacctgcggagcctgcagagcctgcacctgcacaacaaccgcatccacagcctgggcaagaagtgctttgatggcctgcacagcctggagaccctggacctgaactacaacaacctggatgagttccccacagccatccgcaccctgagcaacctgaaggagctgggcttccacagcaacaacatccgcagcatccctgagaaggcctttgtgggcaaccccagcctcatcaccatccacttctatgacaaccccatccagtttgtgggccgcagcgccttccagcacctgcctgagctgcggaccctgaccctgaatggagccagccagatcacagagttcccagacctgactggaacagccaacctggagagcctgaccctgaccggggcccagatcagcagcctgccccagacagtgtgcaaccagctgcccaacctgcaggtgctggacctgagctacaacctgctggaggacctgcccagcttctctgtgtgccagaagctgcagaagattgacctgcggcacaatgagatctatgagatcaaggtggacaccttccagcagctgctgagcctgcggagcctgaacctggcctggaacaagatcgccatcatccaccccaatgccttcagcaccctgcccagcctcatcaagctggacctgagcagcaacctgctgagcagcttccccatcaccggcctgcacggcctgacccacctgaagctgactggaaaccacgccctgcagagcctcatcagcagcgagaacttccctgagctgaaggtgattgagatgccctatgcctaccagtgctgtgccttcggcgtgtgtgaaaatgcctacaagatcagcaaccagtggaacaagggggacaacagctccatggatgacctgcacaagaaggatgctggcatgttccaggcccaggatgagcgggacctggaggacttcctgctggactttgaggaggacctgaaggccctgcacagcgtgcagtgcagccccagccctggccccttcaagccctgtgagcacctgctggatggctggctgatccgcatcggcgtgtggaccatcgctgtgctggccctgacctgcaatgccctggtgaccagcacagtgttccgcagccccctgtacatcagccccatcaagctgctgattggagtgattgctgctgtgaacatgctgactggagtgagcagcgctgtgctggccggcgtggatgccttcaccttcggcagctttgcccggcatggagcctggtgggagaatggagtgggctgccacgtgattggcttcctgagcatctttgccagcgagagctctgtgttcctgctgaccctggccgccctggagcggggcttctctgtgaagtacagcgccaagtttgagaccaaggcccccttcagcagcctgaaggtgatcatcctgctgtgtgccctgctggccctgaccatggctgctgtgcccctgctgggcggcagcaagtacggggccagccccctgtgcctgcccctgccctttggagagcccagcaccatgggctacatggtggccctgatcctgctgaacagcctgtgcttcctgatgatgaccatcgcctacaccaagctgtactgcaacctggacaagggggacctggagaacatctgggactgcagcatggtgaagcacatcgccctgctgctcttcaccaactgcatcctgaactgccctgtggccttcctgtccttcagcagcctcatcaacctgaccttcatcagccctgaggtgatcaagttcatcctgctggtggtggtgcccctgcctgcctgcctgaaccccctgctgtacatcctcttcaacccccacttcaaggaggacctggtgtccctgaggaagcagacctacgtgtggaccaggagcaagcaccccagcctgatgagcatcaacagtgatgatgtggagaagcagagctgtgacagcacccaggccctggtgaccttcaccagcagcagcatcacctatgacctgccccccagctctgtgcccagccctgcctaccctgtgacagagagctgccacctgagctctgtggcctttgtgccctgcctgtag

SEQ ID NO: 97604 - DNA, 2664 bp, Artificial Sequence
  derived and/or modified sequence
tgctgctctccgcccgcgtccggctcgtggccccctacttcgggcaccatggacacctcccggctcggtgtgctcctgtccttgcctgtgctgctgcagctggcgaccgggggcagctctcccaggtctggtgtgttgctgaggggctgccccacacactgtcattgcgagcccgacggcaggatgttgctcagggtggactgctccgacctggggctctcggagctgccttccaacctcagcgtcttcacctcctacctagacctcagtatgaacaacatcagtcagctgctcccgaatcccctgcccagtctccgcttcctggaggagttacgtcttgcgggaaacgctctgacatacattcccaagggagcattcactggcctttacagtcttaaagttcttatgctgcagaataatcagctaagacacgtacccacagaagctctgcagaatttgcgaagccttcaatccctacatctccataacaatagaatccactccctgggaaagaaatgctttgatgggctccacagcctagagactttagatttaaattacaataaccttgatgaattccccactgcaattaggacactctccaaccttaaagaactaggatttcatagcaacaatatcaggtcgatacctgagaaagcatttgtaggcaacccttctcttattacaatacatttctatgacaatcccatccagtttgttgggagatctgcttttcaacatttacctgaactaagaacactgactctgaatggtgcctcacaaataactgaatttcctgatttaactggaactgcaaacctggagagtctgactttaactggagcacagatctcatctcttcctcaaaccgtctgcaatcagttacctaatctccaagtgctagatctgtcttacaacctattagaagatttacccagtttttcagtctgccaaaagcttcagaaaattgacctaagacataatgaaatctacgaaattaaagttgacactttccagcagttgcttagcctccgatcgctgaatttggcttggaacaaaattgctattattcaccccaatgcattttccactttgccatccctaataaagctggacctatcgtccaacctcctgtcgtcttttcctataactgggttacatggtttaactcacttaaaattaacaggaaatcatgccttacagagcttgatatcatctgaaaactttccagaactcaaggttatagaaatgccttatgcttaccagtgctgtgcatttggagtgtgtgagaatgcctataagatttctaatcaatggaataaaggtgacaacagcagtatggacgaccttcataagaaagatgctggaatgtttcaggctcaagatgaacgtgaccttgaagatttcctgcttgactttgaggaagacctgaaagcccttcattcagtgcagtgttcaccttccccaggccccttcaaaccctgtgaacacctgcttgatggctggctgatcagaattggagtgtggaccatagcagttctggcacttacttgtaatgctttggtgacttcaacagttttcagatcccctctgtacatttcccccattaaactgttaattggggtcatcgcagcagtgaacatgctcacgggagtctccagtgccgtgctggctggtgtggatgcgttcacttttggcagctttgcacgacatggtgcctggtgggagaatggggttggttgccatgtcattggttttttgtccatttttgcttcagaatcatctgttttcctgcttactctggcagccctggagcgtgggttctctgtgaaatattctgcaaaatttgaaacgaaagctccattttctagcctgaaagtaatcattttgctctgtgccctgctggccttgaccatggccgcagttcccctgctgggtggcagcaagtatggcgcctcccctctctgcctgcctttgccttttggggagcccagcaccatgggctacatggtcgctctcatcttgctcaattccctttgcttcctcatgatgaccattgcctacaccaagctctactgcaatttggacaagggagacctggagaatatttgggactgctctatggtaaaacacattgccctgttgctcttcaccaactgcatcctaaactgccctgtggctttcttgtccttctcctctttaataaaccttacatttatcagtcctgaagtaattaagtttatccttctggtggtagtcccacttcctgcatgtctcaatccccttctctacatcttgttcaatcctcactttaaggaggatctggtgagcctgagaaagcaaacctacgtctggacaagatcaaaacacccaagcttgatgtcaattaactctgatgatgtcgaaaaacagtcctgtgactcaactcaagccttggtaacctttaccagctccagcatcacttatgacctgcctcccagttccgtgccatcaccagcttatccagtgactgagagctgccatctttcctctgtggcatttgtcccatgtctctaattaatatgtgaaggaaaatgttttcaaaggttgagaacctgaaaatgtgagattgagtatatcagagcagtaattaataagaagagctgaggtgaaactcggtttaaa

SEQ ID NO: 97605 - DNA, 2508 bp, Artificial Sequence
  derived and/or modified sequence
atggacaccagccggctgggcgtgctgctgagcctgcccgtgctgcttcaactggctacaggcggttccagcccccgctcgggggtactgctcaggggttgtcccacccactgtcattgtgagccagatggccggatgctgttgcgcgtagactgtagcgacctaggtctgtcggagctgccatccaatctgagcgtcttcaccagttacctggacctgtctatgaataatatctcacagctcctgccaaaccccctgccctccctccgatttctcgaggagctacgtctcgcagggaatgcgctaacctacattcccaagggggcatttactggattgtacagcctgaaagtcttgatgctgcagaacaatcagctgcggcatgtgccaacggaggcgctgcaaaaccttaggtctcttcaaagcctgcacctgcataacaatcgcatacactcccttggcaaaaagtgctttgatggtctacacagtttggagaccctcgatctgaactacaacaacctggatgagtttccgaccgcgatccgcacattatccaacttgaaggagctgggttttcacagtaataatataagatccatacccgagaaagcttttgtgggcaatccatccttgattactattcatttttacgataacccaatccaatttgtaggccgttccgccttccagcaccttccggagcttcggactctgaccctgaacggggcatcccagattactgagtttcccgatctcaccggcaccgccaatctggaatccctgactctgaccggagctcaaataagttcgctgccacagaccgtgtgcaatcaattgcccaacctacaggtgctagacctgtcatataacttactcgaagatctccccagcttttcagtgtgtcagaaactgcaaaaaattgacctgaggcataacgagatctatgaaattaaggtcgacaccttccagcagctcctatctctgcgtagcctcaatctagcctggaataaaatagcaattatccatccaaacgcgtttagtactctaccctctctgataaagctcgatttaagttccaaccttctgtcctcgttccctattactggacttcatggtctgacccatttaaagttaactgggaatcacgccctgcagtctctgatctcttcagagaattttccagagctcaaggttatcgagatgccatacgcatatcaatgctgtgcctttggagtatgtgaaaacgcttataaaatctccaatcaatggaacaagggagacaacagctcaatggatgatctccataagaaggatgcaggcatgtttcaagcccaggatgaacgggacctagaggattttttattggattttgaggaagaccttaaagcactccactcagttcaatgctcaccttctcctgggccattcaagccatgtgagcatctgctcgatggctggctgattagaattggggtatggaccattgctgttttggctctgacctgcaatgccctcgtgacttccactgtgttccgatcacctttgtacatcagccccatcaagctgctcattggtgtgattgctgcagtgaacatgctgaccggcgtttcaagcgccgtgctcgccggcgtcgacgcatttactttcggaagttttgctcggcacggggcttggtgggaaaatggtgtaggctgtcatgtcatcggattcttgtcgatatttgccagtgaatcctctgtgtttctgctaacgctggccgcactcgagcgaggcttctcagtaaagtactcagcaaaatttgagacaaaggcccccttctcatctctgaaggtaatcattctcctttgtgctttgttggccctgactatggctgcagtccccttactgggtgggagcaagtatggtgctagtcctctttgcctgccgcttccatttggcgaaccgtctacaatgggttatatggtggctttgatactgcttaactctctctgttttttgatgatgaccatcgcctatactaagttgtattgtaacctcgacaagggagacttggaaaacatctgggattgcagcatggtaaagcacatagccctcttgcttttcaccaactgcatcctcaactgccctgttgcttttctctcatttagttccctcattaatctaaccttcatttcccccgaagttatcaagttcatcctcctggtggtagttcccctgccagcctgcctcaaccccctgctgtacattctgttcaatccccactttaaagaggacctggtatcactcagaaaacagacttatgtgtggacacggtcaaagcatccctctcttatgtcgattaattccgacgatgtcgagaagcagtcatgtgattcaactcaagcccttgtcacctttacctctagttccataacctatgatctgccacccagcagcgtcccttctccggcctaccctgtcacagaaagttgccacctgtctagcgtagctttcgtgccttgtctctag

SEQ ID NO: 97606 - DNA, 2508 bp, Artificial Sequence
  derived and/or modified sequence
atggacacctcaagactgggagtgttgttgtctctgcctgtgctgctgcagcttgcaacaggaggctctagccccagatctggcgttttactgaggggctgccccactcactgtcactgtgagcctgatggtcgcatgctgctccgcgtggactgcagcgatttgggtctgagcgagttgccatctaacttgagtgttttcacatcctacctggatctctccatgaacaatattagtcagctgctcccaaatccactcccctcccttcgttttctggaggagctcaggcttgcgggaaatgcgcttacatatattcccaagggagctttcaccggcttatactctctgaaggtgctcatgcttcagaataatcagctgaggcatgtgcctactgaggctttacaaaacctccgcagcttacaatccctgcacctgcacaacaataggatccactctctgggcaaaaagtgtttcgacgggctgcactcactggagacccttgacctaaactacaataacctggatgaatttcctacagccattaggaccctgagtaatttgaaggagctcgggtttcatagtaacaacattagatccatccccgagaaggccttcgtgggaaaccctagtctcataactatccacttttacgataatcccatccagttcgtcggtcgatccgcattccagcacctcccagagctgagaaccctgactctgaacggtgcaagccagattactgagtttcccgatctcacaggtaccgctaacctggagtctttgaccctcaccggtgcccaaatatcttctctgccacaaacagtctgtaaccagctcccaaacctgcaagtccttgatttgtcctataacctgctcgaagacctgccttccttttcggtttgccaaaagctgcagaagatagacctgcgtcacaatgagatttatgaaattaaggtcgacacattccaacaattattgtccttaaggagcctgaaccttgcctggaacaaaatagctattatccacccgaatgctttctctacactgccctcactaattaaacttgacctgtcgtcgaatttgctctctagcttccctataacaggccttcatgggctgacgcacctgaaactgacaggcaaccatgccctacaaagcctcatcagctctgagaattttcctgaactcaaagtgatcgaaatgccatatgcttaccagtgctgtgccttcggcgtgtgcgaaaatgcgtataaaatcagcaaccagtggaacaaaggcgacaactcaagtatggatgacttgcacaaaaaagacgctggcatgttccaggcccaggatgagcgtgacctcgaagacttcttgttggattttgaggaagatttaaaagccctccactcagttcagtgtagccctagcccaggtccgttcaaaccttgcgaacatctgctcgacggatggctgattagaatcggggtgtggactattgcagtactggctttgacatgcaatgccctggtaacctccaccgtattccggtcacctttgtatatctcacctataaagctgctcataggcgtcatcgcggctgttaacatgctgaccggcgtgtcatcagcggttttggccggagttgacgccttcactttcggatccttcgccaggcatggcgcatggtgggagaacggtgtcgggtgtcacgtgatcggttttctgagcattttcgcttctgagtcatcagtatttttgttaacattggccgctctggagcggggattcagcgtcaaatacagcgccaagttcgaaactaaggctccgttcagttcacttaaggtgattatcctgctatgcgcattgcttgcgctcacgatggctgctgtgccccttctggggggatcaaaatacggagccagccctctgtgcctccccctacctttcggtgaaccctcgacaatgggttacatggtggctcttatattactgaattcgttgtgctttctcatgatgacgattgcatacaccaaactgtattgcaatctggacaagggagacctggagaatatttgggattgtagcatggtcaaacatattgctttgcttctctttactaattgtattttgaattgtcctgttgctttcctctccttcagctccctcattaatctcacttttatatcccccgaggtgattaagtttattttattggtcgtcgtgccactgccagcctgtctgaatcctctgctttatattctgttcaatccccactttaaagaggatttggtttcactcaggaaacaaacttatgtttggacaagatctaaacatccatctctgatgtccataaattctgacgacgtggagaagcagtcatgcgactcaactcaggccttagttaccttcacctccagcagtattacctatgacctgccaccatccagcgtcccaagtcctgcttatcctgtcacagaatcctgccacttgagctctgtggcattcgtgccttgtctctag

SEQ ID NO: 97607 - DNA, 2508 bp, Artificial Sequence
  derived and/or modified sequence
atggacaccagcagactgggcgtgctgctgagcctgcccgtgctgctgcagctggccaccggcggcagcagccccagaagcggcgtgctgctgagaggctgccccacccactgccactgcgagcccgacggcagaatgctgctgagagtggactgcagcgacctgggcctgagcgagctgcccagcaacctgagcgtgttcaccagctacctggacctgagcatgaacaacatcagccagctgctgcccaaccccctgcccagcctgagattcctggaggagctgagactggccggcaacgccctgacctacatccccaagggcgccttcaccggcctgtacagcctgaaggtgctgatgctgcagaacaaccagctgagacacgtgcccaccgaggccctgcagaacctgagaagcctgcagagcctgcacctgcacaacaacagaatccacagcctgggcaagaagtgcttcgacggcctgcacagcctggagaccctggacctgaactacaacaacctggacgagttccccaccgccatcagaaccctgagcaacctgaaggagctgggcttccacagcaacaacatcagaagcatccccgagaaggccttcgtgggcaaccccagcctgatcaccatccacttctacgacaaccccatccagttcgtgggcagaagcgccttccagcacctgcccgagctgagaaccctgaccctgaacggcgccagccagatcaccgagttccccgacctgaccggcaccgccaacctggagagcctgaccctgaccggcgcccagatcagcagcctgccccagaccgtgtgcaaccagctgcccaacctgcaggtgctggacctgagctacaacctgctggaggacctgcccagcttcagcgtgtgccagaagctgcagaagatcgacctgagacacaacgagatctacgagatcaaggtggacaccttccagcagctgctgagcctgagaagcctgaacctggcctggaacaagatcgccatcatccaccccaacgccttcagcaccctgcccagcctgatcaagctggacctgagcagcaacctgctgagcagcttccccatcaccggcctgcacggcctgacccacctgaagctgaccggcaaccacgccctgcagagcctgatcagcagcgagaacttccccgagctgaaggtgatcgagatgccctacgcctaccagtgctgcgccttcggcgtgtgcgagaacgcctacaagatcagcaaccagtggaacaagggcgacaacagcagcatggacgacctgcacaagaaggacgccggcatgttccaggcccaggacgagagagacctggaggacttcctgctggacttcgaggaggacctgaaggccctgcacagcgtgcagtgcagccccagccccggccccttcaagccctgcgagcacctgctggacggctggctgatcagaatcggcgtgtggaccatcgccgtgctggccctgacctgcaacgccctggtgaccagcaccgtgttcagaagccccctgtacatcagccccatcaagctgctgatcggcgtgatcgccgccgtgaacatgctgaccggcgtgagcagcgccgtgctggccggcgtggacgccttcaccttcggcagcttcgccagacacggcgcctggtgggagaacggcgtgggctgccacgtgatcggcttcctgagcatcttcgccagcgagagcagcgtgttcctgctgaccctggccgccctggagagaggcttcagcgtgaagtacagcgccaagttcgagaccaaggcccccttcagcagcctgaaggtgatcatcctgctgtgcgccctgctggccctgaccatggccgccgtgcccctgctgggcggcagcaagtacggcgccagccccctgtgcctgcccctgcccttcggcgagcccagcaccatgggctacatggtggccctgatcctgctgaacagcctgtgcttcctgatgatgaccatcgcctacaccaagctgtactgcaacctggacaagggcgacctggagaacatctgggactgcagcatggtgaagcacatcgccctgctgctgttcaccaactgcatcctgaactgccccgtggccttcctgagcttcagcagcctgatcaacctgaccttcatcagccccgaggtgatcaagttcatcctgctggtggtggtgcccctgcccgcctgcctgaaccccctgctgtacatcctgttcaacccccacttcaaggaggacctggtgagcctgagaaagcagacctacgtgtggaccagaagcaagcaccccagcctgatgagcatcaacagcgacgacgtggagaagcagagctgcgacagcacccaggccctggtgaccttcaccagcagcagcatcacctacgacctgccccccagcagcgtgcccagccccgcctaccccgtgaccgagagctgccacctgagcagcgtggccttcgtgccctgcctgtag

SEQ ID NO: 97608 - protein, 391 aa, Artificial Sequence
  derived and/or modified sequence
MAPTQGPRAPLEFGGPLGAAALLLLLPATMFHLLLAARSGPARLLGPPASLPGLEVLWSPRALLLWLAWLGLQAALYLLPARKVAEGQELKDKSRLRYPINGFQALVLTALLVGLGMSAGLPLGALPEMLLPLAFVATLTAFIFSLFLYMKAQVAPVSALAPGGNSGNPIYDFFLGRELNPRICFFDFKYFCELRPGLIGWVLINLALLMKEAELRGSPSLAMWLVNGFQLLYVGDALWHEEAVLTTMDITHDGFGFMLAFGDMAWVPFTYSLQAQFLLHHPQPLGLPMASVICLINGLETISTATGRKLLVSGWWGMVRHPNYLGDLIMALAWSLPCGVSHLLPYFYLLYFTALLVHREARDERQCLQKYGLAWQEYCRRVPYRIMPYIY

SEQ ID NO: 97609 - DNA, 1176 bp, Artificial Sequence
  derived and/or modified sequence
atggcccccacccagggccccagagcccccctggagttcggcggccccctgggcgccgccgccctgctgctgctgctgcccgccaccatgttccacctgctgctggccgccagaagcggccccgccagactgctgggcccccccgccagcctgcccggcctggaggtgctgtggagccccagagccctgctgctgtggctggcctggctgggcctgcaggccgccctgtacctgctgcccgccagaaaggtggccgagggccaggagctgaaggacaagagcagactgagataccccatcaacggcttccaggccctggtgctgaccgccctgctggtgggcctgggcatgagcgccggcctgcccctgggcgccctgcccgagatgctgctgcccctggccttcgtggccaccctgaccgccttcatcttcagcctgttcctgtacatgaaggcccaggtggcccccgtgagcgccctggcccccggcggcaacagcggcaaccccatctacgacttcttcctgggcagagagctgaaccccagaatctgcttcttcgacttcaagtacttctgcgagctgagacccggcctgatcggctgggtgctgatcaacctggccctgctgatgaaggaggccgagctgagaggcagccccagcctggccatgtggctggtgaacggcttccagctgctgtacgtgggcgacgccctgtggcacgaggaggccgtgctgaccaccatggacatcacccacgacggcttcggcttcatgctggccttcggcgacatggcctgggtgcccttcacctacagcctgcaggcccagttcctgctgcaccacccccagcccctgggcctgcccatggccagcgtgatctgcctgatcaacggcctggagaccatcagcaccgccaccggcagaaagctgctggtgagcggctggtggggcatggtgagacaccccaactacctgggcgacctgatcatggccctggcctggagcctgccctgcggcgtgagccacctgctgccctacttctacctgctgtacttcaccgccctgctggtgcacagagaggccagagacgagagacagtgcctgcagaagtacggcctggcctggcaggagtactgcagaagagtgccctacagaatcatgccctacatctactag

SEQ ID NO: 97610 - DNA, 1176 bp, Artificial Sequence
  derived and/or modified sequence
atggccccaactcagggaccaagggccccgctggagttcggcggtcctctcggcgcggccgcccttctccttctgttacctgccactatgtttcacctcctcttggccgctagaagcgggccagcccgcttgctgggtccccccgcaagcctccctggattggaggtgctgtggtcaccgcgcgcgctcctgctgtggctggcctggctgggcctgcaagccgccctgtatctactgcctgcccgaaaggtcgccgaaggccaggagttgaaagataaatcccggctgaggtatcccataaatggcttccaagccctggtgttgaccgccctgttggtgggcctgggtatgtctgctggcctcccacttggggcgctgcccgaaatgctgctccccttggccttcgtcgccaccctcaccgctttcatcttctccctcttcctctacatgaaggcacaggtagcccctgtgtcagcgctggcccccgggggcaattccgggaaccctatctacgactttttcctcgggcgcgagctcaatcccagaatctgcttcttcgatttcaagtatttttgcgagctcagacctggcctaattggctgggtgctgataaacctagctctactgatgaaggaggctgagctgcgaggcagcccctccctggccatgtggctcgttaacgggttccaactgctctacgtgggggatgcactgtggcacgaagaagccgtcctgactacaatggatatcactcacgatggcttcggtttcatgctggcctttggagacatggcttgggtgcctttcacctactcactccaggctcaatttcttctgcatcaccctcagccccttggccttcctatggcctccgtaatctgtcttattaatgggttggagacaatctctaccgccacgggtcgcaagcttctggtgtcaggttggtggggaatggtgagacaccccaattacttaggtgatctgattatggctcttgcgtggtccttaccatgcggtgtttctcacctcctcccatacttttatttgctgtactttactgccctgctcgtgcacagagaagccagagatgaacgccagtgtttgcaaaaatatgggcttgcatggcaggaatattgtaggagggtgccatacaggatcatgccatacatctattag

SEQ ID NO: 97611 - DNA, 1176 bp, Artificial Sequence
  derived and/or modified sequence
atggcccccacccagggcccccgggcccccctggagtttggaggccccctgggcgccgccgccctgctgctgctgctgcctgccaccatgttccacctgctgctggccgcccggagcggccctgcccggctgctgggccccccagccagcctgcccggcctggaggtgctgtggagcccccgggccctgctgctgtggctggcctggctgggcctgcaggccgccctgtacctgctgcctgccaggaaggtggccgagggccaggagctgaaggacaagagccggctgcgctaccccatcaatggcttccaggccctggtgctgacagccctgctggtgggcctgggcatgtctgctggcctgcccctgggcgccctgcctgagatgctgctgcccctggcctttgtggccaccctgacagccttcatcttcagcctcttcctgtacatgaaggcccaggtggcccctgtgtctgccctggcccctgggggcaacagcggcaaccccatctatgacttcttcctgggccgggagctgaacccccgcatctgcttctttgacttcaagtacttctgtgagctgcggcccggcctgattggctgggtgctgatcaacctggccctgctgatgaaggaggccgagctgcggggcagccccagcctggccatgtggctggtgaatggcttccagctgctgtatgtgggagatgccctgtggcatgaggaggccgtgctgaccaccatggacatcacccatgatggcttcggcttcatgctggcctttggagacatggcctgggtgcccttcacctacagcctgcaggcccagttcctgctgcaccacccccagcccctgggcctgcccatggccagcgtcatctgcctgatcaatggcctggagaccatcagcacagccaccggcaggaagctgctggtgtctggctggtggggcatggtgcgccaccccaactacctgggggacctgatcatggccctggcctggagcctgccctgtggggtgagccacctgctgccctacttctacctgctgtacttcaccgccctgctggtgcaccgggaggccagagatgagcggcagtgcctgcagaagtatggcctggcctggcaggagtactgccggcgggtgccctaccgcatcatgccctacatctactag

SEQ ID NO: 97612 - DNA, 1176 bp, Artificial Sequence
  derived and/or modified sequence
atggcccccacccagggcccccgggcccccctggagttcggcggcccactgggtgctgccgcgctactactgttgttgcctgccactatgtttcacctgctactcgccgccagaagtggccctgccagactcctagggccacctgcatcactgcccggtctggaagttctttggagcccccgcgctttgctgctttggctcgcttggctaggccttcaggccgcgctgtatctgctgcctgcacgcaaagtggctgaaggccaagaactgaaggacaaaagtcgccttagataccccatcaatggctttcaggccctcgtcctaacagctctgttggtcggtctgggcatgtcagccggcctgcccctcggagcactccccgagatgctcctcccactagcatttgtagccaccttgactgctttcattttctccctgtttctgtacatgaaggcccaggtggcccccgtctccgcgctggctcccgggggcaacagtggcaaccctatatatgacttctttctgggaagggaactcaaccctcggatttgcttttttgatttcaaatatttctgtgagctccggcctgggttaatcggttgggtgcttattaacctcgcattgttgatgaaggaagccgagttacgtgggtcaccctccttagccatgtggttagtcaatggatttcagctgctttacgtaggagatgccctatggcatgaagaggccgtattaaccaccatggacattacccatgatggattcgggttcatgctggcattcggtgatatggcttgggttccattcacctatagtctgcaggctcaattcttactgcaccatcctcaaccattgggcttgcctatggcctcagttatctgcctcatcaatgggctggagacgataagtacagcgacgggaagaaaacttctggtctcaggatggtggggcatggttcgccatccgaattatctcggcgacttgattatggccctcgcgtggagccttccatgcggagtgtctcacctcttgccctacttttaccttctgtatttcacagccctgctcgtgcaccgggaagctcgcgatgagcgtcagtgcctgcagaaatatggcttagcttggcaggaatactgccgacgcgtgccataccggatcatgccctacatctattag

SEQ ID NO: 97613 - DNA, 1176 bp, Artificial Sequence
  derived and/or modified sequence
atggcacccacgcagggtcccagagcccctctggaattcgggggtcctctcggggctgctgccttactgctgctcctcccagcaacaatgttccatcttctactagccgcaaggtccggacccgctcgactgctcggaccaccagcctctttacctggcttggaagtgctgtggtcccctagggccctgctgttgtggctggcctggctcggactccaggccgctttatacctgctccctgccagaaaggtggcagaagggcaggagctgaaagacaagagtagactaagataccctattaatgggttccaggcccttgtactgacagctctgcttgtggggttaggaatgagcgcgggattgccgcttggggcactcccagaaatgttgctgccactggcattcgttgctaccctgaccgcatttatcttttcactttttctgtacatgaaagctcaggtagctcctgtgagcgctctggctcccggaggaaacagcggcaatcctatttacgacttcttcctgggaagggagctgaaccccagaatttgcttcttcgacttcaaatacttttgtgaactgagaccaggactgattggctgggtgctcataaatctggcgctgttgatgaaagaagcagaattgcggggttctcctagtcttgccatgtggctcgtcaacgggtttcagttgctctatgtcggtgatgcgctttggcacgaggaagcagtattaactaccatggatatcactcacgatgggtttgggtttatgctcgcttttggagatatggcatgggtcccattcacatactccctgcaggcgcagttcttgctgcaccatccacagcccttgggactccccatggcatccgtgatctgcctgatcaacgggctggagactatctcaaccgccacaggcaggaaacttctcgtctctggctggtggggaatggttcgtcatcctaattacctaggcgacttgataatggctttggcatggagcctgccttgtggagtgagtcacctgctgccttacttttacctgctatattttactgccctgcttgtgcacagagaagcccgagacgaacgacagtgcctgcagaaatacggcctggcctggcaggagtattgtaggcgcgtcccttacaggataatgccctacatttactag

SEQ ID NO: 97614 - DNA, 1490 bp, Artificial Sequence
  derived and/or modified sequence
tgtccaggcaggtgcaggcgccgcggggccggatcctccgcgcggccgagtccatctcctgggaaatggggcggacagtgtttccttgactgactattgtgagcgccctctctctccggcggagcggagaccatggcccccactcagggcccccgggccccgctggaattcggagggcccctgggcgccgcggctctgctactgctgctgcccgccaccatgttccacctgctcctggcggcccgttcgggccccgcgcgcctgctgggtccacccgcgtccctgccggggctggaggtgctgtggagcccacgggcgctgctgctgtggctcgcctggctcggcctgcaggcggcgctctacctactgccggcgcgcaaggtggccgaggggcaggaattgaaggacaagagtcgcctgcgctatcctattaacggcttccaggccctggtgctgacagccctgttggtggggctggggatgtcagcggggctgcctctgggggcgctcccggaaatgctcctgcccttggcgtttgtcgccaccctcaccgctttcatcttcagcctctttctctacatgaaggcgcaggtagccccagtttcggccctggcacctggggggaactcaggcaatccgatttacgacttttttctgggacgagagctcaaccctcgtatctgtttcttcgacttcaaatatttctgtgaactgcgacccggcctcatcggctgggtcctcatcaacctggccctgttgatgaaggaggcagagcttcgaggcagtccctcactggccatgtggctggtcaatggcttccagttgctctacgtgggtgatgccctctggcacgaggaggccgtcctcaccaccatggatatcacacatgacgggtttggcttcatgctggcgtttggggacatggcctgggtgcccttcacctacagcctgcaggcccagttcctgctgcaccacccgcagcccctggggttgcccatggcctctgtcatctgcctcatcaatgggcttgagaccatctctacagccacagggcggaaactgctggtgtctgggtggtggggtatggtccgccatcccaactatcttggagacctcatcatggctctggcttggtccttgccctgcggggtgtcacacctgctgccctacttctacctcctctacttcaccgcgctgctggtgcaccgtgaggcccgggatgagcggcagtgcctgcagaagtacggcctggcctggcaggagtactgccggcgtgtgccttaccgcatcatgccctacatctactgaagcggctccaccaccccaggtgggggcatgtgcccactcatccaccagcacacccaggaccaggagcctcgacacacttgggactcaagggcttgcaccccacccagccctgaggatgaacaacctcagagaagaggtggtttagagcaaggaaaaaaatgaaaccagtgaccaaaatcgga

SEQ ID NO: 97615 - protein, 2925 aa, Artificial Sequence
  derived and/or modified sequence
MGVLASALCWLLCVWLPWGEQAAESLRVQRLGERVVDSGRSGARGMRNVKGMRNGPAQTRVSSSSSHQEATLAMGDKATVVGGQQAEAPDSVAMSSWERRLHRAKCAPSYLFSCFNGGECVHPAFCDCRRFNATGPRCQMVYNAGPERDSICRAWGQHHVETFDGLYYYLSGKGSYTLVGRHEPEGQSFSIQVHNDPQCGSSPYTCSRAVSLFFVGEQEIHLAKEVTHGGMRVQLPHVMGSARLQQLAGYVIVRHQSAFTLAWDGASAVYIKMSPELLGWTHGLCGNNNADPKDDLVTSSGKLTDDVVEFVHSWQEQAPNQPPGPTTSSLPRPPCLQQNPGTMQGVYEQCEALLRPPFDACHAYVSPLPFTASCTSDLCQSMGDVATWCRALAEYARACAQAGRPLQGWRTQLRQCTVHCKEKAFTYNECIACCPASCHPRASCVDSEIACVDGCYCPNGLIFEDGGCVAPAECPCEFHGTLYPPGSVVKEDCNTCTCTSGKWECSTAVCPAECSVTGDIHFTTFDGRRYTFPATCQYILAKSRSSGTFTVTLQNAPCGLNQDGACVQSVSVILHQDPRRQVTLTQAGDVLLFDQYKIIPPYTDDAFEIRRLSSVFLRVRTNVGVRVLYDREGLRLYLQVDQRWVEDTVGLCGTFNGNTQDDFLSPVGVPESTPQLFGNSWKTLSACSPLVSGSPLDPCDVHLQAASYSVQACSVLTGEMFAPCSAFLSPVPYFEQCRRDACRCGQPCLCATLAHYAHLCRRHGLPVDFRARLPACALSCEASKEYSPCVAPCGRTCQDLASPEACGVDGGDDLSRDECVEGCACPPDTYLDTQADLCVPRNQCSCHFQGVDYPPGDSDIPSLGHCHCKDGVMSCDSRAPAAACPAGQVFVNCSDLHTDLELSRERTCEQQLLNLSVSARGPCLSGCACPQGLLRHGDACFLPEECPCTWKGKEYFPGDQVMSPCHTCVCQRGSFQCTLHPCASTCTAYGDRHYRTFDGLPFDFVGACKVHLVKSTSDVSFSVIVENVNCYSSGMICRKFISINVGNSLIVFDDDSGNPSPESFLDDKQEVHTWRVGFFTLVHFPQEHITLLWDQRTTVHVQAGPQWQGQLAGLCGNFDLKTINEMRTPENLELTNPQEFGSSWAAVECPDTLDPRDMCVLNPLREPFAKKECSILLSEVFEICHPVVDVTWFYSNCLTDTCGCSQGGDCECFCASVSAYAHQCCQHGVAVDWRTPRLCPYDCDFFNKVLGKGPYQLSSLAAGGALVGMKAVGDDIVLVRTEDVAPADIVSFLLTAALYKAKAHDPDVVSLEAADRPNFFLHVTANGSLELAKWQGRDTFQQHASFLLHRGTRQAGLVALESLAKPSSFLYVSGAVLALRLYEHTEVFRRGTLFRLLDAKPSGAAYPICEWRYDACASPCFQTCRDPRAASCRDVPRVEGCVPVCPTPQVLDEVTQRCVYLEDCVEPAVWVPTEALGNETLPPSQGLPTPSDEEPQLSQESPRTPTHRPALTPAAPLTTALNPPVTATEEPVVSPGPTQTTLQQPLELTASQLPAGPTESPASKGVTASLLAIPHTPESSSLPVALQTPTPGMVSGAMETTRVTVIFAGSPNITVSSRSPPAPRFPLMTKAVTVRGHGSLPVRTTPPQPSLTASPSSRPVASPGAISRSPTSSGSHKAVLTPAVTKVISRTGVPQPTQAQSASSPSTPLTVAGTAAEQVPVSPLATRSLEIVLSTEKGEAGHSQPMGSPASPQPHPLPSAPPRPAQHTTMATRSPALPPETPAAASLSTATDGLAATPFMSLESTRPSQLLSGLPPDTSLPLAKVGTSAPVATPGPKASVITTPLQPQATTLPAQTLSPVLPFTPAAMTQAHPPTHIAPPAAGTAPGLLLGATLPTSGVLPVAEGTASMVSVVPRKSTTGKVAILSKQVSLPTSMYGSAEGGPTELTPATSHPLTPLVAEPEGAQAGTALPVPTSYALSRVSARTAPQDSMLVLLPQLAEAHGTSAGPHLAAEPVDEATTEPSGRSAPALSIVEGLAEALATTTEANTSTTCVPIAEQDCVRHICLEGQLIRVNQSQHCPQGAAPPRCGILGLAVRVGGDRCCPLWECACRCSIFPDLSFVTFDGSHVALFKEAIYILSQSPDEMLTVHVLDCKSANLGHLNWPPFCLVMLNMTHLAHQVTIDRFNRKVTVDLQPVWPPVSRYGFRIEDTGHMYMILTPSDIQIQWLHSSGLMIVEASKTSKAQGHGLCGICDGDAANDLTLKDGSVVGGAEDPAPFLDSWQVPSSLTSVGQTRFRPDSCATTDCSPCLRMVSNRTFSACHRFVPPESFCELWIRDTKYVQQPCVALTVYVAMCHKFHVCIEWRRSDYCPFLCSSDSTYQACVTACEPPKTCQDGILGPLDPEHCQVLGEGCVCSEGTILHRRHSALCIPEAKCACTDSMGVPRALGETWNSSLSGCCQHQCQAPDTIVPVDLGCPSPRPESCLRFGEVALLLPTKDPCCLGTVCVCNQTLCEGLAPTCRPGHRLLTHFQEDSCCPSYSCECDPDLCEAELVPSCRQDQILITGRLGDSCCTSYFCACGDCPDSIPECQEGEALTVHRNTTELCCPLYQCVCENFRCPQVQCGLGTALVEVWSPDRCCPYKSCECDCDTIPVPRCHLWEKSQLDEEFMHSVENVCGCAKYECVKAPVCLSRELGVMQPGQTVVELSADGVCHTSRCTTVLDPLTNFYQINTTSVLCDIHCEANQEYEHPRDLAACCGSCRNVSCLFTFPNGTTSLFLPGASWIADCARHHCSSTPLGAVLVRSPISCPPLNETECAKVGGSVVPSLEGCCRTCKEDGRSCKKVTIRMTIRKNECRSSTPVNLVSCDGRCPSASIYNYNINTYARFCKCCREVGLQRRSVQLFCATNATWVPYTVQEPTDCACQWS

SEQ ID NO: 97616 - DNA, 8778 bp, Artificial Sequence
  derived and/or modified sequence
atgggcgtactggccagcgctttatgttggctcctttgcgtgtggctaccatggggagaacaggccgcagaaagcttgcgagttcagcgcctcggcgagagagtcgttgacagcggcagatccggtgctaggggcatgagaaacgtgaaaggtatgcgcaacggtcccgcccaaacacgtgtctcatcttcttcatcacatcaggaggccacactcgcgatgggcgataaggccactgtagtgggtgggcagcaggcagaggcgccggattctgtcgcaatgagcagttgggaaagacgattgcaccgcgcaaaatgcgccccctcctatctcttttcctgcttcaacggcggagagtgtgttcacccggcattctgtgactgtcggagatttaatgccacggggcctcgatgccagatggtctacaatgctggtccagagcgcgactccatttgcagagcctgggggcagcatcacgtcgaaaccttcgacggtctgtattattacctcagtggaaaagggtcatacactctagtgggacgtcatgaaccggagggtcagtcatttagcatacaggttcacaacgacccacagtgcggatcctcaccttatacttgtagccgggccgtgagtctgttttttgtgggcgaacaggaaattcacctggctaaagaagtaacgcacggcggcatgagggttcagcttccccatgtgatgggctctgcccggcttcagcaactcgcgggctatgtaatcgtgaggcaccagtctgcatttaccttagcctgggacggagcatctgcagtgtacattaagatgtctcctgagcttttgggatggactcacggactgtgtggaaacaataatgccgacccaaaagacgatctggtgacttcttccggcaagctaacggacgatgtggtggaattcgttcactcttggcaagagcaggctcccaaccagccgcccgggccgacaaccagctctctgccgcgcccaccttgcttacagcagaaccccggaacgatgcagggggtatatgaacagtgcgaagccttgttgaggccgccttttgacgcgtgtcatgcctatgtgtctccgttaccattcaccgccagctgcacctcagacttgtgtcagtctatgggtgacgtcgcaacgtggtgtcgggccctagcggaatatgcacgggcctgcgcccaggccgggcggcccttacagggatggaggactcagcttaggcaatgcacagtgcattgcaaagagaaagcgtttacttacaacgagtgtatcgcatgctgccccgctagctgtcatccccgtgcatcatgcgtcgatagcgaaatcgcttgcgtcgacggctgctattgcccgaatggcctcatattcgaagatggcggttgcgttgctcccgctgagtgcccttgcgaattccacgggaccctatatcctcctgggtctgtggtgaaggaagactgtaacacgtgtacttgcacttcgggaaagtgggaatgcagtaccgccgtttgccctgccgaatgttctgtcactggggacatacacttcactacgtttgatggtcgccgctacaccttcccagctacctgccagtatatccttgccaaaagccgttcatctggcacattcacagtcactctccaaaatgcaccgtgtggtcttaatcaggacggcgcttgtgtccaatccgtatccgttatcctgcaccaagacccaaggcgccaggtaacactaacgcaggctggcgacgtgctgctctttgatcagtacaagatcatccccccatacaccgatgatgccttcgaaatcagaaggctctctagcgtgtttctgcgcgtacggacaaatgtaggggtgagggtgttgtacgatcgggaagggcttagactttatcttcaggttgatcaacgctgggtcgaagacaccgtgggactgtgcggaacctttaacggcaacacacaggacgactttctgtctcccgttggcgtgcccgaatcaactccacaactttttggcaatagctggaaaacacttagcgcatgcagccctttggtcagcggttctcctttagacccctgcgatgtccacctgcaagccgccagttactcggtgcaggcctgttcggttctgacaggtgagatgttcgctccgtgcagcgctttccttagccctgtgccctatttcgaacagtgccggcgggacgcgtgtagatgtggccagccctgcctgtgtgccacattggcacactacgctcacctgtgccgccgtcacggattgcccgtggattttagagcgcgactgccggcctgcgccctcagctgtgaagcgtcaaaggaatattccccatgcgtggctccctgcggcagaacctgtcaggacctggcatcccctgaggcctgcggcgtagacggaggagatgacctgtcaagagacgagtgtgtcgaaggatgcgcctgtccccccgatacatacctggacacacaggctgatctgtgcgtgcctaggaatcagtgttcatgtcattttcagggggtggattaccccccaggtgattctgacatcccaagcttagggcattgccactgtaaggatggagtgatgagttgcgattcccgcgctcctgcagcggcatgccctgctggtcaggtgtttgtgaactgttccgatttacacacagatttagagctcagcagagagcggacctgcgaacagcaactgttaaacttgtccgtttctgccaggggtccttgtctcagtggctgcgcctgtccacaggggctgcttcgccatggcgatgcctgctttttgcccgaggaatgcccatgcacatggaagggtaaggagtatttccctggtgaccaggtgatgagcccctgccacacgtgtgtctgtcagaggggtagttttcagtgcacactccatccatgcgcaagtacctgcaccgcttacggcgataggcactaccggacatttgatggactcccatttgacttcgtcggcgcctgcaaagtgcatctcgtcaaatcaacaagtgatgtgtccttcagcgtgatcgtcgaaaacgtgaactgttattcctctgggatgatctgccggaagtttatttctataaatgtaggcaactctctcattgtgtttgacgatgactctggtaatccatcaccagaaagtttcctggatgacaaacaggaggttcacacttggagggtgggattcttcacccttgtgcacttcccccaggagcatatcaccctcctgtgggaccaaaggacaaccgtgcacgttcaagccgggccacaatggcaaggacagcttgccggcctttgtggcaatttcgacctgaagaccattaacgagatgcggacaccagagaacctcgagttgaccaatccccaagagtttggcagttcgtgggctgccgtggagtgccccgatacattggatcctcgagatatgtgcgttttaaatcctctgagagagccatttgccaagaaagagtgctctatcctgctcagcgaagtcttcgagatttgtcaccccgttgttgacgtgacgtggttctacagcaattgtcttactgacacgtgcgggtgcagtcagggtggagattgcgaatgtttctgcgcatctgtgtccgcctacgcccaccagtgttgccagcacggcgtggcggttgactggcggactccccgcctttgcccatatgactgcgactttttcaataaggtgctgggtaagggtccatatcagctatcgagtctggctgccggaggtgctttagtgggaatgaaagcagtgggcgatgacatcgtacttgtgcgcacagaggacgtggcgcctgctgacatcgtgtcttttctcctgactgctgccctctacaaggcgaaggcccacgaccccgatgtcgtctctttggaagcagcagaccggccaaatttttttcttcatgtgactgccaatgggtcattggaattagccaaatggcaggggagagacacgttccagcagcacgcttcatttctgctccaccggggcacacgacaagctggactggtggccctcgagtcacttgccaagccttcatccttcctttatgtctcgggtgccgttctggctcttcgcctgtacgaacatactgaagtctttcgccggggcacgctgttccggttgcttgatgctaaaccttctggagccgcatatccaatttgtgagtggcgctatgatgcgtgtgcatcaccctgtttccaaacctgccgggatccaagagctgcttcttgcagagatgttccaagggttgagggatgtgtacccgtgtgtcccacccctcaggtcctggacgaagtgacccagaggtgcgtatacctggaggattgcgttgagccagccgtgtgggtgcccaccgaggctctgggaaacgaaactctgccgcccagccaagggttacccacccctagtgatgaagaaccgcagttgagccaagagtctccgcgaacccctacccacaggcccgcactcacccctgctgctcccctaactacggcactcaacccgccggttaccgccaccgaggagcccgtcgtgagccccgggcccacgcagaccacactgcagcagccactggagttgaccgccagccagctgcccgcaggccccacggaatcccccgcaagcaagggagtcaccgcaagcctgctggcaatcccacatacgcctgagagttcgagtctgccagtagccctccagactccaacccctgggatggtcagcggcgctatggaaactaccagagtgacagtgatctttgccggctcccctaatatcacagtgtcttcccggtccccgccagcccccaggttccccctcatgacaaaagccgtgacagtccgaggacacggatccctgcccgttagaacgactccgcctcagccatccctgacagcaagcccttctagtagacccgtcgcttctcccggtgccatcagcaggtcccccacttcaagtgggtcccacaaggcagtgctgaccccagccgtcaccaaagtgatatcccgaactggagtgccccagcccacacaggcccagtcggcaagcagcccatccaccccactgactgtcgcaggaactgctgcggaacaagtgcctgtgagccccttagccaccagaagtctggagattgtactctctacagaaaagggcgaggccggacactcccagcccatgggatctccagcatcccctcagccgcaccccttgccgtctgcaccacctcggcccgctcagcataccacaatggctaccagatctccagcactcccacccgaaacgccggccgcagcaagcctctccactgcgaccgatgggttggccgccacccctttcatgtcactcgagtcaaccagaccctcgcagctgttgtccggccttccgcccgatacatctttacctctcgctaaggttggtactagcgcccccgtggccaccccgggacctaaggcatctgtcatcaccacgcccctgcaacctcaggcaaccaccttgccggcccagaccctttcccccgtgttaccatttactcccgctgccatgacgcaggcgcatcctcctacccatatcgcacccccagcggccggaaccgcgccgggactactgcttggagcaacgctgcctacctccggcgtgctcccagttgccgaaggaacagctagcatggtgtcggtggtgccaaggaaatctactactgggaaagtagccatcttgtcaaaacaggtttctttaccaactagcatgtacggctccgctgagggagggcctaccgaactcacgcctgcaacatcacatccattgactccactggtcgctgaaccggagggagcccaggccgggactgcccttcccgttcctactagctacgccctctccagagtctctgcgaggacggctcctcaagactctatgctggtactgctgcctcagttagctgaggcgcacggcacctcggccggacctcatctggctgctgagcccgtggatgaggccacaacagagccatccggtcgctccgcccctgctctgtcgatcgtcgaaggacttgccgaggcgctcgctaccactacagaagcgaacacctcgaccacttgcgtgcccattgccgaacaggattgcgtaaggcatatctgccttgaaggacagctgattcgagtcaatcagtcacagcactgcccacagggagctgcacccccccggtgcggcatcctggggcttgccgtgagagttggcggggaccgatgctgtcccctgtgggagtgtgcttgccgatgctccatttttcccgatttgagttttgtgacctttgatgggtctcatgtggctctcttcaaggaagccatatacattctgtcgcagtccccggacgagatgttgacagttcatgtgcttgactgcaaaagcgccaaccttgggcacctgaattggccccccttttgtcttgtaatgctaaacatgacacatcttgcgcatcaggtcacaatcgaccgcttcaatcggaaagtgacagtggaccttcagccagtttggccccccgtgagcagatatggatttcgaatagaagacacaggacacatgtacatgatattaaccccatcagatatccagatccagtggcttcacagcagcgggctcatgattgttgaggcctcaaagacatcaaaagctcaggggcacggcctttgtggtatctgtgacggcgacgcggccaacgacctgaccctgaaggatggttcagtagtgggaggcgccgaggaccctgcacccttccttgattcctggcaagtgccttcaagtctgacatccgtgggccagactcgattcaggcctgattcttgtgccaccacagactgtagcccttgcctgcgcatggtgtccaaccggactttctccgcgtgtcatagatttgtaccacccgaaagcttctgtgagttatggataagagacaccaagtacgtgcagcaaccttgtgtagcgctgactgtgtacgtcgctatgtgccacaagttccatgtctgcatcgaatggcgtcgtagcgattactgcccatttctgtgcagtagcgactccacctaccaggcctgcgtgaccgcgtgtgaaccgccaaaaacctgtcaggacggcattctcgggcccctcgaccctgagcattgccaggtgcttggcgaaggctgtgtgtgctctgaaggcaccatactgcatagaaggcactctgccttgtgcattccagaagccaaatgtgcatgcaccgacagtatgggtgttcctagagcgcttggtgaaacctggaactccagtctaagcggatgttgccagcaccagtgtcaagcgccagatactattgtgcccgtggatctgggctgcccttcaccaagaccagaatcatgccttaggtttggtgaggtggcgttgctcctgccaactaaagacccctgctgtcttggcaccgtctgcgtctgcaatcagaccttatgcgaagggctggctcccacatgtaggcccggacatcgcctcctgacccatttccaggaagactcttgttgtccgagttattcctgcgagtgtgacccggatctgtgtgaggcagaactggtcccttcttgtcgacaggaccagatcttgattaccggaaggctcggagacagctgttgtacatcgtacttttgcgcttgtggggattgtccagactcaatccccgagtgtcaggagggcgaagccctcaccgtgcacaggaataccacagagctatgttgtcccctgtatcagtgcgtttgcgaaaacttcagatgcccacaggtccagtgcggtctcgggaccgcgctcgtcgaggtttggagccccgatagatgttgcccttataaatcttgcgagtgcgattgcgacaccattcccgtgcccagatgtcacctgtgggaaaagtctcagctcgacgaggaattcatgcatagtgtggaaaatgtgtgtggatgcgcaaaatatgaatgcgtcaaggctccagtctgcctgagccgagagctcggcgtcatgcaaccaggacagacagtggtggagctatctgctgacggggtgtgccatactagcagatgcaccacggtgctggacccccttacaaatttttaccagatcaatactacgtcagtgctgtgcgatattcattgtgaagccaatcaagagtacgagcaccccagggacctcgctgcctgttgcggctcgtgcaggaatgtgagttgcctattcacgttcccgaatggcaccaccagcttattcctccctggggccagctggattgccgactgtgcacggcaccactgtagtagtaccccattgggcgccgtactcgtgaggtcacctatttcatgcccgccacttaatgaaactgagtgtgccaaagtgggaggcagcgtggtaccctcccttgagggctgttgccgaacatgtaaagaggacggtcggagttgtaaaaaggtcacgattcggatgacaattagaaagaatgagtgtaggtccagcacaccagtaaatctggtgtcttgtgatggccggtgccccagtgctagtatctataactataacatcaatacatatgcaagattctgtaaatgctgtcgtgaggtaggcctgcagcggcgctctgtacaattgttctgtgctactaatgccacttgggtaccatacactgtgcaggagcctacggactgcgcctgtcagtggagttag

SEQ ID NO: 97617 - DNA, 8778 bp, Artificial Sequence
  derived and/or modified sequence
atgggcgtgctggccagcgccctgtgctggctgctgtgtgtgtggctgccctggggcgagcaggccgctgagagcctgcgggtgcagaggctgggggagcgggtggtggacagcggccgcagcggggcccggggcatgagaaatgtgaagggcatgagaaatggacctgcccagaccagggtgagcagcagcagcagccaccaggaggccaccctggccatgggagacaaggccaccgtggtgggcggccagcaggccgaggccccagattctgtggccatgagctcctgggagcggcggctgcaccgggccaagtgtgcccccagctacctgttcagctgcttcaatggaggagaatgtgtgcacccagccttctgtgactgccgccgcttcaatgccaccggcccccgctgccagatggtgtacaatgccggccctgagcgggacagcatctgccgggcctggggccagcaccacgtggagacctttgatggcctgtactactacctgagcggcaagggcagctacaccctggtgggcagacatgagcctgagggccagagcttcagcatccaggtgcacaatgacccccagtgtggcagcagcccctacacctgcagcagagctgtgtccctcttctttgtgggggagcaggagatccacctggccaaggaggtgacccacggcggcatgagggtgcagctgccccacgtgatgggcagcgcccggctgcagcagctggccggctacgtgattgtgcgccaccagagcgccttcaccctggcctgggatggagccagcgctgtgtacatcaagatgagccctgagctgctgggctggacccacggcctgtgtggcaacaacaatgctgaccccaaggatgacctggtgaccagcagcggcaagctgacagatgatgtggtggagtttgtgcacagctggcaggagcaggcccccaaccagcccccaggccccaccaccagcagcctgcccaggcctccctgcctgcagcagaaccctggcaccatgcagggcgtgtatgagcagtgtgaggccctgctgcggcccccatttgatgcctgccacgcctacgtgagccccctgcccttcaccgccagctgcaccagtgacctgtgccagagcatgggagatgtggccacctggtgccgggccctggccgagtatgcccgggcctgtgcccaggccggccggcccctgcagggctggaggacccagctgcggcagtgcaccgtgcactgcaaggagaaggccttcacctacaatgaatgtattgcctgctgcccagccagctgccacccccgggccagctgtgtggacagcgagatcgcctgtgtggatggctgctactgccccaacggcctcatctttgaagatggcggctgtgtggccccagcagaatgtccctgtgagttccacggcaccctgtacccacctggctctgtggtgaaggaggactgcaacacctgcacctgcaccagcggcaagtgggagtgcagcacagctgtgtgcccagcagaatgttctgtgactggagacatccacttcaccacctttgatggccgccgctacaccttccctgccacctgccagtacatcctggccaagagccgcagcagcggcaccttcaccgtgaccctgcagaatgccccctgtggcctgaaccaggatggagcctgtgtgcagagcgtgtctgtcatcctgcaccaggacccccggcggcaggtgaccctgacccaggccggagatgtgctgctgtttgaccagtacaagatcatccccccctacacagatgatgcctttgagatccggcggctgagcagcgtcttcctgcgggtgaggaccaacgtgggcgtgcgggtgctgtatgaccgggagggcctgcggctgtacctgcaggtggaccagcgctgggtggaggacacagtgggcctgtgtggcaccttcaacggcaacacccaggatgacttcctgagccctgtgggcgtgcctgagagcaccccccagctgtttggaaacagctggaagaccctgagcgcctgcagccccctggtgtctggcagccccctggacccctgtgatgtgcacctgcaggccgccagctacagcgtgcaggcctgcagcgtgctgactggagagatgtttgccccctgcagcgccttcctgagccctgtgccctactttgagcagtgcagaagagatgcctgccgctgtggccagccctgcctgtgtgccaccctggcccactacgcccacctgtgcagaagacatggcctgcctgtggacttccgggcccggctgcctgcctgtgccctgagctgtgaggccagcaaggagtacagcccctgtgtggccccctgtggccgcacctgccaggacctggccagccctgaggcctgtggggtggatggaggagatgacctgagcagagatgaatgtgtggagggctgtgcctgccccccagacacctacctggacacccaggccgacctgtgtgtgcccaggaaccagtgcagctgccacttccagggcgtggactacccacctggggacagcgacatccccagcctgggccactgccactgcaaggatggagtgatgagctgtgacagccgggccccagctgctgcctgcccagctggccaggtgtttgtgaactgcagcgacctgcacacagacctggagctgagccgggagaggacctgtgagcagcagctgctgaacctgtctgtgtctgcccggggcccctgcctgagcggctgtgcctgcccccagggcctgctgcggcatggagatgcctgcttcctgcctgaagaatgtccctgcacctggaagggcaaggagtacttccctggggaccaggtgatgagcccctgccacacctgtgtgtgccagaggggcagcttccagtgcaccctgcacccctgtgccagcacctgcacagcctatggagacagacactaccgcacctttgatggcctgccctttgattttgtgggcgcctgcaaggtgcacctggtgaagagcaccagtgatgtgtccttcagcgtcatcgtggagaatgtgaactgctacagcagcggcatgatctgcaggaagttcatcagcatcaacgtgggcaacagcctcatcgtgtttgatgatgacagcggcaaccccagccctgagagcttcctggatgacaagcaggaggtgcacacctggagggtgggcttcttcaccctggtgcacttcccccaggagcacatcaccctgctgtgggaccagaggaccaccgtgcacgtgcaggccggcccccagtggcagggccagctggccggcctgtgtggcaactttgacctgaagaccatcaatgagatgaggaccccagagaacctggagctgaccaacccccaggagtttggcagctcctgggccgctgtggagtgcccagacaccctggacccccgggacatgtgtgtgctgaaccccctgcgggagccctttgccaagaaggagtgcagcatcctgctgtctgaggtgtttgagatctgccaccctgtggtggatgtgacctggttctacagcaactgcctgacagacacctgtggctgcagccagggcggggactgtgagtgcttctgtgcctctgtgtctgcctatgcccaccagtgctgccagcacggcgtggccgtggactggaggaccccccggctgtgcccctatgactgtgacttcttcaacaaggtgctgggcaagggcccctaccagctgagcagcctggccgccggcggggccctggtgggcatgaaggctgtgggagatgacatcgtgctggtgaggacagaagatgtggccccagctgacatcgtgtccttcctgctgacagctgccctgtacaaggccaaggcccatgaccctgatgtggtgtccctggaggccgctgaccggcccaacttcttcctgcacgtgacagccaacggcagcctggagctggccaagtggcagggccgggacaccttccagcagcacgccagcttcctgctgcaccggggcacccggcaggccggcctggtggccctggagagcctggccaagcccagcagcttcctgtatgtgtctggagctgtgctggccctgcggctgtatgagcacacagaggtgttcagaagaggcaccctcttccggctgctggatgccaagcccagcggggccgcctaccccatctgtgagtggaggtatgatgcctgtgccagcccctgcttccagacctgccgggaccccagggctgccagctgcagagatgtgccccgggtggagggctgtgtgcctgtgtgccccaccccccaggtgctggatgaggtgacccagagatgtgtgtacctggaggactgtgtggagcctgctgtgtgggtgcccacagaggccctgggcaatgagaccctgccccccagccagggcctgcccacccccagtgatgaggagccccagctgagccaggagagccccaggacccccacccacaggcctgccctgaccccagctgcccccctgaccacagccctgaacccccctgtgacagccacagaggagcctgtggtgtccccaggccccacccagaccaccctgcagcagcccctggagctgacagccagccagctgcctgctggccccacagagagccctgccagcaagggcgtgacagccagcctgctggccatcccccacaccccagagagcagcagcctgcctgtggccctgcagacccccaccccaggcatggtgtctggggccatggagaccaccagggtgaccgtcatctttgctggcagccccaacatcaccgtgagcagccgcagccccccagccccccgcttccccctgatgaccaaggctgtgacagtgcggggccacggcagcctgcctgtgaggaccaccccaccccagcccagcctgacagccagccccagcagcaggcctgtggccagccctggggccatcagccgcagccccaccagcagcggcagccacaaggctgtgctgaccccagctgtgaccaaggtgatcagcaggactggagtgccccagcccacccaggcccagagcgccagcagccccagcacccccctgactgtggccggcacagctgctgagcaggtgcctgtgagccccctggccaccaggagcctggagatcgtgctgagcacagagaagggggaggccggccacagccagcccatgggcagccctgccagcccccagccccaccccctgcccagcgccccacccaggcctgcccagcacaccaccatggccaccaggagccctgccctgcccccagagaccccagctgctgccagcctgagcacagccacagatggcctggccgccacccccttcatgagcctggagagcacccggcccagccagctgctgagcggcctgcccccagacaccagcctgcccctggccaaggtgggcaccagcgcccctgtggccaccccaggccccaaggccagcgtcatcaccacccccctgcagccccaggccaccaccctgcctgcccagaccctgagccctgtgctgcccttcaccccagctgccatgacccaggcccacccccccacccacatcgcccctcctgctgctggaacagcccctggcctgctgctgggcgccaccctgcccaccagcggcgtgctgcctgtggccgagggcacagcctccatggtgtctgtggtgcccaggaagagcaccaccgggaaggtggccatcctgagcaagcaggtgtccctgcccacctccatgtatggcagcgctgagggcggccccacagagctgaccccagccaccagccaccccctgacccccctggtggccgagcctgagggcgcccaggccggcacagccctgcctgtgcccaccagctatgccctgagccgggtgtctgccaggacagccccccaggacagcatgctggtgctgctgccccagctggccgaggcccacggcaccagcgctggcccccacctggccgctgagcctgtggatgaggccaccacagagcccagcggccgcagcgccccagccctgagcatcgtggagggcctggccgaggccctggccaccaccacagaggccaacaccagcaccacctgtgtgcccatcgccgagcaggactgtgtgcgccacatctgcctggagggccagctgatccgggtgaaccagagccagcactgcccccagggcgccgccccaccccgctgtggcatcctgggcctggccgtgcgggtgggcggggaccgctgctgccccctgtgggagtgtgcctgccgctgcagcatcttcccagacctgagctttgtgacctttgatggcagccacgtggccctcttcaaggaggccatctacatcctgagccagagcccagatgagatgctgactgtgcacgtgctggactgcaagagcgccaacctgggccacctgaactggccacccttctgcctggtgatgctgaacatgacccacctggcccaccaggtgaccatcgaccgcttcaacaggaaggtgacagtggacctgcagcctgtgtggccccctgtgagccgctatggcttcagaattgaggacaccggccacatgtacatgatcctgacccccagcgacatccagatccagtggctgcacagcagcggcctgatgattgtggaggccagcaagaccagcaaggcccagggccacggcctgtgtggcatctgtgatggagatgctgccaatgacctgaccctgaaggatggctctgtggtgggcggcgctgaggaccctgcccccttcctggacagctggcaggtgcccagcagcctgacctctgtgggccagacccgcttccggccagacagctgtgccaccacagactgcagcccctgcctgaggatggtgagcaacagaaccttcagcgcctgccacagatttgtgcccccagagagcttctgtgagctgtggatccgggacaccaagtatgtgcagcagccctgtgtggccctgactgtgtatgtggccatgtgccacaagttccacgtgtgcatcgagtggaggagaagtgactactgccccttcctgtgcagcagtgacagcacctaccaggcctgtgtgacagcctgtgagccccccaagacctgccaggacggcatcctgggccccctggaccctgagcactgccaggtgctgggggagggctgtgtgtgcagcgagggcaccatcctgcaccggcggcacagcgccctgtgcatccctgaggccaagtgtgcctgcacagacagcatgggcgtgccccgggccctgggggagacctggaacagcagcctgagcggctgctgccagcaccagtgccaggccccagacaccatcgtgcctgtggacctgggctgccccagccccaggcctgagagctgcctgcgctttggagaggtggccctgctgctgcccaccaaggacccctgctgcctgggcaccgtgtgtgtgtgcaaccagaccctgtgtgagggcctggcccccacctgcaggcctggccaccggctgctgacccacttccaggaggacagctgctgccccagctacagctgtgaatgtgaccctgacctgtgtgaggccgagctggtgcccagctgccggcaggaccagatcctgatcaccggccgcctgggggacagctgctgcaccagctacttctgtgcctgtggggactgcccagacagcatccctgagtgccaggagggggaggccctgactgtgcacaggaacaccacagagctgtgctgccccctgtaccagtgtgtgtgtgagaacttccgctgcccccaggtgcagtgtggcctgggcacagccctggtggaggtgtggagcccagaccgctgctgcccctacaagagctgtgaatgtgactgtgacaccatccctgtgccccgctgccacctgtgggagaagagccagctggatgaggagttcatgcacagcgtggagaatgtgtgtggctgtgccaagtatgaatgtgtgaaggcccctgtgtgcctgagccgggagctgggcgtgatgcagcccggccagacagtggtggagctgtctgcagatggagtgtgccacaccagccgctgcaccaccgtgctggaccccctgaccaacttctaccagatcaacaccacctctgtgctgtgtgacatccactgtgaggccaaccaggagtatgagcacccccgggacctggccgcctgctgcggcagctgcagaaatgtgtcctgcctcttcaccttccccaacggcaccaccagcctcttcctgcccggggcctcctggattgctgactgtgcccggcaccactgcagcagcacccccctgggcgctgtgctggtgcgcagccccatcagctgcccccccctgaatgaaacagaatgtgccaaggtgggcggctctgtggtgcccagcctggagggctgctgcaggacctgcaaggaggatggccgcagctgcaagaaggtgaccatccgcatgaccatcaggaagaatgaatgtcgcagcagcacccctgtgaacctggtgtcctgtgatggccgctgccccagcgccagcatctacaactacaacatcaacacctacgcccgcttctgcaagtgctgccgggaggtgggcctgcagaggagatctgtgcagctgttctgtgccaccaatgccacctgggtgccctacacagtgcaggagcccacagactgtgcctgccagtggagctag

SEQ ID NO: 97618 - DNA, 8778 bp, Artificial Sequence
  derived and/or modified sequence
atgggcgtgctggccagcgccctgtgctggctgctgtgcgtgtggctcccttggggcgaacaggccgccgaaagtctgcgcgtccagcgcctgggggaacgcgtggtggacagtggacgctctggcgcacgggggatgcgcaacgtcaaaggcatgcgaaatggacccgcccagaccagggtgtcttcatcatctagccatcaggaggccacactagctatgggggacaaggctaccgtcgttggcggccagcaggcggaggctcccgattctgtcgccatgagtagttgggaaaggcgactgcacagggcgaagtgcgccccaagttacctttttagttgcttcaatgggggagagtgcgtgcaccccgccttttgtgattgtcgccgctttaatgctactggtccgaggtgccagatggtatacaacgccggacccgagcgcgactcaatctgccgcgcttgggggcagcaccacgtggagacattcgatgggctgtattattacttaagcgggaaggggtcctacactttggtgggacgccacgagcccgaggggcagagcttcagcattcaggtgcacaatgatcctcaatgtggaagtagtccatacacctgcagccgcgccgttagtctgttcttcgtcggggagcaggaaatccatcttgcgaaagaagtcacacacgggggaatgagggttcagcttcctcacgttatggggagtgctagactgcagcagctggctggctatgtcattgtgcggcaccagagcgcttttactctggcttgggacggcgccagtgccgtgtatattaagatgagtcctgagctgctggggtggactcacggactttgcggtaacaataatgccgatccgaaggacgatctcgtcacttcctccggcaagctgacagatgatgtggtcgaattcgtccattcatggcaggagcaggccccaaaccaaccacccgggccaaccacctcaagcctgccccgcccaccatgtctgcagcagaatcccgggactatgcagggtgtctatgaacagtgtgaggctctgctgaggcctccatttgatgcttgtcacgcttacgtttctccgctgcccttcaccgcaagttgtacatcagatctttgccagtctatgggagacgttgctacgtggtgtagagccctggccgaatatgcacgggcatgcgcacaggccgggaggcctctccagggatggagaactcagctgagacaatgtaccgtgcattgtaaggaaaaggccttcacctacaacgagtgtatcgcgtgttgccctgcttcttgtcacccccgggctagttgcgtcgacagtgaaatcgcgtgcgtggatgggtgctattgtcccaatggactaatatttgaagatggcggctgtgtggcccccgccgagtgtccatgtgagtttcacggcaccctctaccctccaggctcagtcgtgaaggaggattgcaacacctgcacatgcacatctggcaaatgggagtgtagcaccgcggtgtgtcccgcagagtgttcggtgaccggtgatatacactttactacgtttgatggccggcggtacactttcccagcaacctgccagtatattctcgcaaagtccagaagctccggcaccttcaccgtcaccctgcagaatgctccctgcggcttgaaccaggatggggcctgtgttcagtccgtgagcgtgatccttcatcaggaccctcggcgccaggtgactctaactcaagcaggagacgtactactgttcgatcagtacaaaatcattcctccgtacaccgatgatgccttcgagatacgacgcctgtcatccgttttcttgagggtccgcacgaacgtgggggtaagagttctttacgaccgggaggggcttcgactgtatctgcaggtcgaccagcgctgggttgaagacaccgtggggctctgtggaacctttaacgggaatacacaggacgacttcttgtcacccgtgggcgtcccggagtctacacctcagctatttggtaatagttggaagaccctgtcagcatgttcgccattagtgtccggctcccccctcgatccttgtgacgtgcacctccaagctgcgtcttactcagtgcaggcttgcagcgtactcacaggtgagatgtttgccccctgcagcgccttcctgagtccggtaccttactttgaacaatgcagacgcgacgcctgccgctgtggacagccgtgtctttgcgcaactcttgcacactacgcacacctctgccgaaggcatggactgcccgtggactttagggccaggcttcccgcctgcgccttgagttgcgaggcctctaaagagtacagcccttgcgtcgctccttgcgggaggacctgtcaggaccttgcttctcccgaagcctgcggagtagacggaggtgacgatctcagccgtgacgaatgcgtggagggctgtgcctgccctccagacacctatctcgacactcaagccgatctgtgtgtccctcggaaccagtgttcctgccatttccaaggcgtggattacccccccggagactccgatattccctcacttgggcattgccattgtaaggatggggtaatgtcttgtgactcgcgcgctcccgccgctgcgtgtcctgccggacaagttttcgtcaactgctccgacctgcataccgacctcgaacttagcagagaacgcacttgcgagcagcagctgctgaacctctctgtgtccgctcgagggccttgcctgtccggctgtgcatgtccacagggccttctgcggcacggcgacgcgtgctttctccctgaagagtgcccctgtacatggaaggggaaagagtatttcccaggggaccaggtgatgagcccctgccacacatgcgtgtgtcaacgcggcagcttccagtgcaccttacatccatgtgcctctacatgcacagcgtacggggatcgccactaccggacatttgatggattgccctttgatttcgtcggggcttgcaaggtgcatctagtaaaatccacaagcgatgtttccttctccgttatagttgagaatgtcaattgttactcttcaggtatgatctgtagaaaatttattagcataaatgtgggaaattctttaatcgtcttcgacgacgactcgggaaacccttcccccgaaagctttctcgacgacaagcaggaggtgcatacatggcgcgtgggctttttcaccttggttcatttcccccaggaacacattaccctgttgtgggatcagcgtacgacagtgcatgtgcaggcaggcccccagtggcaaggccaattagcagggctttgcggaaactttgacctgaagaccatcaatgagatgagaactcctgagaatctggaactcacaaatccacaagagtttggcagctcgtgggcagcggtggagtgcccagacacactggaccctagggacatgtgtgtgctcaaccctctccgggaaccctttgcaaagaaggagtgcagcatcctcttgtctgaggtgtttgagatctgtcatccagtggtggacgtcacatggttctattctaactgcctcacggacacatgcgggtgcagccagggtggcgattgcgaatgtttctgcgccagtgttagcgcatatgcacaccaatgttgtcagcatggagtcgccgtggattggcggacaccaaggctgtgtccttacgattgtgacttttttaataaagtattggggaagggtccttatcaactctctagtttagccgcaggtggcgctttagtggggatgaaagccgtgggcgatgacatcgtgctagtccgaaccgaggacgtggcaccagctgacatcgtatcgttcctcctgacagctgctctgtacaaggctaaggcacacgacccggacgtggtgagtttggaagctgctgatcgccctaactttttcctgcatgtaacggccaatggctctcttgagctggccaaatggcagggaagggatacattccagcagcacgcctctttcctgttgcacagagggacccggcaggccggcctggtagccctcgagtccttggctaaaccatcttcattcctctatgtttctggcgccgtgttagccctacggctctacgagcacacagaagtgttccggcggggcactctgtttcggctgctcgacgctaaaccctctggggccgcctatccaatatgtgaatggaggtacgatgcctgtgcgtcaccatgcttccagacctgccgtgatcccagggcagcttcttgcagggacgtcccaagggtggagggatgtgtccccgtgtgtcctacgcctcaggtactggacgaagtcacacagagatgcgtgtacctcgaggattgtgtggaacctgctgtgtgggtgccaaccgaggcactcggcaacgagacgttgcctccttcccagggtcttcctaccccctcagacgaggagccacaattaagccaggaatctccgcgaactcctactcatagacccgcactgacccctgctgctccccttacaaccgctttgaatcccccggtcaccgctaccgaggagccagtggtttcacctggcccgacacaaacaacacttcagcaacccctggaactgacagcctcacaacttcccgccggacccacagagtcccccgcctcaaagggggttaccgccagccttcttgccataccccataccccagagagctcctctttgcccgtcgccctgcagactcccactcccggaatggtctctggcgctatggagacaactcgggttaccgtgatctttgccggatccccaaacatcacagtgtccagtaggtcaccccccgcacctcgtttccccctgatgacaaaggccgtgacagtccgcgggcatggaagcttgcctgtgagaactacacctccacagccttctcttacagcttctcctagttccaggcccgttgcctcccccggggcaatttccaggtccccgacctcatctggaagtcataaggccgtactcacacccgctgtcaccaaagtcatcagcaggaccggtgtcccacaaccaactcaggcacaatctgccagctcaccaagtacacctctgaccgtggcgggaactgcagccgaacaggtcccagtgtcccccctagccactagaagcctggagattgtgctctcaacagagaagggggaggctggacattcccagcctatggggtctccagctagtccgcagccgcaccccttgccttctgctccccctcgccccgcccaacacacgaccatggcaaccaggtcccctgctctcccaccggaaacaccagccgcggcctccttgtctactgccacagatgggcttgctgctacccctttcatgtctttggaatctacgagaccgtctcagctgctgtctgggctgccaccggacacatcccttcccctcgctaaggtcggcacgagtgcccctgtcgctactcccggccccaaggcttccgtgattacaacacccctgcagccccaagcaactaccctgcccgctcagactctctctcctgtgctgccttttactcctgcagctatgactcaggcacatccaccgacacacatcgctccacctgcggctgggaccgcccccgggctgctgctgggcgccacgctgcccacttccggcgttctcccagtggcggaaggaaccgccagcatggttagtgtggttccacgcaaaagtacgacggggaaggtggcaatcctcagtaagcaggtgtctctcccaaccagtatgtacggcagtgctgagggaggcccgaccgagctcacccccgcaacaagccacccgctcactcccctggtagcagagcctgaaggagcccaggctgggacagctctccctgtacctacatcctatgcactgagccgcgtgtctgctaggactgctccacaggatagcatgctcgtcctcctgcctcagctggccgaggctcatgggacttccgctggacctcatctggctgccgagcccgtcgacgaggctacaactgagccatctggacgctccgccccagccctctcaattgttgagggtctcgccgaggcccttgccacaaccactgaggccaatacctctactacctgtgtgcccatcgccgaacaggactgcgtccgacacatctgcctggagggtcagttgataagggtgaaccagagccagcactgtccccagggcgctgccccaccccggtgcggtattctcggcttggcggtacgtgtgggaggcgataggtgttgccctttgtgggagtgcgcatgtagatgcagtatcttccccgacttatcatttgtgacattcgatggaagccatgtcgctttgtttaaggaggccatatacatcctatcccagtcacccgatgagatgctgactgtacacgtgctcgattgcaaatccgcaaatttgggccatcttaactggcctccattttgtctcgtgatgttgaatatgacgcacctggcacaccaggtgactatagatcggttcaataggaaagtgaccgtggacctgcagcctgtatggcctcccgtgagtagatacggctttaggattgaggatacaggccacatgtatatgatactgaccccgtccgatatacagattcaatggttgcactcatctgggcttatgattgtggaagcctcaaaaactagtaaagcccagggccatggtctatgtggcatttgtgacggagacgcagctaacgatctgaccctcaaagacggatcagtcgtggggggcgctgaagaccctgccccgtttctggactcctggcaagtaccaagctcattaacctcagtcggccaaacccgattccgcccagatagttgcgccacaaccgactgttcgccttgcttacggatggtctccaataggacattttccgcttgccaccgtttcgtgccacctgaatctttctgtgaattatggattcgggacacgaagtacgttcagcagccctgcgttgcgttgactgtgtacgtcgcaatgtgccacaagtttcacgtgtgtatcgaatggcggcgctccgactattgtccattcctgtgctcttcagactccacctatcaggcatgcgtcaccgcctgcgaaccccccaagacatgtcaggacggcatcctggggcctcttgaccctgagcactgccaagtcctgggcgaggggtgtgtgtgcagtgagggcactatccttcaccggcggcactctgctctgtgcattccggaggccaaatgcgcatgtacagatagcatgggagtgccgcgggctttgggtgagacctggaattccagccttagcggctgctgtcagcaccagtgccaggctcctgacaccatcgtgccagttgatttgggatgtccttcaccacgccctgaatcttgtctgaggttcggggaggtggctctgctgctcccgaccaaggatccctgctgcttgggaacagtgtgtgtttgcaatcagacactttgtgaaggcttggcccctacgtgccgtcccgggcaccgtctcctcacacacttccaagaggacagctgctgcccatcctattcttgcgagtgtgaccccgatctgtgcgaagccgaacttgtcccaagttgccgccaggatcaaatcctgatcactggacgactgggagactcttgttgcactagctatttctgtgcctgtggggactgtccagatagcattcccgagtgtcaggagggcgaggcgcttacagtgcatagaaacacaaccgagctgtgttgccccctgtaccagtgtgtatgcgaaaactttagatgtccacaggttcagtgtggcctgggaaccgcgcttgtggaggtttggtccccagacagatgctgcccatacaaaagctgtgaatgcgattgtgacaccatacccgtgcctcggtgccatttatgggagaagagccagttggatgaggagttcatgcactccgttgaaaacgtctgcgggtgtgccaagtatgagtgtgtgaaagcacctgtatgtctctcaagagagctgggcgtcatgcagcctggccaaacggtggtggagctctccgccgacggcgtgtgtcatacttctcgctgtacaaccgtcttggatcccctaactaacttttaccagattaacaccacctcagtactgtgcgacatccattgcgaggcaaaccaagagtacgaacacccgcgggatctggctgcttgttgcggcagctgtaggaacgtgtcgtgcctcttcactttccctaatggcacaacctccttgtttctgcccggagcctcctggattgcagattgcgcccgccatcactgcagttcgacccccttgggcgctgtgctggtgcgcagccctattagctgcccacctttgaatgagacagaatgcgcaaaggttgggggctctgtggtaccttcacttgaaggatgttgccgaacttgtaaggaggatggccgctcatgtaaaaaagtcactattcgcatgaccattaggaagaacgagtgtagatcaagtacgcctgtcaatctcgtgtcctgtgatggccgctgcccatcggcgtccatctacaactataacatcaacacctatgcacgcttctgcaagtgttgtagagaggtgggactgcagagaaggagcgtacagctattctgcgccacaaacgctacttgggttccatatacagtacaggaaccaactgactgtgcatgccagtggagctag

SEQ ID NO: 97619 - DNA, 8778 bp, Artificial Sequence
  derived and/or modified sequence
atgggagtcctggcgtctgcgctctgctggctgctttgtgtctggctgccctggggtgagcaggcagccgagtccctgcgggtgcagcgcctcggtgagagggttgtggactcagggaggtcgggggctcgaggaatgagaaacgttaaaggaatgaggaatgggcccgcgcagactcgtgtttcctccagcagcagccaccaggaggcgacccttgccatgggggacaaggctacagtcgtgggaggccagcaggctgaagccccagactccgtggccatgtcttcctgggaaaggcggctccatcgggccaagtgtgcaccatcctacttgttctcctgcttcaatggaggcgagtgtgtgcacccagccttctgtgactgcagacgcttcaatgccactggaccgcgctgccagatggtgtacaatgccggccctgagagggacagcatttgccgggcgtgggggcagcaccacgtggagacatttgatgggctctactactacctctccggaaagggcagctacaccctggtgggtcgccatgagcccgagggacagagcttctccatccaggtacacaatgacccgcagtgtggctcttcaccctacacctgctccagggctgtcagcctcttctttgtgggtgagcaggagatccatctggccaaggaggtcacccatggaggcatgagggtccaactgccacatgtcatggggagcgcgcgtctgcagcagcttgccggctatgtcatcgtgcggcatcagtcagccttcacactggcctgggatggtgcctcggctgtctacatcaagatgagtccagagcttctgggctggacccatgggctgtgtgggaacaacaatgctgaccccaaggatgatctggtgaccagctctgggaagctgactgacgacgtggttgagtttgtgcacagctggcaggagcaggcccctaaccagcctccagggcccacaacttcctccctgcctcgcccaccgtgcctacagcagaacccaggaaccatgcagggcgtgtacgagcagtgtgaggctctactgcggcccccctttgacgcctgccacgcctacgtcagccctctgcccttcacagccagttgtaccagtgatctctgccaatcaatgggtgatgtagccacctggtgccgggcactggcggagtatgcccgggcgtgtgcccaggcagggcggcccttgcaaggctggaggacccagctccggcaatgcactgtgcactgcaaggagaaggcctttacctacaatgagtgcatcgcctgctgccctgcctcctgccatccccgggcatcctgtgtggacagtgagatcgcctgtgtggacggctgctattgccccaatgggctcatcttcgaggatgggggctgcgtggcaccagctgagtgtccctgtgagtttcacgggactctgtacccacctggctctgtggtgaaggaagactgcaatacttgcacatgcacctcaggcaagtgggagtgcagcacagctgtctgcccagctgagtgctcagtgactggtgacattcacttcacaacctttgatggccgccggtacacgttccccgccacatgtcagtacatcctggccaagagccgctcttcgggcaccttcaccgtgacattgcagaatgccccatgtggcctgaaccaagatggagcctgtgtccagtcagtgtcagtgattctgcaccaggaccctcggaggcaggtgaccctgacccaggcaggggatgtccttctgtttgaccagtacaagatcatcccgccatacacagatgatgcctttgagatccgtaggctgtcctccgtgttcctgcgggtgaggacgaacgtgggcgtgcgggtgctctacgaccgtgaagggctccgactgtacctgcaagtggaccagcgatgggtggaggataccgtgggcctctgcggcaccttcaatggcaacacgcaggatgacttcctgtctccagtgggtgtacctgagagcaccccacaactttttggcaattcctggaaaacactttctgcttgctccccgctggtctctggctcccctctggacccctgcgatgtgcacctgcaagccgcctcctactcagtgcaggcctgcagcgtgctcacgggggagatgtttgcgccctgctctgcgttcctgagccccgtgccctactttgagcagtgccgcagggatgcctgccgctgcgggcagccctgcctgtgcgccacactggcccactacgcccacctgtgccggcgccatgggctccccgttgatttccgcgcccgcctgccagcctgtgcactgtcctgtgaggcctccaaggagtatagcccctgcgtggccccgtgtggacgtacctgccaggacctggccagccctgaggcctgtggggttgatggtggcgatgacctgagcagagacgagtgtgtggagggctgtgcctgcccaccggacacctatctggacacccaggctgacctctgtgtcccccggaaccagtgctcctgccacttccagggagtggactatccccccggagacagtgacatcccatccctgggccactgccactgcaaagatggagtcatgagctgtgatagcagagccccagctgctgcctgcccagcaggccaggtcttcgtgaactgcagcgacctgcacacggacctggagctgagcagggagaggacgtgtgagcagcaactgctgaacctgagcgtgtcagcccgtggcccctgcctctcgggctgcgcctgtccccagggtctgctcagacacggggatgcatgtttcctgccagaggagtgcccctgcacttggaaggggaaggagtatttccctggggaccaggtgatgtctccttgccatacctgtgtgtgccagcggggctcattccagtgcaccctgcacccttgcgcctccacctgcactgcctatggggaccggcattaccgcacgtttgatgggctcccgtttgacttcgtgggggcatgcaaagtgcacctggtcaagagcacatcagatgtcagcttctctgtgattgtagagaatgtgaactgctacagctctggcatgatctgcaggaaatttatttccatcaacgttgggaactcactcattgtctttgatgatgactccggaaatcctagtccagagagcttcctggatgacaagcaggaggtccacacatggcgagtgggatttttcacactggtgcatttcccacaggagcacatcaccctcttgtgggaccagagaaccacagtgcacgtccaggctgggcctcagtggcagggccagctggcgggcctctgtgggaactttgacttaaaaaccatcaatgagatgaggaccccggagaacctagagctaactaacccccaggagtttggcagcagttgggctgcagttgagtgcccagacaccctcgatcctcgggatatgtgtgtcctgaatcctctccgagaaccatttgccaagaaggagtgcagcatcctgctcagtgaggtgtttgagatctgccaccctgtggttgatgtcacttggttttactcaaactgcctgacagacacatgtggctgcagccagggtggtgactgtgagtgcttctgtgccagcgtctccgcttatgcccaccagtgttgccagcatggggtggctgttgactggcgaaccccccgcctctgcccgtatgactgtgacttctttaacaaagtgctaggtaagggcccctatcagctatccagcttggcagccggtggtgctctggtgggcatgaaggcggtgggcgatgacatagtcctagtgaggacagaggatgtggcgccagcagacattgtgagcttcctgctgacagctgctctgtacaaggccaaggcccatgacccagatgtggtgtccctggaggcagcagacagacccaacttcttccttcacgtcacagccaacgggtctctggagctggctaagtggcagggccgtgacaccttccaacagcatgcctccttcttgctgcaccgggggacacggcaggcaggcctggtggccctggagtccctggccaagcccagctccttcctctatgtgtcgggcgcggtgctggccctgcggctgtacgaacacacagaggtgttccgccggggcacactcttccgccttctggatgccaagccctcgggggctgcctaccccatctgcgagtggcgctacgatgcctgtgccagcccctgcttccaaacctgccgggacccacgggcagccagctgccgggacgtacccagggtagaaggctgtgtccctgtgtgccccaccccccaggtcctggatgaagtcacacagagatgtgtctacttggaggactgtgtggagccagcagtttgggttcccacagaggcccttggcaatgagaccctccctcccagtcaagggttgcccactcccagtgatgaggagccacagctgtcacaggaaagccccaggacccccacccacaggccagccctcaccccagctgccccactcaccacagccctgaacccaccagtgacagccactgaggagccagtggtgtctccaggccccacccagaccaccctgcagcagccactggagctcactgcatctcaactccccgccggccccacggagtccccagccagcaagggagtgactgccagcctcctggccatcccccatacaccagagtcctcatccctccctgttgcactgcagacacccacacctggcatggtgtcaggtgccatggagacaacaagggtgactgtgatctttgcaggaagccctaacatcacagtctcctcccggtcgccccctgcccctcgcttcccgctcatgaccaaggctgtgacagtccgaggccatggctccttgcctgttaggacgacacccccacagccctccttgacagcaagtccctcctccagacctgtggcttcccctggagccatctccaggtcccccacctcctcgggatcccacaaggctgtgctgacacctgcagtaactaaggtcataagcaggacaggggtcccccagcccacccaggcccagagtgcttcaagtcccagcacccctctaactgtggctggaacagcagcagaacaggttcctgtcagtccccttgcaaccaggagcttggagatagtgctatccacagagaagggcgaagccgggcacagccagcccatgggctcgcctgcctccccacagccacacccactcccctctgcaccaccccgcccagcccagcataccaccatggccaccaggtctccagctctgcccccagagaccccagctgccgccagcctgtcaacagccactgatgggctggcagccacacccttcatgtcccttgagtcaactcgtccctcccagctcctctctggcctgcctcccgacaccagcctgcccctggccaaggtgggcacatctgccccagtggccacacccggccccaaagcctctgtcatcaccactccactccagccacaggccacgactctgcctgctcagacacttagcccagtactgcctttcactccagcagcaatgacccaggcgcacccacccactcacatagcacccccagcagcaggcacagctccaggcctgctgctgggagccacattgccaacctctggagtcctgcctgtggctgagggcacggcctccatggtatctgttgtcccacgaaagagcaccacagggaaggtggccatcctatccaagcaagtgtctctgcccacttccatgtatggttctgcagagggtgggcccacagagctcacgcctgctacgagccaccctctcacgcccttggtggctgagcccgagggagcccaggcaggcacagctctgccagtgcccacatcctatgccctgagccgtgtctcagccaggacggccccccaagacagcatgctggttctgttgcctcagctggctgaggcccatggaacctcggcagggcctcacctggcagcagagccggtggacgaggccaccacagaaccatctgggcgctcagccccagccctgagcatcgtagagggtttggcggaggctttggcaactaccactgaggccaatacatccaccacctgtgttccaatcgccgagcaggactgcgtccgccacatctgcctggagggccagctgattcgcgtgaatcagtcccagcactgtccccagggtgctgctccccctcgctgtgggatcctgggcctcgccgtgcgggtgggtggggaccgctgctgcccactctgggagtgtgcctgccggtgctcaatcttccctgacctgagcttcgtgaccttcgatgggagccacgtagctctgttcaaggaggccatctacatcctcagccagagcccagatgaaatgctcaccgtccatgtactggactgcaaaagtgccaacctggggcacctgaactggcccccgttctgtctggtgatgttgaacatgactcacttggcccatcaggtcactattgatcgcttcaaccgaaaggtgactgtggacttgcagcctgtgtggccaccggtgagcaggtatggattcagaattgaggacacaggccacatgtacatgatcctgactccctcagacatccagatccagtggctccacagctcaggactcatgatcgtggaggccagcaaaaccagcaaggcccagggccatggcctgtgcggtatctgtgatggagatgcagccaatgaccttaccctgaaggatggctcagtggtgggtggggctgaggaccctgctccctttctggacagctggcaggtgcccagctccctgacctcagtgggccagacccgcttccgcccagacagctgcgccacaactgactgctcgccctgccttcgcatggtgtccaaccgcaccttcagtgcctgccaccgctttgtgcctccggagtcattctgtgagctgtggatccgggacaccaagtacgtgcagcagccctgcgtggccctgactgtgtacgtggccatgtgccacaaatttcatgtgtgcatcgagtggcggcgctctgactactgccccttcctgtgctccagcgactccacataccaggcatgtgtgacagcctgtgagccacccaagacatgccaggatgggatactagggcctctggacccagagcactgccaggtgctgggcgagggctgcgtctgctccgagggcaccatcttacaccggcgccactctgcactctgcatcccggaggccaagtgcgcctgcactgacagcatgggggtgccgagggccctgggggagacctggaacagctccctcagcggctgctgccagcaccagtgccaagccccagacaccattgtcccggtggatctgggctgccccagtccccgccctgagagctgcctgcgattcggggaggtggccttgctcctacccaccaaggacccctgctgcctggggactgtctgtgtgtgtaaccagactctgtgtgagggtctcgcccccacatgccgcccaggccaccgcctcctcacccacttccaggaggactcctgctgccccagctacagctgtgagtgtgacccagatctctgtgaggcagagctggtccccagctgccgacaggaccagatcctgatcacgggccgcctgggggactcctgctgcacctcctacttctgcgcctgtggtgactgtccagactccatccccgaatgtcaagaaggggaggcgctcactgtgcacaggaataccacggaactctgctgccctctgtaccagtgtgtgtgtgagaacttccgctgtccccaagtgcagtgtggcctgggcactgccctggtggaggtgtggagccccgaccgctgctgcccctacaaatcctgtgaatgtgactgtgacacaatcccggtgccccggtgccatctgtgggagaaatcccagctggatgaggagttcatgcacagcgtggagaatgtgtgtggctgcgccaagtacgagtgtgtgaaggccccggtgtgtctgagccgcgagctgggtgtgatgcagcccggccagacagtggtggagctctcagcagatggcgtgtgccacacctcccgctgcaccaccgtgctcgaccctctcaccaacttctaccagatcaacaccacctccgtgctctgtgacatccactgtgaggcgaaccaggagtacgagcacccgcgggacctcgctgcctgctgcggctcctgcaggaacgtgtcctgtctcttcaccttccccaatggcaccacctccctgttcttgcccggggcatcctggatcgcagactgcgcccgccaccactgcagcagcacgcccctgggtgccgtgctggtccgctctcccataagctgcccaccgctcaatgagactgagtgtgccaaggttgggggttccgtggtaccttccttggaaggatgctgcaggacctgtaaggaggatgggcgctcctgcaagaaggtgaccatccgcatgaccatccgcaagaatgaatgcaggagcagcacccctgtgaacctagtgtcctgcgatgggaggtgcccatccgccagcatctacaactacaacatcaacacctatgcccgattctgcaagtgctgccgtgaggtgggcctgcagcggcgctctgtgcagctcttctgtgccaccaatgccacctgggtgccctatacagtgcaggagcccaccgactgtgcctgccagtggtcctga

SEQ ID NO: 97620 - DNA, 8777 bp, Artificial Sequence
  derived and/or modified sequence
atgggggtcttagcatctgccctctgttggttgctgtgtgtttggcttccttggggcgagcaggcagcagagagtctgcgtgtgcagcggctgggcgagagggtggtcgatagtggtaggtcaggcgctcgcggaatgcgtaatgtcaagggaatgcgcaacggccctgcccagacgcgagtcagctcttcttcctcacaccaggaggcaaccctcgctatgggcgataaagccacagtggtgggtggacagcaagcagaagctcctgactccgtggctatgtcgtcctgggagcggcgtctgcacagagcaaaatgcgcaccttcctatctgttttcctgctttaatggaggcgagtgcgtgcacccagctttctgcgattgcagaagatttaacgcgactggtccccgttgccagatggtctacaacgctggacctgaacgcgatagtatatgtcgggcatggggacagcatcacgtggagacctttgatggattgtactactacttgagcgggaaaggaagctacacgcttgtcggccgtcacgagcccgaagggcaatcattctcgattcaggtgcacaacgatccccagtgcggtagcagcccctatacgtgctctagggctgtctcacttttcttcgtaggcgaacaggagattcacttagcaaaggaggtgacacacggtggaatgagagtgcagctaccgcacgtgatgggctctgctcgccttcaacagctggccggatacgtgatcgtacgtcatcaatccgcgttcactctagcatgggacggagcatcggcagtgtatatcaagatgagccccgagctgcttggatggacccacggcctgtgcggaaacaacaatgcggacccaaaggacgacctagttacctcttcagggaagctgactgatgatgtggtcgagtttgttcatagctggcaggaacaggcgccaaatcagccgcctggcccaaccacctcatctttacccagaccaccttgcctccagcagaatcccggaactatgcagggggtgtatgaacagtgcgaagccctgttgaggccgccattcgacgcatgtcatgcgtacgtctctccattaccgttcacagctagttgtacaagtgatctctgccagtctatgggagatgtggcaacttggtgtagggccttggcagagtatgcccgtgcctgtgcccaagcgggtcggcctctgcaaggatggcgcacgcagcttcgacagtgtactgttcactgcaaagagaaagccttcacctataacgagtgcattgcctgttgtccagcctcatgccaccctagggcatcctgcgttgactctgagattgcctgcgtcgatggatgttactgtcctaatggactgatattcgaggatggcggatgcgtcgcaccagctgagtgtccatgcgagtttcacggcaccctttacccgccaggatccgtggtgaaagaagattgcaacacatgcacatgtaccagcgggaagtgggaatgcagcaccgctgtctgcccggctgagtgctctgtcactggcgatattcacttcaccaccttcgatggacgacggtacacttttccagccacctgccagtatattcttgctaaatcaagatctagtggaacctttactgtgacgcttcagaatgcaccctgtggtctcaaccaagatggagcatgtgtgcagagtgtctcggtcatcctccatcaggatccaagaaggcaggtaacgcttacacaagccggagacgttctcttgttcgaccagtataagattattccgccttacactgatgatgcattcgagatacggaggttaagttcagttttcctgcgggtgaggacaaacgtcggcgtgagagtcctctacgacagggagggtctcagactgtacctgcaggtggatcaacggtgggtggaggacacagtgggcctctgtgggacatttaatggcaatacacaggacgacttcctgtcaccggttggcgtgcccgaatccactccgcagttatttggtaacagctggaaaactctttccgcatgttctccattggtgagcggatctcctctggatccgtgcgatgtgcacctccaggccgcatcctactctgtgcaggcctgttcagtgctgacaggggagatgttcgccccttgtagcgcgttcctgtctccggtaccatactttgagcaatgtaggagagatgcttgtcggtgcggacaaccctgcttgtgtgctaccctggcgcactatgctcacctgtgtcgtagacacgggttgcctgtggatttcagggcacgcctcccagcatgcgctttatcttgtgaggctagcaaggaatatagcccgtgcgtggcgccttgtggtcgaacatgtcaggacttggcaagtccagaagcatgtggagtggatggaggggatgacctgtcaagggatgagtgtgtggagggatgcgcatgcccccctgatacttatttggatacccaggccgacctttgtgtccccagaaaccaatgctcttgtcacttccaaggagttgactacccgcctggagatagtgatatacccagtctggggcactgccactgcaaagacggcgttatgtcatgcgactctagggccccagcggctgcctgtcctgctggccaggtgtttgtaaactgcagtgacctgcatacggatctcgaactgtcgcgggaacgcacctgcgagcaacaattactgaatttgtctgtgtccgctagagggccttgtctgagcggatgtgcgtgtcctcagggcctcctgcgtcatggcgacgcctgttttctcccggaggaatgtccgtgcacctggaaaggaaaagagtacttcccaggcgaccaggtgatgagcccatgtcacacatgtgtctgccagcgcggatcctttcagtgtactctgcatccttgcgcctccacttgcacagcttatggggacagacactataggacattcgatggcttaccattcgactttgtgggggcttgtaaggtgcatctcgtcaagtcaacctccgatgtatcgtttagcgtaatcgtggagaacgtgaactgctattcgagcgggatgatctgcagaaaattcatctctataaacgtgggcaattccctcattgtgttcgacgacgacagtggaaatcccagcccagagtcctttctggacgataagcaagaagtacacacatggcgagtgggttttttcacgctggtgcacttcccccaggagcatatcaccttgctgtgggaccagaggacaacggtgcatgtgcaagccggacctcagtggcagggacagctagcaggtctctgcggaaattttgatctgaaaactatcaatgaaatgcgaaccccagagaatctggagctcacaaatccccaggagttcgggtcatcttgggccgctgtggagtgtccggatacacttgaccccagagatatgtgcgtactcaaccctctccgggaaccttttgcgaagaaggaatgctctattctcctgtcagaggtatttgagatctgtcatcccgtggtggacgttacttggttttactcgaattgcctcacggatacctgtggctgctcgcaaggaggggattgtgagtgtttttgcgccagcgtgtcagcctacgcccatcagtgctgccaacacggagtcgccgtcgattggagaactccacgactgtgtccttacgactgcgacttcttcaataaagtgttaggaaaaggcccttatcagctctccagcctggccgctggcggagcacttgttggcatgaaagctgtaggcgacgacatcgttttggtgagaaccgaggacgtggcgcctgcagatattgtgagcttcctactgacagccgctctctataaggctaaggcccatgatcctgacgtagtcagcctcgaggctgctgaccgacccaattttttcctgcacgtaaccgctaatggctccctcgagttagcaaaatggcagggccgtgacacattccagcagcacgccagctttctgctacacaggggaaccagacaggcaggtctcgtggcattagagagtcttgccaagccgagttccttcctgtacgtttcaggagccgtgttggcgttgcgcctctatgagcacacggaagtcttccgtcgcggtaccctgttcagattgctcgacgcaaaaccgtcgggagccgcttatcctatttgtgagtggcggtacgacgcgtgcgcttcgccatgttttcagacctgtcgcgatcccagggcggctagctgccgagatgtgcctcgcgtcgaagggtgcgtccccgtctgccctacgccgcaagtcttagatgaggttacccagcgctgtgtgtacctagaggactgcgtcgaacctgccgtttgggttccaactgaagcgctgggaaacgagaccctcccaccgtctcagggactgcctacacccagcgacgaggaaccacagctgagtcaagagtcccctcggacgcccacccataggcccgcactgactccggctgcgcctctcacgaccgcactgaacccaccggtgactgcgaccgaagagccggtggttagcccagggccaacgcagaccaccctccagcagcccctcgaactgacggccagccagttgccagctgggcctactgagtctccagcctcaaagggggtgacagctagcctgctcgccatcccccatacaccagaatcttccagcctgcctgtggccttacagacacccaccccaggcatggtgagcggtgcgatggaaactaccagggttaccgttatcttcgctggatcccccaacatcactgtttctagcagatctccccctgctccaaggttccccctgatgactaaggcggtgactgtcagagggcatggctcacttcctgtaaggactacccctcctcagccttcgttgactgcctccccatcttcaaggcctgtcgcatcgcctggcgcaatttcccggtcacctacctccagcggcagccacaaagccgtgctaactcccgcagttaccaaggttattagcagaactggagtgcctcagcctacccaagcacagagtgcttccagcccttctaccccgctgactgtagccggaaccgctgccgaacaggtgcctgttagccccctcgccacccgctctctcgagatcgtgctcagcactgaaaagggcgaagccggtcacagccagccaatgggctccccagccagcccccagccacaccctctcccgtccgcccctccacggcctgctcagcacacgaccatggccactagatctccggcactccctccagagacccctgctgctgcctccttatctaccgccacagatgggctggcggctactccattcatgtccctggaatcaaccaggccctcacagctgctctcgggattgcccccagacacttccctccccttggctaaagttggcacgtccgcacctgtagccacccccggacccaaggcgtccgtgatcactacgccgctgcagccccaggccacgacccttccagcccagaccctctcacctgtgctgccattcacccctgctgctatgacgcaggcacaccctcctacacatatcgcaccgcctgcagccggaactgcccctggcctgctcctgggcgcaactttacctaccagcggtgtcttgcctgttgccgaggggacagcttccatggtgtcagtcgtccccagaaagtcaacaactggaaaagtagccatcttgagcaagcaggtaagtctaccaacctccatgtacggatccgccgagggcggacctaccgaactgactcccgcaacatcacatcctctaacacctctggtggccgaacccgaaggggctcaggcaggcaccgccttaccagtgccaacttcctatgcattaagcagagtgagcgcacgcaccgcccctcaggactccatgctagtgctgctccctcagctcgccgaagcacacggaacgtccgcagggcctcacctggccgcagagccggttgatgaggccacgaccgagccaagtggccgatccgcaccggcactctccattgttgaaggtctggcggaggcgcttgctaccacaaccgaggctaacaccagcacaacttgtgtgcccatcgctgaacaggattgtgtccgacatatttgtcttgaaggacagctaatcagagtgaaccagtcccagcattgtcctcagggggctgcccctcccagatgtgggatcctgggcctggctgtccgggtcgggggagaccggtgttgtcccctgtgggagtgcgcttgcagatgcagtattttccccgatctgtccttcgttaccttcgacggcagtcacgtggcgttgtttaaggaggcgatctacattctgagccagtctccagatgaaatgttaacagttcacgtcctggattgcaaatcagcgaatcttgggcatctgaattggcctccgttttgcctcgtgatgctgaatatgacccatttggcccaccaggtcaccatcgaccgcttcaaccgaaaggtaacagtcgatctccaacctgtgtggccacctgtgagtagatacggtttccgcatcgaagacactggtcatatgtatatgattctaacgcctagtgacattcagattcaatggctgcactctagcggattaatgattgtggaagccagcaaaacctccaaggctcagggtcacggcctgtgcggaatttgcgacggcgacgccgcaaacgacctcacgctcaaggatggcagcgtcgtgggcggtgcagaagatcctgctcccttcctggacagctggcaggtgccatcttcacttacctcagttggacagaccaggtttcgtcctgattcttgcgcaaccacagattgcagtccctgccttcgtatggtgagtaaccgtacctttagtgcctgccaccgctttgttccccctgaaagcttttgcgagctgtggattagggacactaagtacgtgcagcagccctgtgtggctttgacagtctatgtcgccatgtgccataagtttcacgtgtgtattgagtggcgcaggagtgactactgcccatttctgtgttccagtgatagtacttatcaggcgtgtgtgactgcatgtgaaccccctaagacctgtcaggatggcattctgggccctctggacccagagcactgccaggtcttaggggaggggtgcgtgtgtagcgaaggcactattcttcacagaagacattctgcactgtgcattcctgaagccaagtgcgcgtgtacagactccatgggagtccctagggccctcggggagacttggaacagctctttgtcaggctgttgtcagcaccaatgtcaggcaccagacacgatcgtgcccgtcgatctgggctgcccctcgccgaggcctgaatcttgcctccgcttcggcgaggtggcactgctgctcccaactaaagacccttgctgtctcggcactgtctgcgtttgtaaccaaacgctctgcgaaggcttggcccctacatgccggcctggtcaccggctgctgactcacttccaagaggattcctgctgtcctagctacagttgtgaatgtgatccggacctctgcgaggccgaattggttccatcgtgtcgccaggaccagatacttatcacaggacggctgggagactcttgctgtacgtcctacttctgcgcctgtggggactgtccagacagcatcccggagtgtcaggaaggcgaggcactgactgtccaccgaaataccacagagctctgctgccccctctatcagtgcgtctgcgaaaactttcgctgcccacaggtgcagtgcggactagggaccgcactggtggaagtttggtcaccagatcggtgttgtccctataaaagttgcgagtgcgactgcgacacgatccccgtgcccagatgtcacctttgggaaaagtcacagctcgatgaagagttcatgcactctgtggagaacgtgtgcggatgcgctaaatatgaatgcgtcaaggctcccgtctgtctgtcccgggaactcggtgttatgcagcccggtcagacagtcgttgagctgtcagcagatggggtgtgtcacacctctagatgtaccactgtcttagacccgctgaccaatttctaccaaattaacaccacatctgtactgtgtgatatccactgcgaggcgaatcaggagtatgaacacccacgcgatttagcggcatgttgcgggagttgcaggaatgtcagctgcttgttcacgtttcccaacggaactactagtctcttcttgccaggtgcttcgtggattgcggattgtgccagacaccactgcagtagcacgcctctaggagcagtgctcgtgcgttcacccatcagctgtcccccattgaacgagactgagtgtgccaaggttgggggttctgtcgttcccagcctggaaggctgttgcagaacttgcaaagaggatggtcgatcttgtaagaaggtaacaatacgaatgacaatccgcaagaatgagtgcaggagctctacaccagtcaatctcgtctcctgtgacggaagatgcccctccgcatctatctataattacaacatcaacacctacgcccgtttctgcaaatgttgtcgggaggttgggctgcagagacggtctgttcagctgttctgcgccacgaatgccacatgggtaccctacacggtgcaggaacccacagattgtgcctgccagtggagcta

SEQ ID NO: 97621 - DNA, 8778 bp, Artificial Sequence
  derived and/or modified sequence
atgggcgtgctggccagcgccctgtgctggctgctgtgcgtgtggctgccctggggcgagcaggccgccgagagcctgagagtgcagagactgggcgagagagtggtggacagcggcagaagcggcgccagaggcatgagaaacgtgaagggcatgagaaacggccccgcccagaccagagtgagcagcagcagcagccaccaggaggccaccctggccatgggcgacaaggccaccgtggtgggcggccagcaggccgaggcccccgacagcgtggccatgagcagctgggagagaagactgcacagagccaagtgcgcccccagctacctgttcagctgcttcaacggcggcgagtgcgtgcaccccgccttctgcgactgcagaagattcaacgccaccggccccagatgccagatggtgtacaacgccggccccgagagagacagcatctgcagagcctggggccagcaccacgtggagaccttcgacggcctgtactactacctgagcggcaagggcagctacaccctggtgggcagacacgagcccgagggccagagcttcagcatccaggtgcacaacgacccccagtgcggcagcagcccctacacctgcagcagagccgtgagcctgttcttcgtgggcgagcaggagatccacctggccaaggaggtgacccacggcggcatgagagtgcagctgccccacgtgatgggcagcgccagactgcagcagctggccggctacgtgatcgtgagacaccagagcgccttcaccctggcctgggacggcgccagcgccgtgtacatcaagatgagccccgagctgctgggctggacccacggcctgtgcggcaacaacaacgccgaccccaaggacgacctggtgaccagcagcggcaagctgaccgacgacgtggtggagttcgtgcacagctggcaggagcaggcccccaaccagccccccggccccaccaccagcagcctgcccagacccccctgcctgcagcagaaccccggcaccatgcagggcgtgtacgagcagtgcgaggccctgctgagaccccccttcgacgcctgccacgcctacgtgagccccctgcccttcaccgccagctgcaccagcgacctgtgccagagcatgggcgacgtggccacctggtgcagagccctggccgagtacgccagagcctgcgcccaggccggcagacccctgcagggctggagaacccagctgagacagtgcaccgtgcactgcaaggagaaggccttcacctacaacgagtgcatcgcctgctgccccgccagctgccaccccagagccagctgcgtggacagcgagatcgcctgcgtggacggctgctactgccccaacggcctgatcttcgaggacggcggctgcgtggcccccgccgagtgcccctgcgagttccacggcaccctgtacccccccggcagcgtggtgaaggaggactgcaacacctgcacctgcaccagcggcaagtgggagtgcagcaccgccgtgtgccccgccgagtgcagcgtgaccggcgacatccacttcaccaccttcgacggcagaagatacaccttccccgccacctgccagtacatcctggccaagagcagaagcagcggcaccttcaccgtgaccctgcagaacgccccctgcggcctgaaccaggacggcgcctgcgtgcagagcgtgagcgtgatcctgcaccaggaccccagaagacaggtgaccctgacccaggccggcgacgtgctgctgttcgaccagtacaagatcatccccccctacaccgacgacgccttcgagatcagaagactgagcagcgtgttcctgagagtgagaaccaacgtgggcgtgagagtgctgtacgacagagagggcctgagactgtacctgcaggtggaccagagatgggtggaggacaccgtgggcctgtgcggcaccttcaacggcaacacccaggacgacttcctgagccccgtgggcgtgcccgagagcaccccccagctgttcggcaacagctggaagaccctgagcgcctgcagccccctggtgagcggcagccccctggacccctgcgacgtgcacctgcaggccgccagctacagcgtgcaggcctgcagcgtgctgaccggcgagatgttcgccccctgcagcgccttcctgagccccgtgccctacttcgagcagtgcagaagagacgcctgcagatgcggccagccctgcctgtgcgccaccctggcccactacgcccacctgtgcagaagacacggcctgcccgtggacttcagagccagactgcccgcctgcgccctgagctgcgaggccagcaaggagtacagcccctgcgtggccccctgcggcagaacctgccaggacctggccagccccgaggcctgcggcgtggacggcggcgacgacctgagcagagacgagtgcgtggagggctgcgcctgcccccccgacacctacctggacacccaggccgacctgtgcgtgcccagaaaccagtgcagctgccacttccagggcgtggactacccccccggcgacagcgacatccccagcctgggccactgccactgcaaggacggcgtgatgagctgcgacagcagagcccccgccgccgcctgccccgccggccaggtgttcgtgaactgcagcgacctgcacaccgacctggagctgagcagagagagaacctgcgagcagcagctgctgaacctgagcgtgagcgccagaggcccctgcctgagcggctgcgcctgcccccagggcctgctgagacacggcgacgcctgcttcctgcccgaggagtgcccctgcacctggaagggcaaggagtacttccccggcgaccaggtgatgagcccctgccacacctgcgtgtgccagagaggcagcttccagtgcaccctgcacccctgcgccagcacctgcaccgcctacggcgacagacactacagaaccttcgacggcctgcccttcgacttcgtgggcgcctgcaaggtgcacctggtgaagagcaccagcgacgtgagcttcagcgtgatcgtggagaacgtgaactgctacagcagcggcatgatctgcagaaagttcatcagcatcaacgtgggcaacagcctgatcgtgttcgacgacgacagcggcaaccccagccccgagagcttcctggacgacaagcaggaggtgcacacctggagagtgggcttcttcaccctggtgcacttcccccaggagcacatcaccctgctgtgggaccagagaaccaccgtgcacgtgcaggccggcccccagtggcagggccagctggccggcctgtgcggcaacttcgacctgaagaccatcaacgagatgagaacccccgagaacctggagctgaccaacccccaggagttcggcagcagctgggccgccgtggagtgccccgacaccctggaccccagagacatgtgcgtgctgaaccccctgagagagcccttcgccaagaaggagtgcagcatcctgctgagcgaggtgttcgagatctgccaccccgtggtggacgtgacctggttctacagcaactgcctgaccgacacctgcggctgcagccagggcggcgactgcgagtgcttctgcgccagcgtgagcgcctacgcccaccagtgctgccagcacggcgtggccgtggactggagaacccccagactgtgcccctacgactgcgacttcttcaacaaggtgctgggcaagggcccctaccagctgagcagcctggccgccggcggcgccctggtgggcatgaaggccgtgggcgacgacatcgtgctggtgagaaccgaggacgtggcccccgccgacatcgtgagcttcctgctgaccgccgccctgtacaaggccaaggcccacgaccccgacgtggtgagcctggaggccgccgacagacccaacttcttcctgcacgtgaccgccaacggcagcctggagctggccaagtggcagggcagagacaccttccagcagcacgccagcttcctgctgcacagaggcaccagacaggccggcctggtggccctggagagcctggccaagcccagcagcttcctgtacgtgagcggcgccgtgctggccctgagactgtacgagcacaccgaggtgttcagaagaggcaccctgttcagactgctggacgccaagcccagcggcgccgcctaccccatctgcgagtggagatacgacgcctgcgccagcccctgcttccagacctgcagagaccccagagccgccagctgcagagacgtgcccagagtggagggctgcgtgcccgtgtgccccaccccccaggtgctggacgaggtgacccagagatgcgtgtacctggaggactgcgtggagcccgccgtgtgggtgcccaccgaggccctgggcaacgagaccctgccccccagccagggcctgcccacccccagcgacgaggagccccagctgagccaggagagccccagaacccccacccacagacccgccctgacccccgccgcccccctgaccaccgccctgaacccccccgtgaccgccaccgaggagcccgtggtgagccccggccccacccagaccaccctgcagcagcccctggagctgaccgccagccagctgcccgccggccccaccgagagccccgccagcaagggcgtgaccgccagcctgctggccatcccccacacccccgagagcagcagcctgcccgtggccctgcagacccccacccccggcatggtgagcggcgccatggagaccaccagagtgaccgtgatcttcgccggcagccccaacatcaccgtgagcagcagaagcccccccgcccccagattccccctgatgaccaaggccgtgaccgtgagaggccacggcagcctgcccgtgagaaccacccccccccagcccagcctgaccgccagccccagcagcagacccgtggccagccccggcgccatcagcagaagccccaccagcagcggcagccacaaggccgtgctgacccccgccgtgaccaaggtgatcagcagaaccggcgtgccccagcccacccaggcccagagcgccagcagccccagcacccccctgaccgtggccggcaccgccgccgagcaggtgcccgtgagccccctggccaccagaagcctggagatcgtgctgagcaccgagaagggcgaggccggccacagccagcccatgggcagccccgccagcccccagccccaccccctgcccagcgccccccccagacccgcccagcacaccaccatggccaccagaagccccgccctgccccccgagacccccgccgccgccagcctgagcaccgccaccgacggcctggccgccacccccttcatgagcctggagagcaccagacccagccagctgctgagcggcctgccccccgacaccagcctgcccctggccaaggtgggcaccagcgcccccgtggccacccccggccccaaggccagcgtgatcaccacccccctgcagccccaggccaccaccctgcccgcccagaccctgagccccgtgctgcccttcacccccgccgccatgacccaggcccacccccccacccacatcgccccccccgccgccggcaccgcccccggcctgctgctgggcgccaccctgcccaccagcggcgtgctgcccgtggccgagggcaccgccagcatggtgagcgtggtgcccagaaagagcaccaccggcaaggtggccatcctgagcaagcaggtgagcctgcccaccagcatgtacggcagcgccgagggcggccccaccgagctgacccccgccaccagccaccccctgacccccctggtggccgagcccgagggcgcccaggccggcaccgccctgcccgtgcccaccagctacgccctgagcagagtgagcgccagaaccgccccccaggacagcatgctggtgctgctgccccagctggccgaggcccacggcaccagcgccggcccccacctggccgccgagcccgtggacgaggccaccaccgagcccagcggcagaagcgcccccgccctgagcatcgtggagggcctggccgaggccctggccaccaccaccgaggccaacaccagcaccacctgcgtgcccatcgccgagcaggactgcgtgagacacatctgcctggagggccagctgatcagagtgaaccagagccagcactgcccccagggcgccgccccccccagatgcggcatcctgggcctggccgtgagagtgggcggcgacagatgctgccccctgtgggagtgcgcctgcagatgcagcatcttccccgacctgagcttcgtgaccttcgacggcagccacgtggccctgttcaaggaggccatctacatcctgagccagagccccgacgagatgctgaccgtgcacgtgctggactgcaagagcgccaacctgggccacctgaactggccccccttctgcctggtgatgctgaacatgacccacctggcccaccaggtgaccatcgacagattcaacagaaaggtgaccgtggacctgcagcccgtgtggccccccgtgagcagatacggcttcagaatcgaggacaccggccacatgtacatgatcctgacccccagcgacatccagatccagtggctgcacagcagcggcctgatgatcgtggaggccagcaagaccagcaaggcccagggccacggcctgtgcggcatctgcgacggcgacgccgccaacgacctgaccctgaaggacggcagcgtggtgggcggcgccgaggaccccgcccccttcctggacagctggcaggtgcccagcagcctgaccagcgtgggccagaccagattcagacccgacagctgcgccaccaccgactgcagcccctgcctgagaatggtgagcaacagaaccttcagcgcctgccacagattcgtgccccccgagagcttctgcgagctgtggatcagagacaccaagtacgtgcagcagccctgcgtggccctgaccgtgtacgtggccatgtgccacaagttccacgtgtgcatcgagtggagaagaagcgactactgccccttcctgtgcagcagcgacagcacctaccaggcctgcgtgaccgcctgcgagccccccaagacctgccaggacggcatcctgggccccctggaccccgagcactgccaggtgctgggcgagggctgcgtgtgcagcgagggcaccatcctgcacagaagacacagcgccctgtgcatccccgaggccaagtgcgcctgcaccgacagcatgggcgtgcccagagccctgggcgagacctggaacagcagcctgagcggctgctgccagcaccagtgccaggcccccgacaccatcgtgcccgtggacctgggctgccccagccccagacccgagagctgcctgagattcggcgaggtggccctgctgctgcccaccaaggacccctgctgcctgggcaccgtgtgcgtgtgcaaccagaccctgtgcgagggcctggcccccacctgcagacccggccacagactgctgacccacttccaggaggacagctgctgccccagctacagctgcgagtgcgaccccgacctgtgcgaggccgagctggtgcccagctgcagacaggaccagatcctgatcaccggcagactgggcgacagctgctgcaccagctacttctgcgcctgcggcgactgccccgacagcatccccgagtgccaggagggcgaggccctgaccgtgcacagaaacaccaccgagctgtgctgccccctgtaccagtgcgtgtgcgagaacttcagatgcccccaggtgcagtgcggcctgggcaccgccctggtggaggtgtggagccccgacagatgctgcccctacaagagctgcgagtgcgactgcgacaccatccccgtgcccagatgccacctgtgggagaagagccagctggacgaggagttcatgcacagcgtggagaacgtgtgcggctgcgccaagtacgagtgcgtgaaggcccccgtgtgcctgagcagagagctgggcgtgatgcagcccggccagaccgtggtggagctgagcgccgacggcgtgtgccacaccagcagatgcaccaccgtgctggaccccctgaccaacttctaccagatcaacaccaccagcgtgctgtgcgacatccactgcgaggccaaccaggagtacgagcaccccagagacctggccgcctgctgcggcagctgcagaaacgtgagctgcctgttcaccttccccaacggcaccaccagcctgttcctgcccggcgccagctggatcgccgactgcgccagacaccactgcagcagcacccccctgggcgccgtgctggtgagaagccccatcagctgcccccccctgaacgagaccgagtgcgccaaggtgggcggcagcgtggtgcccagcctggagggctgctgcagaacctgcaaggaggacggcagaagctgcaagaaggtgaccatcagaatgaccatcagaaagaacgagtgcagaagcagcacccccgtgaacctggtgagctgcgacggcagatgccccagcgccagcatctacaactacaacatcaacacctacgccagattctgcaagtgctgcagagaggtgggcctgcagagaagaagcgtgcagctgttctgcgccaccaacgccacctgggtgccctacaccgtgcaggagcccaccgactgcgcctgccagtggagctag

SEQ ID NO: 97622 - protein, 331 aa, Artificial Sequence
  derived and/or modified sequence
MPRGQASKRRAREKRRQARGEDQCLGGAQATAAEKEKLPSSSSPACQSPPQSFPNAGIPQESQRASYPSSPASAVSLTSSDEGAKGQKGESPNSFHGPSSSESTGRDLLNTKTGELVQFLLNKYIRKEPITREAMLKVINRKYKQHFPEILRRSTENVEVVFGLYLKEMDPSRQSYVLVGKLDFPNQGSLSDGGGFPLSGLLMVLLSTIFMHGNRATEEEMWECLNALGMYKGRKHFIYGEPQELVTKDLVREGYLEYQQVPSSDPPRYEFLWGPRARAETSKMKVLEFVAKLNDTVASTYKSRYEEALREEEEQARARAVARDSARARAS

SEQ ID NO: 97623 - protein, 336 aa, Artificial Sequence
  derived and/or modified sequence
MPRGQASKRRAREKRRQARGEDQCLGGAQATAAEKEKLPSSSSPACQSPPQSFPNAGIPQESQRASYPSSPASAVSLTSSDEGAKGQKGESPNSFHGPSSSESTGRDLLNTKTGELVQFLLNKYIRKEPITREAMLKVINRKYKQHFPEILRRSTENVEVVFGLYLKEMDPSRQSYVLVGKLDFPNQGSLSDGGGFPLSGLLMVLLSTIFMHGNRATEEEMWECLNALGMYKGRKHFIYGEPQELVTKDLVREGYLEYQQVPSSDPPRYEFLWGPRARAETSKMKVLEFVAKLNDTVASTYKSRYEEALREEEEQARARAVARDSARARASRSFQP

SEQ ID NO: 97624 - DNA, 996 bp, Artificial Sequence
  derived and/or modified sequence
atgcctcggggccaggctagtaagcggagggctcgggagaaaaggcgtcaagcaaggggcgaggaccagtgtctcggcggtgctcaggccaccgctgctgagaaagagaaactaccctcgtcttcgagcccagcttgccagtcccctccacagtctttcccaaacgcgggaattccccaggaaagccagcgcgcaagctatccctcaagccccgcctccgctgtgtccctgaccagctccgacgaaggggccaaagggcagaagggcgaaagtcccaatagcttccacggtccatcatccagcgaatcgaccggacgggacctcctcaacactaaaaccggtgaactcgtgcaattcctgcttaataaatacatacggaaagaacctattaccagggaagctatgctgaaggtgattaacagaaagtataaacaacacttccctgagatcttacggcggagcacggagaacgtcgaggtggtgtttggtctgtacttgaaagagatggatccaagcagacagagttacgtactggtcggcaaactggattttccaaaccagggaagcctgtcagatggtggggggttccccctcagtggcctcctgatggttctgctgtccaccatcttcatgcacggaaatagagctactgaggaagagatgtgggagtgtctgaacgccctcgggatgtacaaaggccggaaacacttcatttatggagaacctcaggagctcgtaactaaggacctggttcgtgagggatacctggaataccagcaggtgcccagttcagatcctccgaggtacgagttcctttggggcccacgggcgagagccgaaactagcaagatgaaagtgctagaattcgtggctaagctcaacgacactgtggccagcacctacaagtcaagatatgaggaagcgctaagagaagaggaagaacaggccagagcccgcgccgtcgcccgggattctgctagggctagagcatcttag

SEQ ID NO: 97625 - DNA, 1011 bp, Artificial Sequence
  derived and/or modified sequence
atgcctagaggccaggcaagcaagaggcgggcacgcgagaagcggcgccaggcccgcggggaagaccagtgcctgggtggggcgcaagcaacagctgccgaaaaggagaaactccccagcagctccagcccagcttgtcaatcacctccacagagcttcccaaacgccggcattccgcaggagtcgcagagggcctcctatcccagctcgcccgcatctgctgtgtcacttacatcctcggacgaaggcgcaaagggccagaagggagagtcacccaattcttttcatggcccttcaagcagcgaaagcactggcagagacctgcttaacactaaaaccggggaattagtccagttcctgctgaataagtacatcaggaaggagcccattacgcgggaggctatgcttaaggttataaataggaagtacaagcaacatttccccgagattcttcgtcggtccacggagaatgtggaggtggtcttcggtctttatctcaaggagatggatcctagcaggcagtcatacgttctggtggggaaactggacttccccaaccagggatcacttagcgatggggggggcttccctctgagcgggctgcttatggtgctgctgtctacaatattcatgcatggaaatagggccaccgaggaggagatgtgggaatgtctgaatgccctgggaatgtacaaaggccgaaagcatttcatctatggtgagccccaggagctagtgacaaaagatctcgtccgagaggggtaccttgaatatcagcaggtgccttctagcgatccacctagatatgaatttctatgggggcccagggctcgggcagagacctctaagatgaaagtgcttgaatttgttgccaaactcaacgataccgtggccagcacttataagtcacgttatgaggaggctctacgtgaagaagaagagcaggcgagggctagagccgtagcccgcgactctgcccgtgcccgtgcctctcgatcttttcagccttag

SEQ ID NO: 97626 - DNA, 1011 bp, Artificial Sequence
  derived and/or modified sequence
atgccaaggggccaggctagcaagaggagggctcgtgagaaacgtagacaggcacgaggcgaagaccagtgtctgggtggagctcaagctacagccgccgaaaaagagaagctgccgagctcgtcgtccccggcatgccagtcaccgccccagagctttcccaatgccggcatccctcaggagtcacaaagggcatcttacccaagcagcccagccagcgccgtgtctcttacaagtagtgatgaaggagccaaaggtcagaagggtgagtctcccaactcttttcacgggccttcaagctccgagtcaacaggcagagacttgcttaatacaaaaacaggagagctcgtccaattcctcctcaacaaatacatcagaaaggagcctatcacccgggaggcgatgcttaaggtgataaacagaaaatataagcagcacttcccagagatcctccgtagatcaactgagaacgtagaagtggtgttcgggctgtatcttaaagagatggatccgagtcgccaatcttacgtgctggtcggcaaacttgatttcccaaaccagggatccctgtccgatggaggaggcttcccactatctggcttgctgatggtccttctgtctactatctttatgcatgggaacagggccaccgaagaggagatgtgggaatgcttaaacgctcttggcatgtataaaggccgcaagcatttcatctacggggaaccgcaggagctggtaacgaaggatctggtcagggagggctacttggagtatcagcaggtccctagctctgacccccccaggtatgagtttctctgggggcctagagcccgggcggaaactagtaaaatgaaagtactagagttcgtagcaaagctgaatgacaccgtggcttcaacatataagagccggtatgaagaagccttgcgagaggaagaagagcaggctcgcgcaagggctgtggcccgggattcagctagggctcgcgcatccaggtccttccaaccgtag

SEQ ID NO: 97627 - DNA, 996 bp, Artificial Sequence
  derived and/or modified sequence
atgccccggggccaggccagcaagagaagagcccgggagaagaggcggcaggcccggggggaggaccagtgcctgggcggggcccaggccacagctgctgagaaggagaagctgcccagcagcagcagccctgcctgccagagccccccccagagcttccccaatgccggcatcccccaggagagccagagggccagctaccccagcagccctgccagcgctgtgtccctgaccagcagtgatgaaggagccaagggccagaagggggagagccccaacagcttccacggccccagcagcagcgagagcacaggccgggacctgctgaacaccaagacaggagagctggtgcagttcctgctgaacaagtacatcaggaaggagcccatcacccgggaggccatgctgaaggtgatcaacaggaagtacaagcagcacttccctgagatcctgcggcgcagcacagaaaatgtggaggtggtgtttggcctgtacctgaaggagatggaccccagccggcagagctatgtgctggtgggcaagctggacttccccaaccagggcagcctgagtgatggcggcggcttccccctgagcggcctgctgatggtgctgctgagcaccatcttcatgcacggcaacagagccacagaggaggagatgtgggagtgcctgaatgccctgggcatgtacaagggcaggaagcacttcatctatggagagccccaggagctggtgaccaaggacctggtgcgggagggctacctggagtaccagcaggtgcccagcagtgacccccccaggtatgagttcctgtggggcccccgggcccgggcagagaccagcaagatgaaggtgctggagtttgtggccaagctgaatgacacagtggccagcacctacaagagccgctatgaggaggccctgcgggaggaggaggagcaggcccgggcccgggctgtggcccgggacagcgcccgggcccgggccagctag

SEQ ID NO: 97628 - DNA, 1011 bp, Artificial Sequence
  derived and/or modified sequence
atgccccggggccaggccagcaagagaagagcccgggagaagaggcggcaggcccggggggaggaccagtgcctgggcggggcccaggccacagctgctgagaaggagaagctgcccagcagcagcagccctgcctgccagagccccccccagagcttccccaatgccggcatcccccaggagagccagagggccagctaccccagcagccctgccagcgctgtgtccctgaccagcagtgatgaaggagccaagggccagaagggggagagccccaacagcttccacggccccagcagcagcgagagcacaggccgggacctgctgaacaccaagacaggagagctggtgcagttcctgctgaacaagtacatcaggaaggagcccatcacccgggaggccatgctgaaggtgatcaacaggaagtacaagcagcacttccctgagatcctgcggcgcagcacagaaaatgtggaggtggtgtttggcctgtacctgaaggagatggaccccagccggcagagctatgtgctggtgggcaagctggacttccccaaccagggcagcctgagtgatggcggcggcttccccctgagcggcctgctgatggtgctgctgagcaccatcttcatgcacggcaacagagccacagaggaggagatgtgggagtgcctgaatgccctgggcatgtacaagggcaggaagcacttcatctatggagagccccaggagctggtgaccaaggacctggtgcgggagggctacctggagtaccagcaggtgcccagcagtgacccccccaggtatgagttcctgtggggcccccgggcccgggcagagaccagcaagatgaaggtgctggagtttgtggccaagctgaatgacacagtggccagcacctacaagagccgctatgaggaggccctgcgggaggaggaggagcaggcccgggcccgggctgtggcccgggacagcgcccgggcccgggccagccgctccttccagccctag

SEQ ID NO: 97629 - DNA, 993 bp, Artificial Sequence
  derived and/or modified sequence
atgcctcgcggtcaggcgagtaagcgccgtgcccgtgagaaacgccgccaggctcgaggtgaagaccaatgtctcgggggtgctcaagccaccgcagcagagaaggaaaagctgccatcctcctcctctcctgcatgccagagtcctccccagagcttccccaatgcaggcattcctcaggagtcccagagagccagctaccccagctctcctgcttcagctgtttcactcacaagttctgatgaaggtgccaagggccaaaagggggaaagtcccaactccttccatggcccgtcctcctctgagagcacaggaagagatcttctgaacacgaagacgggcgaattggtgcagttcctcctcaacaagtatataaggaaagagcccattacgagggaagccatgctgaaggttatcaacagaaagtacaagcagcacttccctgagatcctccggagaagcactgagaacgtagaggtggtctttggcctctacctgaaggaaatggaccccagccgtcagtcctatgtgcttgttggcaagctggactttcccaatcaaggaagcttgagcgatggcgggggctttcccctgagcgggctcctgatggttctcctgagcaccatcttcatgcatggcaaccgtgccactgaggaagagatgtgggaatgcctgaatgcattggggatgtataagggtaggaagcacttcatctatggggagccccaggagcttgtcaccaaagatttggtgcgagaggggtacctggagtaccagcaggtgcccagcagcgatcctccacgctacgagttcctgtggggtcccagggcccgtgctgaaaccagcaaaatgaaagtcctggagtttgtggccaagctcaatgataccgttgccagtacctacaagtcccggtatgaggaggctctgagagaggaggaagagcaagccagagccagagcggtagccagggatagcgccagggccagggctagc

SEQ ID NO: 97630 - DNA, 1379 bp, Artificial Sequence
  derived and/or modified sequence
ggaagtgaggatcttcgtctgagggacgccacctcaggctaccagaaccccaagactggttgggtatcaagggtgttgcctgtagtgagctgaggatggagtcccaggactggtcaagtagcaaggtgaagatcctgagccctcagtagacagggctgcacggagcgtttcagcagagggctttggttgcaagactggctgccccaggtcagcggagaaaggagtcccaggctctgtggggagtgaaggtgcccacctcctgcaccctcttgcctgctgcccctaagcacagtcatcatgcctcgcggtcaggcgagtaagcgccgtgcccgtgagaaacgccgccaggctcgaggtgaagaccaatgtctcgggggtgctcaagccaccgcagcagagaaggaaaagctgccatcctcctcctctcctgcatgccagagtcctccccagagcttccccaatgcaggcattcctcaggagtcccagagagccagctaccccagctctcctgcttcagctgtttcactcacaagttctgatgaaggtgccaagggccaaaagggggaaagtcccaactccttccatggcccgtcctcctctgagagcacaggaagagatcttctgaacacgaagacgggcgaattggtgcagttcctcctcaacaagtatataaggaaagagcccattacgagggaagccatgctgaaggttatcaacagaaagtacaagcagcacttccctgagatcctccggagaagcactgagaacgtagaggtggtctttggcctctacctgaaggaaatggaccccagccgtcagtcctatgtgcttgttggcaagctggactttcccaatcaaggaagcttgagcgatggcgggggctttcccctgagcgggctcctgatggttctcctgagcaccatcttcatgcatggcaaccgtgccactgaggaagagatgtgggaatgcctgaatgcattggggatgtataagggtaggaagcacttcatctatggggagccccaggagcttgtcaccaaagatttggtgcgagaggggtacctggagtaccagcaggtgcccagcagcgatcctccacgctacgagttcctgtggggtcccagggcccgtgctgaaaccagcaaaatgaaagtcctggagtttgtggccaagctcaatgataccgttgccagtacctacaagtcccggtatgaggaggctctgagagaggaggaagagcaagccagagccagagcggtagccagggatagcgccagggccagggctagcaggtcctttcagccctagtgaagtctcaggcaatcctcactaagagattgaaaagcctgtccaccatctcagtatttgggggtgaggtg

SEQ ID NO: 97631 - DNA, 1434 bp, Artificial Sequence
  derived and/or modified sequence
gatgctctaacgagggtagtgactctgtctaaaggcaaaagcacagttcagctgagggaggagaactggacactcattggagtcccggagaggacactgagtacactggagaggacttctatgcaaaaagggggcccgagcagagccccgccccgctttcagccctgggagacccagcagggacttgattggatgtggctcactccgacatccgcccgcctgggaagctgccggaagtgaggatcttcgtctgagggacgccacctcaggctaccagaaccccaagactggttgggtatcaaggtgcccacctcctgcaccctcttgcctgctgcccctaagcacagtcatcatgcctcgcggtcaggcgagtaagcgccgtgcccgtgagaaacgccgccaggctcgaggtgaagaccaatgtctcgggggtgctcaagccaccgcagcagagaaggaaaagctgccatcctcctcctctcctgcatgccagagtcctccccagagcttccccaatgcaggcattcctcaggagtcccagagagccagctaccccagctctcctgcttcagctgtttcactcacaagttctgatgaaggtgccaagggccaaaagggggaaagtcccaactccttccatggcccgtcctcctctgagagcacaggaagagatcttctgaacacgaagacgggcgaattggtgcagttcctcctcaacaagtatataaggaaagagcccattacgagggaagccatgctgaaggttatcaacagaaagtacaagcagcacttccctgagatcctccggagaagcactgagaacgtagaggtggtctttggcctctacctgaaggaaatggaccccagccgtcagtcctatgtgcttgttggcaagctggactttcccaatcaaggaagcttgagcgatggcgggggctttcccctgagcgggctcctgatggttctcctgagcaccatcttcatgcatggcaaccgtgccactgaggaagagatgtgggaatgcctgaatgcattggggatgtataagggtaggaagcacttcatctatggggagccccaggagcttgtcaccaaagatttggtgcgagaggggtacctggagtaccagcaggtgcccagcagcgatcctccacgctacgagttcctgtggggtcccagggcccgtgctgaaaccagcaaaatgaaagtcctggagtttgtggccaagctcaatgataccgttgccagtacctacaagtcccggtatgaggaggctctgagagaggaggaagagcaagccagagccagagcggtagccagggatagcgccagggccagggctagcaggtcctttcagccctagtgaagtctcaggcaatcctcactaagagattgaaaagcctgtccaccatctcagtatttgggggtgaggtg

SEQ ID NO: 97632 - DNA, 996 bp, Artificial Sequence
  derived and/or modified sequence
atgccccggggccaggccagcaagcggcgggcccgggagaagcggcgccaggccaggggtgaggaccaatgcctgggcggtgcacaggccacggcagctgagaaggagaaactcccttcctcgtcatcccctgcgtgtcagagcccaccacaaagttttccaaacgctgggattccacaagaaagccaaagggcgtcttacccttctagccccgcgtcagctgtgagcctgacatcaagtgatgagggcgccaaaggccagaagggtgaatcccctaatagcttccatggcccctcatctagcgagtccacagggcgggatctgctcaataccaaaactggggagctggtccagttcctgcttaacaaatatatcagaaaggaacctatcacgagggaggcaatgcttaaagtgatcaacagaaagtacaaacaacacttcccagagattcttaggcgcagtacagaaaatgtagaggtagttttcggtctgtacctgaaggagatggatccgtctcggcaatcctatgttctagtgggaaaactggactttcctaatcaggggagtttgtctgacggcggcggattcccgctcagtggattgctcatggtactgctgtcaactatttttatgcacggcaatcgggccactgaggaagagatgtgggagtgtctcaacgccctcggcatgtacaaaggacgcaaacacttcatctacggcgagccgcaggaacttgtgacaaaagaccttgttcgagaaggctatctggagtatcaacaggtgccttcaagcgaccctccaaggtatgagttcctgtggggcccacgggcccgggcagagacatccaagatgaaggtgctggaattcgtcgcgaagttgaacgacaccgtcgctagtacatataagtctagatatgaggaagccctgcgcgaggaggaggaacaggctagggcacgtgccgttgctagggactcagctagggcccgcgcctcatag

SEQ ID NO: 97633 - DNA, 1011 bp, Artificial Sequence
  derived and/or modified sequence
atgccccggggccaggccagcaagcggcgggcccgggagaagcggcgtcaggcacgcggcgaagaccaatgtctcggtggcgctcaggccactgccgccgaaaaggagaagctacctagctccagctcaccagcatgccagagccccccccagtctttccctaatgctggtatcccgcaagaaagccagcgcgcctcttatccatcgtctccggcttccgcagtgagccttaccagttccgatgaaggcgccaagggccagaagggcgagagtcccaactcttttcacggccccagctcaagtgaatctacgggtagggacctcctcaatacaaagaccggagaactagtgcagttcttgctcaataagtatatccgaaaagagcctatcacgcgagaagctatgctgaaagtcataaatagaaaatacaagcagcactttcccgaaattctgagacgatctacagagaatgtggaggttgttttcggactgtaccttaaggagatggatcctagtagacagtcatatgtgctggtcgggaaacttgatttccccaatcaaggatccctttcagatggcgggggatttcccctctcagggttgctcatggtgctgctgtctactatcttcatgcatgggaaccgggccaccgaggaggaaatgtgggaatgcttgaacgcactcggcatgtacaagggacggaagcactttatctacggggagccccaggagcttgtcaccaaagatctggtgagggaggggtacttggaatatcagcaggttccttcttccgatccccctagatacgagttcctctggggacctcgcgctcgggctgagacaagcaagatgaaggtgctcgagtttgtggcaaagctcaatgacactgtggcctcaacctacaaaagtagatacgaagaggccctgagagaagaagaagaacaggcccgggctcgcgccgtggcccgtgatagcgctcgagcacgcgcgtcgcgatcctttcagccttag

SEQ ID NO: 97634 - DNA, 1011 bp, Artificial Sequence
  derived and/or modified sequence
atgccccggggccaggccagcaagcggcgggcccgggagaagcggagacaggctcgaggagaggaccagtgcctcggcggagcacaagcaactgcagctgagaaggaaaaattgccgtccagttcaagccctgcatgccaatcgccccctcagagcttcccaaatgccggaattcctcaagagtctcagagggcctcatatcccagtagtcctgcttccgcagttagcttgacatcaagtgacgagggagctaagggtcagaagggtgaaagtcctaactccttccacggaccctcctcatcagaaagtaccgggcgggatctgctgaataccaagaccggggagctcgtccagttcctgctcaacaaatatattaggaaggaacccatcacaagggaggcgatgctcaaggtcatcaacaggaaatacaagcagcattttcccgagattctgaggcggagcacggagaacgtggaagtggtgtttggactctacttgaaggagatggatccgtcccggcaatcctatgtgctggttggtaaattagatttcccgaatcaaggttcactaagcgatggcggcggcttccctttatccggtctactgatggtgctactgagcacaatattcatgcacgggaaccgggcgactgaggaggagatgtgggagtgtctaaatgccttaggaatgtataagggacgcaagcatttcatctatggcgagcctcaggaacttgttactaaggatctggtgcgggaaggatacttggaataccagcaagtgcctagctccgaccctcctcggtacgagttcctttggggaccaagagcgcgggccgagaccagtaaaatgaaggtcctggaatttgtagccaagttgaatgatacagtggcatccacctacaagagccgatatgaggaggctctccgtgaagaggaggaacaagccagggcccgagcggtagccagggatagcgcacgggcacgcgcttccaggtcattccagccatag

SEQ ID NO: 97635 - DNA, 996 bp, Artificial Sequence
  derived and/or modified sequence
atgcccagaggtcaagcttccaagagacgggctcgcgaaaagagacgtcaagcgcgtggggaggaccaatgtcttggcggtgcacaagccactgctgccgaaaaggagaaattgccctctagctcctccccagcttgtcagtcccctcctcaatcatttcccaatgccggaatcccacaggagagtcagagagcgtcatacccatcttcccccgcaagcgcagtgtccttaacctccagtgatgaaggcgctaagggccaaaaaggagaatctccaaacagcttccacggcccttcatcatccgagagcactggcagagatcttctgaataccaaaacaggggagctcgttcagtttcttctcaataaatacattaggaaagaaccaatcaccagggaagccatgctcaaggtgattaaccggaagtacaagcagcacttccccgagatcctccggaggtccaccgaaaatgtcgaggtagtgttcggcctgtatctgaaagagatggatccatcccgccagtcctacgtgctggtgggtaagctcgactttcctaatcaaggctccctgtctgatggcggtggtttccccctgagcggcctcctgatggtgctcctgagtacaatcttcatgcacggaaatcgggctactgaggaggagatgtgggaatgcctgaacgcacttggcatgtacaaggggaggaaacacttcatatacggtgagccacaggaattagtgaccaaggatctggtcagggagggctacctggaataccaacaggttccctctagcgaccccccacggtatgagttcctgtggggcccacgcgctcgagctgaaacaagtaagatgaaggttctcgagttcgtggctaagcttaatgacactgtggctagtacttataaatcacgttatgaggaagccctgagggaagaagaggagcaagccagagcacgagctgttgcaagggacagcgccagggcacgggcatcttag

SEQ ID NO: 97636 - DNA, 1011 bp, Artificial Sequence
  derived and/or modified sequence
atgccaaggggacaggcgtccaagagacgcgcacgggaaaagcgccgtcaggctcgcggagaagatcagtgcctgggcggtgctcaagcgaccgccgcagaaaaagaaaaactgccttccagctcctcccccgcttgtcaatcccccccacaatccttcccaaacgcagggattcctcaagagagtcagagagccagctatccctcctctcctgctagcgccgtcagcctgacttcatcagacgagggagctaagggccaaaagggcgagtcacccaactccttccacgggccttcttcatcagaaagtacaggaagagacctcctcaatacaaagacgggtgagttggtacagttcctgctgaataagtacatccgcaaagagcccattacccgagaagctatgctgaaggtcattaaccggaagtacaagcagcatttcccagagattcttaggagaagtactgagaacgtggaagtggtgtttggcctatatctcaaagagatggatccaagtcggcagagctatgtgctggtggggaagctggatttccctaaccagggctcactgtctgacggcggagggttccctctgagcggattgctgatggtgctgctatctactatctttatgcatggaaacagggccacagaagaggaaatgtgggaatgcctcaatgcattgggaatgtacaagggccgaaaacatttcatatacggggagccgcaggagctggtgaccaaagatctggtcagagaaggctacttagagtatcaacaggttccaagctcggacccgccacgctacgaattcctgtggggccctagggcgagagctgagacatccaagatgaaggtcctcgagttcgttgcgaaactgaacgacacagtggcttccacatataaatctcgctacgaagaagctctaagagaagaggaggagcaggctcgggctagagccgttgcccgagacagcgctcgtgctcgtgcttctcggtccttccagccgtag

SEQ ID NO: 97637 - DNA, 1011 bp, Artificial Sequence
  derived and/or modified sequence
atgcctcgaggccaggcctctaaacgcagagccagggagaaaaggagacaagcccgaggagaagaccagtgtcttggtggcgctcaggcaacagctgctgaaaaagagaagctgcctagttcctccagtccagcatgccagtcccctcctcagagcttccccaatgctgggatcccacaggaatctcagcgcgcatcttacccaagctcgcctgcgagtgctgtgtcacttacctctagcgatgaaggcgcaaaggggcagaaaggcgagtcccccaatagcttccacgggccttcctcatctgagtccacaggcagggatcttttaaacacaaagacaggcgagctggtgcagttcctgctcaacaagtatattcggaaggagcccataaccagggaggctatgcttaaggtgatcaatcgtaaatataaacagcatttccctgagattctccgtcgttctactgaaaacgtcgaggtggtatttggactgtacctgaaagagatggaccctagtcggcagtcttatgttttagtggggaaactggatttcccaaatcaaggttctttgtccgacggcggtgggtttcctctttctggactgctgatggttttgttaagtactatctttatgcatgggaatcgcgctaccgaggaggagatgtgggagtgcctcaacgcacttggaatgtataaggggagaaaacacttcatttacggagaaccccaggaactagttaccaaggatttagtgagagaggggtatctggagtatcagcaggtgccaagttccgaccctccgagatatgagtttctgtgggggccaagagcaagagccgaaacctctaagatgaaagtcttggaattcgtggccaagctgaacgacaccgtagcgtcaacctacaaatctaggtatgaggaggccttgagggaggaggaagagcaggcacgggcacgagcagtggcaagggacagtgcgcgagcacgggcttccagaagcttccagccatag

SEQ ID NO: 97638 - DNA, 996 bp, Artificial Sequence
  derived and/or modified sequence
atgcccagaggccaggccagcaagagaagagccagagagaagagaagacaggccagaggcgaggaccagtgcctgggcggcgcccaggccaccgccgccgagaaggagaagctgcccagcagcagcagccccgcctgccagagccccccccagagcttccccaacgccggcatcccccaggagagccagagagccagctaccccagcagccccgccagcgccgtgagcctgaccagcagcgacgagggcgccaagggccagaagggcgagagccccaacagcttccacggccccagcagcagcgagagcaccggcagagacctgctgaacaccaagaccggcgagctggtgcagttcctgctgaacaagtacatcagaaaggagcccatcaccagagaggccatgctgaaggtgatcaacagaaagtacaagcagcacttccccgagatcctgagaagaagcaccgagaacgtggaggtggtgttcggcctgtacctgaaggagatggaccccagcagacagagctacgtgctggtgggcaagctggacttccccaaccagggcagcctgagcgacggcggcggcttccccctgagcggcctgctgatggtgctgctgagcaccatcttcatgcacggcaacagagccaccgaggaggagatgtgggagtgcctgaacgccctgggcatgtacaagggcagaaagcacttcatctacggcgagccccaggagctggtgaccaaggacctggtgagagagggctacctggagtaccagcaggtgcccagcagcgacccccccagatacgagttcctgtggggccccagagccagagccgagaccagcaagatgaaggtgctggagttcgtggccaagctgaacgacaccgtggccagcacctacaagagcagatacgaggaggccctgagagaggaggaggagcaggccagagccagagccgtggccagagacagcgccagagccagagccagctag

SEQ ID NO: 97639 - DNA, 1011 bp, Artificial Sequence
  derived and/or modified sequence
atgcccagaggccaggccagcaagagaagagccagagagaagagaagacaggccagaggcgaggaccagtgcctgggcggcgcccaggccaccgccgccgagaaggagaagctgcccagcagcagcagccccgcctgccagagccccccccagagcttccccaacgccggcatcccccaggagagccagagagccagctaccccagcagccccgccagcgccgtgagcctgaccagcagcgacgagggcgccaagggccagaagggcgagagccccaacagcttccacggccccagcagcagcgagagcaccggcagagacctgctgaacaccaagaccggcgagctggtgcagttcctgctgaacaagtacatcagaaaggagcccatcaccagagaggccatgctgaaggtgatcaacagaaagtacaagcagcacttccccgagatcctgagaagaagcaccgagaacgtggaggtggtgttcggcctgtacctgaaggagatggaccccagcagacagagctacgtgctggtgggcaagctggacttccccaaccagggcagcctgagcgacggcggcggcttccccctgagcggcctgctgatggtgctgctgagcaccatcttcatgcacggcaacagagccaccgaggaggagatgtgggagtgcctgaacgccctgggcatgtacaagggcagaaagcacttcatctacggcgagccccaggagctggtgaccaaggacctggtgagagagggctacctggagtaccagcaggtgcccagcagcgacccccccagatacgagttcctgtggggccccagagccagagccgagaccagcaagatgaaggtgctggagttcgtggccaagctgaacgacaccgtggccagcacctacaagagcagatacgaggaggccctgagagaggaggaggagcaggccagagccagagccgtggccagagacagcgccagagccagagccagcagaagcttccagccctag

SEQ ID NO: 97640 - protein, 1419 aa, Artificial Sequence
  derived and/or modified sequence
MEGTHCTLQLHKPITELCYISFCLPKGEVRGFSYKGTVTLDRSNKGFHNCYQVREESDIISLSQEPDEHPGDIFFKQTPTKDILTELYKLTTERERLLTNLLSSDHILGITMGNQEGKLQELSVSLAPEDDCFQSAGDWQGELPVGPLNKRSTHGNKKPRRSSGRRESFGALPQKRTKRKGRGGRESAPLMGKDKICSSHSLPLSRTRPNLWVLEEKGNLLPNGALACSLQRRESCPPDIPKTPDTDLGFGSFETAFKDTGLGREVLPPDCSSTEAGGDGIRRPPSGLEHQQTGLSESHQDPEKHPEAEKDEMEKPAKRTCKQKPVSKVVAKVQDLSSQVQRVVKTHSKGKETIAIRPAAHAEFVPKADLLTLPGAEAGAHGSRRQGKERQGDRSSQSPAGETASISSVSASAEGAVNKVPLKVIESEKLDEAPEGKRLGFPVHTSVPHTRPETRNKRRAGLPLGGHKSLFLDLPHKVGPDSSQPRGDKKKPSPPAPAALGKVFNNSASQSSTHKQTSPVPSPLSPRLPSPQQHHRILRLPALPGEREAALNDSPCRKSRVFSGCVSADTLEPPSSAKVTETKGASPAFLRAGQPRLVPGETLEKSLGPGKTTAEPQHQSPPGISSEGFPWDGFNEQTPKDLPNRDGGAWVLGYRAGPACPFLLHEEREKSNRSELYLDLHPDHSLTEQDDRTPGRLQAVWPPPKTKDTEEKVGLKYTEAEYQAAILHLKREHKEEIENLQAQFELRAFHIRGEHAMITARLEETIENLKHELEHRWRGGCEERKDVCISTDDDCPPKTFRNVCVQTDRETFLKPCESESKTTRSNQLVPKKLNISSLSQLSPPNDHKDIHAALQPMEGMASNQQKALPPPPASIPPPPPLPSGLGSLSPAPPMPPVSAGPPLPPPPPPPPPLPPPSSAGPPPPPPPPPLPNSPAPPNPGGPPPAPPPPGLAPPPPPGLFFGLGSSSSQCPRKPAIEPSCPMKPLYWTRIQISDRSQNATPTLWDSLEEPDIRDPSEFEYLFSKDTTQQKKKPLSETYEKKNKVKKIIKLLDGKRSQTVGILISSLHLEMKDIQQAIFNVDDSVVDLETLAALYENRAQEDELVKIRKYYETSKEEELKLLDKPEQFLHELAQIPNFAERAQCIIFRSVFSEGITSLHRKVEIITRASKDLLHVKSVKDILALILAFGNYMNGGNRTRGQADGYSLEILPKLKDVKSRDNGINLVDYVVKYYLRYYDQEAGTEKSVFPLPEPQDFFLASQVKFEDLIKDLRKLKRQLEASEKQMVVVCKESPKEYLQPFKDKLEEFFQKAKKEHKMEESHLENAQKSFETTVRYFGMKPKSGEKEITPSYVFMVWYEFCSDFKTIWKRESKNISKERLKMAQESVSKLTSEKKVETKKINPTASLKERLRQKEASVTTN

SEQ ID NO: 97641 - DNA, 4260 bp, Artificial Sequence
  derived and/or modified sequence
atggagggcacccactgcaccctgcagctgcacaagcccatcaccgagctgtgctacatcagcttctgcctgcccaagggcgaggtgagaggcttcagctacaagggcaccgtgaccctggacagaagcaacaagggcttccacaactgctaccaggtgagagaggagagcgacatcatcagcctgagccaggagcccgacgagcaccccggcgacatcttcttcaagcagacccccaccaaggacatcctgaccgagctgtacaagctgaccaccgagagagagagactgctgaccaacctgctgagcagcgaccacatcctgggcatcaccatgggcaaccaggagggcaagctgcaggagctgagcgtgagcctggcccccgaggacgactgcttccagagcgccggcgactggcagggcgagctgcccgtgggccccctgaacaagagaagcacccacggcaacaagaagcccagaagaagcagcggcagaagagagagcttcggcgccctgccccagaagagaaccaagagaaagggcagaggcggcagagagagcgcccccctgatgggcaaggacaagatctgcagcagccacagcctgcccctgagcagaaccagacccaacctgtgggtgctggaggagaagggcaacctgctgcccaacggcgccctggcctgcagcctgcagagaagagagagctgcccccccgacatccccaagacccccgacaccgacctgggcttcggcagcttcgagaccgccttcaaggacaccggcctgggcagagaggtgctgccccccgactgcagcagcaccgaggccggcggcgacggcatcagaagaccccccagcggcctggagcaccagcagaccggcctgagcgagagccaccaggaccccgagaagcaccccgaggccgagaaggacgagatggagaagcccgccaagagaacctgcaagcagaagcccgtgagcaaggtggtggccaaggtgcaggacctgagcagccaggtgcagagagtggtgaagacccacagcaagggcaaggagaccatcgccatcagacccgccgcccacgccgagttcgtgcccaaggccgacctgctgaccctgcccggcgccgaggccggcgcccacggcagcagaagacagggcaaggagagacagggcgacagaagcagccagagccccgccggcgagaccgccagcatcagcagcgtgagcgccagcgccgagggcgccgtgaacaaggtgcccctgaaggtgatcgagagcgagaagctggacgaggcccccgagggcaagagactgggcttccccgtgcacaccagcgtgccccacaccagacccgagaccagaaacaagagaagagccggcctgcccctgggcggccacaagagcctgttcctggacctgccccacaaggtgggccccgacagcagccagcccagaggcgacaagaagaagcccagcccccccgcccccgccgccctgggcaaggtgttcaacaacagcgccagccagagcagcacccacaagcagaccagccccgtgcccagccccctgagccccagactgcccagcccccagcagcaccacagaatcctgagactgcccgccctgcccggcgagagagaggccgccctgaacgacagcccctgcagaaagagcagagtgttcagcggctgcgtgagcgccgacaccctggagccccccagcagcgccaaggtgaccgagaccaagggcgccagccccgccttcctgagagccggccagcccagactggtgcccggcgagaccctggagaagagcctgggccccggcaagaccaccgccgagccccagcaccagagcccccccggcatcagcagcgagggcttcccctgggacggcttcaacgagcagacccccaaggacctgcccaacagagacggcggcgcctgggtgctgggctacagagccggccccgcctgccccttcctgctgcacgaggagagagagaagagcaacagaagcgagctgtacctggacctgcaccccgaccacagcctgaccgagcaggacgacagaacccccggcagactgcaggccgtgtggcccccccccaagaccaaggacaccgaggagaaggtgggcctgaagtacaccgaggccgagtaccaggccgccatcctgcacctgaagagagagcacaaggaggagatcgagaacctgcaggcccagttcgagctgagagccttccacatcagaggcgagcacgccatgatcaccgccagactggaggagaccatcgagaacctgaagcacgagctggagcacagatggagaggcggctgcgaggagagaaaggacgtgtgcatcagcaccgacgacgactgcccccccaagaccttcagaaacgtgtgcgtgcagaccgacagagagaccttcctgaagccctgcgagagcgagagcaagaccaccagaagcaaccagctggtgcccaagaagctgaacatcagcagcctgagccagctgagcccccccaacgaccacaaggacatccacgccgccctgcagcccatggagggcatggccagcaaccagcagaaggccctgccccccccccccgccagcatccccccccccccccccctgcccagcggcctgggcagcctgagccccgccccccccatgccccccgtgagcgccggcccccccctgcccccccccccccccccccccccccccctgcccccccccagcagcgccggccccccccccccccccccccccccccccctgcccaacagccccgccccccccaaccccggcggccccccccccgccccccccccccccggcctggcccccccccccccccccggcctgttcttcggcctgggcagcagcagcagccagtgccccagaaagcccgccatcgagcccagctgccccatgaagcccctgtactggaccagaatccagatcagcgacagaagccagaacgccacccccaccctgtgggacagcctggaggagcccgacatcagagaccccagcgagttcgagtacctgttcagcaaggacaccacccagcagaagaagaagcccctgagcgagacctacgagaagaagaacaaggtgaagaagatcatcaagctgctggacggcaagagaagccagaccgtgggcatcctgatcagcagcctgcacctggagatgaaggacatccagcaggccatcttcaacgtggacgacagcgtggtggacctggagaccctggccgccctgtacgagaacagagcccaggaggacgagctggtgaagatcagaaagtactacgagaccagcaaggaggaggagctgaagctgctggacaagcccgagcagttcctgcacgagctggcccagatccccaacttcgccgagagagcccagtgcatcatcttcagaagcgtgttcagcgagggcatcaccagcctgcacagaaaggtggagatcatcaccagagccagcaaggacctgctgcacgtgaagagcgtgaaggacatcctggccctgatcctggccttcggcaactacatgaacggcggcaacagaaccagaggccaggccgacggctacagcctggagatcctgcccaagctgaaggacgtgaagagcagagacaacggcatcaacctggtggactacgtggtgaagtactacctgagatactacgaccaggaggccggcaccgagaagagcgtgttccccctgcccgagccccaggacttcttcctggccagccaggtgaagttcgaggacctgatcaaggacctgagaaagctgaagagacagctggaggccagcgagaagcagatggtggtggtgtgcaaggagagccccaaggagtacctgcagcccttcaaggacaagctggaggagttcttccagaaggccaagaaggagcacaagatggaggagagccacctggagaacgcccagaagagcttcgagaccaccgtgagatacttcggcatgaagcccaagagcggcgagaaggagatcacccccagctacgtgttcatggtgtggtacgagttctgcagcgacttcaagaccatctggaagagagagagcaagaacatcagcaaggagagactgaagatggcccaggagagcgtgagcaagctgaccagcgagaagaaggtggagaccaagaagatcaaccccaccgccagcctgaaggagagactgagacagaaggaggccagcgtgaccaccaactag

SEQ ID NO: 97642 - DNA, 4260 bp, Artificial Sequence
  derived and/or modified sequence
atggaaggcactcattgtaccctccaattgcataagcccattacggaactctgctacatcagcttctgtcttccaaagggggaagtcagaggattttcatacaagggcactgtaactctagacagatccaataaaggttttcataactgctaccaagtcagggaggagtcagacatcatcagcctcagccaggagccggacgaacatccaggcgacatatttttcaagcagactcccacgaaagacattctaactgagctgtacaaactcacaacagagagggagagactgctaaccaatctcctgagctcagaccacatcctggggatcacgatggggaaccaggaggggaagctgcaagagctgtccgtgagcctggcccccgaggatgactgtttccagagtgctggtgactggcagggagagctccccgtgggccctctcaataagaggagcacccacgggaacaaaaagcctcggaggtctagtggaaggagagagagctttggggcccttccacagaagaggaccaaaagaaaagggcgtggaggccgagaatcagctcctctgatgggcaaggacaagatctgttccagccactcccttcctctttctagaacaaggcctaacctttgggtactagaggagaaaggaaatctgctcccgaatggggcacttgcctgctccctgcagaggagagagagctgccccccagatattcccaagacgccagacacagaccttggctttgggagctttgagacggctttcaaggacactgggcttggaagagaagtgctgccccctgactgcagctccacagaggcaggaggggatggcattcggaggccgccgagcgggctggagcatcagcaaacaggtttgtctgaaagtcaccaggaccctgagaagcatccagaggcagaaaaggatgagatggagaagccggctaagcggacttgcaagcagaaacctgtctccaaagtggtggccaaagttcaggacctgtcctcccaggtacaaagagtagttaaaacgcattctaagggtaaggagacgattgccattcgcccagcagcccacgctgagtttgtacccaaagccgacttgctcaccctcccgggagctgaggctggggctcatggctccaggcggcagggcaaggagcggcaaggggataggtcatcgcagtcgccagccggggaaacagcctccatttctagtgtgtcggccagtgccgagggggccgtgaacaaggtccccctgaaggtgatagagagtgagaagttagatgaagcccctgaggggaaaagactgggcttccctgtccacacgagtgtccctcacactcgcccagaaacgagaaacaagaggagagccgggttgccccttggtggccacaagtccttgtttctggatctgccccacaaagtaggtcctgactcctcacaacccagaggtgataagaagaagccatccccaccagcaccggcagctcttggcaaggtgtttaataattcagcctcgcagtccagcacacacaaacagacgtcacctgttccctcgcctctgtctccaaggctccccagccctcagcagcatcacaggatcctccggctccctgcattgcctggtgagagggaagctgctcttaatgactctccttgtagaaagagccgtgtcttctctgggtgcgtctctgctgacaccttggagccaccatcctctgcaaaggtcacggagaccaaaggagccagcccggccttcctcagagcaggccaacctcggttggtgcctggggaaactttggaaaagagcttggggccagggaagaccacagctgagccccagcaccagtcacctccaggtatctcctctgagggctttccctgggacggcttcaatgagcagacacctaaagaccttcccaacagagatggaggcgcgtgggttctgggctacagagcgggaccagcctgtccatttttgcttcatgaggaaagggagaagtcaaacaggagcgaattgtacttggatctccatcctgaccacagcctgactgagcaggatgacaggactcctggcagacttcaagctgtctggccacccccaaagacaaaagacacagaagaaaaagtgggactgaagtacactgaagcagaataccaagctgctattttacacttgaagagggagcacaaagaagaaattgaaaacctgcaggcacagtttgaacttcgggcatttcatatccggggcgagcatgcaatgataacagcgagactagaagaaaccattgaaaatctgaaacacgagctagaacacagatggcgagggggttgtgaagagaggaaagatgtgtgcatttccaccgatgatgactgccctccaaagaccttcagaaatgtgtgcgtccagacagacagagagaccttcctcaagccctgtgaaagtgaaagcaagacaaccagaagtaatcaattagtacccaaaaagctgaatatctcctctttaagccagctctcacccccaaatgaccacaaagacatccatgcagcactccagccaatggagggcatggcatcaaatcagcagaaggcattgcctccgcctcccgcatccatccctccccctccgcccctcccctcaggacttggatctttgtctcccgcacctccaatgccacctgtgagtgctgggccaccgctaccacctccgcctcctccaccgccacctctacctccaccttcaagtgctggacctccaccacccccacccccacccccacttcctaactcccctgccccacccaaccctggagggcctcctcctgctccaccacccccaggacttgcacccccacctccccctggactcttctttggacttggctcttcttccagtcaatgtcctcgaaaaccagccatcgagcccagttgtcccatgaagcctttatattggactaggatacaaataagtgataggagccaaaatgctacaccaaccttatgggactccttagaagaacctgacattcgggaccccagtgaatttgagtatttattctccaaagacacaactcaacagaagaaaaaacctctgtcagagacttatgagaagaaaaacaaggtcaaaaagatcatcaaattgttggatggaaaacgatctcaaactgtgggaatcttgatatctagtttacatttagaaatgaaggatatccaacaggccattttcaatgtggatgactccgtggttgatctggagaccctggcagccttatatgaaaacagagcccaagaggatgagctggttaaaataagaaagtattacgagacatccaaagaagaagaactgaagctgctggataaacctgagcaatttttacatgagttagcccagattcctaattttgctgaacgtgcccagtgcataatcttcagatctgtcttttctgagggtatcacctccttgcacagaaaggtagagatcatcacgcgagcttctaaggacttgctgcacgtgaagagcgtgaaggatattttagctctcatcttggcttttggaaattatatgaatggaggaaataggactcggggacaagccgatggatatagcttagaaattctgcccaaactcaaggatgtcaaaagtcgggataatgggattaatctggtggactacgttgttaagtattacctgcgttactatgatcaggaagctggaacagaaaagagtgttttccccttgccggaaccacaggatttctttctggcctcccaagtcaagtttgaagacctcataaaagatttgagaaaactgaagaggcaactagaagcaagtgagaaacagatggtggtggtgtgcaaggagtccccaaaggagtatctccagcctttcaaggacaaactagaggagttcttccaaaaagccaaaaaagagcataagatggaagaaagtcacttggagaatgcacagaaaagttttgaaacaacagtacgatattttgggatgaagccaaagtctggtgagaaggagatcacacccagctacgtgtttatggtgtggtatgagttctgcagtgacttcaagacaatttggaaacgggagagtaaaaacatatctaaagaaagattgaaaatggctcaggaatcagtcagcaagttgacttcagagaagaaagtggagacaaagaaaatcaatcccactgctagcctgaaagaaagactgcgtcagaaggaagccagtgtgaccactaactaa

SEQ ID NO: 97643 - DNA, 4260 bp, Artificial Sequence
  derived and/or modified sequence
atggagggcacccactgcaccttgcagttacacaaaccgattaccgaactgtgctacatatccttttgtttacctaaaggtgaggtgcgtggatttagctacaaaggaactgtgacccttgacagatccaataagggctttcataattgctatcaggtgagagaagaatcagacataatctctctgtcccaagagcccgatgagcatcctggagacattttcttcaagcagacacctaccaaggatattttgacagagctgtacaaactaacaacagaacgggaaagattgctcactaacctcttaagtagcgatcacattctagggatcactatgggcaatcaggaggggaagttacaggaactgagcgttagccttgcccctgaagatgactgctttcagtcggcaggggactggcaaggcgagcttccagtgggccccctcaacaaacggtcaacgcatggtaacaagaaacctagacgaagctccgggcggcgggagtccttcggcgctctaccccagaaacgcacaaagcgcaaaggaaggggaggtcgggaaagcgctccacttatgggcaaagataagatctgtagcagccactctttaccactcagcaggactcggcccaatctgtgggtgctggaggagaaaggcaatctgttgccaaatggcgcccttgcctgtagcttgcagcgccgggagtcatgccctccggacattccgaagacacccgacacggatctcggctttggttctttcgaaacagcatttaaagacaccggtctgggtcgcgaggtgttgccgcccgattgttccagcactgaagctggcggggacgggatccggcgtcctccatcggggctggaacaccagcagaccggcttatccgagagccatcaagatcccgaaaagcatcctgaggcagagaaggatgaaatggaaaaaccggcaaagcgaacctgcaaacagaaaccagtcagtaaggtcgttgcgaaggtacaagatctgagctctcaagttcaacgagtcgttaagactcactccaagggcaaagaaaccattgccatcaggccagccgcccacgcagagttcgttcccaaggcagatctgctgacattgccaggggctgaagctggcgcgcacggctcacgccggcagggcaaagaacgccagggagaccgctcgtctcaatcccccgccggcgaaacagcaagcatatcgagcgtcagtgcaagtgcagaaggcgctgtcaataaggtgcccctgaaggtaatagagagtgaaaaactcgatgaagctcctgaaggaaagcggctggggtttcctgtgcacacatccgttccccacaccagacctgaaactcgcaacaagcggagagcaggactgccactcgggggccataagtcactgtttctcgacttacctcacaaggtcgggcccgatagcagtcaaccacggggcgacaagaagaagccatcgcccccggccccggccgccctgggaaaggtgtttaataactccgcctctcagagctccacgcataagcagaccagccccgtgccttcgccactctcaccacgtctgccatccccccagcagcatcacagaatcctgcgcctcccagctctgcctggggagcgcgaggcagccctgaacgacagcccgtgtcgaaagtctagagtgttctccggctgcgtgtccgccgacactctagaacccccctcttcagctaaagtaacagaaactaaaggggcttctcccgcctttttaagggccggtcaaccacgcctggtgccaggcgagacactggaaaagtccctgggccctggaaagaccacagccgagccccaacatcagtctccccctggtatttcatcagaaggcttcccatgggacggatttaacgaacagactcccaaggatctccccaatagagatggcggagcctgggttctgggataccgggcgggtccagcatgcccattcctcttgcacgaagagcgggaaaaaagtaacagaagtgagctatacttggacctccaccccgatcacagcctgacagaacaggacgataggacaccaggtcgccttcaggctgtttggcctccacctaaaaccaaagataccgaggagaaggtggggcttaagtatacggaagctgaataccaggcggccatcctccacctgaagcgagaacacaaggaagagatcgagaacctgcaggcacagttcgagttgcgggctttccacatcaggggagaacatgccatgataacggcccggctggaggagacgatcgaaaatcttaagcacgagcttgagcacaggtggcgtgggggctgcgaggagcgaaaggatgtgtgcatttctaccgatgacgattgccccccaaaaacttttaggaacgtgtgtgtccagaccgatagggagaccttcttaaagccctgtgaatctgagagcaagacaacccggtctaaccagctagtaccaaagaagctgaatatttccagcctgtcccagttgtctccccctaacgaccacaaagatatccacgccgcgttacagcccatggaaggcatggcatctaaccagcagaaggccctcccgcctcctcctgcctcaataccaccacccccaccactgccgtcaggactcgggagtctgagcccagccccccctatgccacctgtctcggcgggaccgcccttgcccccgccacccccacccccacctccacttccgcctccaagctctgccggcccacctcccccccctccgccaccccctctgccaaattcacccgccccccctaacccagggggaccaccccctgcacctccaccacctggcctcgccccacccccaccccctggcttatttttcgggttgggttctagctcttcccaatgccccagaaagcctgccattgagccgagctgtcctatgaagcctctttactggactcggatccagatctcagacaggagtcagaatgccaccccgaccttatgggactcgctggaagagccggatattcgggatcccagcgagttcgaatatctgttctccaaagacactacccagcagaagaaaaagccacttagcgagacatacgaaaagaagaacaaggtgaaaaagatcatcaagttgctggacggaaaacgcagccagacagttgggattctgatctcatccctgcacttggaaatgaaagatatccagcaggccattttcaatgttgacgactctgtagtggacctggagactcttgccgccctttacgagaatcgcgctcaggaggacgaactcgtgaagataagaaagtactacgagacctctaaagaggaggagctcaagctgctcgataaacctgagcagttcctgcacgagctggcccagatcccaaacttcgctgaaagggcccagtgcatcatctttaggtctgttttttccgagggcataacctcactccacaggaaagtagagataatcaccagggcaagtaaagacctgctccacgtgaaaagtgtaaaagacatcttggcactcatccttgcatttggaaactacatgaacgggggcaatcggactcggggccaggctgacggttattccctggagatcctgcctaagctgaaggatgtgaagtccagggataatggaattaatctcgtcgattacgttgttaagtattacctgagatactatgatcaagaggctggcaccgagaaaagtgtgttcccgctgcctgagccccaagatttctttctggcttctcaagtcaaatttgaggacctgatcaaggatctgcggaagcttaaaagacaactcgaggcctctgaaaaacaaatggtggtggtctgcaaggagtctcctaaagaatatctacagccgtttaaagacaagctcgaggaatttttccagaaagcaaaaaaagagcacaaaatggaggaaagccatctggagaatgcacaaaaatccttcgagacaactgtgagatattttggcatgaagccaaaatccggagaaaaggaaattacaccttcttacgtcttcatggtgtggtacgagttttgctctgatttcaagactatttggaagcgggaaagtaaaaatatctctaaagagagacttaagatggcccaggagtcggtgtctaagctgaccagtgaaaagaaggtcgagacgaagaagataaaccccacagccagtttgaaagagcgcttacgccagaaggaggctagcgttactaccaattag

SEQ ID NO: 97644 - DNA, 4260 bp, Artificial Sequence
  derived and/or modified sequence
atggagggcacccactgcaccctgcagctgcacaagcccatcacagagctgtgctacatctccttctgcctgcccaagggggaggtgcggggcttctcctacaagggcaccgtgaccctggacaggagcaacaagggcttccacaactgctaccaggtgcgggaggagagtgacatcatcagcctgagccaggagccagatgagcaccctggggacatcttcttcaagcagacccccaccaaggacatcctgacagagctgtacaagctgaccacagagcgggagcggctgctgaccaacctgctgagcagtgaccacatcctgggcatcaccatgggcaaccaggagggcaagctgcaggagctgtctgtgtccctggccccagaagatgactgcttccagagcgctggggactggcagggcgagctgcctgtgggccccctgaacaagaggagcacccacggcaacaagaagccccggcgcagcagtggaagaagagagagctttggagccctgccccagaagaggaccaagaggaagggccggggcggccgggagagcgcccccctgatgggcaaggacaagatctgcagcagccacagcctgcccctgagcaggacccggcccaacctgtgggtgctggaggagaagggcaacctgctgcccaatggagccctggcctgcagcctgcagaggcgggagagctgccccccagacatccccaagaccccagacacagacctgggcttcggcagctttgaaacagccttcaaggacaccggcctgggccgggaggtgctgcccccagactgcagcagcacagaggccggaggagatggcatccggcggccccccagcggcctggagcaccagcagacaggcctgtctgagagccaccaggaccctgagaagcaccctgaggccgagaaggatgagatggagaagccagccaagaggacctgcaagcagaagcctgtgtccaaggtggtggccaaggtgcaggacctgagcagccaggtgcagagggtggtgaagacccacagcaagggcaaggagaccatcgccatccggcctgctgcccacgccgagtttgtgcccaaggctgacctgctgaccctgcccggggctgaggccggggcccacggcagccggcggcagggcaaggagcggcagggcgacaggagcagccagagccctgctggggagacagccagcatcagctctgtgtctgccagcgctgagggcgctgtgaacaaggtgcccctgaaggtgattgaaagtgagaagctggatgaggcccctgagggcaagaggctgggcttccctgtgcacacctctgtgccccacaccaggcctgagaccaggaacaagaggcgggccggcctgcccctgggcggccacaagagcctcttcctggacctgccccacaaggtgggccctgacagcagccagcccaggggggacaagaagaagcccagccccccagccccagctgccctgggcaaggtgttcaacaacagcgccagccagagcagcacccacaagcagaccagccctgtgcccagccccctgagcccccggctgcccagcccccagcagcaccaccgcatcctgcggctgcctgccctgcccggggagcgggaggccgccctgaatgacagcccctgcaggaagagcagggtcttcagcggctgtgtgtctgctgacaccctggagccccccagcagcgccaaggtgacagagaccaagggggccagccctgccttcctgcgggccggccagccccggctggtgcctggagagaccctggagaagagcctgggccctgggaagaccacagctgagccccagcaccagagccccccaggcatcagcagcgagggcttcccctgggatggcttcaatgagcagacccccaaggacctgcccaacagagatggaggagcctgggtgctgggctaccgggccggccctgcctgccccttcctgctgcacgaggagcgggagaagagcaacagaagtgagctgtacctggacctgcacccagaccacagcctgacagagcaggatgacaggaccccaggccgcctgcaggccgtgtggcccccacccaagaccaaggacacagaggagaaggtgggcctgaagtacacagaggccgagtaccaggccgccatcctgcacctgaagcgggagcacaaggaggagattgagaacctgcaggcccagtttgagctgcgggccttccacatccggggggagcacgccatgatcacagcccggctggaggagaccatcgagaacctgaagcatgagctggagcaccgctggaggggcggctgtgaggagaggaaggatgtgtgcatcagcacagatgatgactgcccccccaagaccttcagaaatgtgtgtgtgcagacagaccgggagaccttcctgaagccctgtgagagcgagagcaagaccaccaggagcaaccagctggtgcccaagaagctgaacatcagcagcctgagccagctgagccccccaaatgaccacaaggacatccacgccgccctgcagcccatggagggcatggccagcaaccagcagaaggccctgcccccacctccagccagcatccccccacctccacccctgcccagcggcctgggcagcctgagccctgccccacccatgcctcctgtgtctgctggcccccccctgcccccacctcctcctcctcctccacccctgcccccacccagcagcgctggccccccacctcctcctcctcctccacccctgcccaacagccctgccccacccaaccctgggggccccccaccagcccctcctcctcctggcctggcccctcctcctcctcctggcctcttcttcggcctgggcagcagcagcagccagtgccccaggaagccagccatcgagcccagctgccccatgaagcccctgtactggacccgcatccagatcagtgacaggagccagaatgccacccccaccctgtgggacagcctggaggagccagacatccgggaccccagcgagtttgagtacctgttcagcaaggacaccacccagcagaagaagaagcccctgtctgagacctatgagaagaagaacaaggtgaagaagatcatcaagctgctggatggcaagaggagccagacagtgggcatcctgatcagcagcctgcacctggagatgaaggacatccagcaggccatcttcaacgtggatgattctgtggtggacctggagaccctggccgccctgtatgaaaatagagcccaggaggatgagctggtgaagatcaggaagtactatgagaccagcaaggaggaggagctgaagctgctggacaagccagagcagttcctgcacgagctggcccagatccccaactttgctgagcgggcccagtgcatcatcttccgcagcgtcttcagcgagggcatcaccagcctgcacaggaaggtggagatcatcacccgggccagcaaggacctgctgcacgtgaagtctgtgaaggacatcctggccctgatcctggcctttggaaactacatgaatggaggcaacagaacccggggccaggctgatggctacagcctggagatcctgcccaagctgaaggatgtgaagagccgggacaatggcatcaacctggtggactatgtggtgaagtactacctgcgctactatgaccaggaggccggcacagagaagtctgtgttccccctgcctgagccccaggacttcttcctggccagccaggtgaagtttgaggacctgatcaaggacctgaggaagctgaagaggcagctggaggccagcgagaagcagatggtggtggtgtgcaaggagagccccaaggagtacctgcagcccttcaaggacaagctggaggagttcttccagaaggccaagaaggagcacaagatggaggagagccacctggagaatgcccagaagagctttgagaccaccgtgcgctacttcggcatgaagcccaagtctggagagaaggagatcacccccagctatgtgttcatggtgtggtatgagttctgcagcgacttcaagaccatctggaagcgggagagcaagaacatcagcaaggagcggctgaagatggcccaggagagcgtgtccaagctgaccagcgagaagaaggtggagaccaagaagatcaaccccacagccagcctgaaggagcggctgcggcagaaggaggcctctgtgaccaccaactag

SEQ ID NO: 97645 - DNA, 4260 bp, Artificial Sequence
  derived and/or modified sequence
atggagggcacccactgcaccctgcagctgcacaagcccatcaccgagctttgttacatctcattttgcctgcccaaaggggaggtccggggtttttcctacaaaggtaccgttactctggatagaagcaataaggggttccacaactgctatcaggtacgtgaagaatccgatatcatttccttgtcccaggaacccgacgaacaccccggcgatatcttcttcaagcagactccgacaaaggatatcctgaccgaactgtacaaactgacaactgaaagggagagattactgactaatttgctcagttcagaccacattctgggtattacgatgggaaaccaggagggcaagttacaggagctctctgtgtctcttgcgccagaggacgactgctttcagtctgccggcgactggcagggagaactacccgtgggaccactgaacaagcgatctacacatgggaacaaaaagcctagaagaagctctggccgccgtgagagttttggagcccttccgcagaagagaacaaaacgcaaaggtaggggaggtcgcgaatcggctccgttgatgggcaaagataagatctgctcttcccatagcttgcccctttcccgcacccgacctaatctgtgggttctcgaggagaagggcaatctgctcccaaacggcgctctggcttgttccctgcagcgccgcgagtcatgtcccccagatattcccaaaactccagatactgacctgggttttggatcattcgagaccgcatttaaggacaccggtctgggacgcgaagtgctgccaccagattgctcctctacagaggctggcggcgatggaatacggagacccccctccggcctggaacaccagcagacaggcttatccgagtcacaccaggaccccgaaaagcatcccgaggccgaaaaggacgagatggagaagccagccaagagaacgtgtaagcagaaacctgtgtctaaggttgttgccaaggtgcaggatttaagcagccaggtgcagcgggtggtgaaaacacactccaagggaaaagagaccatagcaattcggcctgccgcccacgcggagttcgtgcctaaggccgatcttctgacgctccccggagcagaggctggggcccatggcagcaggaggcagggaaaggaaaggcagggcgaccgctcttcccagtcccctgcaggtgagacagcatctatcagctctgtatcggcctcagctgaaggagcggtgaataaagtgccactgaaggtcatcgagagcgaaaagctggatgaagcgcccgaggggaaacggcttgggttccccgtgcatacctcagtcccacatactaggccagagactcgtaataagcgccgagcggggctgccactcggcggtcataagagtctgtttcttgacttgccccataaagtcggaccagactcatctcagccacgtggtgacaagaaaaaaccatccccccctgctccagcggccctgggcaaagtgttcaataactccgcgagtcaatcctcaacccacaagcagacttccccggtgcccagtcctctcagcccacgcctcccatctccacagcagcaccaccgcatcctgaggctgcccgccctccccggcgagagggaggctgcattgaatgacagtccctgtaggaagtcccgtgtctttagcggctgcgtgagcgcagacactctggagccgccttcttcggcaaaggtcaccgagaccaagggcgcctcccctgccttccttagggctggacagcctcgcctggtcccaggtgagacactggagaagtctctcggtccaggtaaaacaaccgccgagcctcaacaccagtcccccccaggcatctccagtgaggggttcccttgggatggtttcaacgagcagacacccaaagacctgcctaaccgagacgggggcgcatgggtgctcggctaccgcgctggccccgcttgcccatttctactgcacgaggaaagggaaaaatccaacaggtcagaactgtacttggatttgcatcccgaccattctctgaccgagcaggatgaccgcacgcccgggcggttacaggctgtttggccaccccccaagacaaaagataccgaggaaaaagtagggctcaagtacacagaggccgaataccaggccgcgattctacacctgaagagggaacataaggaggagattgagaatctgcaggctcagttcgaactgcgggcctttcacattaggggtgaacatgcaatgataacggctaggttggaggagacgattgagaatctaaagcacgaattggagcaccgatggaggggcggctgtgaagagagaaaagacgtctgtatttccacagatgatgattgcccgccaaaaaccttcagaaatgtgtgtgtgcagactgatagggagacatttcttaagccatgtgaatcagaatcaaagaccactcggtcaaatcagctagtccctaagaaacttaatattagctcactcagccaactgtccccccctaacgatcacaaggacatccatgctgctctgcaaccgatggaaggaatggccagcaaccagcagaaggcgttaccacccccccccgctagcattcctccccccccaccgctccctagtggacttggaagcctgtctccagcaccaccaatgccgccagtgagtgctggacccccactccctccaccccctcctcccccaccccccctgccacccccgtcctccgccggacccccccctcccccgcccccaccacctcttcctaactctccagcaccccccaaccccggcggacctccccctgcaccccccccccccggactggcccctcctcctccgccaggcttgtttttcggcctaggcagttcttcatctcaatgcccccgtaaaccagcaatcgaaccctcatgccctatgaagccactgtattggacccgcattcagatctcagatcggtcccaaaatgcgacaccaacgctgtgggactcactggaggagccggacattagagatccatccgaattcgagtacctgttctccaaagataccactcagcaaaaaaaaaagcctttgagtgagacctatgagaagaagaataaagtgaagaaaatcatcaaactcctcgatgggaagaggtcccagactgtcggaattctcatcagttcgctgcaccttgagatgaaagacatccagcaggccatttttaacgtggatgatagcgtggtggacctcgaaacactagccgcgctgtatgaaaacagagcgcaggaagatgagttagtcaaaatccgaaaatactatgagacatcaaaggaagaggagctcaagctattggacaagcccgagcaatttctacacgaactggctcagataccaaacttcgctgagcgagcccaatgtatcatcttccgcagcgtgttttccgagggcattacctccctgcatcggaaagtggagataatcactagagccagcaaggatcttctgcacgtgaaaagtgtaaaagatatactggcactgatcctcgcattcggcaactacatgaacggggggaaccggacgagagggcaagccgacggttacagtctggaaattcttcccaagctaaaggatgtcaagagcagagacaacggcattaatctcgttgattatgtagtcaagtactatttacggtactatgaccaggaggcaggaaccgagaaaagcgtgtttcctctgcccgagccacaggactttttcctggccagccaagtcaagttcgaagacctgatcaaggacttgcgtaagctgaaaagacagctcgaggccagcgaaaagcaaatggttgtggtctgcaaggagtctccaaaagaatatcttcagccctttaaagacaagttagaagagttctttcagaaggcaaagaaggagcacaagatggaagagtcgcatctggagaacgcccagaaatctttcgaaactaccgtcagatattttggaatgaagcccaagagcggagagaaggagattaccccttcttatgtctttatggtttggtacgaattctgtagtgacttcaagaccatctggaagcgggagagcaaaaatattagcaaggagcggttaaaaatggcccaggagtctgttagcaagctgacttctgagaaaaaagtggaaactaagaagatcaatcccactgcctctctcaaggagagactgaggcagaaggaggcgtcagtcacaacaaactag

SEQ ID NO: 97646 - DNA, 4260 bp, Artificial Sequence
  derived and/or modified sequence
atggaggggactcactgtaccctgcaactccacaagcccatcactgagttgtgctacatcagcttttgtctgcccaaaggagaggtgcgcggtttctcatataaagggaccgtgaccttagatcgttctaacaaaggcttccacaactgctatcaggtaagagaggaaagcgatattatcagcctgtctcaggagccggacgagcatcccggagatatatttttcaagcagacccccaccaaggatatcttgaccgaactttacaaactgacaacagagcgggagcggctgctcaccaatctgctcagttctgaccacatcctgggcatcacaatgggtaaccaggaaggcaaacttcaggagctgtctgtgtcactagccccagaggatgactgcttccagagcgccggtgattggcagggcgaattgcccgtaggccctctcaacaaacggagcacacacggcaacaagaaacctcggcgtagttccggcagaagagaaagtttcggtgccctgccccagaagagaaccaagagaaaagggaggggcggtcgagaatcagcccctttgatgggaaaagataaaatttgctcttcacacagcttgccacttagccgcacccggcctaacctgtgggttctggaagaaaaaggaaatctgctgcctaacggcgcactggcctgttcattacagagacgcgaatcttgcccgccagacataccaaaaactcctgacacagatctggggttcggctccttcgagacagcattcaaggacaccggattggggagagaagtgctgccccctgattgcagtagtaccgaggccggtggagacggaatccgtcgtccaccatctggcttagaacaccagcagacaggactgtcggagtcacatcaggacccggaaaagcacccggaggctgaaaaagacgagatggagaagcctgccaagcgcacctgtaagcagaaaccggtttctaaggtggtggctaaggtgcaagacttgagcagccaagtccaacgagtcgtgaagacccattcaaagggtaaggagacaatcgccatccggcctgccgctcacgccgagtttgtccctaaggccgacctgttgactctccccggagccgaggccggtgcccacggatctcggagacaagggaaggaaaggcagggcgatagaagttcacagagcccagcgggagaaactgccagcatctcatccgtgtctgcatcagcagaaggcgctgtcaacaaggtccctctgaaagttattgaaagtgagaagttggatgaggccccagagggcaaacgcctagggtttcctgtacatacctctgtgccccacactcgacccgagactaggaataagaggcgcgctgggctcccactgggagggcataaaagtcttttcctggacctcccccataaggttggcccagatagtagccaacccagaggcgacaagaagaagccctcaccccctgcccctgctgccctgggaaaggtgtttaataattcggctagtcagtcgtctacccataagcaaacctcacctgtaccatctcctctgtcccctcgacttccgtctccccagcaacaccaccgaatattgagattgcccgctctccccggagagcgcgaggccgctcttaatgatagtccctgtcgaaagagtcgcgtgttcagtgggtgtgtatctgccgataccctggagcccccttcgagtgctaaggttacagagaccaagggcgcttcccctgcttttctcagagccggacagccaaggctagtccccggtgagactctcgagaagtcccttgggcctggaaagaccactgctgaaccgcaacaccagagcccccctggcatctctagcgaaggattcccgtgggatggcttcaatgagcagactccaaaagacttgcctaaccgcgacggtggtgcatgggttttggggtaccgtgcaggaccagcctgccctttccttctacacgaagagagagagaaaagtaaccgaagcgagctgtatttggacctccaccctgaccacagcctgaccgagcaagatgaccggacaccaggcaggctacaggctgtctggcctccacctaaaactaaagatactgaagagaaggtcggactcaaatacacggaggccgagtaccaggccgctatcctccatctgaaacgggagcataaggaggagatcgaaaatctccaggctcagttcgagctgcgagcgttccacatacggggtgagcacgcgatgattaccgcgagactcgaggagacaatcgagaacctgaagcacgagctggaacatagatggagaggcggttgtgaggagcgcaaggacgtctgtattagtaccgatgacgattgtcccccaaaaacatttcggaacgtgtgtgtccagactgatcgcgagacatttctcaagccctgcgaatccgaaagtaagacgaccaggtccaaccaactggtaccaaaaaagctcaatatctcatcattgagtcagttgagtcctccaaacgatcacaaagatattcatgccgcactgcagcctatggaggggatggcatccaaccaacaaaaagcgcttccacctcccccagcttccattcctccgcctccgcctctaccttccggactgggtagcttgtcccccgcaccccctatgcctccagtgagtgctggtcctcctctgccccctcctccaccgcctccacctccccttccacccccttcttccgcagggcctcctccccctcctccacctccaccactcccgaacagccccgctccccctaaccccggaggaccacccccagcgccacccccacctgggctcgctccccctcctccaccagggttgttctttgggctgggctctagctcatctcagtgtcccaggaagcctgcaatagaaccatcatgccccatgaagcctctgtattggactagaattcagatctcggacagatcacaaaacgcgactccaactctttgggacagcctggaagaacccgacattcgagatcctagtgagttcgagtatctgttctccaaggacactacgcaacagaagaagaagcctctgagcgaaacatatgagaaaaaaaataaagtgaagaagatcatcaaactcctggatggcaaacgaagccagacagtgggaatacttatctcatctctccacctagagatgaaggatatacagcaggccatatttaatgtggacgactccgtcgtggatttggaaaccctggcggctctgtacgagaatcgggcacaggaggatgagctggtgaagatcagaaaatattatgagactagcaaggaggaagagctgaaacttctcgataagcccgagcagtttcttcatgagctggcacagattccgaactttgcagaacgggctcagtgtatcatcttcagaagcgttttctctgaaggcatcacctccctgcacaggaaagtggagatcatcactcgcgcttccaaagaccttttgcacgtcaagtctgtaaaggatatactagcgctaatcctcgcattcggcaattatatgaatggcggaaaccgaacccggggacaggcagatggttactcactggagatcctgccaaaattgaaggatgtcaagtctagggataacggaatcaatctggttgactatgtcgtgaagtattatttgagatactacgaccaggaggccggtaccgagaaatccgtgtttcctttaccagaacctcaggactttttcctggcaagccaggtgaaattcgaagatcttatcaaggacctaaggaaacttaagagacagctagaggcctctgagaaacagatggtcgtggtgtgtaaggaatctccaaaggaatacctgcagccgtttaaagacaagctggaagagtttttccaaaaggccaaaaaggaacataaaatggaagaatcacacctggaaaatgcgcagaaatctttcgagacgactgtgaggtatttcggcatgaagcctaaatctggcgaaaaggaaatcaccccttcttatgtatttatggtgtggtacgagttttgctcagactttaaaaccatttggaaaagagaaagcaagaatatttcaaaggaacgccttaagatggctcaggaatccgtctcaaagctcacgtccgagaagaaggttgagaccaagaaaattaaccccactgctagtctgaaggagcgcctgcgtcaaaaagaggcaagcgttacgacaaactag

SEQ ID NO: 97647 - protein, 662 aa, Artificial Sequence
  derived and/or modified sequence
MEGTHCTLQLHKPITELCYISFCLPKGEVRGFSYKGTVTLDRSNKGFHNCYQVREESDIISLSQEPDEHPGDIFFKQTPTKDILTELYKLTTERERLLTNLLSSDHILGITMGNQEGKLQELSVSLAPEDDCFQSAGDWQGELPVGPLNKRSTHGNKKPRRSSGRRESFGALPQKRTKRKGRGGRESAPLMGKDKICSSHSLPLSRTRPNLWVLEEKGNLLPNGALACSLQRRESCPPDIPKTPDTDLGFGSFETAFKDTGLGREVLPPDCSSTEAGGDGIRRPPSGLEHQQTGLSESHQDPEKHPEAEKDEMEKPAKRTCKQKPVSKVVAKVQDLSSQVQRVVKTHSKGKETIAIRPAAHAEFVPKADLLTLPGAEAGAHGSRRQGKERQGDRSSQSPAGETASISSVSASAEGAVNKVPLKVIESEKLDEAPEGKRLGFPVHTSVPHTRPETRNKRRAGLPLGGHKSLFLDLPHKVGPDSSQPRGDKKKPSPPAPAALGKVFNNSASQSSTHKQTSPVPSPLSPRLPSPQQHHRILRLPALPGEREAALNDSPCRKSRVFSGCVSADTLEPPSSAKVTETKGASPAFLRAGQPRLVPGETLEKSLGPGKTTAEPQHQSPPAFHWDLQQHFQEPVIRTVSISCASNLIKEEAGKGKESRSG

SEQ ID NO: 97648 - DNA, 1989 bp, Artificial Sequence
  derived and/or modified sequence
atggagggcacccactgcaccctgcagctgcacaagcccatcaccgagctgtgctacatcagcttctgcctgcccaagggcgaggtgagaggcttcagctacaagggcaccgtgaccctggacagaagcaacaagggcttccacaactgctaccaggtgagagaggagagcgacatcatcagcctgagccaggagcccgacgagcaccccggcgacatcttcttcaagcagacccccaccaaggacatcctgaccgagctgtacaagctgaccaccgagagagagagactgctgaccaacctgctgagcagcgaccacatcctgggcatcaccatgggcaaccaggagggcaagctgcaggagctgagcgtgagcctggcccccgaggacgactgcttccagagcgccggcgactggcagggcgagctgcccgtgggccccctgaacaagagaagcacccacggcaacaagaagcccagaagaagcagcggcagaagagagagcttcggcgccctgccccagaagagaaccaagagaaagggcagaggcggcagagagagcgcccccctgatgggcaaggacaagatctgcagcagccacagcctgcccctgagcagaaccagacccaacctgtgggtgctggaggagaagggcaacctgctgcccaacggcgccctggcctgcagcctgcagagaagagagagctgcccccccgacatccccaagacccccgacaccgacctgggcttcggcagcttcgagaccgccttcaaggacaccggcctgggcagagaggtgctgccccccgactgcagcagcaccgaggccggcggcgacggcatcagaagaccccccagcggcctggagcaccagcagaccggcctgagcgagagccaccaggaccccgagaagcaccccgaggccgagaaggacgagatggagaagcccgccaagagaacctgcaagcagaagcccgtgagcaaggtggtggccaaggtgcaggacctgagcagccaggtgcagagagtggtgaagacccacagcaagggcaaggagaccatcgccatcagacccgccgcccacgccgagttcgtgcccaaggccgacctgctgaccctgcccggcgccgaggccggcgcccacggcagcagaagacagggcaaggagagacagggcgacagaagcagccagagccccgccggcgagaccgccagcatcagcagcgtgagcgccagcgccgagggcgccgtgaacaaggtgcccctgaaggtgatcgagagcgagaagctggacgaggcccccgagggcaagagactgggcttccccgtgcacaccagcgtgccccacaccagacccgagaccagaaacaagagaagagccggcctgcccctgggcggccacaagagcctgttcctggacctgccccacaaggtgggccccgacagcagccagcccagaggcgacaagaagaagcccagcccccccgcccccgccgccctgggcaaggtgttcaacaacagcgccagccagagcagcacccacaagcagaccagccccgtgcccagccccctgagccccagactgcccagcccccagcagcaccacagaatcctgagactgcccgccctgcccggcgagagagaggccgccctgaacgacagcccctgcagaaagagcagagtgttcagcggctgcgtgagcgccgacaccctggagccccccagcagcgccaaggtgaccgagaccaagggcgccagccccgccttcctgagagccggccagcccagactggtgcccggcgagaccctggagaagagcctgggccccggcaagaccaccgccgagccccagcaccagagcccccccgccttccactgggacctgcagcagcacttccaggagcccgtgatcagaaccgtgagcatcagctgcgccagcaacctgatcaaggaggaggccggcaagggcaaggagagcagaagcggctag

SEQ ID NO: 97649 - DNA, 3930 bp, Artificial Sequence
  derived and/or modified sequence
ggactggagcgcagcatccttcgaggctgcagccgccacggctgttgccgtaagcaatcctcctgcctcagcctcccgagtagctgggactcgggaccagcctcccgagtattggtcagatgacatttaccatcaccgttttcttcttctttcatcatcatcatcatcaccattgccactaccaccacctccaaggccactaccaccacagcatctctgttcctccatcagagctcttcaagttctgtaaaggcagattctctaaaggcatgcctggtggcatcacgtttttcacatctccgcatctggaccctgcccaagcgaaggctgatctaggcagtctcattgctggagatgactgtcagctgctttctctgcatagccaccatcacatgcctcaccactggagcctgggaagcctgaccacaaaccggcatctccaaggcatgaataattaggtaggcataatggaaggcactcattgtaccctccaattgcataagcccattacggaactctgctacatcagcttctgtcttccaaagggggaagtcagaggattttcatacaagggcactgtaactctagacagatccaataaaggttttcataactgctaccaagtcagggaggagtcagacatcatcagcctcagccaggagccggacgaacatccaggcgacatatttttcaagcagactcccacgaaagacattctaactgagctgtacaaactcacaacagagagggagagactgctaaccaatctcctgagctcagaccacatcctggggatcacgatggggaaccaggaggggaagctgcaagagctgtccgtgagcctggcccccgaggatgactgtttccagagtgctggtgactggcagggagagctccccgtgggccctctcaataagaggagcacccacgggaacaaaaagcctcggaggtctagtggaaggagagagagctttggggcccttccacagaagaggaccaaaagaaaagggcgtggaggccgagaatcagctcctctgatgggcaaggacaagatctgttccagccactcccttcctctttctagaacaaggcctaacctttgggtactagaggagaaaggaaatctgctcccgaatggggcacttgcctgctccctgcagaggagagagagctgccccccagatattcccaagacgccagacacagaccttggctttgggagctttgagacggctttcaaggacactgggcttggaagagaagtgctgccccctgactgcagctccacagaggcaggaggggatggcattcggaggccgccgagcgggctggagcatcagcaaacaggtttgtctgaaagtcaccaggaccctgagaagcatccagaggcagaaaaggatgagatggagaagccggctaagcggacttgcaagcagaaacctgtctccaaagtggtggccaaagttcaggacctgtcctcccaggtacaaagagtagttaaaacgcattctaagggtaaggagacgattgccattcgcccagcagcccacgctgagtttgtacccaaagccgacttgctcaccctcccgggagctgaggctggggctcatggctccaggcggcagggcaaggagcggcaaggggataggtcatcgcagtcgccagccggggaaacagcctccatttctagtgtgtcggccagtgccgagggggccgtgaacaaggtccccctgaaggtgatagagagtgagaagttagatgaagcccctgaggggaaaagactgggcttccctgtccacacgagtgtccctcacactcgcccagaaacgagaaacaagaggagagccgggttgccccttggtggccacaagtccttgtttctggatctgccccacaaagtaggtcctgactcctcacaacccagaggtgataagaagaagccatccccaccagcaccggcagctcttggcaaggtgtttaataattcagcctcgcagtccagcacacacaaacagacgtcacctgttccctcgcctctgtctccaaggctccccagccctcagcagcatcacaggatcctccggctccctgcattgcctggtgagagggaagctgctcttaatgactctccttgtagaaagagccgtgtcttctctgggtgcgtctctgctgacaccttggagccaccatcctctgcaaaggtcacggagaccaaaggagccagcccggccttcctcagagcaggccaacctcggttggtgcctggggaaactttggaaaagagcttggggccagggaagaccacagctgagccccagcaccagtcacctccagccttccattgggatcttcagcagcactttcaggaaccagtcataagaactgtaagcatctcctgtgcttctaaccttataaaagaagaagctggaaaagggaaggagagtagaagtgggtaagagctttttttgatatgggtaacttctctactgtggagacttcctatagggcctccagccattacctcctattggccctactttgaaaggcatgagggagggagttccccagatagtacctttgatttgtatcctctgtctagttcccttttctctcttgattttccctttcctgtcgctgtgagtcctctttatattctgaacccttcagtgactccctgcagctgggaagcccatacagggagaagtttcctgcttccagctacctttgtctttcacttcatttctcttcccacctaaacccagaagagggctcagagagttgccagcagtccagaaagaggggtgaataattcatttaccatcacactacagtgtccctttatctgaacccaactcccacctttctcccaggttagctattaaccagattaagtttatggtctgtggacatttatttcctgtggaaataacatctaggtatttttattgaagtgatgtcattaagattattgaaagctctcattaactgcttaagaaagagattaagtctggcaaaagtaatcagatctgtttccagttggaagactcttcaatgttagaggcaagtagtaattcccaggaaccagtgaaacccgcttatccttgttacaagactaagcagttaaagctgacattaccattcatgcaggatgtagcataaggatgtcacagaggccagcgatgcaccttctgttgggtttgtaatttcttaacttctcatttcaaggatgatgcatgggaatctccattatcaccacatagtggtgataaaatagagaatatactaacaagaactggtagtcaggtttttcttctcctgcctcctcccaccaccaacctggagattggttttatagtattttatttggcgggtggagactgatgtggaatgttcccaagcctttgtggagtatggtcttcccccaaaccttgaggaactctagttgtgctagcctgcaaagcagtgtccttggagcttggtgctaggattcctttctgttttgcttgctttcatttacctttgattcaaagtaaacccttttagtgccagaagaatcacagggagcttggctcaccatacttgggaaatgcccaatctttagtatgctcttgagtaatcctgtggttgttttcctttgactgaagtcactgatgtggtgatggaagcatatgctccaggcatagttcttcctgatattgagaactgagaatctcttgatcaattcttgtgcccatgaaaatatgtaattaatgtcaacttattaagagttaagaggcatacatgaaataaattttatttacatgtgtaaacccctaatactactgtcaaagctttgattgtctctgtggatatacattatgggaagtaaatataaactcttcccatattaatattaaggtttgatgcaattccaataaaattgtaaagaag

SEQ ID NO: 97650 - DNA, 1989 bp, Artificial Sequence
  derived and/or modified sequence
atggaagggacgcattgcacactgcagctgcataaacctattacggaactgtgctatatctcattctgtctgcctaaaggtgaggtgcgtggcttctcctacaaaggaacagtcactctggacaggagcaacaaagggttccacaactgttatcaagtgagggaggaaagcgacattattagcctgtcccaggagccagacgaacatcctggagacattttcttcaagcagactccaacaaaagatatccttacagagctgtataagctgaccaccgagcgggaacggctgctgactaatctgttatcctcagaccatatcctggggattacaatgggcaaccaagaagggaagctacaggagctcagcgtgagtctggcccctgaagatgattgcttccagagtgctggggattggcaaggagagctgcctgtggggcctctcaataagagatcaacccatgggaataagaaacccaggagatcaagcggacggcgtgaaagctttggggcccttccccaaaagcgcaccaagcggaagggaaggggcggcagagagtccgctcccttaatgggaaaggacaagatctgtagtagtcactctctcccactgagcaggactcggcctaacttgtgggtccttgaagaaaagggcaatctgttgccgaatggggccctcgcgtgctcactgcaaagaagagagagctgtccaccggacattccaaagactcctgacacggatctgggtttcgggtcgttcgaaacagcttttaaggataccggtcttggtcgtgaagtgcttcccccggactgttcatctacagaggcaggaggggacggaattcgccggccgccaagcggactagagcatcagcagacgggcctttcagaatcacatcaggaccctgaaaaacacccagaagccgagaaggatgagatggagaagcccgccaagcggacttgtaagcagaaacccgtgagtaaagtggtggccaaggtgcaggacctgagctcgcaggtgcagagggtcgtcaaaacccacagtaaaggaaaggagacaatagccatacggccagctgctcacgccgagtttgttcccaaggccgatttgctgaccttgcctggcgccgaagccggggctcatgggagtaggcggcagggcaaagagcggcaaggggatcgctcgagtcagagtccagctggggaaaccgcctctatatcatccgtgagcgctagtgctgaaggagccgtgaataaagtcccattaaaagtcatagagtccgagaaactcgacgaagccccagaggggaaaagactggggttcccagtgcataccagcgtcccacatacccgaccggagacccgcaacaagcgccgcgccgggctcccattgggcgggcacaaatctctgttcttggacctccctcacaaggtcgggcctgactcctcccagcccaggggcgacaaaaagaaacctagcccccccgcaccagccgccctcggaaaggtattcaacaatagcgcctcacaatcctcgacgcataagcagacatccccagttccaagccctctctcgcctaggcttccaagcccccagcaacaccaccgtattctccgacttcccgccttgccgggcgaacgggaagccgccctgaatgacagcccctgccgcaagagccgcgtgttcagtggctgcgtctccgctgacaccttggagccccctagcagcgctaaggtgactgagacgaagggggccagccctgctttcttacgggctgggcagccgagactcgttcccggggagacgctggagaagagcctggggcctgggaaaaccactgccgagccccagcatcaatcccccccggcctttcattgggatcttcagcagcacttccaagaaccagttattaggacagtcagtattagctgtgcttccaatctgatcaaagaagaggctggcaagggaaaggaaagcagaagcggatag

SEQ ID NO: 97651 - DNA, 1989 bp, Artificial Sequence
  derived and/or modified sequence
atggagggcacccactgcaccctgcagctgcacaagcccatcacagagctgtgctacatctccttctgcctgcccaagggggaggtgcggggcttctcctacaagggcaccgtgaccctggacaggagcaacaagggcttccacaactgctaccaggtgcgggaggagagtgacatcatcagcctgagccaggagccagatgagcaccctggggacatcttcttcaagcagacccccaccaaggacatcctgacagagctgtacaagctgaccacagagcgggagcggctgctgaccaacctgctgagcagtgaccacatcctgggcatcaccatgggcaaccaggagggcaagctgcaggagctgtctgtgtccctggccccagaagatgactgcttccagagcgctggggactggcagggcgagctgcctgtgggccccctgaacaagaggagcacccacggcaacaagaagccccggcgcagcagtggaagaagagagagctttggagccctgccccagaagaggaccaagaggaagggccggggcggccgggagagcgcccccctgatgggcaaggacaagatctgcagcagccacagcctgcccctgagcaggacccggcccaacctgtgggtgctggaggagaagggcaacctgctgcccaatggagccctggcctgcagcctgcagaggcgggagagctgccccccagacatccccaagaccccagacacagacctgggcttcggcagctttgaaacagccttcaaggacaccggcctgggccgggaggtgctgcccccagactgcagcagcacagaggccggaggagatggcatccggcggccccccagcggcctggagcaccagcagacaggcctgtctgagagccaccaggaccctgagaagcaccctgaggccgagaaggatgagatggagaagccagccaagaggacctgcaagcagaagcctgtgtccaaggtggtggccaaggtgcaggacctgagcagccaggtgcagagggtggtgaagacccacagcaagggcaaggagaccatcgccatccggcctgctgcccacgccgagtttgtgcccaaggctgacctgctgaccctgcccggggctgaggccggggcccacggcagccggcggcagggcaaggagcggcagggcgacaggagcagccagagccctgctggggagacagccagcatcagctctgtgtctgccagcgctgagggcgctgtgaacaaggtgcccctgaaggtgattgaaagtgagaagctggatgaggcccctgagggcaagaggctgggcttccctgtgcacacctctgtgccccacaccaggcctgagaccaggaacaagaggcgggccggcctgcccctgggcggccacaagagcctcttcctggacctgccccacaaggtgggccctgacagcagccagcccaggggggacaagaagaagcccagccccccagccccagctgccctgggcaaggtgttcaacaacagcgccagccagagcagcacccacaagcagaccagccctgtgcccagccccctgagcccccggctgcccagcccccagcagcaccaccgcatcctgcggctgcctgccctgcccggggagcgggaggccgccctgaatgacagcccctgcaggaagagcagggtcttcagcggctgtgtgtctgctgacaccctggagccccccagcagcgccaaggtgacagagaccaagggggccagccctgccttcctgcgggccggccagccccggctggtgcctggagagaccctggagaagagcctgggccctgggaagaccacagctgagccccagcaccagagccccccagccttccactgggacctgcagcagcacttccaggagcctgtgatcagaacagtgtccatcagctgtgccagcaacctgatcaaggaggaggccggcaagggcaaggagagccgctctggatag

SEQ ID NO: 97652 - DNA, 1989 bp, Artificial Sequence
  derived and/or modified sequence
atggagggcacccactgcaccctgcagctgcacaagcccatcaccgagctgtgttacataagcttctgtctacctaaaggggaggtgaggggctttagttacaagggaaccgtaacgctggatagaagtaacaaagggttccacaactgctatcaggttcgtgaggaaagcgacatcatctcattatcgcaggagccggatgaacacccaggagatattttctttaaacagacgcccaccaaggatatccttacggagttatataagctgaccaccgagagggagaggcttctgactaacctgctgagctcggatcatattctgggtattaccatggggaatcaggagggcaaacttcaagagctgtctgtgtcactagcacctgaagacgactgctttcagagcgcaggtgattggcaaggcgagttgccagttggcccactcaataagcgctctacacacggtaacaagaaaccccggcggtcgtccggccggcgggaatcttttggagccctgccccagaagcgaacgaagaggaagggaagaggagggcgcgagtcagcccctctcatgggcaaagacaaaatatgttcctcacacagtttgcccttgtcccgcactcggcctaatctgtgggtgttggaagaaaagggaaatctgctgccaaatggagctctggcctgttcattgcagcggcgggaatcctgtccgcccgacattccgaaaacccccgatacagacctcggattcggatccttcgagaccgcattcaaggacacggggctaggacgtgaagtgcttccgcctgattgcagttcaactgaagcaggcggagacggtatcagaagaccgccatcagggctggaacatcagcaaacgggtctgtcggagagtcaccaagacccggaaaagcacccggaggccgaaaaagacgagatggaaaaacctgctaaacggacttgtaagcaaaaaccggtctcaaaagttgtggcaaaggtccaggatctgtcaagtcaggttcaacgggtcgtgaaaacccattctaagggcaaggagacgatcgctattaggccagcagcacatgccgagtttgtcccaaaagccgacttgctcaccttgcctggggccgaggccggcgctcacggatcaaggagacagggaaaggagcgccagggcgacaggtctagtcagtctcccgccggagagaccgccagcatttcttctgtttccgcttctgcagagggggccgttaacaaagtccccctcaaagtgatcgagtctgaaaaactcgatgaggcacccgaaggcaaaagattgggctttccagtgcacacttctgtgccacatacacgccctgagacacgcaataaacgccgcgcagggctgccattaggaggtcacaagagtctgtttctggacctgccgcacaaggttgggcccgacagttcccagccccggggggacaagaaaaagccatctcccccagcaccggccgctctgggcaaagtgtttaataacagtgcaagtcagagctccacccacaagcagacttctccagtgccttctcccctgtctccccggctgccatcacctcagcagcaccataggatactcagattgcctgctctcccaggggagagagaagctgcactgaacgattccccatgccggaagtcccgagtcttttcaggctgtgtgtctgccgacaccctggagcccccctccagtgctaaagtgactgagacaaagggggcgtcacccgccttcctcagggctggacaaccaagattggtgccgggggagactttagagaagtcacttgggccgggtaaaaccacagctgaacctcagcatcaatctccgcctgcatttcactgggatctccaacagcactttcaggagcctgtgatccgtactgtgtcaatctcgtgcgcctcgaacctgattaaggaggaggccgggaagggaaaggagagtcgttcagggtag

SEQ ID NO: 97653 - DNA, 1989 bp, Artificial Sequence
  derived and/or modified sequence
atggagggcactcactgtactcttcagcttcataaaccgatcacagaactttgctatataagcttttgcttgccaaagggagaggttagaggatttagctacaaagggaccgtgacactggatcgcagcaataaggggttccacaactgttatcaggtgcgggaagagtccgatatcataagcctgagccaggaaccagacgaacaccctggggacattttcttcaagcagacgcccactaaggacatcctaaccgagctgtacaaactgacaaccgaacgggagcgcctgctcaccaatctactgtcctccgaccacatactggggatcactatgggcaaccaggagggcaaactgcaggagctgagcgttagcctggccccagaagacgattgctttcaatcagcaggtgattggcagggggagctgcccgtgggacccctgaataaacgctctacacatggaaacaagaaacctcggagatcgagcggtcgcagagaaagctttggggcattgccacagaaacgaacaaaacgaaaggggagaggaggccgtgaatctgcccctctgatggggaaagacaagatctgttcctctcacagcctgccactaagtcgcactagaccaaacctctgggttctagaggaaaaggggaacctgctgcctaatggagctttagcttgttcgctgcagcggcgagaatcatgcccacccgatattccaaagacccccgacaccgatctggggttcggatcatttgaaaccgccttcaaggacactggcctgggcagagaagtcctccctcccgattgtagcagcacagaagcaggcggagatgggatacggagacctccctctggcttggagcatcaacagacgggactgtccgagtctcatcaagatcctgaaaaacatcccgaggctgaaaaagacgagatggagaagcccgcaaagagaacatgcaaacagaaacccgtgagcaaagtggtggcaaaagtccaggatttgtcttcccaggtgcagcgggtcgtgaagacacattcaaaggggaaggaaacaatagcaattcgtcccgcagcgcatgctgagtttgttcctaaggccgacctgctgaccctgcccggtgccgaggctggagctcacggttccaggcggcagggaaaagagagacagggcgacagatcaagccagagtccggctggcgagacagccagtatatcgtccgtgagtgcctctgccgagggtgccgtaaacaaggtccccctgaaagtaatagaaagtgagaaattggatgaggcacccgagggaaagcgtctgggttttcccgtccatacctcagtgccacatacacggccagagacgcggaacaaacgcagggcagggcttccactaggcggtcataaaagcctatttttggacttgccccacaaagtgggacctgatagcagccagccacgaggcgataagaaaaaacccagtcctccagctcccgctgccctgggcaaagtctttaataatagcgccagccagagcagtacacacaagcagaccagtccggtgccctccccattgtcgcctcgcctcccgtctccacaacagcaccaccggatcctaagactccccgcactaccaggcgaaagggaagcggcactgaacgatagcccatgcagaaagtcccgggtgttcagtgggtgcgtaagtgccgatacgctcgagcctccctcatctgctaaggtgactgaaacaaaaggtgccagcccggcttttctccgcgcaggccagcctcggttagtgccgggagagacgctggagaaatcccttgggcctgggaagacaactgcagagccacaacaccagtcgcctccagcatttcactgggacctgcagcagcacttccaagagcccgtcatccggaccgtatccatctcctgtgcaagtaatttgattaaagaggaggctggaaagggaaaagagtcacgatcgggctag

SEQ ID NO: 97654 - protein, 437 aa, Artificial Sequence
  derived and/or modified sequence
MLFEGLDLVSALATLAACLVSVTLLLAVSQQLWQLRWAATRDKSCKLPIPKGSMGFPLIGETGHWLLQVFSKIFSHEALESYLPKIQLVIQDTLRAWSSHPEAINVYQEAQKLTFRMAIRVLLGFSIPEEDLGHLFEVYQQFVDNVFSLPVDLPFSGYRRGIQARQILQKGLEKAIREKLQCTQGKDYLDALDLLIESSKEHGKEMTMQELKDGTLELIFAAYATTASASTSLIMQLLKHPTVLEKLRDELRAHGILHSGGCPCEGTLRLDTLSGLRYLDCVIKEVMRLFTPISGGYRTVLQTFELDGFQIPKGWSVMYSIRDTHDTAPVFKDVNVFDPDRFSQARSEDKDGRFHYLPFGGGVRTCLGKHLAKLFLKVLAVELASTSRFELATRTFPRITLVPVLHPVDGLSVKFFGLDSNQNEILPETEAMLSATV

SEQ ID NO: 97655 - DNA, 1314 bp, Artificial Sequence
  derived and/or modified sequence
atgctgttcgagggcctggacctggtgagcgccctggccaccctggccgcctgcctggtgagcgtgaccctgctgctggccgtgagccagcagctgtggcagctgagatgggccgccaccagagacaagagctgcaagctgcccatccccaagggcagcatgggcttccccctgatcggcgagaccggccactggctgctgcaggtgttcagcaagatcttcagccacgaggccctggagagctacctgcccaagatccagctggtgatccaggacaccctgagagcctggagcagccaccccgaggccatcaacgtgtaccaggaggcccagaagctgaccttcagaatggccatcagagtgctgctgggcttcagcatccccgaggaggacctgggccacctgttcgaggtgtaccagcagttcgtggacaacgtgttcagcctgcccgtggacctgcccttcagcggctacagaagaggcatccaggccagacagatcctgcagaagggcctggagaaggccatcagagagaagctgcagtgcacccagggcaaggactacctggacgccctggacctgctgatcgagagcagcaaggagcacggcaaggagatgaccatgcaggagctgaaggacggcaccctggagctgatcttcgccgcctacgccaccaccgccagcgccagcaccagcctgatcatgcagctgctgaagcaccccaccgtgctggagaagctgagagacgagctgagagcccacggcatcctgcacagcggcggctgcccctgcgagggcaccctgagactggacaccctgagcggcctgagatacctggactgcgtgatcaaggaggtgatgagactgttcacccccatcagcggcggctacagaaccgtgctgcagaccttcgagctggacggcttccagatccccaagggctggagcgtgatgtacagcatcagagacacccacgacaccgcccccgtgttcaaggacgtgaacgtgttcgaccccgacagattcagccaggccagaagcgaggacaaggacggcagattccactacctgcccttcggcggcggcgtgagaacctgcctgggcaagcacctggccaagctgttcctgaaggtgctggccgtggagctggccagcaccagcagattcgagctggccaccagaaccttccccagaatcaccctggtgcccgtgctgcaccccgtggacggcctgagcgtgaagttcttcggcctggacagcaaccagaacgagatcctgcccgagaccgaggccatgctgagcgccaccgtgtag

SEQ ID NO: 97656 - DNA, 1346 bp, Artificial Sequence
  derived and/or modified sequence
atgctctttgagggcttggatctggtgtcggcgctggccaccctcgccgcgtgcctggtgtccgtgacgctgctgctggccgtgtcgcagcagctgtggcagctgcgctgggccgccactcgcgacaagagctgcaagctgcccatccccaagggatccatgggcttcccgctcatcggagagaccggccactggctgctgcaggtcttctccaagatcttcagccacgaggccctggagagttacctgcccaagatccagctggtgatccaggacacactgcgcgcctggagcagccaccccgaggccatcaacgtgtaccaggaggcgcagaagctgaccttccgcatggccatccgggtgctgctgggcttcagcatccctgaggaggaccttgggcacctctttgaggtctaccagcagtttgtggacaatgtcttctccctgcctgtcgacctgcccttcagtggctaccggcggggcattcaggctcggcagatcctgcagaaggggctggagaaggccatccgggagaagctgcagtgcacacagggcaaggactacttggacgccctggacctcctcattgagagcagcaaggagcacgggaaggagatgaccatgcaggagctgaaggacgggaccctggagctgatctttgcggcctatgccaccacggccagcgccagcacctcactcatcatgcagctgctgaagcaccccactgtgctggagaagctgcgggatgagctgcgggctcatggcatcctgcacagtggcggctgcccctgcgagggcacactgcgcctggacacgctcagtgggctgcgctacctggactgcgtcatcaaggaggtcatgcgcctgttcacgcccatttccggcggctaccgcactgtgctgcagaccttcgagcttgatggtttccagatccccaaaggctggagtgtcatgtatagcatccgggacacccatgacacagcgcccgtgttcaaagacgtgaacgtgttcgaccccgatcgcttcagccaggcgcggagcgaggacaaggatggccgcttccattacctcccgttcggtggcggtgtccggacctgcctgggcaagcacctggccaagctgttcctgaaggtgctggcggtggagctggctagcaccagccgctttgagctggccacacggaccttcccccgcatcaccttggtccccgtcctgcaccccgtggatggcctcagcgtcaagttctttggcctggactccaaccagaacgagatcctgccggagacggaggccatgctgagcgccacagtctaacccaagacccacccgcctcagcccagcccagg

SEQ ID NO: 97657 - DNA, 1314 bp, Artificial Sequence
  derived and/or modified sequence
atgttgttcgagggactcgacctggtgagcgccctggccacactcgctgcgtgcctcgtgtctgtcacccttctcctggccgtgtcgcagcagttgtggcaactccggtgggccgctacacgcgacaaaagctgcaagctccccatccctaaaggaagcatggggtttccgcttataggtgagaccgggcattggctgctccaggtgttttcaaagatattttcccatgaggcactggagtcttacctgccaaaaattcagctggtgattcaggacacgctgcgggcttggtcctcacacccagaagctataaacgtgtaccaggaggcacaaaaacttactttccgcatggccattagggtcctgttgggcttctcaattccagaggaggaccttggccacctgtttgaggtttatcagcagtttgttgacaacgtcttctccctaccagtggatctgcccttttccggttacagacgggggatccaggctcggcagattctgcagaagggtctagagaaagccatcagagaaaaactgcagtgcactcaaggaaaggactacttggatgccctagatttgttgattgagagctccaaggagcacggtaaagagatgaccatgcaggagctgaaggatgggactctcgaactcatatttgccgcatatgcaacaaccgcctccgccagcacatccctcatcatgcagcttttaaaacacccgacagtgctcgagaagctacgagacgagctgcgagcccacgggatacttcattccggaggctgcccctgcgaagggacgctccgattggacaccctttctggcctcagataccttgactgtgtgatcaaagaggtgatgaggctttttactcccatctcgggcgggtacaggaccgtgttgcagacctttgaactggatggcttccagatacccaagggctggtctgttatgtacagcataagagatacccacgacacggctcccgtcttcaaggacgttaatgtctttgatcccgacagatttagccaggcgcgatcggaggataaagacggtcgttttcactatctccccttcggtggaggtgtaaggacttgtctaggcaaacacttagctaagttgttcttgaaagtacttgccgtggagttagccagtacttcccggttcgaactggctacccggacttttccacgtattacactcgtcccagtccttcacccagtcgatggcttatccgtgaagttctttggactcgattcaaatcagaatgagatcctgcctgaaacagaagcaatgctgagtgccaccgtgtag

SEQ ID NO: 97658 - DNA, 1314 bp, Artificial Sequence
  derived and/or modified sequence
atgctgtttgagggcctggacctggtgtctgccctggccaccctggccgcctgcctggtgtctgtgaccctgctgctggccgtgtcccagcagctgtggcagctgcgctgggccgccacccgggacaagagctgcaagctgcccatccccaagggctccatgggcttccccctgattggagagaccggccactggctgctgcaggtgttcagcaagatcttcagccatgaggccctggagagctacctgcccaagatccagctggtgatccaggacaccctgcgggcctggagcagccaccctgaggccatcaacgtgtaccaggaggcccagaagctgaccttcaggatggccatccgggtgctgctgggcttcagcatccctgaggaggacctgggccacctgtttgaggtgtaccagcagtttgtggacaacgtgttcagcctgcctgtggacctgcccttcagcggctacagaagaggcatccaggcccggcagatcctgcagaagggcctggagaaggccatccgggagaagctgcagtgcacccagggcaaggactacctggatgccctggacctgctgattgagagcagcaaggagcacggcaaggagatgaccatgcaggagctgaaggatggcaccctggagctgatctttgctgcctatgccaccacagccagcgccagcaccagcctcatcatgcagctgctgaagcaccccaccgtgctggagaagctgagagatgagctgcgggcccacggcatcctgcacagcggcggctgcccctgtgagggcaccctgcggctggacaccctgagcggcctgcgctacctggactgtgtgatcaaggaggtgatgaggctcttcacccccatcagcggcggctacagaacagtgctgcagacctttgagctggatggcttccagatccccaagggctggagcgtgatgtacagcatccgggacacccatgacacagcccctgtgttcaaggatgtgaatgtgtttgatcctgaccgcttcagccaggcccggtctgaggacaaggatggccgcttccactacctgccctttggaggcggcgtgaggacctgcctgggcaagcacctggccaagctgttcctgaaggtgctggccgtggagctggccagcaccagcagatttgagctggccaccaggaccttcccccgcatcaccctggtgcctgtgctgcaccctgtggatggcctgtctgtgaagttcttcggcctggacagcaaccagaatgagatcctgcctgagacagaggccatgctgagcgccaccgtgtag

SEQ ID NO: 97659 - DNA, 1314 bp, Artificial Sequence
  derived and/or modified sequence
atgctgttcgagggcctggacctggtgagcgccctggccaccctggctgcctgccttgtgtccgtgaccctgctacttgcagtgagccagcagctatggcagctgcgctgggcggctacgagggataagagctgcaagctacctattccaaaaggttcgatgggcttccctcttataggtgagacaggccactggctgctgcaggtctttagcaagatcttcagtcacgaggcccttgagtcctatctcccaaagatacagctcgtgatccaagatacattaagagcttggagcagccaccccgaggcaatcaacgtgtaccaggaggcgcaaaaactcacattcaggatggccattagggttctgttgggcttctcaatccctgaagaggatctgggacacctatttgaagtctatcagcaatttgtggataacgtgttcagtttgcccgtggacctacccttcagtgggtatcgccggggcatacaggcccgccagatactgcagaaaggacttgagaaggctattagggaaaaactccagtgtacccagggcaaagattatctggacgcactcgacctgttaattgagtcctctaaggaacacggcaaggagatgaccatgcaggaacttaaggacggaaccttggagcttatatttgcagcatacgcgaccacagcctccgccagcactagccttattatgcagctgctaaagcaccctactgtgctggaaaagctgcgggatgagcttcgcgcccacgggattctgcactcaggagggtgtccatgcgagggaacactccggcttgatactttgagtggccttaggtacctagactgcgtgataaaagaggtaatgcgtcttttcactcctatctccggggggtatagaaccgtcctgcagacctttgagttggacgggttccagattcctaagggttggtctgtgatgtactccatccgggacacgcacgacacagccccagtctttaaggacgttaatgtgtttgatcccgatcggtttagtcaggccagatcagaggacaaggacgggcgctttcattacctccccttcgggggcggtgtgaggacatgtcttggcaaacacctggccaagttattcctgaaggtgttagccgtggaactggcctccacatcgaggttcgagcttgcgacaaggacttttcctaggatcactttggtcccggtccttcaccccgtggacggcctgtcagtgaaatttttcggtttggattccaatcagaacgaaatcctacccgagactgaggccatgctgtctgcgaccgtgtag

SEQ ID NO: 97660 - DNA, 1314 bp, Artificial Sequence
  derived and/or modified sequence
atgttgtttgagggattagacttggtaagtgccctggctaccctcgcggcatgtctggttagtgttaccctcttactggccgtctcacagcaactgtggcagctccgttgggcagcgactcgcgataaaagctgtaaactccctattcccaagggctcaatggggttcccacttatcggagagacagggcattggctgttacaggtgttttccaaaatctttagccatgaagcgctggaatcctatttgcccaagatacagctcgttattcaagacactctgcgtgcctggtcttcgcatcccgaggccataaacgtgtaccaagaggcccagaagctaacctttagaatggccattagggttcttctggggtttagtattcccgaagaagatttaggccatctgttcgaggtctatcaacaatttgttgataacgtattttcactgccagtggatctgcccttcagtgggtataggagaggcattcaggctcgccagatcttgcagaaagggctcgagaaggctatccgggaaaagctgcaatgtacccaaggcaaagattacctggatgcactcgaccttttaatagaatcgagcaaagagcatggtaaggaaatgaccatgcaggagctgaaagatggtacactggagcttattttcgccgcttatgcaaccaccgcatcagcatcaacaagcctcattatgcagctgctgaaacaccctaccgtcctggagaagcttagggatgagctacgtgctcatggcattctgcacagtggcggttgcccatgcgaaggtaccctccggttggacaccctgtcaggcttgagatatttggattgtgtgattaaagaggtgatgcgattgttcaccccaatatccggaggctatcggaccgtgttacaaacgtttgagctggacggcttccagatcccgaaaggctggtccgtgatgtacagcatcagggatacacacgacactgcccctgtattcaaggacgtcaacgtgtttgaccctgatcgcttttctcaggctagaagcgaagacaaggacggtagatttcattacctgccttttgggggtggggtgagaacctgtctcggcaaacacttggccaaactgtttttgaaggtgcttgcagtggagctggcatccacatccaggttcgagctggcaacccggacattcccgagaataacactagtgccagtcctgcaccccgtggatggcctttcagtgaaattttttgggctcgacagcaaccagaacgagatcctgcctgagacagaggcaatgttgagtgcgactgtgtag

SEQ ID NO: 97661 - protein, 74 aa, Artificial Sequence
  derived and/or modified sequence
MAEEPQSVLQLPTSIAAGGEGLTDVSPETTTPEPPSSAAVSPGTEEPAGDTKKKIYLCESVLCSFPRPRSWNSL

SEQ ID NO: 97662 - DNA, 225 bp, Artificial Sequence
  derived and/or modified sequence
atggccgaggagccccagagcgtgctgcagctgcccaccagcatcgccgccggcggcgagggcctgaccgacgtgagccccgagaccaccacccccgagccccccagcagcgccgccgtgagccccggcaccgaggagcccgccggcgacaccaagaagaagatctacctgtgcgagagcgtgctgtgcagcttccccagacccagaagctggaacagcctgtag

SEQ ID NO: 97663 - DNA, 225 bp, Artificial Sequence
  derived and/or modified sequence
atggcagaagaaccacagtcagtccttcagctccccacaagcatcgcggctgggggagaaggcctcacggatgttagtccagagacaactacacccgagccaccctcatctgcagccgtttccccgggaaccgaggaacccgcaggggacacaaaaaagaaaatctatctctgcgaatctgttctgtgctctttccccagaccaaggagttggaattctctgtag

SEQ ID NO: 97664 - DNA, 225 bp, Artificial Sequence
  derived and/or modified sequence
atggccgaggagccccagagcgtgctgcagctgcccaccagcattgctgctggaggagagggcctgacagatgtgtccccagagaccaccaccccagagccccccagcagcgctgctgtgtccccaggcacagaggagcctgctggggacaccaagaagaagatctacctgtgtgagagcgtgctgtgcagcttcccccggcccaggtcctggaacagcctgtag

SEQ ID NO: 97665 - DNA, 225 bp, Artificial Sequence
  derived and/or modified sequence
atggccgaggagccccagagcgtgctgcagctgcccaccagcatcgcagccggaggcgagggactgacagatgtctctcccgagaccaccacaccggagccaccatcatctgctgctgtgtcccctggaacggaggaacctgctggagacacaaaaaagaagatttatctgtgcgagtcagtactttgctcgttcccacgcccccggagctggaacagcctttag

SEQ ID NO: 97666 - DNA, 225 bp, Artificial Sequence
  derived and/or modified sequence
atggccgaggaaccccagagcgtgctacagctgccaactagcatcgccgctggaggcgaagggctgactgatgtctctcccgagactacaacacctgaacctccaagtagtgcagccgtcagtccgggaaccgaggagcccgcaggtgatactaaaaagaagatttacctctgtgaatccgtcttgtgtagcttccctcgacctaggagctggaattcgctgtag

SEQ ID NO: 97667 - protein, 3829 aa, Artificial Sequence
  derived and/or modified sequence
MNTFWPGRELIVQWYPFDENRNHPSVSWLKMVWKNLYIHFSEDLTLFDEMPLIPRTILEEGQTCVELIRLRIPSLVILDDESEAQLPEFLADIVQKLGGFVLKKLDASIQHPLIKKYIHSPLPSAVLQIMEKMPLQKLCNQITSLLPTHKDALRKFLASLTDSSEKEKRIIQELAIFKRINHSSDQGISSYTKLKGCKVLHHTAKLPADLRLSISVIDSSDEATIRLANMLKIEQLKTTSCLKLVLKDIENAFYSHEEVTQLMLWVLENLSSLKNENPNVLEWLTPLKFIQISQEQMVSAGELFDPDIEVLKDLFCNEEGTYFPPSVFTSPDILHSLRQIGLKNEASLKEKDVVQVAKKIEALQVGACPDQDVLLKKAKTLLLVLNKNHTLLQSSEGKMTLKKIKWVPACKERPPNYPGSLVWKGDLCNLCAPPDMCDVGHAILIGSSLPLVESIHVNLEKALGIFTKPSLSAVLKHFKIVVDWYSSKTFSDEDYYQFQHILLEIYGFMHDHLNEGKDSFRALKFPWVWTGKKFCPLAQAVIKPIHDLDLQPYLHNVPKTMAKFHQLFKVCGSIEELTSDHISMVIQKIYLKSDQDLSEQESKQNLHLMLNIIRWLYSNQIPASPNTPVPIHHSKNPSKLIMKPIHECCYCDIKVDDLNDLLEDSVEPIILVHEDIPMKTAEWLKVPCLSTRLINPENMGFEQSGQREPLTVRIKNILEEYPSVSDIFKELLQNADDANATECSFLIDMRRNMDIRENLLDPGMAACHGPALWSFNNSQFSDSDFVNITRLGESLKRGEVDKVGKFGLGFNSVYHITDIPIIMSREFMIMFDPNINHISKHIKDKSNPGIKINWSKQQKRLRKFPNQFKPFIDVFGCQLPLTVEAPYSYNGTLFRLSFRTQQEAKVSEVSSTCYNTADIYSLVDEFSLCGHRLIIFTQSVKSMYLKYLKIEETNPSLAQDTVIIKKKSCSSKALNTPVLSVLKEAAKLMKTCSSSNKKLPSDEPKSSCILQITVEEFHHVFRRIADLQSPLFRGPDDDPAALFEMAKSGQSKKPSDELSQKTVECTTWLLCTCMDTGEALKFSLSESGRRLGLVPCGAVGVQLSEIQDQKWTVKPHIGEVFCYLPLRIKTGLPVHINGCFAVTSNRKEIWKTDTKGRWNTTFMRHVIVKAYLQVLSVLRDLATSGELMDYTYYAVWPDPDLVHDDFSVICQGFYEDIAHGKGKELTKVFSDGSTWVSMKNVRFLDDSILKRRDVGSAAFKIFLKYLKKTGSKNLCAVELPSSVKLGFEEAGCKQILLENTFSEKQFFSEVFFPNIQEIEAELRDPLMIFVLNEKVDEFSGVLRVTPCIPCSLEGHPLVLPSRLIHPEGRVAKLFDIKDGRFPYGSTQDYLNPIILIKLVQLGMAKDDILWDDMLERAVSVAEINKSDHVAACLRSSILLSLIDEKLKIRDPRAKDFAAKYQTIRFLPFLTKPAGFSLDWKGNSFKPETMFAATDLYTAEHQDIVCLLQPILNENSHSFRGCGSVSLAVKEFLGLLKKPTVDLVINQLKEVAKSVDDGITLYQENITNACYKYLHEALMQNEITKMSIIDKLKPFSFILVENAYVDSEKVSFHLNFEAAPYLYQLPNKYKNNFRELFETVGVRQSCTVEDFALVLESIDQERGTKQITEENFQLCRRIISEGIWSLIREKKQEFCEKNYGKILLPDTNLMLLPAKSLCYNDCPWIKVKDTTVKYCHADIPREVAVKLGAVPKRHKALERYASNVCFTTLGTEFGQKEKLTSRIKSILNAYPSEKEMLKELLQNADDAKATEICFVFDPRQHPVDRIFDDKWAPLQGPALCVYNNQPFTEDDVRGIQNLGKGTKEGNPYKTGQYGIGFNSVYHITDCPSFISGNDILCIFDPHARYAPGATSISPGRMFRDLDADFRTQFSDVLDLYLGTHFKLDNCTMFRFPLRNAEMAKVSEISSVPASDRMVQNLLDKLRSDGAELLMFLNHMEKISICEIDKSTGALNVLYSVKGKITDGDRLKRKQFHASVIDSVTKKRQLKDIPVQQITYTMDTEDSEGNLTTWLICNRSGFSSMEKVSKSVISAHKNQDITLFPRGGVAACITHNYKKPHRAFCFLPLSLETGLPFHVNGHFALDSARRNLWRDDNGVGVRSDWNNSLMTALIAPAYVELLIQLKKRYFPGSDPTLSVLQNTPIHVVKDTLKKFLSFFPVNRLDLQPDLYCLVKALYNCIHEDMKRLLPVVRAPNIDGSDLHSAVIITWINMSTSNKTRPFFDNLLQDELQHLKNADYNITTRKTVAENVYRLKHLLLEIGFNLVYNCDETANLYHCLIDADIPVSYVTPADIRSFLMTFSSPDTNCHIGKLPCRLQQTNLKLFHSLKLLVDYCFKDAEENEIEVEGLPLLITLDSVLQTFDAKRPKFLTTYHELIPSRKDLFMNTLYLKYSNILLNCKVAKVFDISSFADLLSSVLPREYKTKSCTKWKDNFASESWLKNAWHFISESVSVKEDQEETKPTFDIVVDTLKDWALLPGTKFTVSANQLVVPEGDVLLPLSLMHIAVFPNAQSDKVFHALMKAGCIQLALNKICSKDSAFVPLLSCHTANIESPTSILKALHYMVQTSTFRAEKLVENDFEALLMYFNCNLNHLMSQDDIKILKSLPCYKSISGRYVSIGKFGTCYVLTKSIPSAEVEKWTQSSSSAFLEEKIHLKELYEVIGCVPVDDLEVYLKHLLPKIENLSYDAKLEHLIYLKNRLSSAEELSEIKEQLFEKLESLLIIHDANSRLKQAKHFYDRTVRVFEVMLPEKLFIPNDFFKKLEQLIKPKNHVTFMTSWVEFLRNIGLKYILSQQQLLQFAKEISVRANTENWSKETLQNTVDILLHHIFQERMDLLSGNFLKELSLIPFLCPERAPAEFIRFHPQYQEVNGTLPLIKFNGAQVNPKFKQCDVLQLLWTSCPILPEKATPLSIKEQEGSDLGPQEQLEQVLNMLNVNLDPPLDKVINNCRNICNITTLDEEMVKTRAKVLRSIYEFLSAEKREFRFQLRGVAFVMVEDGWKLLKPEEVVINLEYESDFKPYLYKLPLELGTFHQLFKHLGTEDIISTKQYVEVLSRIFKNSEGKQLDPNEMRTVKRVVSGLFRSLQNDSVKVRSDLENVRDLALYLPSQDGRLVKSSILVFDDAPHYKSRIQGNIGVQMLVDLSQCYLGKDHGFHTKLIMLFPQKLRPRLLSSILEEQLDEETPKVCQFGALCSLQGRLQLLLSSEQFITGLIRIMKHENDNAFLANEEKAIRLCKALREGLKVSCFEKLQTTLRVKGFNPIPHSRSETFAFLKRFGNAVILLYIQHSDSKDINFLLALAMTLKSATDNLISDTSYLIAMLGCNDIYRIGEKLDSLGVKYDSSEPSKLELPMPGTPIPAEIHYTLLMDPMNVFYPGEYVGYLVDAEGGDIYGSYQPTYTYAIIVQEVEREDADNSSFLGKIYQIDIGYSEYKIVSSLDLYKFSRPEESSQSRDSAPSTPTSPTEFLTPGLRSIPPLFSGRESHKTSSKHQSPKKLKVNSLPEILKEVTSVVEQAWKLPESERKKIIRRLYLKWHPDKNPENHDIANEVFKHLQNEINRLEKQAFLDQNADRASRRTFSTSASRFQSDKYSFQRFYTSWNQEATSHKSERQQQNKEKCPPSAGQTYSQRFFVPPTFKSVGNPVEARRWLRQARANFSAARNDLHKNANEWVCFKCYLSTKLALIAADYAVRGKSDKDVKPTALAQKIEEYSQQLEGLTNDVHTLEAYGVDSLKTRYPDLLPFPQIPNDRFTSEVAMRVMECTACIIIKLENFMQQKV

SEQ ID NO: 97668 - protein, 1001 aa, Artificial Sequence
  derived and/or modified sequence
MASSPLPGPNDILLASPSSAFQPDTLSQPRPGHANLKPNQVGQVILYGIPIVSLVIDGQERLCLAQISNTLLKNFSYNEIHNRRVALGITCVQCTPVQLEILRRAGAMPISSRRCGMITKREAERLCKSFLGENRPPKLPDNFAFDVSHECAWGCRGSFIPARYNSSRAKCIKCSYCNMYFSPNKFIFHSHRTPDAKYTQPDAANFNSWRRHLKLTDKSPQDELVFAWEDVKAMFNGGSRKRALPQPGAHPACHPLSSVKAAAVAAAAAVAGGGGLLGPHLLGAPPPPPPPPPPLAELAGAPHAHHKRPRFDDDDDSLQEAAVVAAASLSAAAASLSVAAASGGAGTGGGGAGGGCVAGVGVGAGAGAGAGAGAKGPRSYPVIPVPSKGSFGGVLQKFPGCGGLFPHPYTFPAAAAAFSLCHKKEDAGAAAEALGGAGAGGAGAAPKAGLSGLFWPAGRKDAFYPPFCMFWPPRTPGGLPVPTYLQPPPQPPSALGCALGESPALLRQAFLDLAEPGGAAGSAEAAPPPGQPPQVVANGPGSGPPPPAGGAGSRDALFESPPGGSGGDCSAGSTPPADSVAAAGAGAAAAGSGPAGSRVPAPHHPHLLEGRKAGGGSYHHSSAFRPVGGKDDAESLAKLHGASAGAPHSAQTHPHHHHHPHHHHHHHHPPQPPSPLLLLPPQPDEPGSERHHPAPPPPPPPPPPPPLAQHPHHRGLLSPGGTSCCYPSEDSSEDEDDEEEEQEVDVEGHKPPEGEEEEEGRDPDDDEEEDEETEVLLGDPLVGGGRFLQGRGPSEKGSSRDRAPAVAGAFPLGLNSSRLLQEDGKLGDPGSDLPPPPPPPLAPQKASGGGSSSPGSPVHHPSLEEQPSYKDSQKTKENNQVIVSTKDDNSFSDKNKEHSFFITDSDASGGDFWRERSGEHTQETNSPHSLKKDVENMGKEELQKVLFEQIDLRRRLEQEFQVLKGNTSFPVFNNFQDQMKRELAYREEMVQQLQIVSCIST

SEQ ID NO: 97669 - DNA, 3006 bp, Artificial Sequence
  derived and/or modified sequence
atggccagcagccccctgcccggccccaacgacatcctgctggccagccccagcagcgccttccagcccgacaccctgagccagcccagacccggccacgccaacctgaagcccaaccaggtgggccaggtgatcctgtacggcatccccatcgtgagcctggtgatcgacggccaggagagactgtgcctggcccagatcagcaacaccctgctgaagaacttcagctacaacgagatccacaacagaagagtggccctgggcatcacctgcgtgcagtgcacccccgtgcagctggagatcctgagaagagccggcgccatgcccatcagcagcagaagatgcggcatgatcaccaagagagaggccgagagactgtgcaagagcttcctgggcgagaacagaccccccaagctgcccgacaacttcgccttcgacgtgagccacgagtgcgcctggggctgcagaggcagcttcatccccgccagatacaacagcagcagagccaagtgcatcaagtgcagctactgcaacatgtacttcagccccaacaagttcatcttccacagccacagaacccccgacgccaagtacacccagcccgacgccgccaacttcaacagctggagaagacacctgaagctgaccgacaagagcccccaggacgagctggtgttcgcctgggaggacgtgaaggccatgttcaacggcggcagcagaaagagagccctgccccagcccggcgcccaccccgcctgccaccccctgagcagcgtgaaggccgccgccgtggccgccgccgccgccgtggccggcggcggcggcctgctgggcccccacctgctgggcgccccccccccccccccccccccccccccccccctggccgagctggccggcgccccccacgcccaccacaagagacccagattcgacgacgacgacgacagcctgcaggaggccgccgtggtggccgccgccagcctgagcgccgccgccgccagcctgagcgtggccgccgccagcggcggcgccggcaccggcggcggcggcgccggcggcggctgcgtggccggcgtgggcgtgggcgccggcgccggcgccggcgccggcgccggcgccaagggccccagaagctaccccgtgatccccgtgcccagcaagggcagcttcggcggcgtgctgcagaagttccccggctgcggcggcctgttcccccacccctacaccttccccgccgccgccgccgccttcagcctgtgccacaagaaggaggacgccggcgccgccgccgaggccctgggcggcgccggcgccggcggcgccggcgccgcccccaaggccggcctgagcggcctgttctggcccgccggcagaaaggacgccttctacccccccttctgcatgttctggccccccagaacccccggcggcctgcccgtgcccacctacctgcagccccccccccagccccccagcgccctgggctgcgccctgggcgagagccccgccctgctgagacaggccttcctggacctggccgagcccggcggcgccgccggcagcgccgaggccgcccccccccccggccagcccccccaggtggtggccaacggccccggcagcggcccccccccccccgccggcggcgccggcagcagagacgccctgttcgagagcccccccggcggcagcggcggcgactgcagcgccggcagcaccccccccgccgacagcgtggccgccgccggcgccggcgccgccgccgccggcagcggccccgccggcagcagagtgcccgccccccaccacccccacctgctggagggcagaaaggccggcggcggcagctaccaccacagcagcgccttcagacccgtgggcggcaaggacgacgccgagagcctggccaagctgcacggcgccagcgccggcgccccccacagcgcccagacccacccccaccaccaccaccacccccaccaccaccaccaccaccaccaccccccccagccccccagccccctgctgctgctgcccccccagcccgacgagcccggcagcgagagacaccaccccgccccccccccccccccccccccccccccccccccccccctggcccagcacccccaccacagaggcctgctgagccccggcggcaccagctgctgctaccccagcgaggacagcagcgaggacgaggacgacgaggaggaggagcaggaggtggacgtggagggccacaagccccccgagggcgaggaggaggaggagggcagagaccccgacgacgacgaggaggaggacgaggagaccgaggtgctgctgggcgaccccctggtgggcggcggcagattcctgcagggcagaggccccagcgagaagggcagcagcagagacagagcccccgccgtggccggcgccttccccctgggcctgaacagcagcagactgctgcaggaggacggcaagctgggcgaccccggcagcgacctgcccccccccccccccccccccctggccccccagaaggccagcggcggcggcagcagcagccccggcagccccgtgcaccaccccagcctggaggagcagcccagctacaaggacagccagaagaccaaggagaacaaccaggtgatcgtgagcaccaaggacgacaacagcttcagcgacaagaacaaggagcacagcttcttcatcaccgacagcgacgccagcggcggcgacttctggagagagagaagcggcgagcacacccaggagaccaacagcccccacagcctgaagaaggacgtggagaacatgggcaaggaggagctgcagaaggtgctgttcgagcagatcgacctgagaagaagactggagcaggagttccaggtgctgaagggcaacaccagcttccccgtgttcaacaacttccaggaccagatgaagagagagctggcctacagagaggagatggtgcagcagctgcagatcgtgagctgcatcagcacctag

SEQ ID NO: 97670 - DNA, 3006 bp, Artificial Sequence
  derived and/or modified sequence
atggcctcctcccccttgccaggacctaacgatattcttctcgctagcccctccagcgcatttcagcctgacaccttaagtcagccgcgccctggacacgccaatctcaagccaaaccaggtgggacaagtgatcttatacggcattccaatcgtctcactcgtgattgacgggcaggaacgcttatgtctggcccaaatttccaacacccttctgaaaaatttctcgtataacgagattcacaataggcgggttgcccttggtattacttgtgtgcagtgtaccccagtccagctggagattctgcggcgggcaggcgctatgcccatctcctcacgaagatgtggaatgattaccaagcgtgaggccgagcgcctttgcaaaagttttctcggagagaataggccccccaagttgcctgacaacttcgctttcgatgtctcccatgagtgtgcctgggggtgtcgggggagttttattccggctcgttataactcatcccgggcaaagtgtatcaagtgcagttactgtaacatgtattttagccccaacaagtttattttccactcacaccgaactcctgatgccaagtatacacagcccgatgccgctaattttaattcatggagaaggcacctgaagctcactgataagtccccgcaggacgaactcgtattcgcctgggaggacgttaaggcaatgtttaatggcgggtctcggaaacgagcactgccccagccaggcgctcatcctgcttgccatcccctgtctagtgtgaaagccgcagcagtagcagccgccgctgcagttgctggaggaggcggtctgctgggccctcacctcttgggcgcacccccccctccacccccgcccccgcctcctctcgccgagcttgcaggcgcccctcatgcccaccataagagaccacggttcgatgatgacgacgactcgctccaagaagctgccgttgtggctgctgcctcacttagcgctgccgcggccagcctgagcgtggcggccgcttctgggggagctggtactggaggcggcggtgccggtgggggatgcgtggcgggggtgggggtcggcgctggcgcgggagccggagctggtgctggagccaaaggcccgcgttcctatccagtcatccctgtgcctagtaagggttccttcggcggcgttctgcagaagttcccagggtgcgggggccttttcccccacccctatacttttcccgctgccgccgcagcattttccctgtgccacaagaaggaagatgccggcgccgccgcggaagccctaggaggggcaggagccggcggtgcaggcgcagctcccaaagccgggctttctggacttttttggcccgctgggcggaaagatgcattttatccgccattttgcatgttttggcccccacgaacacccggaggtctccctgtccctacctatctgcagccacctccccaacctccaagcgctctgggctgtgccctcggtgaatccccagctctcctgaggcaggcatttctggatttagccgaacctgggggggctgcggggtcagcggaggctgcccctcctcctggtcaacccccacaagtggtggcgaacggccctggaagcggtcctccacctccagccggcggcgcaggaagccgcgatgcattatttgagagtccccctgggggctctggtggggattgcagtgccggatctaccccacctgcggattcagttgccgcggccggagctggcgcggcggccgccggaagcgggccagcgggctctagggtgcccgcaccgcaccatccacacttgcttgagggaaggaaggcgggcgggggtagctaccaccactcaagcgcgtttcgtccagtgggtggcaaagatgacgctgagagtttggccaagctgcacggagcgagtgccggcgcaccacactcagctcaaacgcacccacaccaccatcatcaccctcaccatcaccaccaccatcatcatcccccccagcctccttcaccactgctcctcctcccccctcaacctgacgaaccggggagcgaaagacaccatccagcgccaccaccacctccaccacctcctccgcccccgcctctggcccagcacccgcaccacagaggtctcctgtctcccggaggcaccagctgctgttacccctccgaggactcttccgaggacgaggatgacgaagaagaggaacaggaagtcgatgtggaggggcacaagccgcccgagggagaggaggaagaagagggccgtgaccccgacgatgatgaggaggaagatgaggagacagaggtattgctgggggatccgctggtgggcggtgggcgcttcttacaaggcagagggccaagtgagaagggcagtagcagagatcgcgcgccggctgtagccggcgctttccctctcgggctcaactcatccaggctgcttcaggaggacggaaaactgggcgatcccggcagcgacctgcctccaccgcccccccctcctttggcaccccaaaaggcaagtggcggtgggtccagttctccagggtctcccgtgcatcaccccagtctggaggagcagccatcatataaggactcccaaaaaactaaggagaataatcaggttatcgtatcaactaaggacgacaactcttttagtgacaagaataaagagcatagcttcttcatcaccgactcagatgcctctggcggagacttctggagggaaagaagtggggagcatacacaggagacaaattcacctcacagcctaaagaaagacgtggaaaatatggggaaagaggaacttcagaaggtcttgtttgagcagatagacctccgccggcgcttggaacaagaatttcaagtcttgaaaggtaatacaagtttcccagtgttcaataattttcaggaccaaatgaagagggaactggcctatcgggaggaaatggtgcagcagctgcagatcgtgtcctgcatcagtacgtag

SEQ ID NO: 97671 - DNA, 3006 bp, Artificial Sequence
  derived and/or modified sequence
atggccagcagccccctgcccggccccaatgacatcctgctggccagccccagcagcgccttccagcctgacaccctgagccagcccaggcctggccacgccaacctgaagcccaaccaggtgggccaggtgatcctgtatggcatccccatcgtgtccctggtgattgatggccaggagcggctgtgcctggcccagatcagcaacaccctgctgaagaacttctcctacaatgagatccacaacagaagagtggccctgggcatcacctgtgtgcagtgcacccctgtgcagctggagatcctgcggcgggccggggccatgcccatcagcagcagaagatgtggcatgatcaccaagcgggaggccgagcggctgtgcaagagcttcctgggagaaaatcggccccccaagctgcctgacaactttgcctttgatgtgtcccatgaatgtgcctggggctgccggggcagcttcatcccagcccgctacaacagcagccgggccaagtgcatcaagtgcagctactgcaacatgtacttcagccccaacaagttcatcttccacagccacaggaccccagatgccaagtacacccagccagatgctgccaacttcaacagctggaggaggcacctgaagctgacagacaagagcccccaggatgagctggtgtttgcctgggaggatgtgaaggccatgttcaacggcggcagcaggaagagggccctgccccagcccggggcccacccagcctgccaccccctgagctctgtgaaggctgctgctgtggccgctgctgctgctgtggccggcggcggcggcctgctgggcccccacctgctgggcgcccctcctcctcctcctcctcctcctccacccctggccgagctggccggggcccctcatgcccaccacaagaggcccaggtttgatgatgatgatgacagcctgcaggaggccgctgtggtggccgccgccagcctgtctgctgctgctgccagcctgtctgtggccgccgccagcggcggggccggcactggaggcggcggggccggcggcggctgtgtggccggcgtgggcgtgggcgctggggccggggccggggccggggccggggccaagggccccaggagctaccctgtgattcctgtgcccagcaagggcagctttggaggagtgctgcagaagtttcctggctgcggcggcctcttcccccacccctacaccttccctgctgctgctgctgccttcagcctgtgccacaagaaggaggatgctggagctgctgctgaggccctgggcggggccggggccggcggggccggggccgcccccaaggccggcctgagcggcctcttctggccagctggcaggaaggatgccttctacccacccttctgcatgttctggccacccaggacccctgggggcctgcctgtgcccacctacctgcagcccccaccccagcccccatctgccctgggctgtgccctgggggagagccctgccctgctgcggcaggccttcctggacctggccgagcccggcggggccgccggcagcgctgaggccgcccctcctcctggccagcccccccaggtggtggccaacggccctggcagcggccccccacctcctgctgggggcgccggcagcagagatgccctgtttgagagccccccaggcggcagcggcggggactgcagcgctggcagcaccccacctgctgacagcgtggccgctgctggagctggagctgctgctgctggcagcggccctgctggcagccgggtgcctgccccccaccacccccacctgctggagggcaggaaggccggcggcggcagctaccaccacagcagcgccttccggcctgtgggcggcaaggatgatgctgagagcctggccaagctgcacggggccagcgctggggccccccacagcgcccagacccacccccaccaccaccaccacccccaccaccaccaccaccaccaccaccccccccagccccccagccccctgctgctgctgcccccccagccagatgagcccggcagcgagcggcaccacccagcccctcctcctcctcctcctcctcctcctcctccacccctggcccagcacccccaccaccggggcctgctgagccctgggggcaccagctgctgctaccccagcgaggacagcagtgaagatgaagatgatgaggaggaggagcaggaggtggatgtggagggccacaagcccccagagggggaggaggaggaggagggccgggaccctgatgatgatgaggaggaggatgaggagacagaggtgctgctgggggaccccctggtgggcggcggccgcttcctgcagggccggggccccagcgagaagggcagcagccgggaccgggccccagctgtggccggggccttccccctgggcctgaacagcagccggctgctgcaggaggatggcaagctgggggaccccggcagtgacctgcccccacctcctcctccacccctggccccccagaaggccagcggcggcggcagcagcagccctggcagccctgtgcaccaccccagcctggaggagcagcccagctacaaggacagccagaagaccaaggagaacaaccaggtgattgtgtccaccaaggatgacaacagcttcagtgacaagaacaaggagcacagcttcttcatcacagacagtgatgccagcggcggggacttctggagggagaggtctggagagcacacccaggagaccaacagcccccacagcctgaagaaggatgtggagaacatgggcaaggaggagctgcagaaggtgctgtttgagcagattgacctgcggcggcggctggagcaggagttccaggtgctgaagggcaacaccagcttccctgtgttcaacaacttccaggaccagatgaagcgggagctggcctaccgggaggagatggtgcagcagctgcagatcgtgtcctgcatcagcacctag

SEQ ID NO: 97672 - DNA, 3006 bp, Artificial Sequence
  derived and/or modified sequence
atggccagcagccccctgcccggccccaacgacatcctgctggccagtccctctagcgccttccagcccgacacgctgtctcagccccgtcccggtcacgctaacctgaaacccaatcaggtggggcaagttattctttacgggattcctattgtgtctctggtaattgatgggcaggaaagactgtgcctggcccagatttctaatacgctattgaagaacttcagctacaatgagatccacaatagacgagttgcactaggcattacatgtgtgcaatgcaccccggtgcagctggaaattctgcgacgagccggggccatgcctattagctcccgtcgctgtggcatgatcacaaaaagggaagcagaacgactgtgcaaatcttttttaggcgaaaatcgccctccaaaactgcccgataacttcgcattcgatgtctctcatgaatgtgcgtggggttgtcgggggtcttttatccccgcccggtataatagctctcgcgccaagtgtataaagtgcagctactgcaacatgtatttctctccaaataagttcatctttcacagccacaggactcctgatgcgaagtacactcagccagacgctgccaactttaactcttggcggaggcatctgaaactgaccgataagtccccacaggatgaacttgtctttgcttgggaggacgttaaggctatgttcaacggaggatccagaaagcgcgcccttcctcagcccggcgcccatcccgcttgtcatcccttgagtagcgttaaagctgccgcggtggctgctgcggcagccgttgccgggggagggggcctcttagggccacatctgcttggcgcccctcctccaccccctccgccacctcctcccctcgccgagctggctggtgcacctcacgcccatcataagcggccacgctttgacgacgacgatgattcactccaggaggcagccgtcgtagctgcagccagtttgtcagctgctgccgctagtctcagtgttgcagccgcgtctggcggtgcaggtaccggcgggggcggggccggtggtgggtgtgtggccggagtcggcgttggagcaggcgctggagccggcgccggggcaggagcgaaggggcctaggagctatccagtgattcccgtgccaagcaaagggagcttcgggggcgtcctacagaaattccctggctgcggaggtctattccctcatccatatacattccccgccgcagcagcagcctttagtctgtgtcataagaaggaagatgcaggggccgcagcggaggctttgggaggcgctggtgccgggggtgcaggagctgcgcctaaagctggactgtccggcctgttctggccggccggccgcaaggacgctttctaccctccgttttgtatgttttggccccctcgcactccaggcggcctaccggtcccaacctatctccaaccaccaccacaaccaccatctgcactgggatgcgcacttggggaatcccccgcccttctacgacaagccttcttggacctggctgaaccaggaggcgccgccggcagtgctgaagcagccccacctcctggacagcctccacaagtggtggctaatggtcctggctccggaccaccccctccggcaggtggggctggttctagagatgctttgttcgagtctcctccaggcgggtccgggggagattgcagcgccgggtccacgcctcctgctgattctgtggcggccgctggcgctggcgcagccgctgcgggtagtggcccggcggggtcacgcgtgcctgcaccccatcacccacaccttttagaagggcgtaaggccggcggcggaagctatcatcattctagcgcatttaggcccgtgggcgggaaagatgacgcagaaagtcttgccaaactccatggcgcgtcagctggagcaccccactcagctcagactcacccccaccatcatcaccatcctcaccaccatcatcaccaccatcacccaccacagcctccctctcccttgcttctgctgccacctcagcccgacgagcctggctcagagaggcatcaccctgctcctccacctccacccccaccaccaccgccccccccactggcccagcacccccaccacagggggctgctgagcccaggcgggacctcatgctgttaccctagcgaggattcctctgaagacgaagatgatgaagaggaggagcaggaggtcgatgtggaaggacacaagccccctgaaggagaggaggaggaggaagggagggaccccgacgatgacgaggaggaagacgaggagaccgaagtcctgcttggcgacccactggtaggaggaggaagatttctgcagggccgtggaccctctgaaaaagggtcttctcgggacagggctcctgccgttgccggtgcctttcccctcggcctgaatagtagccgcctgctgcaggaagacggcaagcttggggatcctgggtctgaccttccgcccccacctccacctcctttggcgccgcagaaagcaagcggtggaggctcgtcttccccgggaagccccgtgcatcatccttcgctagaagagcagccctcctacaaggacagccagaaaacaaaagagaataaccaggttatcgtgtctacaaaggacgataactcattctcagacaaaaacaaagagcattcattcttcattactgattctgacgcaagcggtggagacttttggcgcgaacggtctggcgaacacacacaggagactaacagtcctcactcacttaagaaggatgtggaaaatatgggcaaggaggaactccagaaggttctgtttgagcagattgatctgcgaagaaggttggaacaggaattccaggtgctgaagggaaacacatccttccccgtgtttaataacttccaggaccagatgaaacgtgagctcgcgtatcgcgaagagatggtgcagcagctgcaaatcgtgagttgcatcagtacttag

SEQ ID NO: 97673 - DNA, 3006 bp, Artificial Sequence
  derived and/or modified sequence
atggcttccagtccgctgccagggcccaacgacatcctgctggcgtcgccgtcgagcgccttccagcccgacacgctgagccagccgcggccagggcacgccaacctcaaacccaaccaggtgggccaggtgatcctctacggcattcccatcgtgtcgttggtgatcgacgggcaagagcgcctgtgcctggcgcagatctccaacactctgctcaagaacttcagctacaacgagatccacaaccgtcgcgtggcactgggcatcacgtgtgtgcagtgcacgccggtgcaactggagatcctgcggcgtgccggggccatgcccatctcatcgcgccgctgcggcatgatcaccaaacgcgaggccgagcgtctgtgcaagtcgttcctgggcgaaaacaggccgcccaagctgccagacaatttcgccttcgacgtgtcacacgagtgcgcctggggctgccgcggcagcttcattcccgcgcgctacaacagctcgcgcgccaagtgcatcaaatgcagctactgcaacatgtacttctcgcccaacaagttcattttccactcccaccgcacgcccgacgccaagtacactcagccagacgcagccaacttcaactcgtggcgccgtcatctcaagctcaccgacaagagtccccaggacgagctggtcttcgcctgggaggacgtcaaggccatgttcaacggcggcagccgcaagcgcgcactgccccagccgggcgcgcaccccgcctgccacccgctcagctctgtgaaggcggccgccgtggccgccgcggccgcggtggccggaggcgggggtctgctgggcccccacctgctgggtgcgcccccgccgccgccgccgccaccgccgcccttggcagagctggctggtgccccgcacgcccatcacaagcggccgcgcttcgacgacgacgacgactccttgcaggaggccgccgtagtggccgccgccagcctctcggccgcagccgccagcctctctgtggctgctgcttcgggcggcgcggggactggtgggggcggcgctgggggtggctgtgtggccggcgtgggcgtgggcgcgggcgcgggggcgggtgccggggcaggggccaaaggcccgcgcagctacccagtcatcccggtgcccagcaagggctcgttcgggggcgtcctgcagaagttcccgggctgcggcgggctcttcccgcacccctacaccttccctgccgcggccgccgccttcagcttgtgccataagaaagaggatgcgggtgccgccgctgaggccctggggggcgcgggcgcaggcggcgcgggcgcggcgcccaaggccggcttgtccggcctcttctggcccgcgggccgcaaggacgccttctatccgcccttctgcatgttctggccgccgcggacccctggcgggctcccggtgcccacctacctgcagcccccgcctcagccgccctcggcgctaggctgcgcgctaggcgaaagcccggccctgctgcgccaggccttcctggacctggctgagccaggcggtgctgctgggagcgccgaggccgcgcccccgccggggcagcccccgcaggtagtggccaacggcccgggctccggcccacctcctcctgccgggggcgccggctctcgcgacgcgctcttcgagtcgcccccgggcggcagcggcggggactgcagcgcgggctccacgccgcccgcggactctgtggcagctgccggggcaggggccgcggccgccgggtctggccccgcgggctcccgggttccggcgccccaccatccgcaccttctggaggggcgcaaagcgggcggtggcagctaccaccattccagcgccttccggccagtgggcggcaaggacgacgcggagagcctggccaagctgcacggggcgtcggcgggcgcgccccactcggcccagacgcatccccaccaccatcaccaccctcaccaccaccaccaccaccaccaccccccgcagccgccgtcgccgcttctgctgctgcccccgcagcccgacgagccgggttccgagcgccaccacccggccccgccgccgccgccgccgccgcccccgccgccccctctggcccagcacccgcaccaccgaggccttctgtctcccgggggaaccagctgctgctaccccagcgaggacagctccgaggacgaggacgacgaggaagaagagcaggaggtggacgtggagggccacaagccccccgagggcgaggaagaggaggaaggtcgagaccctgacgacgacgaggaagaggacgaggagacggaggtcctactcggcgaccccttagtcgggggcggccggttcctccagggccgagggccgtcggagaaggggagcagccgggaccgcgcgccggccgtcgcgggcgcgttcccgctcggcctgaactcctccaggctgctgcaggaagacgggaaactcggggaccccggctcggacctgcccccgcccccgccgccgcccctggccccccagaaggcgagtggcggcggcagcagcagcccgggcagcccagttcaccatccatcactggaggagcagccctcctacaaagatagtcagaaaactaaggaaaataaccaagtaattgtatctacaaaggatgacaacagcttttcagataagaacaaggagcatagctttttcatcacagactctgatgcttctggaggagatttttggagagaaagatcaggtgaacatacacaagaaaccaactcacctcattcactgaaaaaggatgtagaaaatatggggaaagaagaacttcagaaggttttatttgaacaaatagatttacggagacgactggaacaagaattccaggtgttaaaaggaaacacatctttcccagtattcaataattttcaggatcagatgaaaagggagctagcctaccgagaagaaatggtgcaacagttacaaattgtaagctgcatttctacttaa

SEQ ID NO: 97674 - DNA, 3006 bp, Artificial Sequence
  derived and/or modified sequence
atggcctcaagccctctgcccggtccaaacgatattcttcttgcctctccctctagcgcgtttcagcctgacacactcagccagcctagaccaggccacgctaacctcaaacctaaccaggttgggcaagtaattttgtatgggatacctatcgtatccctcgtaatcgatggtcaggagagactgtgcttggcgcagatttccaatactctgttgaagaacttttcatataacgaaatccacaaccggagagtcgccctagggatcacttgtgtgcagtgcactcccgtccagttagagattctccgcagagccggtgccatgcctatatcctctcgcaggtgtgggatgatcaccaaacgagaggctgagcgcctttgcaaatccttcctgggcgaaaatagacctcccaaactaccggataattttgcctttgacgtatcacatgaatgcgcctggggatgcagaggaagcttcatcccagcaaggtacaattccagtcgcgctaaatgcatcaaatgcagctattgcaatatgtatttctcgccaaacaagttcatctttcattcccaccgcacaccagacgctaagtatacccagcccgatgctgcaaattttaatagttggcgcagacatctcaagctgacagacaaaagtccccaggacgaacttgtgttcgcatgggaggatgtcaaggcaatgtttaatgggggtagcaggaagcgggcacttccccagcctggagcccaccctgcttgtcacccattgtcctcagtgaaggccgcagccgttgccgcagcagcagcggttgcaggaggaggcggtctactgggaccccacctgctcggcgcaccaccacctccccctcccccaccaccaccccttgcagagctcgccggagccccacacgcccaccacaaacgacctcgctttgacgatgatgacgatagcctgcaagaggctgcggttgtcgccgctgcttccttatccgcagctgctgccagtttgtccgtggctgcagcgtcggggggagccggaaccggcggaggaggcgctggcggtggttgcgtggccggtgtcggtgtgggagctggagctggtgctggtgctggcgcaggcgctaagggacccaggtcatacccagttatccctgttccctctaaaggtagctttgggggagttctacagaagttccctggatgcggcggactcttcccccatccatatacctttcccgctgctgccgctgcattttccttatgccataagaaagaggatgccggagcagctgctgaggcattgggaggagccggagctgggggagccggtgccgcaccaaaagctggtctcagtggcctcttctggccagctggacgaaaggacgccttctatcctcctttctgcatgttttggccacctcgcacccccggaggtttacctgtccctacttacctgcagccacccccacagcctccctcagccctggggtgtgctctgggcgagagtccagccctattgcgccaggctttcctggatttggctgaacccggaggcgctgccggtagcgcggaggcggcaccaccccctggccagccccctcaggtggtcgccaacggccctgggagcggccctccgccaccagctggcggagctggttctcgcgatgctctctttgagtcacccccagggggttccggcggtgactgttccgcaggctccacacctccagccgactctgtggcagcagccggtgctggagccgctgctgcaggctctggaccagcgggttcccgggtcccggctccgcatcacccccatctcctggaagggcgaaaggctggtggcggaagctaccaccatagtagcgcatttcggccagtaggcggtaaagacgacgccgagtcactggcaaagctccacggagcttctgcgggtgcacctcatagcgcacagacccacccccaccatcaccaccatccgcatcaccatcaccatcaccatcatccaccccagccgccttcccctcttctactccttccccctcagcccgatgagcccggaagcgaacggcatcatcctgccccacctcccccaccccctccccctccccctccgccattggcccagcatcctcatcatcggggtctgctgtctccagggggaacatcctgctgctatcctagcgaagacagcagcgaggatgaggacgacgaggaggaggagcaagaggtggacgtggaagggcataagcccccagagggcgaagaggaagaagagggacgcgaccctgacgatgacgaggaggaagacgaggagaccgaagtactcctaggcgatcccctggtcggcggaggaaggttcctgcaggggagaggtccctcggagaagggaagttcccgggatcgggctccagcagtagctggggcattccccctgggtttgaactcctcccggcttctgcaggaggacgggaaactcggagatcctgggagtgatcttcccccacccccacctccccctctcgcccctcagaaagcatctgggggaggatcttctagtccagggtctccagttcaccatcccagtttagaagaacaaccttcttataaggattcgcaaaagacaaaagagaataaccaggttatagtcagtactaaggacgataattccttctcagacaagaacaaggaacattcgttcttcatcactgattcagacgcttcaggaggagacttttggagggaacggagtggcgaacacacacaagaaacgaactccccccactctctcaaaaaggatgttgagaatatgggtaaggaggagctgcaaaaggtcctttttgaacagatcgatcttcggcgtagactggagcaggaattccaggtgttaaagggaaatacaagcttccctgtatttaataactttcaggatcagatgaagagggagctcgcctatcgggaggaaatggtccagcagttgcaaattgtttcctgcattagcacctag

SEQ ID NO: 97675 - DNA, 198 bp, Artificial Sequence
  derived and/or modified sequence
atggggaaccctcggttgcctcgactcttatgtgctctgaaattttctggctttttgagcaacattcgaggcccgctggctggagaggatggtatgggtgatactcagctggcaagggtgcgggattcagccttgaagaccccatggcgacctgctccatgccccccccccgcccattcactcgacgactggaagtag

SEQ ID NO: 97676 - protein, 906 aa, Artificial Sequence
  derived and/or modified sequence
MVGLLLFFFPAIFLEVSLLPRSPGRKVLLAGASSQRSVARMDGDVIIGALFSVHHQPPAEKVPERKCGEIREQYGIQRVEAMFHTLDKINADPVLLPNITLGSEIRDSCWHSSVALEQSIEFIRDSLISIRDEKDGINRCLPDGQSLPPGRTKKPIAGVIGPGSSSVAIQVQNLLQLFDIPQIAYSATSIDLSDKTLYKYFLRVVPSDTLQARAMLDIVKRYNWTYVSAVHTEGNYGESGMDAFKELAAQEGLCIAHSDKIYSNAGEKSFDRLLRKLRERLPKARVVVCFCEGMTVRGLLSAMRRLGVVGEFSLIGSDGWADRDEVIEGYEVEANGGITIKLQSPEVRSFDDYFLKLRLDTNTRNPWFPEFWQHRFQCRLPGHLLENPNFKRICTGNESLEENYVQDSKMGFVINAIYAMAHGLQNMHHALCPGHVGLCDAMKPIDGSKLLDFLIKSSFIGVSGEEVWFDEKGDAPGRYDIMNLQYTEANRYDYVHVGTWHEGVLNIDDYKIQMNKSGVVRSVCSEPCLKGQIKVIRKGEVSCCWICTACKENEYVQDEFTCKACDLGWWPNADLTGCEPIPVRYLEWSNIESIIAIAFSCLGILVTLFVTLIFVLYRDTPVVKSSSRELCYIILAGIFLGYVCPFTLIAKPTTTSCYLQRLLVGLSSAMCYSALVTKTNRIARILAGSKKKICTRKPRFMSAWAQVIIASILISVQLTLVVTLIIMEPPMPILSYPSIKEVYLICNTSNLGVVAPLGYNGLLIMSCTYYAFKTRNVPANFNEAKYIAFTMYTTCIIWLAFVPIYFGSNYKIITTCFAVSLSVTVALGCMFTPKMYIIIAKPERNVRSAFTTSDVVRMHVGDGKLPCRSNTFLNIFRRKKAGAGNAKKRQPEFSPTSQCPSAHVQL

SEQ ID NO: 97677 - DNA, 2721 bp, Artificial Sequence
  derived and/or modified sequence
atggtgggcctcctcctcttcttcttcccggcaatctttctggaggtttccttactgcctcggagccctggcagaaaggtgcttctggcgggggccagctcgcaacgaagcgtggcacgaatggacggagatgtcattatcggcgccctgtttagtgtacaccatcagccgcctgccgaaaaagtccccgagcgcaaatgcggtgagattcgggagcagtatgggattcaaagagtagaggctatgtttcataccttagataagataaacgctgatcccgtgctgctccctaacattacgctgggcagcgagattagggacagctgctggcattcttccgtggctctcgagcagtccatcgagtttatcagggactccctgatttccatccgtgatgagaaggacggcattaaccgctgtttgccagatgggcagagcctcccgcccgggcggactaagaagcccatcgcaggagtaataggacccggcagctcctctgtcgcaatccaggtccagaatttgctccagctgttcgatatcccccaaatagcttacagcgcaaccagcatagacctcagcgataaaacactctataaatactttctgagagtggtccccagcgataccctgcaggcgagagcaatgctggacattgtgaagaggtacaactggacctacgtttctgccgtgcacaccgaggggaactacggtgagtcgggaatggatgcctttaaagaattggcagcccaggaagggctgtgcattgcacacagcgataagatctacagcaacgccggtgaaaagagttttgaccgattgcttcgcaaactgcgagaaaggctgccgaaagcccgagtggtggtttgtttctgtgaggggatgaccgttagagggctgctctccgctatgcggagactgggcgtagtgggcgagttttccctcataggctctgacggatgggcagacagggacgaagttatcgagggatacgaggtggaagccaacggcggaatcaccataaaattgcagagtcctgaagtcaggtccttcgatgactattttctgaaactccggttagacactaatactagaaacccttggtttcccgagttctggcaacacaggtttcagtgtcgtctgccaggacacctgctggaaaatcctaacttcaagcggatttgtacaggcaacgaaagtttagaagagaactatgtgcaagatagtaaaatgggctttgttattaatgccatctacgcaatggcacatgggcttcagaatatgcaccatgctttgtgccccggacatgtgggtctgtgtgacgcaatgaagcccattgacggttcaaaactgcttgactttctgatcaaatctagcttcataggtgtgtcaggcgaagaagtgtggttcgatgagaagggcgacgcaccggggagatacgatattatgaatttgcaatacacagaggcaaacagatatgactacgtacacgtgggtacctggcatgagggagttctgaacatagacgactacaagatccagatgaacaaaagcggggtagtgcgctccgtgtgttccgagccatgcctcaaaggacagatcaaggtcatccgaaaaggcgaggtatcttgttgctggatttgcaccgcgtgtaaggagaatgagtacgtgcaggacgagttcacttgcaaggcatgtgacttgggatggtggccgaatgcagacctgactggctgtgagccgattcccgtcagatacctcgagtggtcaaatattgagtcaatcattgccatagcgttctcttgtctcggcatcttggtgacattattcgtgacacttatcttcgtgttgtatcgggacacgcctgtagttaaatccagctcacgggaactctgttacatcattctggcaggaatatttctgggctacgtgtgcccttttaccctgattgcaaaacccaccacgacttcttgttacctgcagcggcttctggtggggctatcttcagctatgtgttacagtgcactggtgactaaaaccaatcggatcgccaggatcctggcaggatctaaaaaaaagatttgcacacgcaagccccggtttatgagtgcttgggcgcaagtcataattgcctcaatactgatctcagttcagctcaccttggttgtgactttgattatcatggaacctcctatgcccatcttgtcctatccaagcatcaaagaggtatacctaatctgtaacacgagcaacctgggagttgtcgctcctctgggatataatggtctgctgattatgagctgcacatactatgccttcaagaccagaaacgtccccgccaacttcaacgaggccaaatatattgcatttactatgtatacaacctgtattatttggctggcattcgttccaatttacttcggctccaattacaaaataataactacctgcttcgccgtcagtctttccgtcaccgtcgccctgggatgcatgttcactcccaaaatgtatataattatcgctaagccagaaagaaatgtcagatccgcctttacaacctctgacgtggtccgaatgcacgttggtgatggaaaactgccctgccgttctaatacgtttctaaacattttccgccgcaagaaagctggagccggtaacgcaaagaagagacaacctgagtttagccccacctctcagtgccctagcgcccacgttcagctctag

SEQ ID NO: 97678 - DNA, 2721 bp, Artificial Sequence
  derived and/or modified sequence
atggtgggattgctgctgttctttttccctgcaatctttctggaggtaagtcttttgcctcggagtccaggaagaaaggtgcttttggctggagcgtcttcacagcggagcgtagcaaggatggatggggatgttattataggagcactcttctccgtacatcaccaaccacccgccgaaaaggtaccagagcgcaagtgcggagagattcgggagcagtacggcatccagagggtggaggctatgttccacacactggataagatcaatgcagatccagtgttgctgccaaacatcacattgggttccgaaattagggattcgtgttggcactcttctgttgcactagaacagtcaatcgagttcattcgggacagcttgattagcatcagagacgagaaggatggcatcaatcgctgtcttcccgatggccaatcgctgccccccggaaggacaaaaaagccaattgccggagtgattgggcccggctcttccagcgtggccatccaggtccagaacttactgcaactgtttgatatcccccagattgcctattcagctacctccatcgatctctcggacaaaactctttacaagtacttcctcagagtggttccttcagacactctgcaggcccgagcaatgcttgatatagtgaaacgctacaactggacttacgtgtcagctgtgcacaccgaaggtaattatggggagtcaggcatggatgctttcaaggagctcgccgcccaggaagggctgtgcatcgcgcactctgataagatttattcaaatgcgggggaaaagtcattcgaccgcctgctcaggaaactccgggagagactaccaaaagctcgggtggtcgtctgtttctgcgagggtatgaccgtgagaggcctgctcagcgccatgagacgactgggagtggtgggggagttttccctgattggttctgatggttgggctgaccgagatgaagtgatcgaaggctatgaagtcgaagccaatggagggataaccattaagctacaatctcccgaggtgagaagctttgatgattattttctgaagcttcggttggatacaaacacgcgaaacccctggttcccagagttctggcagcaccgtttccagtgcagactgccaggccatctgttggagaaccctaattttaaaaggatttgtacaggcaatgagtcactggaggaaaattacgtgcaagacagcaaaatggggtttgtgatcaatgccatttacgctatggcacacggtctccagaatatgcaccacgccctgtgccctggtcatgtgggactttgcgacgccatgaagccgatagacgggtctaagctgctagatttcctaatcaagagctccttcatcggtgtatcgggggaagaagtttggtttgatgagaagggcgacgctcctgggagatacgacatcatgaacctccagtacaccgaggccaacagatatgattacgtccacgtcgggacttggcacgaaggtgttctgaacattgacgactataaaatccaaatgaacaagtctggtgtagtgcgaagcgtatgtagcgagccttgtttaaaaggtcaaataaaagtcatccggaaaggcgaggtgtcctgctgctggatttgcacggcctgcaaagagaacgagtacgtccaagatgaatttacctgcaaagcttgtgacctgggttggtggcctaatgccgacctgactggatgcgaacctatcccggtgaggtatctggaatggtccaacattgaatcaattatagcgattgccttcagctgcttggggattctagtcaccctttttgttaccctgatctttgtgctatatcgcgatacgccggtggtgaaatcctcgagtagggagttatgctacatcatcttggcaggaatcttcctgggatatgtttgcccgtttaccttaatagctaagcctactactacttcttgttatctgcaacgccttctcgtggggctttcttctgccatgtgctactcagccctcgtgaccaaaaccaacaggatagctagaatcctcgctggttccaaaaaaaagatttgcactagaaagcccagattcatgagcgcttgggcccaggtgataattgcctccatcctcatctccgtccagctgactttggtggtaaccttgatcattatggaaccccccatgccaattctctcttacccatcaatcaaagaagtgtacttgatatgcaatacaagtaatttgggggtggtcgcaccgctggggtataacggcctgttgattatgagctgcacgtactatgccttcaagactcgcaacgttcctgccaattttaacgaagcgaagtacattgccttcacgatgtatactacctgtattatttggttagcttttgtgcccatctacttcggatccaactacaaaattattacaacgtgtttcgccgtcagcctgtctgtgactgttgcccttggctgtatgtttactccgaaaatgtatattattatcgccaagcccgagcggaatgtacggtctgcctttaccacgagcgacgtagtgcggatgcacgttggcgacggaaaacttccatgccgatctaataccttccttaacattttcaggcgaaagaaggcgggggcggggaatgctaaaaagcgccagccagaattctcacctacctctcagtgcccaagcgcacatgtgcagctttag

SEQ ID NO: 97679 - DNA, 2721 bp, Artificial Sequence
  derived and/or modified sequence
atggtgggactcctcctcttcttcttcccagctatcttcctcgaagtttcactgttgccgagaagccccggcagaaaggttcttcttgcgggagctagctcgcaacgatccgtcgcacgcatggatggcgacgtgattatcggagcactattcagtgtccaccaccagccccctgccgaaaaagtgccagaacgaaagtgtggcgaaattcgtgagcagtacggtattcagcgggtggaggctatgttccacactttggataagattaacgcagatcccgttctgttgcccaatatcacactcggctctgagatccgcgattcctgttggcattccagtgttgccctcgagcagagtatcgagttcattagagacagcctgatttccatcagggacgagaaagatggaataaaccggtgtctacctgacggacagtcactcccacccgggaggacaaagaagcccatcgcaggcgtcatcggccctggatccagttctgttgctatccaggtgcaaaaccttctgcagctttttgacatcccacagatcgcctactctgctacaagcatcgatctatccgacaaaacgctgtacaaatactttctgagggtggtaccctccgacactctccaggcccgggccatgctggacattgtgaagcgttataattggacatatgtgtctgctgttcacaccgaaggcaactacggagaatctggaatggacgcgtttaaggaactggcggcccaagaagggttgtgcatagcccacagtgataagatttattcaaatgccggggaaaagtcgtttgatcgcctgcttagaaaactgagggaacgccttccaaaggctcgggtagtcgtatgcttctgtgaaggaatgaccgtgcgcgggctcctgtcagccatgcggcggctgggcgtagtgggggaattctctctgatcggttcagacggttgggctgaccgggatgaggtgatcgagggctatgaggtcgaagcaaatggaggtattaccattaagctgcagtcaccagaggtcagatcgttcgatgattattttctgaaactcaggctggacacgaacacacgtaacccttggttccctgaattttggcagcacagatttcagtgtagactgccaggccatctgctggaaaatcccaattttaaacggatctgtacaggcaacgagtcgctggaagaaaactacgtccaggattcgaaaatgggattcgttatcaacgcaatttatgccatggctcatggcctgcagaacatgcaccatgctctctgtccgggccacgtgggtctgtgcgatgccatgaagcccatcgacggcagcaagctgcttgattttcttataaaatcctcttttataggcgtcagcggtgaagaggtttggtttgacgagaaaggcgacgcccccggccgctacgatatcatgaatctgcagtacactgaagcaaatcgctatgactacgtgcacgtgggtacctggcacgaaggcgtgctgaatattgacgactataaaatccagatgaacaaaagcggggtggttcgttctgtgtgttccgagccctgcctcaagggccaaattaaggtgatccgcaaaggtgaagttagttgttgttggatatgtaccgcctgtaaggaaaatgaatacgttcaggatgaattcacgtgtaaggcctgtgacctaggctggtggcctaatgcggatcttacaggatgcgaacctatccctgtgcggtatctcgagtggagcaatattgagagtattattgcaatcgcctttagttgtttgggcattcttgtgacgctctttgtcacactcattttcgtcctgtaccgggacacccccgttgtgaagagttctagcagagagctatgttacattatcctggctgggatctttttggggtatgtctgtccattcaccctcattgcgaaaccgaccacaacttcttgctatctacagaggctacttgtgggtctatcttcagccatgtgttatagtgcactcgtcacaaaaaccaacagaatcgctagaattctggcaggcagtaagaaaaaaatctgtactcgaaaacctaggttcatgagcgcctgggcccaggtgatcattgcatccattcttatcagtgtccaactaaccctggtggtgactcttatcattatggaacccccgatgcccatcctctcctacccaagtattaaggaggtttatctgatttgtaacactagcaacctcggcgtcgttgcgcccttgggttataatggcctgctcatcatgtcatgtacctactatgccttcaagacccgcaatgtgcctgcaaatttcaatgaggcaaagtacatcgcattcacgatgtatacgacctgcattatttggcttgctttcgtccccatatatttcggatccaattataaaattatcactacatgcttcgccgtgagcctctccgtaaccgttgctctcggctgcatgttcacccccaaaatgtacatcatcatcgcaaaacctgagaggaatgtacggtcagctttcaccaccagcgatgtggtccgcatgcacgttggggatggaaagctgccctgcaggtcaaacacctttctcaatatatttaggcgcaaaaaagccggcgccggcaacgccaagaagcggcagcctgaattttccccaacatcacagtgtccatcagctcacgttcagctgtag

SEQ ID NO: 97680 - DNA, 6939 bp, Artificial Sequence
  derived and/or modified sequence
agtgctgaagaaagagggcactagtgtacagcccagatcgcatccttgcaccgtctggattagagctgaggcgtctgcaagccgagcgtggccacggtcctctggccccgggaccatagcgctgtctaccccgactcaggtactcagcagcatctagctcaccgctgccaacacgacttccactgtactcttgatcaatttaccttgatgcactaccggtgaagaacggggactcgaattcccttacaaacgcctccagcttgtagaggcggtcgtggaggacccagaggaggagacgaaggggaaggaggcggtggtggaggaggcaaaggccttggacgaccattgttggcgaggggcaccactccgggagaggcggcgctgggcgtcttgggggtgcgcgccgggagcctgcagcgggaccagcgtgggaacgcggctggcaggctgtggacctcgtcctcaccaccatggtcgggctccttttgttttttttcccagcgatctttttggaggtgtcccttctccccagaagccccggcaggaaagtgttgctggcaggagcgtcgtctcagcgctcggtggccagaatggacggagatgtcatcattggagccctcttctcagtccatcaccagcctccggccgagaaagtgcccgagaggaagtgtggggagatcagggagcagtatggcatccagagggtggaggccatgttccacacgttggataagatcaacgcggacccggtcctcctgcccaacatcaccctgggcagtgagatccgggactcctgctggcactcttccgtggctctggaacagagcattgagttcattagggactctctgatttccattcgagatgagaaggatgggatcaaccggtgtctgcctgacggccagtccctccccccaggcaggactaagaagcccattgcgggagtgatcggtcccggctccagctctgtagccattcaagtgcagaacctgctccagctcttcgacatcccccagatcgcttattcagccacaagcatcgacctgagtgacaaaactttgtacaaatacttcctgagggttgtcccttctgacactttgcaggcaagggccatgcttgacatagtcaaacgttacaattggacctatgtctctgcagtccacacggaagggaattatggggagagcggaatggacgctttcaaagagctggctgcccaggaaggcctctgtatcgcccattctgacaaaatctacagcaacgctggggagaagagctttgaccgactcttgcgcaaactccgagagaggcttcccaaggctagagtggtggtctgcttctgtgaaggcatgacagtgcgaggactcctgagcgccatgcggcgccttggcgtcgtgggcgagttctcactcattggaagtgatggatgggcagacagagatgaagtcattgaaggttatgaggtggaagccaacgggggaatcacgataaagctgcagtctccagaggtcaggtcatttgatgattatttcctgaaactgaggctggacactaacacgaggaatccctggttccctgagttctggcaacatcggttccagtgccgccttccaggacaccttctggaaaatcccaactttaaacgaatctgcacaggcaatgaaagcttagaagaaaactatgtccaggacagtaagatggggtttgtcatcaatgccatctatgccatggcacatgggctgcagaacatgcaccatgccctctgccctggccacgtgggcctctgcgatgccatgaagcccatcgacggcagcaagctgctggacttcctcatcaagtcctcattcattggagtatctggagaggaggtgtggtttgatgagaaaggagacgctcctggaaggtatgatatcatgaatctgcagtacactgaagctaatcgctatgactatgtgcacgttggaacctggcatgaaggagtgctgaacattgatgattacaaaatccagatgaacaagagtggagtggtgcggtctgtgtgcagtgagccttgcttaaagggccagattaaggttatacggaaaggagaagtgagctgctgctggatttgcacggcctgcaaagagaatgaatatgtgcaagatgagttcacctgcaaagcttgtgacttgggatggtggcccaatgcagatctaacaggctgtgagcccattcctgtgcgctatcttgagtggagcaacatcgaatccattatagccatcgccttttcatgcctgggaatccttgttaccttgtttgtcaccctaatctttgtactgtaccgggacacaccagtggtcaaatcctccagtcgggagctctgctacatcatcctagctggcatcttccttggttatgtgtgcccattcactctcattgccaaacctactaccacctcctgctacctccagcgcctcttggttggcctctcctctgcgatgtgctactctgctttagtgactaaaaccaatcgtattgcacgcatcctggctggcagcaagaagaagatctgcacccggaagcccaggttcatgagtgcctgggctcaggtgatcattgcctcaattctgattagtgtgcaactaaccctggtggtaaccctgatcatcatggaaccccctatgcccattctgtcctacccaagtatcaaggaagtctaccttatctgcaataccagcaacctgggtgtggtggcccctttgggctacaatggactcctcatcatgagctgtacctactatgccttcaagacccgcaacgtgcccgccaacttcaacgaggccaaatatatcgcgttcaccatgtacaccacctgtatcatctggctagcttttgtgcccatttactttgggagcaactacaagatcatcacaacttgctttgcagtgagtctcagtgtaacagtggctctggggtgcatgttcactcccaagatgtacatcattattgccaagcctgagaggaatgtccgcagtgccttcaccacctctgatgttgtccgcatgcatgttggcgatggcaagctgccctgccgctccaacactttcctcaacatcttccgaagaaagaaggcaggggcagggaatgccaagaagaggcagccagaattctcgcccaccagccaatgtccgtcggcacatgtgcagctttgaaaacccccacactgcagtgaatgtttctaatggcaagtctgtgtcatggtctgaaccaggtggaggacaggtgcccaagggacagcatatgtggcaccgcctctctgtgcacgtgaagaccaatgagacggcctgcaaccaaacagccgtcatcaagcccctcactaaaagttaccaaggctctggcaagagcctgaccttttcagataccagcaccaagaccctttacaacgtagaggaggaggaggatgcccagccgattcgctttagcccgcctggtagcccttccatggtggtgcacaggcgcgtgccaagcgcggcgaccactccgcctctgccgtcccacctgaccgcagaggagacccccctcttcctggccgaaccagccctccccaagggcttgccccctcctctccagcagcagcagcaaccccctccacagcagaaatcgctgatggaccagctccagggagtggtcagcaacttcagtaccgcgatcccggattttcacgcggtgctggcaggccccggtggtcccgggaacgggctgcggtccctgtacccgcccccgccacctccgcagcacctgcagatgctgccgctgcagctgagcacctttggggaggagctggtctccccgcccgcggacgacgacgacgacagcgagaggtttaagctcctccaggagtacgtgtatgagcacgagcgggaagggaacacggaagaagacgaactggaagaggaggaggaggacctgcaggcggccagcaaactgaccccggatgattcgcctgcgctgacgcctccgtcgcctttccgcgactcggtggcctcgggcagctcggtgcccagctcccccgtgtccgagtcggtgctctgcacccctcccaacgtatcctacgcctctgtcattctgcgggactacaagcaaagctcttccaccctgtaagggggaagggtccacatagaaaagcaagacaagccagagatctcccacacctccagagatgtgcaaacagctgggaggaaaagcctgggagtggggggcctcgtcgggaggacaggagaccgctgctgctgctgccgctactgctgctgctgccttaagtaggaagagagggaaggacaccaagcaaaaaatgttccaggccaggattcggattcttgaattactcgaagccttctctgggaagaaagggaattctgacaaagcacaattccatatggtatgtaacttttatcacaaatcaaatagtgacatcacaaacataatgtcctcttttgcacaattgtgcatagatatatatatgcccacacacactgggccatgcttgccaaggaacagcccacgtggacatgccagtcggatcatgagttcacctgatggcattcggagtgagctggtggagccagacagagcaggtgcggggaagggaagggcccaggccagacccatcccaaacggatgatgggatgatgggacagcagctccttgctcagaagcccttctccccgctgggctgacagactcctcatcttcaggagactcaggaatggagcggcacaggggtctctcttcatccactgcaacccatccagtgccagctttgagattgcacttgaagaaaggtgcatggaccccctgctgctctgcagattccctttatttaggaaaacaggaataagagcaaaattatcaccaaaaagtgcttcatcaggcgtgctacaggaggaaggagctagaaatagaacaatccatcagcatgagactttgaaaaaaaaacacatgatcagcttctcatgttccatattcacttattggcgatttggggaaaaggccggaacaagagattgttacgagagtggcagaaacccttttgtagattgacttgtgtttgtgccaagcgggctttccattgaccttcagttaaagaacaaaccatgtgacaaaattgttaccttccacttactgtagcaaataatacctacaagttgaacttctaagatgcgtatatgtacaatttggtgccattatttctcctacgtattagagaaacaaatccatctttgaatctaatggtgtactcatagcaactattactggtttaaatgacaaataattctatcctattgtcactgaagtccttgtaactagcgagtgaatgtgttcctgtgtccttgtatatgtgcgatcgtaaaatttgtgcaatgtaatgtcaaattgactggtcaatgtcaacctagtagtcaatctaactgcaattagaaattgtcttttgaatatactatatatattttttatgttccaataatgttttgtacatcattgtcatcaatatctacagaagctctttgacggtttgaatactatggctcaaggttttcatatgcagctcggatggacatttttcttctaagatggaacttatttttcagatattttctgatgtggagatatgttattaatgaagtggtttgaaaatttgttatattaaaagtgcacaaaaactgagagtgaaaataaaaggtacattttataagcttgcacacattattaacacataagattgaacaaagcatttagattattccaggttatatcatttttttaaagattttccacagctacttgagtgtctaacatacagtaacatctaactcagctaataatttgtaaaatctttatcaatcacattttgccttcttttaatttttatgttcatggacttttattcctgtgtcttggctgtcataactttttatttctgctatttgctgttgtgtaatatccatggacatgtaatccacttactccatctttacaatccctttttaccaccaataaaaggatttttcttgctgttttgatttcttctattatttgtggaatgaattataccccccttaaatatctttgtttatgccttatgttcagtcatattttaatatgcttccttcatattgaagctgctgatttctcagccaaaaatcatcttagaatctttaaatatccattgcatcatttgttcagaatttaacatccattccaatgttggaggcttgtattacttatatttcatcatattctattgccaagtttagtcagttccacaccaagaatgaactgcatttcctttaaaaattattttaaaacacctttattgaaaagatctcatgactgagatgtggactttggttccatgttttcattgtaagaaagcagagagcggaaaatcaatggctccagtgattaatagatgggtttttagtaattgacaaattcatgagggaaagcatatgatctctttattagtgaatcatgcttattttttactcttaatgccactaatatacatccctaatatcacagggcttgtgcattcagatttttaaaaaattaggatagataaggaaacaacttatattcaagtgtaagatgatatcaggttggtctaagacttttggtgaacacgttcattcaactgtgatcactttattactctgaatgcctactattatcctgattatggggtctcctgaataaatagagtattagtccttatgtcatcattgttcaaaattggagatgtacacatacataccctataccaagagggccgaaactcttcaccttgatgtatgttctgatacaagttgttcagcttcttgtaaatgtgttttccttcggcttgttactgccttttgtcaaataatcttgacaatgctgtataataaatattttctattt

SEQ ID NO: 97681 - DNA, 6836 bp, Artificial Sequence
  derived and/or modified sequence
caggtactcaggtatgtctcaagtccatgtcctccaaacagactcagcatctagctcaccgctgccaacacgacttccactgtactcttgatcaatttaccttgatgcactaccggtgaagaacggggactcgaattcccttacaaacgcctccagcttgtagaggcggtcgtggaggacccagaggaggagacgaaggggaaggaggcggtggtggaggaggcaaaggccttggacgaccattgttggcgaggggcaccactccgggagaggcggcgctgggcgtcttgggggtgcgcgccgggagcctgcagcgggaccagcgtgggaacgcggctggcaggctgtggacctcgtcctcaccaccatggtcgggctccttttgttttttttcccagcgatctttttggaggtgtcccttctccccagaagccccggcaggaaagtgttgctggcaggagcgtcgtctcagcgctcggtggccagaatggacggagatgtcatcattggagccctcttctcagtccatcaccagcctccggccgagaaagtgcccgagaggaagtgtggggagatcagggagcagtatggcatccagagggtggaggccatgttccacacgttggataagatcaacgcggacccggtcctcctgcccaacatcaccctgggcagtgagatccgggactcctgctggcactcttccgtggctctggaacagagcattgagttcattagggactctctgatttccattcgagatgagaaggatgggatcaaccggtgtctgcctgacggccagtccctccccccaggcaggactaagaagcccattgcgggagtgatcggtcccggctccagctctgtagccattcaagtgcagaacctgctccagctcttcgacatcccccagatcgcttattcagccacaagcatcgacctgagtgacaaaactttgtacaaatacttcctgagggttgtcccttctgacactttgcaggcaagggccatgcttgacatagtcaaacgttacaattggacctatgtctctgcagtccacacggaagggaattatggggagagcggaatggacgctttcaaagagctggctgcccaggaaggcctctgtatcgcccattctgacaaaatctacagcaacgctggggagaagagctttgaccgactcttgcgcaaactccgagagaggcttcccaaggctagagtggtggtctgcttctgtgaaggcatgacagtgcgaggactcctgagcgccatgcggcgccttggcgtcgtgggcgagttctcactcattggaagtgatggatgggcagacagagatgaagtcattgaaggttatgaggtggaagccaacgggggaatcacgataaagctgcagtctccagaggtcaggtcatttgatgattatttcctgaaactgaggctggacactaacacgaggaatccctggttccctgagttctggcaacatcggttccagtgccgccttccaggacaccttctggaaaatcccaactttaaacgaatctgcacaggcaatgaaagcttagaagaaaactatgtccaggacagtaagatggggtttgtcatcaatgccatctatgccatggcacatgggctgcagaacatgcaccatgccctctgccctggccacgtgggcctctgcgatgccatgaagcccatcgacggcagcaagctgctggacttcctcatcaagtcctcattcattggagtatctggagaggaggtgtggtttgatgagaaaggagacgctcctggaaggtatgatatcatgaatctgcagtacactgaagctaatcgctatgactatgtgcacgttggaacctggcatgaaggagtgctgaacattgatgattacaaaatccagatgaacaagagtggagtggtgcggtctgtgtgcagtgagccttgcttaaagggccagattaaggttatacggaaaggagaagtgagctgctgctggatttgcacggcctgcaaagagaatgaatatgtgcaagatgagttcacctgcaaagcttgtgacttgggatggtggcccaatgcagatctaacaggctgtgagcccattcctgtgcgctatcttgagtggagcaacatcgaatccattatagccatcgccttttcatgcctgggaatccttgttaccttgtttgtcaccctaatctttgtactgtaccgggacacaccagtggtcaaatcctccagtcgggagctctgctacatcatcctagctggcatcttccttggttatgtgtgcccattcactctcattgccaaacctactaccacctcctgctacctccagcgcctcttggttggcctctcctctgcgatgtgctactctgctttagtgactaaaaccaatcgtattgcacgcatcctggctggcagcaagaagaagatctgcacccggaagcccaggttcatgagtgcctgggctcaggtgatcattgcctcaattctgattagtgtgcaactaaccctggtggtaaccctgatcatcatggaaccccctatgcccattctgtcctacccaagtatcaaggaagtctaccttatctgcaataccagcaacctgggtgtggtggcccctttgggctacaatggactcctcatcatgagctgtacctactatgccttcaagacccgcaacgtgcccgccaacttcaacgaggccaaatatatcgcgttcaccatgtacaccacctgtatcatctggctagcttttgtgcccatttactttgggagcaactacaagatcatcacaacttgctttgcagtgagtctcagtgtaacagtggctctggggtgcatgttcactcccaagatgtacatcattattgccaagcctgagaggaatgtccgcagtgccttcaccacctctgatgttgtccgcatgcatgttggcgatggcaagctgccctgccgctccaacactttcctcaacatcttccgaagaaagaaggcaggggcagggaatgccaagaagaggcagccagaattctcgcccaccagccaatgtccgtcggcacatgtgcagctttgaaaacccccacactgcagtgaatgtttctaatggcaagtctgtgtcatggtctgaaccaggtggaggacaggtgcccaagggacagcatatgtggcaccgcctctctgtgcacgtgaagaccaatgagacggcctgcaaccaaacagccgtcatcaagcccctcactaaaagttaccaaggctctggcaagagcctgaccttttcagataccagcaccaagaccctttacaacgtagaggaggaggaggatgcccagccgattcgctttagcccgcctggtagcccttccatggtggtgcacaggcgcgtgccaagcgcggcgaccactccgcctctgccgtcccacctgaccgcagaggagacccccctcttcctggccgaaccagccctccccaagggcttgccccctcctctccagcagcagcagcaaccccctccacagcagaaatcgctgatggaccagctccagggagtggtcagcaacttcagtaccgcgatcccggattttcacgcggtgctggcaggccccggtggtcccgggaacgggctgcggtccctgtacccgcccccgccacctccgcagcacctgcagatgctgccgctgcagctgagcacctttggggaggagctggtctccccgcccgcggacgacgacgacgacagcgagaggtttaagctcctccaggagtacgtgtatgagcacgagcgggaagggaacacggaagaagacgaactggaagaggaggaggaggacctgcaggcggccagcaaactgaccccggatgattcgcctgcgctgacgcctccgtcgcctttccgcgactcggtggcctcgggcagctcggtgcccagctcccccgtgtccgagtcggtgctctgcacccctcccaacgtatcctacgcctctgtcattctgcgggactacaagcaaagctcttccaccctgtaagggggaagggtccacatagaaaagcaagacaagccagagatctcccacacctccagagatgtgcaaacagctgggaggaaaagcctgggagtggggggcctcgtcgggaggacaggagaccgctgctgctgctgccgctactgctgctgctgccttaagtaggaagagagggaaggacaccaagcaaaaaatgttccaggccaggattcggattcttgaattactcgaagccttctctgggaagaaagggaattctgacaaagcacaattccatatggtatgtaacttttatcacaaatcaaatagtgacatcacaaacataatgtcctcttttgcacaattgtgcatagatatatatatgcccacacacactgggccatgcttgccaaggaacagcccacgtggacatgccagtcggatcatgagttcacctgatggcattcggagtgagctggtggagccagacagagcaggtgcggggaagggaagggcccaggccagacccatcccaaacggatgatgggatgatgggacagcagctccttgctcagaagcccttctccccgctgggctgacagactcctcatcttcaggagactcaggaatggagcggcacaggggtctctcttcatccactgcaacccatccagtgccagctttgagattgcacttgaagaaaggtgcatggaccccctgctgctctgcagattccctttatttaggaaaacaggaataagagcaaaattatcaccaaaaagtgcttcatcaggcgtgctacaggaggaaggagctagaaatagaacaatccatcagcatgagactttgaaaaaaaaacacatgatcagcttctcatgttccatattcacttattggcgatttggggaaaaggccggaacaagagattgttacgagagtggcagaaacccttttgtagattgacttgtgtttgtgccaagcgggctttccattgaccttcagttaaagaacaaaccatgtgacaaaattgttaccttccacttactgtagcaaataatacctacaagttgaacttctaagatgcgtatatgtacaatttggtgccattatttctcctacgtattagagaaacaaatccatctttgaatctaatggtgtactcatagcaactattactggtttaaatgacaaataattctatcctattgtcactgaagtccttgtaactagcgagtgaatgtgttcctgtgtccttgtatatgtgcgatcgtaaaatttgtgcaatgtaatgtcaaattgactggtcaatgtcaacctagtagtcaatctaactgcaattagaaattgtcttttgaatatactatatatattttttatgttccaataatgttttgtacatcattgtcatcaatatctacagaagctctttgacggtttgaatactatggctcaaggttttcatatgcagctcggatggacatttttcttctaagatggaacttatttttcagatattttctgatgtggagatatgttattaatgaagtggtttgaaaatttgttatattaaaagtgcacaaaaactgagagtgaaaataaaaggtacattttataagcttgcacacattattaacacataagattgaacaaagcatttagattattccaggttatatcatttttttaaagattttccacagctacttgagtgtctaacatacagtaacatctaactcagctaataatttgtaaaatctttatcaatcacattttgccttcttttaatttttatgttcatggacttttattcctgtgtcttggctgtcataactttttatttctgctatttgctgttgtgtaatatccatggacatgtaatccacttactccatctttacaatccctttttaccaccaataaaaggatttttcttgctgttttgatttcttctattatttgtggaatgaattataccccccttaaatatctttgtttatgccttatgttcagtcatattttaatatgcttccttcatattgaagctgctgatttctcagccaaaaatcatcttagaatctttaaatatccattgcatcatttgttcagaatttaacatccattccaatgttggaggcttgtattacttatatttcatcatattctattgccaagtttagtcagttccacaccaagaatgaactgcatttcctttaaaaattattttaaaacacctttattgaaaagatctcatgactgagatgtggactttggttccatgttttcattgtaagaaagcagagagcggaaaatcaatggctccagtgattaatagatgggtttttagtaattgacaaattcatgagggaaagcatatgatctctttattagtgaatcatgcttattttttactcttaatgccactaatatacatccctaatatcacagggcttgtgcattcagatttttaaaaaattaggatagataaggaaacaacttatattcaagtgtaagatgatatcaggttggtctaagacttttggtgaacacgttcattcaactgtgatcactttattactctgaatgcctactattatcctgattatggggtctcctgaataaatagagtattagtccttatgtcatcattgttcaaaattggagatgtacacatacataccctataccaagagggccgaaactcttcaccttgatgtatgttctgatacaagttgttcagcttcttgtaaatgtgttttccttcggcttgttactgccttttgtcaaataatcttgacaatgctgtataataaatattttctattt

SEQ ID NO: 97682 - DNA, 3756 bp, Artificial Sequence
  derived and/or modified sequence
gctggcaggctgtggacctcgtcctcaccaccatggtcgggctccttttgttttttttcccagcgatctttttggaggtgtcccttctccccagaagccccggcaggaaagtgttgctggcaggagcgtcgtctcagcgctcggtggccagaatggacggagatgtcatcattggagccctcttctcagtccatcaccagcctccggccgagaaagtgcccgagaggaagtgtggggagatcagggagcagtatggcatccagagggtggaggccatgttccacacgttggataagatcaacgcggacccggtcctcctgcccaacatcaccctgggcagtgagatccgggactcctgctggcactcttccgtggctctggaacagagcattgagttcattagggactctctgatttccattcgagatgagaaggatgggatcaaccggtgtctgcctgacggccagtccctccccccaggcaggactaagaagcccattgcgggagtgatcggtcccggctccagctctgtagccattcaagtgcagaacctgctccagctcttcgacatcccccagatcgcttattcagccacaagcatcgacctgagtgacaaaactttgtacaaatacttcctgagggttgtcccttctgacactttgcaggcaagggccatgcttgacatagtcaaacgttacaattggacctatgtctctgcagtccacacggaagggaattatggggagagcggaatggacgctttcaaagagctggctgcccaggaaggcctctgtatcgcccattctgacaaaatctacagcaacgctggggagaagagctttgaccgactcttgcgcaaactccgagagaggcttcccaaggctagagtggtggtctgcttctgtgaaggcatgacagtgcgaggactcctgagcgccatgcggcgccttggcgtcgtgggcgagttctcactcattggaagtgatggatgggcagacagagatgaagtcattgaaggttatgaggtggaagccaacgggggaatcacgataaagctgcagtctccagaggtcaggtcatttgatgattatttcctgaaactgaggctggacactaacacgaggaatccctggttccctgagttctggcaacatcggttccagtgccgccttccaggacaccttctggaaaatcccaactttaaacgaatctgcacaggcaatgaaagcttagaagaaaactatgtccaggacagtaagatggggtttgtcatcaatgccatctatgccatggcacatgggctgcagaacatgcaccatgccctctgccctggccacgtgggcctctgcgatgccatgaagcccatcgacggcagcaagctgctggacttcctcatcaagtcctcattcattggagtatctggagaggaggtgtggtttgatgagaaaggagacgctcctggaaggtatgatatcatgaatctgcagtacactgaagctaatcgctatgactatgtgcacgttggaacctggcatgaaggagtgctgaacattgatgattacaaaatccagatgaacaagagtggagtggtgcggtctgtgtgcagtgagccttgcttaaagggccagattaaggttatacggaaaggagaagtgagctgctgctggatttgcacggcctgcaaagagaatgaatatgtgcaagatgagttcacctgcaaagcttgtgacttgggatggtggcccaatgcagatctaacaggctgtgagcccattcctgtgcgctatcttgagtggagcaacatcgaatccattatagccatcgccttttcatgcctgggaatccttgttaccttgtttgtcaccctaatctttgtactgtaccgggacacaccagtggtcaaatcctccagtcgggagctctgctacatcatcctagctggcatcttccttggttatgtgtgcccattcactctcattgccaaacctactaccacctcctgctacctccagcgcctcttggttggcctctcctctgcgatgtgctactctgctttagtgactaaaaccaatcgtattgcacgcatcctggctggcagcaagaagaagatctgcacccggaagcccaggttcatgagtgcctgggctcaggtgatcattgcctcaattctgattagtgtgcaactaaccctggtggtaaccctgatcatcatggaaccccctatgcccattctgtcctacccaagtatcaaggaagtctaccttatctgcaataccagcaacctgggtgtggtggcccctttgggctacaatggactcctcatcatgagctgtacctactatgccttcaagacccgcaacgtgcccgccaacttcaacgaggccaaatatatcgcgttcaccatgtacaccacctgtatcatctggctagcttttgtgcccatttactttgggagcaactacaagatcatcacaacttgctttgcagtgagtctcagtgtaacagtggctctggggtgcatgttcactcccaagatgtacatcattattgccaagcctgagaggaatgtccgcagtgccttcaccacctctgatgttgtccgcatgcatgttggcgatggcaagctgccctgccgctccaacactttcctcaacatcttccgaagaaagaaggcaggggcagggaatgccaagaagaggcagccagaattctcgcccaccagccaatgtccgtcggcacatgtgcagctttgaaaacccccacactgcagtgaatgtgtggaggacaggtgcccaagggacagcatatgtggcaccgcctctctgtgcacgtgaagaccaatgagacggcctgcaaccaaacagccgtcatcaagcccctcactaaaagttaccaaggctctggcaagagcctgaccttttcagataccagcaccaagaccctttacaacgtagaggaggaggaggatgcccagccgattcgctttagcccgcctggtagcccttccatggtggtgcacaggcgcgtgccaagcgcggcgaccactccgcctctgccgtcccacctgaccgcagaggagacccccctcttcctggccgaaccagccctccccaagggcttgccccctcctctccagcagcagcagcaaccccctccacagcagaaatcgctgatggaccagctccagggagtggtcagcaacttcagtaccgcgatcccggattttcacgcggtgctggcaggccccggtggtcccgggaacgggctgcggtccctgtacccgcccccgccacctccgcagcacctgcagatgctgccgctgcagctgagcacctttggggaggagctggtctccccgcccgcggacgacgacgacgacagcgagaggtttaagctcctccaggagtacgtgtatgagcacgagcgggaagggaacacggaagaagacgaactggaagaggaggaggaggacctgcaggcggccagcaaactgaccccggatgattcgcctgcgctgacgcctccgtcgcctttccgcgactcggtggcctcgggcagctcggtgcccagctcccccgtgtccgagtcggtgctctgcacccctcccaacgtatcctacgcctctgtcattctgcgggactacaagcaaagctcttccaccctgtaagggggaagggtccacatagaaaagcaagacaagccagagatctcccacacctccagagatgtgcaaacagctgggaggaaaagcctggg

SEQ ID NO: 97683 - DNA, 2721 bp, Artificial Sequence
  derived and/or modified sequence
atggtgggcctgctgctcttcttcttccctgccatcttcctggaggtgtccctgctgcccaggagccctggcaggaaggtgctgctggccggggccagcagccagaggtctgtggccaggatggatggagatgtgatcattggagccctcttctctgtgcaccaccagcccccagctgagaaggtgcctgagaggaaatgtggggagatccgggagcagtatggcatccagagggtggaggccatgttccacaccctggacaagatcaatgctgaccctgtgctgctgcccaacatcaccctgggcagcgagatccgggacagctgctggcacagctctgtggccctggagcagagcattgagttcatccgggacagcctcatcagcatcagagatgagaaggatggcatcaaccgctgcctgcctgatggccagagcctgcccccaggccgcaccaagaagcccatcgccggggtcatcggccctggcagcagctctgtggccatccaggtgcagaacctgctgcagctgtttgacatcccccagatcgcctacagcgccaccagcattgacctgagtgacaagaccctgtacaagtacttcctgcgggtggtgcccagcgacaccctgcaggcccgggccatgctggacatcgtgaagcgctacaactggacctacgtgtctgctgtgcacacagagggcaactacggggagagcggcatggatgccttcaaggagctggccgcccaggagggcctgtgcatcgcccacagcgacaagatctacagcaatgctggggagaagagctttgaccggctgctgaggaagctgcgggagcggctgcccaaggcccgggtggtggtgtgcttctgtgagggcatgacagtgcggggcctgctgagcgccatgaggcggctgggcgtggtgggggagttcagcctgattggaagtgatggctgggccgacagagatgaggtgattgagggctatgaggtggaggccaatggaggcatcaccatcaagctgcagagccctgaggtgcgcagctttgatgactacttcctgaagctgcggctggacaccaacaccaggaacccctggttccctgagttctggcagcaccgcttccagtgccgcctgcccggccacctgctggagaaccccaacttcaagaggatctgcacaggaaatgaaagcctggaggagaactacgtgcaggacagcaagatgggcttcgtcatcaatgccatctatgccatggcccacggcctgcagaacatgcaccacgccctgtgccccggccacgtgggcctgtgtgatgccatgaagcccattgatggcagcaagctgctggacttcctgatcaagagcagcttcatcggcgtgtctggagaggaggtgtggtttgatgagaagggagatgcccctggccgctatgacatcatgaacctgcagtacacagaggccaacagatatgactatgtgcacgtgggcacctggcatgaaggagtgctgaacattgatgactacaagatccagatgaacaagtctggagtggtgcgctctgtgtgcagcgagccctgcctgaagggccagatcaaggtgatcaggaagggggaggtgtcctgctgctggatctgcacagcctgcaaggaaaatgaatatgtgcaggatgagttcacctgcaaggcctgtgacctgggctggtggcccaatgctgacctgaccggctgtgagcccatccctgtgcgctacctggagtggagcaacatcgagagcatcatcgccatcgccttcagctgcctgggcatcctggtgaccctgtttgtgaccctcatctttgtgctgtacagagacacccctgtggtgaagagcagcagccgggagctgtgctacatcatcctggccggcatcttcctgggctacgtgtgccccttcaccctgattgccaagcccaccaccaccagctgctacctgcagaggctgctggtgggcctgagcagcgccatgtgctacagcgccctggtgaccaagaccaaccgcatcgcccgcatcctggccggcagcaagaagaagatctgcaccaggaagccccgcttcatgtctgcctgggcccaggtgatcatcgccagcatcctgatctctgtgcagctgaccctggtggtgaccctcatcatcatggagccccccatgcccatcctgagctaccccagcatcaaggaggtgtacctgatctgcaacaccagcaacctgggcgtggtggcccccctgggctacaacggcctgctgatcatgagctgcacctactatgccttcaagaccagaaatgtgcctgccaacttcaatgaggccaagtacatcgccttcaccatgtacaccacctgcatcatctggctggcctttgtgcccatctacttcggcagcaactacaagatcatcaccacctgctttgctgtgtccctgtctgtgacagtggccctgggctgcatgttcacccccaagatgtacatcatcatcgccaagccagagagaaatgtgcgcagcgccttcaccaccagtgatgtggtgaggatgcacgtgggagatggcaagctgccctgccgcagcaacaccttcctgaacatcttccggaggaagaaggccggggctggaaatgccaagaagaggcagcctgagttcagccccaccagccagtgccccagcgcccacgtgcagctgtag

SEQ ID NO: 97684 - DNA, 2721 bp, Artificial Sequence
  derived and/or modified sequence
atggtgggcctgctgctgttcttcttccccgccatcttcctggaggtgagcctcctgccccgcagccccgggcgtaaagttcttctggctggtgcctcgagccagcgatcagtggcccgaatggatggggacgttatcatcggcgccctgttttccgtccatcaccagccccccgctgaaaaggttccagagcgcaagtgtggggaaatccgtgagcaatacggtattcaaagagtcgaagcaatgtttcacaccctggataaaatcaacgccgacccggtgttactccccaacatcacactcggctcagaaataagggattcctgctggcacagttccgttgctttggagcagagcattgaatttatcagggacagtctgatttctattagagatgaaaaggatgggatcaatagatgcctgcctgatggacagtccctgcccccaggacgcacaaaaaagcccatcgcaggagtgatagggcccggttcgagcagtgtggcaatccaagtccagaacctgctgcagttatttgatataccccaaatcgcatactccgcaacttccattgatctgtctgataagactctgtacaagtactttttgcgcgtcgttccgagcgacaccctgcaagcgcgagccatgctagacatcgtgaagcggtataattggacttacgtcagtgccgtgcacacagagggtaattacggcgagtctgggatggatgcctttaaggaactcgcagcccaggaaggtctgtgtatagcccactctgataagatctatagtaatgctggagaaaaatcattcgaccgccttctaagaaagcttcgcgaaaggctgcctaaggccagggtggtggtgtgtttttgcgaaggcatgactgtacggggcctgctgtccgccatgcgcagactcggtgttgtcggggaattctctctcattggatccgatggctgggccgatcgggacgaggtgatcgaagggtacgaagtggaagctaacggcggcatcactataaagctgcagtcccctgaagtccgcagctttgacgactattttttaaaactgcgcctagacactaacacaagaaacccatggtttccagagttctggcagcaccggttccagtgccgattgcccggacatttactggagaaccctaattttaaacgaatctgcaccggcaacgagagcttggaagagaattacgtccaagacagcaaaatgggcttcgtgattaacgcaatttacgcgatggcgcacgggctgcagaacatgcatcacgccctgtgcccagggcacgtgggactttgtgacgctatgaagcctatcgacggtagcaagctgctggatttcctgattaaatcatcttttatcggcgtgtctggagaagaggtatggttcgacgaaaagggagatgccccaggtcgatacgacattatgaaccttcagtacactgaggccaatagatacgattatgttcacgttggcacatggcacgaaggcgtgctgaacatcgacgactacaagatacagatgaataagagcggagtcgtgaggagcgtctgcagtgagccttgtctgaaggggcagattaaggtgatccgaaaaggggaagttagctgctgttggatctgcaccgcctgcaaagagaacgaatatgtacaagatgagttcacatgtaaagcatgtgatctcgggtggtggcctaatgccgatttaaccggctgtgagcctatccctgttaggtatctggaatggagcaatattgaatctattatcgctatcgcattcagttgcctgggcatcttagtcactctgttcgtgaccctgattttcgtactatatcgggacacacctgtggtcaagtccagctcacgggagctctgttatataattctcgctggcatatttctcggatacgtgtgcccctttacccttatcgcaaagcccaccaccacaagctgttatctgcagcgccttctggtcggcttaagttcagccatgtgttatagcgcactagtgaccaaaaccaataggatcgccaggattctagccggaagcaagaaaaagatctgtaccagaaaacctcggtttatgtctgcctgggctcaggttatcatcgcctccattctcatatccgttcagctgactctggttgttacactcattattatggagccccccatgccaatactttcataccccagtattaaggaggtctatcttatctgtaacacttcaaacctgggcgtagtcgctccactaggatacaatggtttgctgattatgtcttgtacctactatgcttttaagacacgtaatgtccccgctaactttaatgaggcgaaatacatcgccttcacaatgtacaccacttgtattatttggctcgctttcgttcccatttactttggaagtaattacaagatcatcactacatgttttgccgtcagtctcagtgtgacggtagctctaggttgcatgttcactccgaaaatgtatataattatagccaaacctgaacgtaatgttagatctgcttttacaacgtccgacgtggtacgcatgcacgtcggcgacgggaagctgccttgtcggtcgaatacattcttaaatatctttaggcgcaaaaaagccggagcggggaacgccaagaaacgtcagccggaattttctccgacctcgcagtgccccagtgctcacgtccagctgtag

SEQ ID NO: 97685 - DNA, 2721 bp, Artificial Sequence
  derived and/or modified sequence
atggtgggcctgctgctgttcttcttccccgccatcttcctggaggtcagcctgctcccaaggtcccctgggcggaaggtgttactggcgggggcctccagccagagatccgttgcccgcatggatggcgacgtgatcattggcgccctctttagtgtccaccaccagccacctgctgagaaagtccccgaaagaaagtgcggcgagattagggaacagtatggtattcagcgggtcgaggcaatgttccatacactagataaaataaatgctgatcccgtcctcttgcccaacataaccttgggctctgagattagggacagttgctggcattcgtctgtggctcttgaacaatcaattgagtttatccgagattccctcatcagtataagagacgaaaaagacgggataaatagatgcctccccgacggccagtcattaccccctgggcgaacaaaaaagccgatagccggagttataggacccgggagcagcagcgtggcgatccaagtgcagaacttgctgcagctgttcgatattccccagatcgcctacagcgcgacatctatcgacctgagcgacaaaactctgtataagtatttcctgcgcgtggtaccctctgacaccctgcaggctcgcgctatgctcgatatcgttaagcgatataactggacttacgtaagtgccgtgcacactgaggggaattacggtgagagcggcatggacgctttcaaggagctagcagctcaagaagggttgtgtatagctcattccgacaagatctacagtaatgccggcgaaaagtcttttgataggttgctgcgtaagcttcgcgagcgattgcctaaggctcgcgttgttgtctgtttctgcgaggggatgacggtgaggggcctgctgagcgccatgaggagactgggcgtggtgggcgaattctcgctgattggttccgatggctgggctgatagggatgaagttatagagggatatgaagtggaggctaatggtggaataacaatcaagttacagtcacctgaggtgcgttcctttgacgattatttccttaagcttcggctcgataccaatacacggaacccatggtttcccgagttttggcagcacagattccagtgccgactgcccgggcacttgctggagaacccgaacttcaagcgaatctgtactggtaacgagagtttggaagaaaactacgtgcaggactccaagatggggttcgtgatcaacgccatctatgccatggcacatggactccagaatatgcatcacgcactgtgcccagggcatgtgggactgtgcgacgccatgaaacctatcgacgggtctaagttgcttgattttctcattaaaagctcgtttattggtgtatccggtgaggaggtctggttcgatgaaaaaggcgatgctcccggaagatatgatattatgaatttgcagtacactgaagccaatcggtatgactacgtccacgtgggaacttggcacgagggtgtcttaaatatagacgattataagatacagatgaacaagagtggcgtcgttagaagcgtctgctctgagccgtgcctgaaaggccagatcaaagtgatcagaaagggtgaagtctcatgttgttggatctgcacagcctgcaaagaaaatgagtacgtgcaagacgagttcacatgcaaagcatgtgacttaggatggtggcccaatgctgacctcaccgggtgcgagcccattccggtgcgttacttagaatggtctaacattgagtctatcattgctatcgctttttcctgcctggggatcttagtgacactgttcgttactctgatcttcgtattgtacagggataccccagtggtaaaatccagttcaagagagctgtgttatattattctagcaggcatctttcttggctatgtgtgccctttcaccctcattgccaaacctaccactacgagttgttatctccaacggcttctggtgggactgtcttccgccatgtgctattcagcacttgtgacaaagactaaccgaattgcgcggatcctcgctggtagcaaaaaaaaaatatgtacaagaaagccccgcttcatgtcagcctgggcgcaggtgatcatagccagcatcttgatttctgttcagctcactctcgtggtaaccttaataataatggaacctcctatgcctattttgagttatccaagtattaaagaggtctacctgatctgtaacacgtccaacctgggagttgtggctcccttaggttataatggccttcttatcatgtcctgtacctactacgcattcaagactcgcaacgttccagccaatttcaatgaggcaaagtacattgcctttacaatgtacacgacctgcataatttggctcgcattcgtccctatctacttcggttcgaattacaaaatcattaccacatgtttcgcagttagccttagcgtgactgtcgctctgggttgcatgttcacgccaaagatgtacattatcatcgccaaaccggagcgcaacgtgcgctccgcttttacaacctccgacgtggtccgcatgcacgtgggtgatgggaagctgccttgccggagcaacacgttccttaacatattcaggaggaagaaggcaggagccggaaacgcgaagaaacgtcagcctgagtttagtcccacatcccaatgccctagcgcccatgtgcaattgtag

SEQ ID NO: 97686 - DNA, 2721 bp, Artificial Sequence
  derived and/or modified sequence
atggtgggcctgctgctgttcttcttccccgccatcttcctggaggtctcattactgccccggtcccccggccggaaggtgctcctcgccggggcatcctctcaaaggtctgtcgcccggatggacggcgatgtgatcattggcgctctatttagcgttcaccaccagccgccagccgaaaaggtacccgaacggaaatgcggcgaaattcgcgaacagtatggaatccagagggtagaggcgatgttccatactcttgataagatcaacgccgacccagtgctgctgcctaacatcacactcggttctgagatccgcgattcctgttggcattcctctgtggcactggagcagagcattgagtttatccgcgacagcctgatctctatcagggatgagaaagatggaatcaatcggtgtctgcctgacgggcaatcgttgccaccgggacgcaccaagaagccaattgccggtgtgatcggtcctggatcctcatcagttgcaatccaggttcaaaatctgttgcaactcttcgatatccctcaaattgcttacagtgccacatctatcgatctgagcgacaagaccctgtacaagtactttctccgggtggttccgagcgatacccttcaggccagagccatgctggacatcgttaaacggtataattggacatacgtatctgccgtgcatacagaaggcaactacggagagtctggcatggacgcgttcaaggagctagctgcccaggaagggctgtgcattgcacacagtgacaagatctactcgaatgccggggagaaatcattcgatcggctgctgcgcaagttgagggagcggctccctaaggcgagagtggtggtatgtttttgtgaaggcatgactgtgcggggcctgttgtcagctatgcgccggttgggggttgttggggaattcagtcttattggctccgatggttgggctgatagggacgaggtcatcgagggttatgaagtcgaggctaatgggggcatcacgatcaagctgcaaagcccagaggttcgctcattcgacgattatttcctgaaactccggttggacactaacacacgcaatccttggttcccggaattctggcagcacagatttcaatgtagattgccaggtcatctcctggaaaatcctaacttcaagcggatctgcaccggaaacgaaagcctggaagaaaattatgtgcaagattctaaaatgggatttgtgataaacgcgatctacgcgatggcccatggcctccagaacatgcaccacgctctgtgtccaggtcatgttggactctgtgatgcaatgaaacccatagatggctccaaactgcttgatttcttaattaagagctcctttattggagtctctggagaagaagtgtggtttgatgagaagggcgacgctcccggtagatatgacataatgaacttgcagtacactgaagccaatcgctacgattacgtgcacgttggaacgtggcacgagggggtccttaacatagatgattacaagatacagatgaataaatcgggagtcgtgcgctctgtttgctccgagccatgccttaaagggcagattaaagttatccggaaaggagaggttagctgctgctggatctgtaccgcatgtaaggagaatgaatacgtgcaggatgaatttacttgcaaggcgtgcgacctgggttggtggccaaatgccgatttgactggctgcgaaccgattccggtaagatacttagaatggtccaacatagagtccattattgcgatcgcgttctcttgtctcgggatccttgtaacactgttcgtgaccttgatcttcgtgctgtatagagacacaccagttgtgaaatcttccagcagggagctctgctacatcatattggctggcatcttccttggttatgtgtgccctttcaccctcatcgcaaaacctacaacaacatcctgttacctgcagcgtcttttggtgggcctttcatctgcgatgtgctacagcgccctcgtcaccaaaacaaacagaattgccaggattctggccggcagcaagaaaaaaatttgtaccagaaagccgcggttcatgtcagcctgggcccaagtaatcatcgcttcaattctcatcagcgtgcagttgacactggtagttacactgatcatcatggagcctccaatgcctatcttatcgtacccttcaattaaagaggtgtacctaatttgtaacactagtaacttgggggtggtcgcaccacttgggtataatggtctgctgatcatgtcatgtacatattacgcctttaagactagaaacgttccagctaacttcaatgaggccaaatacattgcctttacaatgtatacaacctgtattatttggctcgcattcgtgcccatctacttcgggagtaattacaaaattatcactacatgcttcgcagtgagcttgagtgtgaccgttgcactcgggtgtatgttcacacccaagatgtacattattattgccaagcctgaacgaaacgtgcggagtgctttcaccacatctgacgttgtgcggatgcatgtgggggacgggaagctgccctgcagatctaacacgttcctgaatatatttcgtcggaagaaggctggggcaggaaatgctaaaaagagacagcctgaattttcaccaactagccagtgcccttcggctcacgtgcagctgtag

SEQ ID NO: 97687 - DNA, 2721 bp, Artificial Sequence
  derived and/or modified sequence
atggttggtttgctgctgttttttttcccagccatctttttggaagtctcactgctgccacggtcacccggaaggaaagttcttttggccggagctagtagccagcgctccgtcgcgaggatggatggcgacgttataatcggcgctctgttttccgtacaccaccagcccccagccgagaaagtacctgaaaggaagtgcggtgaaatccgtgagcaatatggaatacaaagggtcgaggccatgttccatacccttgacaagataaatgcagaccctgtattgctacccaatattaccctgggctccgagattagggactcatgttggcactcctccgtagctctggagcagtccatagagttcattagagacagtctgatctctattcgggatgagaaggacgggataaatcggtgtttaccggatggacagagcctgcctcctggcaggacgaagaaaccaattgcaggagtgataggcccaggtagcagcagcgtggctattcaggttcagaacctgctgcagttgtttgacatcccacaaatagcttacagtgctacttccattgacttgagcgacaaaaccctgtacaaatattttctgcgggtcgtgccttcagatactttgcaggccagagccatgctggacattgtgaaaagatataattggacctatgtctccgctgtgcatacggaagggaactacggcgagtccggaatggatgcattcaaggaactagcagcacaagaaggactgtgcattgcccattcagacaagatctactctaatgccggtgagaagtctttcgacagattgttgcgaaagctcagggagagactgcccaaggcgagggtagtggtgtgcttctgcgaaggaatgactgtccgtggcctgttgagcgcgatgcgtcgcctcggcgtggtcggcgagtttagccttatcggcagtgatggctgggccgatagggatgaggtaatagaagggtatgaagtggaagccaacgggggaattactatcaagctgcaaagtcccgaggtgagatctttcgacgattatttcctgaagctgagactcgacacaaacactagaaacccgtggttccctgagttttggcagcacagatttcagtgtaggctacccggtcacctacttgagaaccctaattttaaaaggatttgtactggcaatgagtctctggaagagaattacgtacaagacagtaagatgggatttgtcatcaacgccatttacgcaatggcacacggtctgcagaacatgcatcatgctctttgtcccggacacgtgggcctgtgcgatgcaatgaaacctatcgatggctcaaaactgcttgactttctgattaaatcttccttcattggtgtctcgggcgaggaagtgtggttcgatgaaaaaggcgacgcccctggccgatatgatatcatgaacctgcagtatactgaggcgaatcgctatgattacgtacacgtgggtacatggcacgagggagtgctgaatatcgacgactacaagatacagatgaacaagtcaggggtagtgcgatctgtgtgcagcgagccatgtctcaagggccagatcaaagtgatacgaaaaggcgaggtgtcatgttgctggatttgcactgcgtgtaaggagaacgagtatgtgcaggatgaatttacttgtaaagcgtgtgacctcggttggtggcctaacgccgatctcacaggatgtgagcctattccggtcaggtaccttgagtggagcaatatcgagtctatcatagctatcgcattcagttgtctcggcatactcgtgacgttgtttgtaacactgatctttgttttgtatagagatacacctgttgtgaaatcgtcatcccgcgagttgtgctacatcattctggctggaatttttcttgggtacgtttgcccgtttaccctgatagccaagcccacaactacgagttgctatctccagaggttactggtgggactctcatccgccatgtgctactcggctctggtcaccaaaacaaataggattgccaggatcctggcgggatctaagaagaagatatgcaccaggaaaccaaggttcatgtcagcatgggcccaagtcattattgcatctattttaatcagtgtacaactgaccctggtggttaccctcatcattatggagccgcctatgcccatcctctcttatccatctattaaggaggtatacctcatctgcaacactagcaatcttggagtggtggccccactcggctataatggattgctgatcatgtcttgtacttactacgccttcaaaacacgcaacgtaccagcaaacttcaacgaggctaagtacattgcctttactatgtacaccacttgcattatttggctggcattcgtgccaatttatttcggctctaactataaaatcattacgacatgctttgcagtgagcctgtccgtcactgtagcgctggggtgtatgttcaccccaaagatgtatataataatcgctaagccagaacggaatgttaggagcgcttttaccactagcgacgtggtacggatgcacgttggcgacggaaagttgccttgcagaagtaatactttccttaacatctttcggcgtaaaaaagccggtgctggcaacgccaagaaaagacagcctgagttctcccccactagtcagtgtccaagcgcccatgtgcagctgtag

SEQ ID NO: 97688 - DNA, 2721 bp, Artificial Sequence
  derived and/or modified sequence
atggtaggattgctgctttttttcttccccgctatctttctggaggtgtctctactccccagatctcctggacgtaaggtgctgctggcaggagctagctctcagcgatcagttgctcggatggacggcgatgtaatcatcggggcattattctctgtgcatcatcagccccctgccgagaaggttcccgagaggaagtgcggcgagattagagagcagtacgggatacagcgagtggaggcaatgttccacacattggacaagattaacgctgatccagtgctgctacccaacataactctcggttctgagatcagagactcttgttggcacagtagtgtggccctggagcagagcatcgagttcattagagattcacttattagcatccgtgatgaaaaggacggaattaaccgatgcctgccagatggccaaagtcttcccccaggcaggaccaaaaagcccatagccggagtgattgggcctgggagtagctcggtcgcaatacaagttcaaaacctgctgcagttgttcgacataccacagatagcatactccgctacatctatcgatctgtcagacaaaaccctctataagtacttcctcagggtggtacctagcgacaccttacaggccagggcgatgcttgacatcgttaagaggtataactggacttatgtgagcgcagtgcacacagagggcaactacggtgaatcaggcatggatgcttttaaagagttggcggctcaggagggtctgtgtatcgcccattcagataaaatctacagcaacgcaggcgaaaaaagctttgatagactattgcggaaactgcgcgagaggctccccaaagcgcgtgtagtcgtgtgtttttgtgaggggatgaccgttcgcggactgctgtccgctatgcgtaggctgggagtcgtaggcgagtttagtttgatcggttctgatgggtgggccgatcgtgacgaggtgatcgagggatacgaagtagaagctaacggcggaatcaccattaagctgcagtcgccagaggtgaggtcatttgatgattattttctgaagttacggctggacactaacacccggaacccttggttcccggaattctggcaacaccggttccagtgtaggctaccagggcatcttctggaaaatccaaacttcaaacggatctgcacaggtaacgagtcactagaagagaactacgtgcaggatagcaagatgggatttgtcatcaacgctatttacgcaatggcccacggcctgcagaatatgcatcacgcactctgcccgggtcatgttggactgtgcgatgcaatgaaaccaatcgacggatctaaattgctggatttcctgatcaagtcgtcttttattggtgtgagcggcgaggaggtctggttcgatgaaaaaggagacgcacccggacggtacgatatcatgaacctgcagtacacagaggctaatcggtacgattatgtacacgtgggaacctggcatgagggtgtactaaacatagatgactataagatccaaatgaacaaaagcggcgttgtgagatctgtgtgctcagagccatgtcttaaaggacagatcaaggtcattaggaaaggcgaggtcagctgttgttggatttgcactgcctgtaaagagaacgagtacgttcaagatgaatttacatgcaaggcctgcgatctcgggtggtggcctaacgccgatctgactgggtgcgagccaatcccagtgaggtatcttgaatggagcaacatcgagagtataatagctatcgcgttttcatgcctgggcattctggttacccttttcgtaacccttatcttcgtgctctaccgtgacacccctgtggtgaagagtagtagtcgcgagctgtgttacatcattcttgccggaatattcctgggatatgtctgccccttcaccttaattgctaagcccacgaccacttcctgctatttgcagaggctgctagtgggtctgtcttctgcgatgtgttacagcgcattagtgaccaaaacgaatcgtatagctcgtattctggccggttctaagaagaaaatctgcacacgcaaaccacggttcatgtccgcatgggcccaggttatcatcgcgagtatcctcatttccgtgcagttgacattggttgtgaccttgattatcatggaacccccaatgccaatcctcagctacccatctatcaaagaagtgtacctcatttgcaatacgagcaatcttggtgtggttgccccactgggctacaacgggcttttgatcatgtcctgtacctattacgctttcaaaacacgcaacgttcccgctaatttcaatgaggcaaagtatattgctttcacaatgtatactacctgcatcatctggctggcttttgtgcctatatatttcggcagtaactataagatcatcacaacatgctttgcagtgtccttgagcgtcaccgtcgctctcgggtgtatgttcacccccaagatgtacattatcatagctaagccggagagaaatgtccggagtgctttcaccacaagcgatgtcgtgaggatgcatgtgggagacgggaaattgccgtgtcgatcaaacacttttctgaacatctttagacggaagaaagcgggtgctggcaatgccaaaaagcgtcagcctgaattctcaccaacatctcagtgcccttctgcacacgtgcagctgtag

SEQ ID NO: 97689 - DNA, 2721 bp, Artificial Sequence
  derived and/or modified sequence
atggttggcctcctgctgttcttttttccagctatttttttggaggtatctctgctccctcgctccccgggaaggaaggtcctgctcgctggagcatcctctcagcgctcggtggctcgcatggatggagacgttatcatcggagcacttttttccgtgcaccatcagccccctgcagagaaagtaccagaaaggaagtgcggagagatccgagagcagtacgggatccaacgggttgaggccatgtttcacacactggataaaattaatgcggatccagtcctgctgccaaacatcacactgggcagcgaaatccgagattcctgctggcattcctctgtggccctggaacaatctatcgaattcatcagggactccttaatcagcattagagacgagaaagacggaataaatcgttgtctcccagatggacagagtctgccccctggcagaaccaaaaagcccatcgccggtgtgattggcccaggttcatctagtgtggctatccaagtgcaaaaccttctgcaactgtttgatattccccagatcgcctactccgctacatcaattgacctctccgataaaactttatataagtattttttacgggttgttccgtcagacacacttcaagccagagccatgctggatatcgtgaagagatataactggacctacgtgagcgcagtccataccgagggcaactacggagagagcgggatggacgccttcaaagagctggccgcacaagaagggctgtgcattgcgcattctgataaaatatatagcaatgccggagaaaagtcattcgaccggctcctgaggaaactgcgtgaacggctacccaaagcaagagtggttgtatgcttctgtgagggaatgacggtgagaggattgctctctgccatgagacggcttggggtggtgggcgagttcagtctgatcggatctgacgggtgggcagaccgagacgaagtcatagaagggtatgaggttgaagcgaacggaggtatcacaatcaagttgcagagccctgaagttaggagcttcgatgattatttcctgaaactccgcttggatactaacaccaggaacccatggttccccgaattttggcaacacaggttccagtgtcggctccctggacacctgttggaaaatccaaattttaagagaatctgcaccggcaatgagtctctcgaggagaattacgtacaggattccaagatgggctttgtcattaacgcaatatacgctatggcgcacggactgcagaatatgcaccatgctttgtgccctggccacgtcggtttgtgcgacgccatgaagccaatagacggcagcaagctcctggactttctcatcaagagtagcttcatcggggtctccggagaggaggtgtggttcgatgagaagggcgacgcaccaggaaggtatgatatcatgaacttacagtacaccgaggcaaacagatacgattacgttcacgtggggacatggcatgagggcgtcttaaacattgacgattacaaaatacagatgaacaagtcaggagtggtgaggtccgtgtgctctgagccatgcttaaagggccagattaaggtgatacggaagggcgaagtaagctgctgttggatttgtaccgcttgtaaggaaaacgagtatgtgcaagatgagtttacatgcaaggcttgcgaccttggctggtggccaaacgccgacctcacaggctgtgagcccatccccgtgcggtacctggaatggagcaacatagaaagcattatagccattgccttttcttgcctcggcatcctcgttaccctgttcgtgacactgatcttcgtgctttatagggacaccccggtagtcaaatccagcagtcgggaactatgctatatcatactcgccggaatttttcttggctatgtgtgcccctttactctgattgctaaaccgaccaccacctcgtgttacctgcagcggttactggtcggtctctcatccgccatgtgttatagtgccctcgttacgaagaccaacagaattgccaggattctggccggatccaaaaaaaagatctgcacaaggaaacccaggtttatgagtgcttgggcgcaggtgattattgccagcatcctgattagcgtgcagctcactttagtcgtgaccctgattattatggaaccgccaatgcctatcctcagctatccaagtatcaaagaagtgtacttgatttgcaacaccagtaatctgggggtcgtggctcctctggggtacaatggcctgcttatcatgagttgtacgtactacgccttcaagacccgtaatgtccctgccaacttcaacgaagccaagtacattgcttttactatgtataccacatgtatcatttggcttgccttcgtaccaatttactttggatcaaattacaaaatcattactacttgctttgccgtcagcctttcagtcaccgttgcgctgggttgtatgttcacccccaagatgtacatcatcattgccaagcctgagcggaacgtgcgaagcgcattcaccacaagtgacgtggtgagaatgcacgtcggagatggcaagctgccatgtagaagtaacacattcttaaatattttccgccgtaagaaggcgggtgccggaaatgctaaaaagcggcagcctgaattctcaccaacctcacagtgtccgagtgcacacgtccagctgtag

SEQ ID NO: 97690 - DNA, 2721 bp, Artificial Sequence
  derived and/or modified sequence
atggtgggcctgctgctgttcttcttccccgccatcttcctggaggtgagcctgctgcccagaagccccggcagaaaggtgctgctggccggcgccagcagccagagaagcgtggccagaatggacggcgacgtgatcatcggcgccctgttcagcgtgcaccaccagccccccgccgagaaggtgcccgagagaaagtgcggcgagatcagagagcagtacggcatccagagagtggaggccatgttccacaccctggacaagatcaacgccgaccccgtgctgctgcccaacatcaccctgggcagcgagatcagagacagctgctggcacagcagcgtggccctggagcagagcatcgagttcatcagagacagcctgatcagcatcagagacgagaaggacggcatcaacagatgcctgcccgacggccagagcctgccccccggcagaaccaagaagcccatcgccggcgtgatcggccccggcagcagcagcgtggccatccaggtgcagaacctgctgcagctgttcgacatcccccagatcgcctacagcgccaccagcatcgacctgagcgacaagaccctgtacaagtacttcctgagagtggtgcccagcgacaccctgcaggccagagccatgctggacatcgtgaagagatacaactggacctacgtgagcgccgtgcacaccgagggcaactacggcgagagcggcatggacgccttcaaggagctggccgcccaggagggcctgtgcatcgcccacagcgacaagatctacagcaacgccggcgagaagagcttcgacagactgctgagaaagctgagagagagactgcccaaggccagagtggtggtgtgcttctgcgagggcatgaccgtgagaggcctgctgagcgccatgagaagactgggcgtggtgggcgagttcagcctgatcggcagcgacggctgggccgacagagacgaggtgatcgagggctacgaggtggaggccaacggcggcatcaccatcaagctgcagagccccgaggtgagaagcttcgacgactacttcctgaagctgagactggacaccaacaccagaaacccctggttccccgagttctggcagcacagattccagtgcagactgcccggccacctgctggagaaccccaacttcaagagaatctgcaccggcaacgagagcctggaggagaactacgtgcaggacagcaagatgggcttcgtgatcaacgccatctacgccatggcccacggcctgcagaacatgcaccacgccctgtgccccggccacgtgggcctgtgcgacgccatgaagcccatcgacggcagcaagctgctggacttcctgatcaagagcagcttcatcggcgtgagcggcgaggaggtgtggttcgacgagaagggcgacgcccccggcagatacgacatcatgaacctgcagtacaccgaggccaacagatacgactacgtgcacgtgggcacctggcacgagggcgtgctgaacatcgacgactacaagatccagatgaacaagagcggcgtggtgagaagcgtgtgcagcgagccctgcctgaagggccagatcaaggtgatcagaaagggcgaggtgagctgctgctggatctgcaccgcctgcaaggagaacgagtacgtgcaggacgagttcacctgcaaggcctgcgacctgggctggtggcccaacgccgacctgaccggctgcgagcccatccccgtgagatacctggagtggagcaacatcgagagcatcatcgccatcgccttcagctgcctgggcatcctggtgaccctgttcgtgaccctgatcttcgtgctgtacagagacacccccgtggtgaagagcagcagcagagagctgtgctacatcatcctggccggcatcttcctgggctacgtgtgccccttcaccctgatcgccaagcccaccaccaccagctgctacctgcagagactgctggtgggcctgagcagcgccatgtgctacagcgccctggtgaccaagaccaacagaatcgccagaatcctggccggcagcaagaagaagatctgcaccagaaagcccagattcatgagcgcctgggcccaggtgatcatcgccagcatcctgatcagcgtgcagctgaccctggtggtgaccctgatcatcatggagccccccatgcccatcctgagctaccccagcatcaaggaggtgtacctgatctgcaacaccagcaacctgggcgtggtggcccccctgggctacaacggcctgctgatcatgagctgcacctactacgccttcaagaccagaaacgtgcccgccaacttcaacgaggccaagtacatcgccttcaccatgtacaccacctgcatcatctggctggccttcgtgcccatctacttcggcagcaactacaagatcatcaccacctgcttcgccgtgagcctgagcgtgaccgtggccctgggctgcatgttcacccccaagatgtacatcatcatcgccaagcccgagagaaacgtgagaagcgccttcaccaccagcgacgtggtgagaatgcacgtgggcgacggcaagctgccctgcagaagcaacaccttcctgaacatcttcagaagaaagaaggccggcgccggcaacgccaagaagagacagcccgagttcagccccaccagccagtgccccagcgcccacgtgcagctgtag

SEQ ID NO: 97691 - protein, 375 aa, Artificial Sequence
  derived and/or modified sequence
MGPPGLPGLKGDSGPKGEKGHPGLIGLIGPPGEQGEKGDRGLPGPQGSSGPKGEQGITGPSGPIGPPGPPGLPGPPGPKGAKGSSGPTGPKGEAGHPGPPGPPGPPGEVIQPLPIQASRTRRNIDASQLLDDGNGENYVDYADGMEEIFGSLNSLKLEIEQMKRPLGTQQNPARTCKDLQLCHPDFPDGEYWVDPNQGCSRDSFKVYCNFTAGGSTCVFPDKKSEGSKMARWPKEQPSTWYSQYKRGSLLSYVDAEGNPVGVVQMTFLRLLSASAHQNVTYHCYQSVAWQDAATGSYDKALRFLGSNDEEMSYDNNPYIRALVDGCATKKGYQKTVLEIDTPKVEQVPIVDIMFNDFGEASQKFGFEVGPACFMG

SEQ ID NO: 97692 - protein, 210 aa, Artificial Sequence
  derived and/or modified sequence
  misc_feature (1)..(1): Xaa can be any naturally occurring amino acid
XRTRRNIDASQLLDDGNGENYVDYADGMEEIFGSLNSLKLEIEQMKRPLGTQQNPARTCKDLQLCHPDFPDGEYWVDPNQGCSRDSFKVYCNFTAGGSTCVFPDKKSEGSKMARWPKEQPSTWYSQYKRGSLLSYVDAEGNPVGVVQMTFLRLLSASAHQNVTYHCYQSVAWQDAATGSYDKALRFLGSNDEEMSYDNNPYIRALVDGCA

SEQ ID NO: 97693 - DNA, 1128 bp, Artificial Sequence
  derived and/or modified sequence
atgggcccccccggcctgcccggcctgaagggcgacagcggccccaagggcgagaagggccaccccggcctgatcggcctgatcggcccccccggcgagcagggcgagaagggcgacagaggcctgcccggcccccagggcagcagcggccccaagggcgagcagggcatcaccggccccagcggccccatcggcccccccggcccccccggcctgcccggcccccccggccccaagggcgccaagggcagcagcggccccaccggccccaagggcgaggccggccaccccggcccccccggcccccccggcccccccggcgaggtgatccagcccctgcccatccaggccagcagaaccagaagaaacatcgacgccagccagctgctggacgacggcaacggcgagaactacgtggactacgccgacggcatggaggagatcttcggcagcctgaacagcctgaagctggagatcgagcagatgaagagacccctgggcacccagcagaaccccgccagaacctgcaaggacctgcagctgtgccaccccgacttccccgacggcgagtactgggtggaccccaaccagggctgcagcagagacagcttcaaggtgtactgcaacttcaccgccggcggcagcacctgcgtgttccccgacaagaagagcgagggcagcaagatggccagatggcccaaggagcagcccagcacctggtacagccagtacaagagaggcagcctgctgagctacgtggacgccgagggcaaccccgtgggcgtggtgcagatgaccttcctgagactgctgagcgccagcgcccaccagaacgtgacctaccactgctaccagagcgtggcctggcaggacgccgccaccggcagctacgacaaggccctgagattcctgggcagcaacgacgaggagatgagctacgacaacaacccctacatcagagccctggtggacggctgcgccaccaagaagggctaccagaagaccgtgctggagatcgacacccccaaggtggagcaggtgcccatcgtggacatcatgttcaacgacttcggcgaggccagccagaagttcggcttcgaggtgggccccgcctgcttcatgggctag

SEQ ID NO: 97694 - DNA, 633 bp, Artificial Sequence
  derived and/or modified sequence
tgaagaaccagaagaaacatcgacgccagccagctgctggacgacggcaacggcgagaactacgtggactacgccgacggcatggaggagatcttcggcagcctgaacagcctgaagctggagatcgagcagatgaagagacccctgggcacccagcagaaccccgccagaacctgcaaggacctgcagctgtgccaccccgacttccccgacggcgagtactgggtggaccccaaccagggctgcagcagagacagcttcaaggtgtactgcaacttcaccgccggcggcagcacctgcgtgttccccgacaagaagagcgagggcagcaagatggccagatggcccaaggagcagcccagcacctggtacagccagtacaagagaggcagcctgctgagctacgtggacgccgagggcaaccccgtgggcgtggtgcagatgaccttcctgagactgctgagcgccagcgcccaccagaacgtgacctaccactgctaccagagcgtggcctggcaggacgccgccaccggcagctacgacaaggccctgagattcctgggcagcaacgacgaggagatgagctacgacaacaacccctacatcagagccctggtggacggctgcgcctag

SEQ ID NO: 97695 - DNA, 1128 bp, Artificial Sequence
  derived and/or modified sequence
atggggccgcctggcctgcccggcctgaagggcgattccggccccaaaggagagaaaggccaccctggtctcataggtttgatcggtccaccgggtgagcagggagaaaaaggtgaccggggactgccaggccctcaaggcagctctggaccaaaaggtgagcaaggcataaccggcccttccggccctatcggtcccccaggcccgccagggctcccaggccccccaggccctaaaggggccaagggtagctctgggcccacaggtccgaagggcgaagccgggcacccagggcctcctggtccaccgggcccacctggtgaggttatccagcccctgcctattcaggccagcagaacgaggcgcaacatcgacgcatcccagctgttggacgatgggaacggagagaactacgtcgactatgccgatggaatggaagagattttcgggtccttaaatagccttaagctggaaatcgagcaaatgaaacgaccactgggaacgcagcaaaaccccgctagaacgtgcaaggacttgcagttatgtcaccctgatttccccgacggagagtattgggtggatcctaatcaagggtgtagtcgcgattctttcaaagtgtattgtaactttacggctggcggcagcacttgcgtgttcccggataaaaaatcggaaggctccaagatggccaggtggcccaaggagcaaccctccacatggtacagccagtataaaagaggatccctgcttagctatgtggacgccgaagggaacccggttggggtcgtccagatgacttttctgaggcttctttcagcttctgcccaccaaaatgtgacataccactgctaccagtcagtggcctggcaagatgcagcgactgggtcctatgataaggctttgagattcctgggctccaacgacgaggagatgagttacgataacaatccatatattagggcccttgtggacggttgtgctactaagaaagggtaccaaaaaaccgtgctggagattgacacgcctaaagtggaacaagtgcccatcgttgatatcatgttcaatgactttggcgaggcgtcccagaagttcggtttcgaggtcggtccggcgtgctttatggggtag

SEQ ID NO: 97696 - DNA, 633 bp, Artificial Sequence
  derived and/or modified sequence
tgaagaacccggcggaatatcgatgcttctcaactactagacgacggcaatggtgagaattacgtagactatgccgatgggatggaagagatttttggatcccttaatagtctgaaactggagatcgaacaaatgaagaggcccctgggaacacagcagaatcccgcccgaacatgtaaggaccttcagctctgccacccagattttcccgatggggagtactgggttgacccaaatcagggatgtagccgcgattcttttaaagtctattgcaactttacagcggggggctcgacctgcgtgtttcccgataagaaatcagagggatccaagatggcgaggtggcctaaagaacagccttcaacctggtactcacagtacaaaagagggagcctcctgagctatgttgacgccgaggggaatcctgtgggggtagtccagatgacattcttacgcttgttatctgccagtgcccatcagaacgtgacttaccattgctatcaaagcgtggcctggcaggatgctgcaactggctcctacgataaagccctcagatttttaggatccaatgatgaagagatgagctacgataacaacccctacattcgtgctttggtcgacggatgcgcctag

SEQ ID NO: 97697 - DNA, 1128 bp, Artificial Sequence
  derived and/or modified sequence
atgggccccccaggcctgcccggcctgaagggggacagcggccccaagggggagaagggccaccctggcctgattggcctcatcggccccccaggagagcagggcgagaagggggaccggggcctgcccggcccccagggcagcagcggccccaagggggagcagggcatcaccggccccagcggccccatcggccccccaggccccccaggcctgcccggccccccaggccccaagggggccaagggcagcagcggccccaccggccccaagggggaggccggccaccctggccccccaggccccccaggccccccaggagaggtgatccagcccctgcccatccaggccagcaggaccaggaggaacattgatgccagccagctgctggatgatggaaatggagagaactacgtggactatgcagatggcatggaggagatcttcggcagcctgaacagcctgaagctggagattgagcagatgaagaggcccctgggcacccagcagaacccagcccggacctgcaaggacctgcagctgtgccacccagacttcccagatggagagtactgggtggaccccaaccagggctgcagccgggacagcttcaaggtgtactgcaacttcaccgctgggggcagcacctgtgtgtttcctgacaagaagtctgagggcagcaagatggcccgctggcccaaggagcagcccagcacctggtacagccagtacaagaggggcagcctgctgtcctatgtggatgctgagggcaaccctgtgggcgtggtgcagatgaccttcctgcggctgctgagcgccagcgcccaccagaatgtgacctaccactgctaccagagcgtggcctggcaggatgctgccaccggcagctatgacaaggccctgcgcttcctgggcagcaatgatgaggagatgtcctatgacaacaacccctacatccgggccctggtggatggctgtgccaccaagaagggctaccagaagacagtgctggagattgacacccccaaggtggagcaggtgcccatcgtggacatcatgtttaatgactttggagaggccagccagaagtttggatttgaggtgggccctgcctgcttcatgggctag

SEQ ID NO: 97698 - DNA, 633 bp, Artificial Sequence
  derived and/or modified sequence
tgaagaaccaggagaaatattgatgccagccagctgctggatgatggaaatggagaaaattatgtggactatgcagatggcatggaggagatcttcggcagcctgaacagcctgaagctggagattgagcagatgaagaggcccctgggcacccagcagaacccagcccggacctgcaaggacctgcagctgtgccacccagacttcccagatggagagtactgggtggaccccaaccagggctgcagccgggacagcttcaaggtgtactgcaacttcaccgctgggggcagcacctgtgtgtttcctgacaagaagtctgagggcagcaagatggcccgctggcccaaggagcagcccagcacctggtacagccagtacaagaggggcagcctgctgtcctatgtggatgctgagggcaaccctgtgggcgtggtgcagatgaccttcctgcggctgctgagcgccagcgcccaccagaatgtgacctaccactgctaccagagcgtggcctggcaggatgctgccaccggcagctatgacaaggccctgcgcttcctgggcagcaatgatgaggagatgtcctatgacaacaacccctacatccgggccctggtggatggctgtgcctag

SEQ ID NO: 97699 - DNA, 2344 bp, Artificial Sequence
  derived and/or modified sequence
gggccccccgggtccccctggcccccgaggaccctccggagctccaggtgctgatggcccacaaggtcccccaggtggaataggaaaccctggtgcagtgggagagaagggcgagcctggcgaagcaggtgagcctggccttccgggagaaggcggccccccgggacccaaaggagaaaggggagagaagggcgagtcaggcccttcaggtgctgccggaccccctggacccaaaggccctcccggagatgatggtcccaaaggcagccctggcccagtgggttttcctggagatcctggcccccccggagagcctggccccgcgggtcaagatggtccccctggtgacaaaggagatgatggtgaacccgggcagacgggatcccccggccctactggtgaaccaggtccatcggggcctccaggaaaaaggggtcccccaggccccgcaggccccgaaggcagacagggagagaaaggggccaagggagaagccggcttggaaggccctcctgggaagactggccccatcggcccccagggggcccctgggaagcccggaccggatggccttcgagggatccctggccctgtgggagaacaaggtctcccaggatccccaggcccggacggtccccccggccccatgggtcccccaggacttcccggcctcaaaggagattctggtcccaaaggtgaaaagggtcatccaggcctgatcgggctcatcggtcctccgggtgaacagggtgagaagggcgaccgtggtctccctggcccccagggctcctccggtcctaagggagaacagggtatcactggtccttctggcccgattgggcctcctgggccccctggcctgccgggtccgcctggtccaaaaggtgctaagggctcctcgggtccaactggcccgaagggtgaggcaggccacccaggacccccaggccccccgggccccccgggagaggtcatccagcccctgccaatccaggcatccaggacgcggcggaacatcgacgccagccagctgctggacgacgggaatggcgagaactacgtggactacgcggacggcatggaagagatcttcggctctctcaactctctgaagctggagattgagcagatgaaacggcccctgggcacgcagcagaaccccgcccgcacctgcaaggacctgcagctctgccaccccgacttcccagatggtgaatactgggtcgatcctaaccaaggatgctccagggattccttcaaggtttactgcaacttcacagccggggggtcgacatgcgtcttccctgacaagaagtccgaagggagtaaaatggcccgctggcccaaagagcagccttccacctggtatagtcagtacaagcgggggtccctgctctcctatgtggacgccgagggcaaccctgtgggtgtggtacagatgaccttcctgcggctgctgagcgcctctgcccaccagaacgtcacctaccactgctaccagtcagtggcctggcaggacgcagccacgggcagctacgacaaggccctccgcttcctgggctccaacgacgaggagatgtcctatgacaacaacccctacatccgcgccctggtggacggctgtgctaccaagaaaggctaccagaagacggttctggagatcgacacccccaaagtggagcaggtgcccatcgtggacatcatgttcaatgacttcggtgaagcgtcacagaaatttggatttgaagtggggccggcttgcttcatgggctaggagccgccgagcccgggctcccgagagcaacctcgtgacctcagcatgccattcgttcgtgagtgtcccgtgcacgtcctgaccctggacagtgaaggcttctccctcccctcccacctgacttcatctacgcctcggcaccacggggtgtgggaccccagcccggagagaacagagggaaggagccgcgcccccacctggagctgaatcacatgacctagctgcaccccagcgcctgggcccgccccacgctctgtccacacccacgcgccccgggagcggggccatgcctccagccccccagctcgcccgacccatcctgttcgtgaataggtctcaggggttgggggagggactgccagatttggacactatatttttttctaaattcaacttgaagatgtgtatttcccctgaccttcaaaaaatgttccaaggtaagcctcgtaaaggtcatcccaccatcaccaaagcctccgtttttaacaacctccaacacgatccatttagaggccaaatgtcattctgcaggtgccttcccgatggattaaaggtgcttatgtttttgtg

SEQ ID NO: 97700 - DNA, 628 bp, Artificial Sequence
  derived and/or modified sequence
caggacgcggcggaacatcgacgccagccagctgctggacgacgggaatggcgagaactacgtggactacgcggacggcatggaagagatcttcggctctctcaactctctgaagctggagattgagcagatgaaacggcccctgggcacgcagcagaaccccgcccgcacctgcaaggacctgcagctctgccaccccgacttcccagatggtgaatactgggtcgatcctaaccaaggatgctccagggattccttcaaggtttactgcaacttcacagccggggggtcgacatgcgtcttccctgacaagaagtccgaagggagtaaaatggcccgctggcccaaagagcagccttccacctggtatagtcagtacaagcgggggtccctgctctcctatgtggacgccgagggcaaccctgtgggtgtggtacagatgaccttcctgcggctgctgagcgcctctgcccaccagaacgtcacctaccactgctaccagtcagtggcctggcaggacgcagccacgggcagctacgacaaggccctccgcttcctgggctccaacgacgaggagatgtcctatgacaacaacccctacatccgcgccctggtggacggctgtgct

SEQ ID NO: 97701 - DNA, 1128 bp, Artificial Sequence
  derived and/or modified sequence
atgggcccccccggcctgcccggcctgaagggcgacagcggccccaagggggagaagggccacccgggcctcattggactcatcggcccaccgggagaacagggtgaaaagggagatagggggcttcccggacctcagggttcgtcaggacccaaaggagagcagggaatcaccggaccttcaggtccaatcgggccaccaggaccacctgggctccctggtccgcccgggcccaaaggtgcgaagggatcatccggcccgaccggaccaaagggcgaagccggccatcctggccctccagggcctccaggtccacccggcgaggttatacagcccctccccatccaagcatctagaacgcggcggaacatcgatgccagccagctgctggatgacggaaacggcgaaaactacgtggattatgccgacggtatggaggaaatttttggcagcctgaatagtcttaagcttgagatagagcagatgaagcggcccctcggcactcagcagaacccagctcgcacctgcaaagacctgcaattgtgccaccccgattttcccgacggcgagtactgggtggatccaaatcaggggtgtagccgggattcgttcaaagtgtactgcaactttacagctgggggttctacttgcgtgttccccgacaagaaatcggagggatccaaaatggccagatggccaaaggaacagccctctacatggtacagtcagtacaagagaggatccctcctgtcctacgtggatgccgagggcaacccagtgggagtggtccaaatgacgttcctgcggcttttgtccgcatcggctcatcagaatgtcacttaccactgctaccaatctgtggcgtggcaggacgcggcgactgggtcttacgataaagcactaaggttcctgggatcgaatgatgaggaaatgagctatgataataatccctatatccgagctctggtggacggctgcgctaccaagaaagggtaccagaagacagtgttagagatagatacacctaaagtggaacaggtacccatagtggatatcatgttcaacgactttggcgaggcttcccaaaagtttgggtttgaagtcgggccagcttgtttcatggggtag

SEQ ID NO: 97702 - DNA, 633 bp, Artificial Sequence
  derived and/or modified sequence
tgacggacccggcggaacatcgacgccagccagctgctggacgacggtaacggggaaaattatgtcgattatgccgacggcatggaggagatcttcggcagtttgaattctttgaaactcgaaatcgagcagatgaagcgcccactagggacacagcagaaccccgcacgaacctgtaaagatctgcagctctgtcaccctgacttccctgacggagagtactgggtggatcctaaccaggggtgcagccgagattccttcaaagtatactgcaatttcactgccggaggctccacctgcgtgttccccgacaagaagtctgagggctcaaagatggccaggtggccaaaggagcagcctagcacttggtacagtcagtacaaacggggaagcctgctgtcatatgtagatgccgaaggtaatcctgtgggcgtcgtgcagatgacattcctcagacttctgtctgccagcgctcatcagaatgtcacatatcactgttatcagtcagtcgcgtggcaggacgccgctacgggaagctacgataaggctttgagattcctaggaagcaacgatgaagagatgtcatacgataacaatccctatatccgggcccttgtagatggatgcgcatag

SEQ ID NO: 97703 - DNA, 1128 bp, Artificial Sequence
  derived and/or modified sequence
atggggccaccaggccttcccggtctgaaaggagactctggcccaaagggagagaaggggcaccctggcctcattgggctgattggcccacctggcgaacagggtgagaaaggcgatagaggcttacccggaccccagggtagctccggcccaaaaggggagcaggggataacaggcccatcgggcccaatcggaccacccggaccacctggtcttcctgggccaccaggtccgaagggcgctaaagggtcttcaggaccaactggaccaaagggtgaagctggccacccgggtcccccaggaccacctgggccaccaggcgaagtgattcagcctctgcccatccaggcatcgagaactaggagaaatatcgacgcctcccagctgctggatgacggcaatggcgagaactacgtcgactatgcagatggtatggaggaaatcttcgggtccctgaacagcctgaaactggagatcgaacagatgaagcgaccactggggacccagcagaatccagccagaacgtgcaaggacctgcaactttgtcatcctgatttcccagatggtgaatattgggtcgatccgaatcagggctgttccagggactccttcaaggtgtactgtaacttcacagcaggaggtagtacttgtgtgttccctgataaaaagtccgaggggtccaaaatggcacgctggcctaaagaacagccctctacatggtattcccagtacaaaagaggctcactattgtcatacgtagatgccgaagggaaccctgtgggcgtggtccagatgacttttcttcggctcctgtccgcttctgcccaccaaaatgtaacctatcattgctaccaaagcgtggcgtggcaggacgctgctaccgggagctatgataaggcattaagattcttagggtccaacgacgaggagatgtcgtatgataataacccatacattcgtgcgctggtggacgggtgcgccaccaaaaagggctatcagaaaaccgttctggaaatcgatacccccaaggtcgaacaggtccccatcgtggacattatgttcaacgactttggcgaggcctcacagaaattcggatttgaggttggaccggcatgttttatgggctag

SEQ ID NO: 97704 - DNA, 633 bp, Artificial Sequence
  derived and/or modified sequence
taacgaaccagaagaaatatagacgccagtcagctactcgacgatggaaacggggagaactacgttgactatgccgatgggatggaggagatctttggttcactaaactctctgaagctggaaatcgaacaaatgaaacgccctttaggaactcaacagaatcccgctagaacatgtaaggatttacagctgtgccaccctgactttccagatggcgagtactgggtcgaccccaatcagggctgctccagggactcctttaaggtgtattgtaattttacagccggaggttctacctgcgtattccctgataaaaagtccgagggaagtaaaatggctcggtggcccaaggaacaacccagcacatggtactcccagtataagcgcggatcccttctctcctatgtagatgccgaggggaacccagtgggggtggtgcagatgactttcctacggctcctgtctgctagtgcgcaccagaacgtcacctatcattgttatcagtcagtcgcctggcaggacgccgctacaggaagctatgataaggctttgaggttcctgggtagtaatgacgaggaaatgtcatatgataataatccatatattcgtgcccttgtcgatggctgtgcttag

SEQ ID NO: 97705 - DNA, 1128 bp, Artificial Sequence
  derived and/or modified sequence
atggggcctcctggcttgcctggactcaaaggagactctgggcctaaaggagagaagggtcatccaggattgatcggactgataggtcccccgggggaacaaggagagaaaggggataggggactccccggtccacaaggtagcagtgggcctaaaggagaacaaggcattactggcccgagcggcccaataggcccccctggacctcccggcttacccggtcctccaggccctaagggtgcaaaagggtctagcggcccgaccggccctaaaggggaagccggccatcctggcccgcccgggccgccaggtcccccaggtgaggtaatccagccactgcccatacaggcaagtaggactagacgcaatatcgacgcttcccaactgctcgatgacggaaacggggagaactatgtagattacgctgacggcatggaggagatttttggtagcttgaatagcctcaaattagagattgaacagatgaagcggcctcttgggacgcagcaaaacccggccagaacatgtaaagatctgcagctctgccaccctgatttccccgacggagagtactgggtggaccccaatcaggggtgttccagggatagcttcaaggtgtattgtaattttactgcgggagggagtacgtgcgtttttcccgataaaaaaagcgagggcagtaaaatggcccgatggcctaaagagcagccttcgacctggtatagtcagtacaagcggggcagcctgttaagctacgttgacgccgaaggcaaccccgtaggtgtcgtccagatgacatttctgagattgttatcagccagcgcacaccaaaatgtcacttatcactgctaccagtctgtcgcatggcaggatgccgccacaggatcttacgataaggccctgagatttctcgggagcaacgatgaagaaatgtcttatgataataatccgtacatcagggcactggtggacggttgtgccactaagaaaggctaccagaagaccgtgcttgaaattgacacaccaaaggttgaacaagtccccattgtggacataatgtttaatgacttcggggaagccagtcagaaatttggctttgaagtgggaccggcttgctttatgggttag

SEQ ID NO: 97706 - DNA, 633 bp, Artificial Sequence
  derived and/or modified sequence
tgaaggactcgccggaatatcgacgcctctcagttattagatgacggcaacggggaaaattacgtggattatgctgatgggatggaggagatttttggatccctcaatagcctcaaactcgaaatagagcaaatgaaacgtccactaggcacgcaacagaacccagctcgaacatgcaaggacctccaactttgtcacccagactttcccgatggagaatactgggtggatcctaatcagggctgtagcagggactcctttaaagtttattgtaattttaccgcaggcgggtctacgtgtgtgttcccagataaaaaaagtgagggctcaaagatggcaagatggcctaaggaacaaccatccacatggtattcacaatataaaaggggctcgttgctgtcctatgtagatgccgagggcaatcctgttggggttgttcagatgacttttttacgattactctctgccagcgcgcaccagaacgtgacctatcactgttaccaatccgtggcctggcaggacgccgccactggatcttacgacaaggcccttaggtttctggggagcaacgatgaagagatgtcctacgataataatccttacatcagggcactggttgatggatgtgcctag

SEQ ID NO: 97707 - DNA, 1128 bp, Artificial Sequence
  derived and/or modified sequence
atggggcctcctggcttgcctggactcaaaggagactctgggcctaaaggagagaagggtcatccaggattgatcggactgataggtcccccgggggaacaaggagagaaaggggataggggactccccggtccacaaggtagcagtgggcctaaaggagaacaaggcattactggcccgagcggcccaataggcccccctggacctcccggcttacccggtcctccaggccctaagggtgcaaaagggtctagcggcccgaccggccctaaaggggaagccggccatcctggcccgcccggacctccaggcccccctggggaggtgatacaaccccttcccattcaagcctcccgcaccagaaggaatatcgatgcatcacaactgttggatgatggcaacggcgaaaattacgtggactatgccgatgggatggaagaaatttttggcagcctcaactccctgaaactagagattgagcaaatgaaacgtccattagggacccagcagaacccagcacgaacatgcaaggacctgcaactttgtcaccctgattttccagatggcgagtattgggtggaccctaatcagggctgttcccgagacagcttcaaggtttactgcaatttcacagctggcggaagtacatgtgtgttccctgacaaaaagtccgagggtagcaagatggcccgctggcctaaagagcagccatctacctggtacagccaatataaacgtggttcgctgttgtcttatgtagatgcagaaggtaacccagtcggagttgtgcaaatgactttcctaagactgctttcagcttccgcccatcagaacgtaacatatcattgctatcagagcgtggcgtggcaagatgccgctacaggatcatacgataaggcccttcgtttccttgggtctaatgacgaagagatgagctatgataataacccttatatccgtgctcttgtggatgggtgcgctaccaaaaaaggatatcagaaaaccgttttagaaattgacacccctaaggtggaacaggtgccaatcgtggacatcatgtttaacgacttcggagaggcctcccaaaagtttggattcgaggtggggccagcgtgctttatgggatag

SEQ ID NO: 97708 - DNA, 633 bp, Artificial Sequence
  derived and/or modified sequence
tgacgcaccagaaggaacattgatgcaagccaattgttggatgatggcaatggggagaattatgtggactatgccgatggtatggaggaaattttcgggtccctgaacagcctgaagttggagatcgagcaaatgaaacgcccgctgggaactcaacagaaccctgctcgtacctgtaaggaccttcaactctgtcaccctgattttcctgacggcgaatattgggtcgaccccaatcaagggtgctctcgagatagtttcaaggtgtattgcaattttacagcaggggggtctacttgtgttttccctgacaagaaatccgaaggcagcaaaatggcacgatggccaaaagaacagcctagcacctggtactctcagtacaagcgcgggtctcttctttcttatgtggatgctgagggcaaccctgttggggtagtccaaatgactttcttgcggctgttgagtgcttccgcgcaccaaaatgtgacctaccattgttatcaatccgttgcctggcaggacgcagctactgggagctatgacaaggcgcttcgatttttaggtagcaatgatgaggaaatgagttatgataataacccctacattagagccttggtagacggttgtgcttag

SEQ ID NO: 97709 - RNA, 1128 nt, Artificial Sequence
  derived and/or modified sequence
auggggccuccuggcuugccuggacucaaaggagacucugggccuaaaggagagaagggucauccaggauugaucggacugauaggucccccgggggaacaaggagagaaaggggauaggggacuccccgguccacaagguagcagugggccuaaaggagaacaaggcauuacuggcccgagcggcccaauaggccccccuggaccucccggcuuacccgguccuccaggcccuaagggugcaaaagggucuagcggcccgaccggcccuaaaggggaagccggccauccuggcccgcccgggccgccaggucccccaggugagguaauccagccacugcccauacaggcaaguaggacuagacgcaauaucgacgcuucccaacugcucgaugacggaaacggggagaacuauguagauuacgcugacggcauggaggagauuuuugguagcuugaauagccucaaauuagagauugaacagaugaagcggccucuugggacgcagcaaaacccggccagaacauguaaagaucugcagcucugccacccugauuuccccgacggagaguacuggguggaccccaaucagggguguuccagggauagcuucaagguguauuguaauuuuacugcgggagggaguacgugcguuuuucccgauaaaaaaagcgagggcaguaaaauggcccgauggccuaaagagcagccuucgaccugguauagucaguacaagcggggcagccuguuaagcuacguugacgccgaaggcaaccccguaggugucguccagaugacauuucugagauuguuaucagccagcgcacaccaaaaugucacuuaucacugcuaccagucugucgcauggcaggaugccgccacaggaucuuacgauaaggcccugagauuucucgggagcaacgaugaagaaaugucuuaugauaauaauccguacaucagggcacugguggacgguugugccacuaagaaaggcuaccagaagaccgugcuugaaauugacacaccaaagguugaacaaguccccauuguggacauaauguuuaaugacuucggggaagccagucagaaauuuggcuuugaagugggaccggcuugcuuuauggguuag

SEQ ID NO: 97710 - RNA, 633 nt, Artificial Sequence
  derived and/or modified sequence
ugaaggacucgccggaauaucgacgccucucaguuauuagaugacggcaacggggaaaauuacguggauuaugcugaugggauggaggagauuuuuggaucccucaauagccucaaacucgaaauagagcaaaugaaacguccacuaggcacgcaacagaacccagcucgaacaugcaaggaccuccaacuuugucacccagacuuucccgauggagaauacuggguggauccuaaucagggcuguagcagggacuccuuuaaaguuuauuguaauuuuaccgcaggcgggucuacguguguguucccagauaaaaaaagugagggcucaaagauggcaagauggccuaaggaacaaccauccacaugguauucacaauauaaaaggggcucguugcuguccuauguagaugccgagggcaauccuguugggguuguucagaugacuuuuuuacgauuacucucugccagcgcgcaccagaacgugaccuaucacuguuaccaauccguggccuggcaggacgccgccacuggaucuuacgacaaggcccuuagguuucuggggagcaacgaugaagagauguccuacgauaauaauccuuacaucagggcacugguugauggaugugccuag

SEQ ID NO: 97711 - RNA, 1128 nt, Artificial Sequence
  derived and/or modified sequence
auggggccuccuggcuugccuggacucaaaggagacucugggccuaaaggagagaagggucauccaggauugaucggacugauaggucccccgggggaacaaggagagaaaggggauaggggacuccccgguccacaagguagcagugggccuaaaggagaacaaggcauuacuggcccgagcggcccaauaggccccccuggaccucccggcuuacccgguccuccaggcccuaagggugcaaaagggucuagcggcccgaccggcccuaaaggggaagccggccauccuggcccgcccggaccuccaggccccccuggggaggugauacaaccccuucccauucaagccucccgcaccagaaggaauaucgaugcaucacaacuguuggaugauggcaacggcgaaaauuacguggacuaugccgaugggauggaagaaauuuuuggcagccucaacucccugaaacuagagauugagcaaaugaaacguccauuagggacccagcagaacccagcacgaacaugcaaggaccugcaacuuugucacccugauuuuccagauggcgaguauuggguggacccuaaucagggcuguucccgagacagcuucaagguuuacugcaauuucacagcuggcggaaguacauguguguucccugacaaaaaguccgaggguagcaagauggcccgcuggccuaaagagcagccaucuaccugguacagccaauauaaacgugguucgcuguugucuuauguagaugcagaagguaacccagucggaguugugcaaaugacuuuccuaagacugcuuucagcuuccgcccaucagaacguaacauaucauugcuaucagagcguggcguggcaagaugccgcuacaggaucauacgauaaggcccuucguuuccuugggucuaaugacgaagagaugagcuaugauaauaacccuuauauccgugcucuuguggaugggugcgcuaccaaaaaaggauaucagaaaaccguuuuagaaauugacaccccuaagguggaacaggugccaaucguggacaucauguuuaacgacuucggagaggccucccaaaaguuuggauucgagguggggccagcgugcuuuaugggauag

SEQ ID NO: 97712 - RNA, 633 nt, Artificial Sequence
  derived and/or modified sequence
ugacgcaccagaaggaacauugaugcaagccaauuguuggaugauggcaauggggagaauuauguggacuaugccgaugguauggaggaaauuuucgggucccugaacagccugaaguuggagaucgagcaaaugaaacgcccgcugggaacucaacagaacccugcucguaccuguaaggaccuucaacucugucacccugauuuuccugacggcgaauauugggucgaccccaaucaagggugcucucgagauaguuucaagguguauugcaauuuuacagcaggggggucuacuuguguuuucccugacaagaaauccgaaggcagcaaaauggcacgauggccaaaagaacagccuagcaccugguacucucaguacaagcgcgggucucuucuuucuuauguggaugcugagggcaacccuguugggguaguccaaaugacuuucuugcggcuguugagugcuuccgcgcaccaaaaugugaccuaccauuguuaucaauccguugccuggcaggacgcagcuacugggagcuaugacaaggcgcuucgauuuuuagguagcaaugaugaggaaaugaguuaugauaauaaccccuacauuagagccuugguagacgguugugcuuag

SEQ ID NO: 97713 - protein, 716 aa, Artificial Sequence
  derived and/or modified sequence
MWRVLFLLSGLGGLRMDSNFDSLPVQITVPEKIRSIIKEGIESQASYKIVIEGKPYTVNLMQKNFLPHNFRVYSYSGTGIMKPLDQDFQNFCHYQGYIEGYPKSVVMVSTCTGLRGVLQFENVSYGIEPLESSVGFEHVIYQVKHKKADVSLYNEKDIESRDLSFKLQSVEYNHMGSDTTVVAQKVFQLIGLTNAIFVSFNITIILSSLELWIDENKIATTGEANELLHTFLRWKTSYLVLRPHDVAFLLVYREKSNYVGATFQGKMCDANYAGGVVLHPRTISLESLAVILAQLLSLSMGITYDDINKCQCSGAVCIMNPEAIHFSGVKIFSNCSFEDFAHFISKQKSQCLHNQPRLDPFFKQQAVCGNAKLEAGEECDCGTEQDCALIGETCCDIATCRFKAGSNCAEGPCCENCLFMSKERMCRPSFEECDLPEYCNGSSASCPENHYVQTGHPCGLNQWICIDGVCMSGDKQCTDTFGKEVEFGPSECYSHLNSKTDVSGNCGISDSGYTQCEADNLQCGKLICKYVGKFLLQIPRATIIYANISGHLCIAVEFASDHADSQKMWIKDGTSCGSNKVCRNQRCVSSSYLGYDCTTDKCNDRGVCNNKKHCHCSASYLPPDCSVQSDLWPGGSIDSGNFPPVAIPARLPERRYIENIYHSKPMRWPFFLFIPFFIIFCVLIAIMVKVNFQRKKWRTEDYSSDEQPESESEPKG

SEQ ID NO: 97714 - DNA, 2151 bp, Artificial Sequence
  derived and/or modified sequence
atgtggcgagtgctctttctgttgagcgggttgggaggtctgaggatggacagtaatttcgattccttgccggttcagatcacagtgcctgaaaagatcagatcaattataaaagagggaattgaatctcaggcctcatataaaatagtgatcgaggggaaaccctatactgtcaatctgatgcaaaaaaattttttgccacataacttccgcgtgtattcttacagtgggacaggaataatgaaaccactggaccaggatttccaaaacttctgtcattaccagggttatatcgaagggtatccaaagtcggtggtaatggtgtctacgtgcaccgggctgagaggagttctacagttcgagaacgtcagctacgggatcgagcctctggagagcagtgtggggttcgagcacgtcatctatcaagtcaagcataagaaagcagatgtgtcgttatataacgagaaggacatcgagtcacgagatctgtcttttaagctgcagagtgttgagtataatcacatgggcagtgatactaccgtagtagcccagaaagttttccaacttattggcctgacgaatgctatctttgtgtctttcaatatcactattattctcagcagcctggagctttggattgatgagaataagattgcaaccaccggggaggccaacgagcttctgcacacgttcctgaggtggaagacaagctatctggtattgcggcctcacgacgttgccttcttgctggtgtaccgggagaagtcgaattacgttggggcaacattccagggcaagatgtgtgatgcgaattatgccggaggagtagtcctgcacccccgcacaattagcctcgagagcctcgctgtgatactggcccaattactgagtttgagcatgggtatcacctatgatgacatcaataaatgccaatgctccggtgcggtttgcattatgaaccccgaagccatccacttttctggggtgaaaatcttctccaattgttcctttgaagattttgcccacttcataagcaagcagaaatcccaatgcttgcacaatcagccccgactggatccgttctttaaacaacaggccgtgtgtggaaatgccaagcttgaggccggggaagaatgcgactgtgggacagaacaagattgtgccctcataggggagacctgttgcgatattgccacctgcaggtttaaggccggctccaactgcgctgagggaccttgctgcgaaaattgtctcttcatgtccaaagaacggatgtgtagacccagctttgaagaatgcgacctgccagagtattgcaacggatcttcggcttcctgccccgaaaatcattacgttcagacaggtcatccttgcgggttgaatcagtggatttgcattgatggggtttgcatgtctggtgacaaacagtgtactgacacatttgggaaggaggtcgagttcggaccatcagaatgttattctcaccttaactctaagacagatgtttccgggaattgtggcatcagtgactctgggtatacacaatgcgaggccgacaacctgcagtgtggcaaattaatttgcaaatatgtgggcaaatttttgctgcaaatcccacgagccacaatcatatacgcaaacattagtggtcatttgtgtatcgctgttgagtttgcaagcgatcatgcagacagccagaaaatgtggattaaggacgggacatcctgcggtagtaataaggtgtgccgaaatcagcgttgtgtttctagttcatatctgggttacgactgtactactgacaaatgcaatgatcgcggcgtctgcaataacaaaaaacactgtcattgttccgccagctatctgcccccagattgtagtgtgcagagcgatttatggccgggggggtctatcgactccgggaactttccgcctgtagccatacctgcaaggctgcccgagcggcggtatatcgagaacatttatcactctaaacccatgcgctggcctttctttctttttattccattttttattattttttgcgtgcttattgctatcatggtgaaagtcaatttccagcgcaagaagtggcggacagaagactacagttccgacgagcagcccgagtctgagtccgagcccaagggttag

SEQ ID NO: 97715 - DNA, 2151 bp, Artificial Sequence
  derived and/or modified sequence
atgtggagggtgctcttcctgctgagcggcctgggcggcctgaggatggacagcaactttgacagcctgcctgtgcagatcaccgtgcctgagaagatccgcagcatcatcaaggagggcatcgagagccaggccagctacaagatcgtgattgagggcaagccctacacagtgaacctgatgcagaagaacttcctgccccacaacttccgggtgtacagctacagcggcaccggcatcatgaagcccctggaccaggacttccagaacttctgccactaccagggctacatcgagggctaccccaagtctgtggtgatggtgtccacctgcaccggcctgcggggcgtgctgcagtttgaaaatgtgtcctatggaattgagcccctggagagctctgtgggctttgagcacgtgatctaccaggtgaagcacaagaaggcagatgtgtccctgtacaatgagaaggacatcgagagccgggacctgtccttcaagctgcagagcgtggagtacaaccacatgggcagtgacaccaccgtggtggcccagaaggtgttccagctgattggcctgaccaatgccatctttgtgtccttcaacatcaccatcatcctgagcagcctggagctgtggattgatgagaacaagatcgccaccactggagaggccaatgagctgctgcacaccttcctgcgctggaagaccagctacctggtgctgcggccccatgatgtggccttcctgctggtgtaccgggagaagagcaactacgtgggcgccaccttccagggcaagatgtgtgatgccaactatgctgggggcgtggtgctgcaccccaggaccatcagcctggagagcctggccgtcatcctggcccagctgctgagcctgtccatgggcatcacctatgatgacatcaacaagtgccagtgcagcggggctgtgtgcatcatgaaccctgaggccatccacttctctggagtgaagatcttcagcaactgcagctttgaggactttgcccacttcatcagcaagcagaagagccagtgcctgcacaaccagccccggctggaccccttcttcaagcagcaggccgtgtgtggaaatgccaagctggaggccggggaggagtgtgactgtggcacagagcaggactgtgccctgattggagagacctgctgtgacatcgccacctgccgcttcaaggccggcagcaactgtgccgagggcccctgctgtgagaactgcctcttcatgagcaaggagaggatgtgccggcccagctttgaggagtgtgacctgcctgagtactgcaatggcagcagcgccagctgcccagagaaccactacgtgcagacaggccacccctgtggcctgaaccagtggatctgcattgatggagtgtgcatgtctggggacaagcagtgcacagacaccttcggcaaggaggtggagtttggccccagcgagtgctacagccacctgaacagcaagacagatgtgtctggcaactgtggcatcagtgacagcggctacacccagtgtgaggccgacaacctgcagtgtgggaagctgatctgcaagtatgtgggcaagttcctgctgcagatcccccgggccaccatcatctatgccaacatcagcggccacctgtgcatcgctgtggagtttgccagtgaccatgctgacagccagaagatgtggatcaaggatggcaccagctgtggcagcaacaaggtgtgcaggaaccagagatgtgtgagcagcagctacctgggctatgactgcaccacagacaagtgcaatgaccggggcgtgtgcaacaacaagaagcactgccactgcagcgccagctacctgcccccagactgcagcgtgcagagcgacctgtggccaggcggcagcattgattctggcaacttcccccctgtggccatcccagcccggctgcctgagcggcgctacatcgagaacatctaccacagcaagcccatgcgctggcccttcttcctgttcatccccttcttcatcatcttctgtgtgctgattgccatcatggtgaaggtgaacttccagaggaagaagtggaggacagaggactacagcagtgatgagcagcctgagagcgagagcgagcccaagggctag

SEQ ID NO: 97716 - DNA, 2151 bp, Artificial Sequence
  derived and/or modified sequence
atgtggcgggtgctgttcctgctgagcggcctgggcggcctgcggatggacagcaatttcgatagtctgccggtgcagattactgtgcctgaaaagatccgatctatcataaaggaaggcatcgagagccaagcatcatataaaatcgtgatagaaggaaagccctatacagtgaatctaatgcagaagaatttcctgccacacaactttcgggtctacagctattccggcaccggaatcatgaagcccctggaccaagactttcagaatttctgccactaccagggttacatcgaaggatatcccaagtccgtggtgatggtctcaacttgcactggtctgcgtggcgtactgcagttcgagaatgtttcttacgggatagaaccactggagtcctccgtgggatttgaacacgtgatctaccaggtgaaacataaaaaagctgatgtgtctctgtacaacgagaaggacattgagtccagggatctcagcttcaagctgcagtccgtcgagtacaatcatatgggcagcgataccacagtggttgctcaaaaagtgtttcagctgatagggcttacgaatgctatctttgtttcctttaacataacaatcatcttgagtagcttagagctgtggatcgacgaaaacaagatcgccacaactggggaagctaacgaactgttgcatacgttcttgcgctggaagacgtcctacctcgtcctccgtccacatgacgtggcttttttgctggtgtaccgcgaaaagagcaactatgtcggcgcaactttccagggaaagatgtgcgacgccaactatgctgggggtgtggtcttgcaccctcgcacaatctccctggaaagtcttgctgttattctggcccagttactgtccctgagcatgggaataacctatgacgatataaacaagtgtcagtgcagtggtgccgtttgtattatgaacccagaagccatccacttttcaggcgtgaagatcttttccaattgctcctttgaagacttcgctcacttcatctctaaacagaagtcgcagtgtctgcataaccagcctagacttgaccccttcttcaagcagcaagcagtatgcggcaatgccaaattagaggctggagaggaatgcgattgtggcacagagcaagactgcgccttgattggcgagacatgctgcgatatagctacctgtagattcaaggctgggtctaactgcgccgagggaccttgctgtgaaaactgcctgttcatgtctaaggagcgcatgtgccggcccagttttgaggaatgcgacctccccgagtactgtaacggctccagtgcttcctgtcctgagaaccattatgtgcagacaggacatccttgcggcttgaaccaatggatttgtatcgacggagtgtgtatgagtggggataagcagtgcaccgacacctttggcaaggaagtggagtttggtcccagtgagtgctactcacatctgaatagtaaaacggatgtctccggtaattgcgggatctccgatagtgggtacacccaatgtgaagcagataatcttcagtgtggcaagctgatctgtaaatatgtggggaagttcttgctgcagattccgcgcgccactataatctacgccaatatctccgggcatttgtgcatcgccgtggagtttgcttcagaccacgctgacagtcagaagatgtggattaaagatggcactagctgtggaagcaataaggtgtgtagaaatcaacggtgcgtgtcttccagctacctggggtatgactgcaccacagataagtgtaatgataggggggtctgcaataacaagaagcactgtcattgcagtgcctcctatctccctccagactgttccgttcagtccgacctttggccaggaggatcgattgactctggtaattttccaccagtcgccatcccagcaagactgccagagcggcggtatatcgagaacatctaccattctaagcccatgaggtggcctttcttcctcttcatcccattttttattatattctgcgtcttgattgctattatggttaaggtgaatttccagagaaagaaatggagaacggaagactattcctccgatgagcagccggaatccgaaagcgagcccaagggctag

SEQ ID NO: 97717 - DNA, 2151 bp, Artificial Sequence
  derived and/or modified sequence
atgtggcgggttctcttccttctgagcggtttaggcggattgagaatggatagcaacttcgactccctgcctgttcagattaccgtccccgaaaaaatcaggtctatcattaaggaaggcatagagtctcaggcgtcatacaagatcgttattgaaggaaagccctacacagtgaaccttatgcagaaaaatttcctccctcataactttcgcgtttactcctacagcggaacaggcatcatgaagcccctggatcaggacttccagaatttttgtcactaccaagggtatatagaaggctaccccaaatcagtggtgatggtcagcacctgtactggactgcgcggagttctgcagttcgaaaacgttagctatggcatagagcccttagaatcctccgtcggctttgaacatgtcatttatcaggtgaagcacaagaaggccgatgtgagtctctacaacgaaaaggacatcgagagccgcgacctgtcatttaaactgcagtccgtggaatacaatcatatggggagcgacactaccgtcgtggcccagaaagtattccaattgatcggcctcacgaacgcaatttttgtttccttcaacattacaatcattcttagctcccttgaattatggattgatgagaataaaatagctactacaggagaggccaacgagctcttacacacattcctgcgttggaagaccagttacctcgtcctcaggccccatgatgtggcttttttactcgtgtatcgagaaaagtcaaattacgtgggggcaacatttcagggtaagatgtgtgatgccaactacgctggcggagtggtgctccacccgagaaccatttctctggagagcctcgctgtgatcctggcacagctgctctcattaagcatgggaatcacatatgacgacatcaataaatgccagtgctccggcgctgtttgcatcatgaacccagaagcaattcacttcagcggagtgaaaattttttccaactgtagtttcgaagactttgcacatttcatatccaagcagaagtcccaatgcctccataaccagccacgtctggacccgttttttaaacagcaggctgtctgcggcaacgccaaattagaagctggagaggagtgtgattgcggtacagaacaggactgtgccctgattggggagacctgctgtgacatcgctacgtgccgttttaaagctggcagtaactgcgccgaagggccatgttgtgagaattgtctgttcatgagcaaagaaaggatgtgtcggccaagctttgaagaatgcgacttacctgaatactgtaatggatcaagcgcgtcatgtcctgagaaccattatgtgcagaccggccacccctgcgggctaaaccaatggatctgcatagatggggtgtgcatgtccggggataagcagtgtaccgatacgtttggcaaagaagtggagttcggcccaagcgaatgctactctcacctaaactcgaaaaccgatgtgtcggggaactgtgggatctcagactctgggtatacacagtgcgaagcagataatctccagtgcggtaagctgatctgcaagtacgtgggaaagttcctcctgcagatccccagggccacaatcatctacgcaaatatctctggccacctctgcatcgcagttgaattcgcgtccgaccacgcagattctcagaagatgtggatcaaggatgggacatcttgtggctccaataaagtgtgtcggaatcagcgatgcgtaagcagcagctacttaggatatgattgcacaacagacaaatgtaacgatagaggagtgtgtaataacaaaaaacactgtcactgttctgcttcttacctaccccctgactgctccgtacaatccgacttgtggccaggaggttctattgattcaggaaattttcctccagtggccatccccgcaaggctccccgagcgacgttatatcgagaatatctaccattcaaaaccaatgcggtggccttttttcttattcattccgttcttcatcatcttttgcgtcctgattgctatcatggtaaaagtgaactttcagcgaaagaagtggcgaactgaggattattcctccgacgagcaaccagaaagcgaaagtgagcccaaaggatag

SEQ ID NO: 97718 - DNA, 2151 bp, Artificial Sequence
  derived and/or modified sequence
atgtggagagtgctgttcctgctgagcggcctgggcggcctgagaatggacagcaacttcgacagcctgcccgtgcagatcaccgtgcccgagaagatcagaagcatcatcaaggagggcatcgagagccaggccagctacaagatcgtgatcgagggcaagccctacaccgtgaacctgatgcagaagaacttcctgccccacaacttcagagtgtacagctacagcggcaccggcatcatgaagcccctggaccaggacttccagaacttctgccactaccagggctacatcgagggctaccccaagagcgtggtgatggtgagcacctgcaccggcctgagaggcgtgctgcagttcgagaacgtgagctacggcatcgagcccctggagagcagcgtgggcttcgagcacgtgatctaccaggtgaagcacaagaaggccgacgtgagcctgtacaacgagaaggacatcgagagcagagacctgagcttcaagctgcagagcgtggagtacaaccacatgggcagcgacaccaccgtggtggcccagaaggtgttccagctgatcggcctgaccaacgccatcttcgtgagcttcaacatcaccatcatcctgagcagcctggagctgtggatcgacgagaacaagatcgccaccaccggcgaggccaacgagctgctgcacaccttcctgagatggaagaccagctacctggtgctgagaccccacgacgtggccttcctgctggtgtacagagagaagagcaactacgtgggcgccaccttccagggcaagatgtgcgacgccaactacgccggcggcgtggtgctgcaccccagaaccatcagcctggagagcctggccgtgatcctggcccagctgctgagcctgagcatgggcatcacctacgacgacatcaacaagtgccagtgcagcggcgccgtgtgcatcatgaaccccgaggccatccacttcagcggcgtgaagatcttcagcaactgcagcttcgaggacttcgcccacttcatcagcaagcagaagagccagtgcctgcacaaccagcccagactggaccccttcttcaagcagcaggccgtgtgcggcaacgccaagctggaggccggcgaggagtgcgactgcggcaccgagcaggactgcgccctgatcggcgagacctgctgcgacatcgccacctgcagattcaaggccggcagcaactgcgccgagggcccctgctgcgagaactgcctgttcatgagcaaggagagaatgtgcagacccagcttcgaggagtgcgacctgcccgagtactgcaacggcagcagcgccagctgccccgagaaccactacgtgcagaccggccacccctgcggcctgaaccagtggatctgcatcgacggcgtgtgcatgagcggcgacaagcagtgcaccgacaccttcggcaaggaggtggagttcggccccagcgagtgctacagccacctgaacagcaagaccgacgtgagcggcaactgcggcatcagcgacagcggctacacccagtgcgaggccgacaacctgcagtgcggcaagctgatctgcaagtacgtgggcaagttcctgctgcagatccccagagccaccatcatctacgccaacatcagcggccacctgtgcatcgccgtggagttcgccagcgaccacgccgacagccagaagatgtggatcaaggacggcaccagctgcggcagcaacaaggtgtgcagaaaccagagatgcgtgagcagcagctacctgggctacgactgcaccaccgacaagtgcaacgacagaggcgtgtgcaacaacaagaagcactgccactgcagcgccagctacctgccccccgactgcagcgtgcagagcgacctgtggcccggcggcagcatcgacagcggcaacttcccccccgtggccatccccgccagactgcccgagagaagatacatcgagaacatctaccacagcaagcccatgagatggcccttcttcctgttcatccccttcttcatcatcttctgcgtgctgatcgccatcatggtgaaggtgaacttccagagaaagaagtggagaaccgaggactacagcagcgacgagcagcccgagagcgagagcgagcccaagggctag

SEQ ID NO: 97719 - DNA, 2535 bp, Artificial Sequence
  derived and/or modified sequence
ggctgggacccaggacttcaagccatgtggcgcgtcttgtttctgctcagcgggctcggcgggctgcggatggacagtaattttgatagtttacctgtgcaaattacagttccggagaaaatacggtcaataataaaggaaggaattgaatcgcaggcatcctacaaaattgtaattgaagggaaaccatatactgtgaatttaatgcaaaaaaactttttaccccataattttagagtttacagttatagtggcacaggaattatgaaaccacttgaccaagattttcagaatttctgccactaccaagggtatattgaaggttatccaaaatctgtggtgatggttagcacatgtactggactcaggggcgtactacagtttgaaaatgttagttatggaatagaacccctggagtcttcagttggctttgaacatgtaatttaccaagtaaaacataagaaagcagatgtttccttatataatgagaaggatattgaatcaagagatctgtcctttaaattacaaagcgtagagtataatcatatggggtctgatacaactgttgtcgctcaaaaagttttccagttgattggattgacgaatgctatttttgtttcatttaatattacaattattctgtcttcattggagctttggatagatgaaaataaaattgcaaccactggagaagctaatgagttattacacacatttttaagatggaaaacatcttatcttgttttacgtcctcatgatgtggcatttttacttgtttacagagaaaagtcaaattatgttggtgcaacctttcaagggaagatgtgtgatgcaaactatgcaggaggtgttgttctgcaccccagaaccataagtctggaatcacttgcagttattttagctcaattattgagccttagtatggggatcacttatgatgacattaacaaatgccagtgctcaggagctgtctgcattatgaatccagaagcaattcatttcagtggtgtgaagatctttagtaactgcagcttcgaagactttgcacattttatttcaaagcagaagtcccagtgtcttcacaatcagcctcgcttagatccttttttcaaacagcaagcagtgtgtggtaatgcaaagctggaagcaggagaggagtgtgactgtgggactgaacaggattgtgcccttattggagaaacatgctgtgatattgccacatgtagatttaaagccggttcaaactgtgctgaaggaccatgctgcgaaaactgtctatttatgtcaaaagaaagaatgtgtaggccttcctttgaagaatgcgacctccctgaatattgcaatggatcatctgcatcatgcccagaaaaccactatgttcagactgggcatccgtgtggactgaatcaatggatctgtatagatggagtttgtatgagtggggataaacaatgtacagacacatttggcaaagaagtagagtttggcccttcagaatgttattctcaccttaattcaaagactgatgtatctggaaactgtggtataagtgattcaggatacacacagtgtgaagctgacaatctgcagtgcggaaaattaatatgtaaatatgtaggtaaatttttattacaaattccaagagccactattatttatgccaacataagtggacatctctgcattgctgtggaatttgccagtgatcatgcagacagccaaaagatgtggataaaagatggaacttcttgtggttcaaataaggtttgcaggaatcaaagatgtgtgagttcttcatacttgggttatgattgtactactgacaaatgcaatgatagaggtgtatgcaataacaaaaagcactgtcactgtagtgcttcatatttacctccagattgctcagttcaatcagatctatggcctggtgggagtattgacagtggcaattttccacctgtagctataccagccagactccctgaaaggcgctacattgagaacatttaccattccaaaccaatgagatggccatttttcttattcattcctttctttattattttctgtgtactgattgctataatggtgaaagttaatttccaaaggaaaaaatggagaactgaggactattcaagcgatgagcaacctgaaagtgagagtgaacctaaagggtagtctggacaacagagatgccatgatatcacttcttctagagtaattatctgtgatggatggacacaaaaaaatggaaagaaaagaatgtacattacctggtttcctgggattcaaacctgcatattgtgattttaatttgaccagaaaatatgatatatatgtataatttcacagataatttacttatttaaaaatgcatgataatgagttttacattacaaatttctgtttttttaaagttatcttacgctatttctgttggttagtagacactaattctgtcagtaggggcatggtataaggaaatatcataatgtaatgaggtggtactatgattaaaagccactgttacatttcaaa

SEQ ID NO: 97720 - protein, 820 aa, Artificial Sequence
  derived and/or modified sequence
MKMLLLLHCLGVFLSCSGHIQDEHPQYHSPPDVVIPVRITGTTRGMTPPGWLSYILPFGGQKHIIHIKVKKLLFSKHLPVFTYTDQGAILEDQPFVQNNCYYHGYVEGDPESLVSLSTCFGGFQGILQINDFAYEIKPLAFSTTFEHLVYKMDSEEKQFSTMRSGFMQNEITCRMEFEEIDNSTQKQSSYVGWWIHFRIVEIVVVIDNYLYIRYERNDSKLLEDLYVIVNIVDSILDVIGVKVLLFGLEIWTNKNLIVVDDVRKSVHLYCKWKSENITPRMQHDTSHLFTTLGLRGLSGIGAFRGMCTPHRSCAIVTFMNKTLGTFSIAVAHHLGHNLGMNHDEDTCRCSQPRCIMHEGNPPITKFSNCSYGDFWEYTVERTKCLLETVHTKDIFNVKRCGNGVVEEGEECDCGPLKHCAKDPCCLSNCTLTDGSTCAFGLCCKDCKFLPSGKVCRKEVNECDLPEWCNGTSHKCPDDFYVEDGIPCKERGYCYEKSCHDRNEQCRRIFGAGANTASETCYKELNTLGDRVGHCGIKNATYIKCNISDVQCGRIQCENVTEIPNMSDHTTVHWARFNDIMCWSTDYHLGMKGPDIGEVKDGTECGIDHICIHRHCVHITILNSNCSPAFCNKRGICNNKHHCHCNYLWDPPNCLIKGYGGSVDSGPPPKRKKKKKFCYLCILLLIVLFILLCCLYRLCKKSKPIKKQQDVQTPSAKEEEKIQRRPHELPPQSQPWVMPSQSQPPVTPSQSHPQVMPSQSQPPVTPSQSQPRVMPSQSQPPVMPSQSHPQLTPSQSQPPVTPSQRQPQLMPSQSQPPVTPS

SEQ ID NO: 97721 - protein, 44 aa, Artificial Sequence
  derived and/or modified sequence
MKMLLLLHCLGVFLSCSGHIQDEHPQYHSPPDVVIPVRITGTTR

SEQ ID NO: 97722 - protein, 90 aa, Artificial Sequence
  derived and/or modified sequence
MKMLLLLHCLGVFLSCSGHIQDEHPQYHSPPDVVIPVRITGTTRGMTPPGWLSYILPFGGQKHIIHIKVKKLLFSKHLPVFTYTDQGAIL

SEQ ID NO: 97723 - protein, 14 aa, Artificial Sequence
  derived and/or modified sequence
MKMLLLLHCLGVFL

SEQ ID NO: 97724 - DNA, 88 bp, Artificial Sequence
  derived and/or modified sequence
agcaacttcagcaaagtctcaggatacaaaatcaatgtacaaaaatcacaagcattcttatacaccaataacagacaaacagagagcc

SEQ ID NO: 97725 - DNA, 88 bp, Artificial Sequence
  derived and/or modified sequence
agcaacttcagcaaagtctcaggagacaaaatcaatgtacaaaaatcacaagcattcttatacaccaataacagacaaacagagagcc

SEQ ID NO: 97726 - DNA, 92 bp, Artificial Sequence
  derived and/or modified sequence
agcaacttcagcaaagtctcaggatacaaaatcaatgtacaaaaatcacaagcattcttatacaccaataacagacaaacagagagccaaaa

SEQ ID NO: 97727 - DNA, 2463 bp, Artificial Sequence
  derived and/or modified sequence
atgaagatgctgttgctgctgcactgtctaggcgtctttctgtcttgtagtgggcatatacaggacgagcatcctcagtatcattcacctcctgatgtagtgattccagtgcgcataacaggcaccacccggggaatgaccccccccgggtggctgtcctatatacttcctttcggcgggcagaagcatatcatacatattaaggtgaagaagctgctcttttccaaacatcttcctgttttcacatacaccgatcagggtgccattctggaggaccagcctttcgttcagaacaattgctattaccacgggtacgtcgagggagaccctgagtcgcttgtctctctctccacttgctttggcggcttccagggcatcctccagataaatgactttgcgtacgaaatcaagccactggccttctccaccaccttcgagcacctcgtttacaagatggacagtgaagagaaacagttttctacaatgaggtctggcttcatgcagaatgaaatcacttgtcggatggaattcgaagagatcgacaacagcacccagaaacagtctagctacgttggctggtggattcactttaggatcgtggagattgttgtggtcattgataactacctttacataagatacgagcgaaacgattccaagttgttagaagatttatatgtgatcgttaatatcgtagacagcatactggatgtgatcggcgttaaggttctgctctttggtctggaaatatggacaaataagaacctaatcgtggtcgacgatgtgagaaagagtgttcacctctattgcaagtggaagtcagagaacatcacccctagaatgcagcacgacacatcccatctgttcacgaccctggggcttagagggctctccggtatcggggcttttcgtggaatgtgtaccccacacaggtcgtgcgcaatagtaactttcatgaataagacactcgggacattcagcattgccgtcgctcatcatctggggcacaatctcgggatgaaccatgacgaggacacatgccggtgttcccagccccgttgcatcatgcacgagggaaatccaccaattactaagttttcaaactgctcctacggggatttctgggagtacactgttgaaaggactaagtgcctcttggaaaccgttcataccaaagatatcttcaacgtgaagcgctgtgggaatggtgttgtggaggaaggagaggagtgtgattgtgggccactaaaacattgtgccaaagatccgtgctgcctgagcaactgcaccttgactgacgggagtacatgtgcgtttggcctttgctgtaaagactgtaaattccttccatcaggtaaggtctgcaggaaggaggtcaatgaatgcgacctccccgagtggtgtaatggtacttcccacaagtgccctgacgacttttacgtggaggacggcattccctgtaaggagaggggttactgttatgaaaagagctgtcacgatcgaaatgagcagtgccgccggatattcggcgctggggccaacaccgcctccgagacttgctacaaagagttgaatactctgggggaccgagtaggccattgcggcattaagaacgctacttacatcaagtgcaacatttcagacgtccagtgtggacgtatccaatgcgaaaacgtaacagagatccctaacatgtcagatcataccaccgtccattgggcgcggttcaacgatataatgtgttggtcgacagactaccatctgggcatgaaggggcccgatataggagaggtcaaagatgggaccgaatgcggtattgaccatatctgcattcaccgccattgtgttcacataaccatcctgaacagcaactgctcccctgcattttgcaataagaggggaatctgtaacaataagcatcactgccactgcaactatctgtgggacccacctaactgccttattaaggggtacgggggatctgtagactccgggccacctcccaagaggaaaaagaagaagaagttctgctacctatgcatcctacttctgattgtcttatttattctgttgtgctgtctttaccggctgtgcaagaagtcaaagcccataaaaaagcagcaggacgtacaaaccccatcagcaaaagaggaggagaagatccagcgtaggccccacgaactgccaccccagtctcaaccctgggtgatgccaagccagagtcagccacctgtgactccttctcaatctcatcctcaggtgatgccctcacagagccagccccccgtgacaccctctcaaagccaaccccgcgtaatgccctcacagtcccagcccccggtcatgccttcccagagccacccccagttgaccccaagccagtctcagccgcctgtgacaccctctcagagacaaccacagttgatgccaagtcagagtcagcctccggttaccccttcctag

SEQ ID NO: 97728 - DNA, 2463 bp, Artificial Sequence
  derived and/or modified sequence
atgaagatgctactgttactacactgcctcggcgtgtttctgtcctgttctggtcatattcaggacgaacatccccaataccattctcctccagacgtggtgatcccagtccgtatcacaggcaccactaggggcatgacaccgccaggctggctttcttacatactgccatttggaggccaaaaacatatcatacacattaaggtgaaaaagttgttattcagtaaacatttacccgtgttcacctatacagaccagggcgctattttagaagaccagcccttcgtgcagaataattgctactatcacgggtacgtggaaggggaccccgagtcgctagtgagtttgtcaacatgttttggcggatttcaggggatactacaaatcaatgacttcgcctacgagattaagccactcgcattttctaccacatttgagcacctggtatataagatggacagcgaggagaaacagtttagcactatgagaagcggatttatgcagaatgagataacctgcaggatggaattcgaagagattgataattcaacccagaaacagagctcctacgtagggtggtggatccacttccggatcgtcgaaattgttgtcgtgatcgacaactatctgtatattcggtatgaacgaaacgactccaaactgttggaagatttgtacgtcattgttaacatcgtggactcaattttggacgtcattggtgtcaaggttttgttattcggactagagatctggacaaacaaaaacctgatcgtcgtcgacgatgtccggaaaagcgttcacttgtattgtaagtggaagtccgaaaatattacaccaagaatgcagcacgacacgtcgcatctgtttaccaccctggggctgcgaggactgagcggtattggggctttccgcgggatgtgtaccccccatcggagctgtgctatcgtcacgtttatgaataagaccctaggcacctttagtatcgcagtcgcccaccatcttggccataaccttggaatgaaccatgatgaagacacctgccggtgctctcagcccaggtgcattatgcatgaaggcaaccccccaatcaccaagtttagcaattgcagctacggcgatttctgggagtacaccgttgagcgcactaaatgcctgctggaaaccgtccatacaaaagacatctttaatgtgaaacgctgcggaaatggagtagtcgaggaaggcgaggaatgtgactgtggacccctgaagcactgcgctaaggacccctgttgccttagcaactgtacccttaccgacggatccacttgtgcattcggcctgtgttgcaaagattgcaagttcctgccctctggtaaggtgtgtagaaaagaggtaaatgaatgcgatttacctgagtggtgcaacggcacgtcgcataaatgtcccgatgacttctacgtggaggacgggatcccatgtaaggaaaggggatactgttatgaaaagtcatgtcacgacagaaatgagcagtgtcgcaggatctttggagctggtgctaatactgcatctgagacctgctacaaggagttgaacaccctaggggatcgcgtcggtcactgtggcatcaagaacgcgacatacatcaagtgcaacatatctgacgtgcagtgcggtcggatccaatgcgagaacgtgactgaaataccaaacatgagtgatcacaccacagtgcattgggcaagatttaatgatattatgtgttggtctaccgactaccacttaggtatgaagggaccagacattggtgaggttaaggatggaacagagtgcgggatcgatcatatctgcattcaccggcactgcgttcacatcacaattctcaatagtaattgcagcccagcattctgcaacaagagggggatttgcaacaacaagcaccactgccattgtaactatctgtgggacccccccaactgcctgattaaaggttacggaggcagcgtcgactcagggccgccgcccaagaggaaaaagaaaaagaagttctgttacctgtgtatactactgctgatcgttctattcatactcctgtgttgtctctataggttgtgtaaaaagtcaaagcctatcaagaagcaacaggatgtccagaccccttccgcaaaggaggaggaaaagatccagcgcagaccgcacgagttgccgcctcagagccagccttgggtcatgcccagccagtctcaacccccggtgacaccttctcagtctcatcctcaagtgatgccatctcaaagccagcccccagtcacacccagtcagtcccagcctcgagtgatgccatcccagtctcaaccgccggtgatgcccagccagtcacatccacagctgactcccagtcagtctcagccaccggtgactcccagtcagcggcagccccagttgatgccatctcaatctcagccccccgtcacaccgagctag

SEQ ID NO: 97729 - DNA, 2463 bp, Artificial Sequence
  derived and/or modified sequence
atgaagatgctgctcttactccattgcctcggagtctttttgtcatgctctggacacatccaggatgagcatccccagtaccacagtccgccagatgtcgtgattccagtgcggatcaccggcacgactagagggatgacgcctccaggttggctgtcttatatacttccttttggagggcaaaaacatattatacacataaaggtaaagaagctgctgttctccaaacatctgcccgttttcacttatactgaccagggagccatattggaagatcagccgtttgttcagaacaattgttactatcatggctatgtggaaggcgaccccgaatctctggtttctttgtctacatgctttgggggattccaaggcatcctgcagattaacgattttgcatatgaaattaagcctctggcattctccactacattcgaacacttagtctataagatggactccgaggagaaacaatttagcacaatgaggtcaggcttcatgcaaaacgagatcacttgtagaatggaattcgaagaaatcgacaacagcacccaaaaacagagctcctacgtagggtggtggatccactttcgaattgtggaaatcgtggttgtgatcgacaattacctgtacattcgatacgaacgaaatgacagcaagctacttgaggacctctacgtcattgtcaacatagtggacagcatcctcgatgtcatcggcgtgaaagtcctgctgttcggccttgagatctggacgaacaagaacttgatcgtggtggatgacgtgcggaagagcgtgcatctgtattgtaagtggaagtcagaaaacatcacaccaagaatgcaacatgatacctcacacctgttcaccactctgggattgcgggggctgtcaggtatcggagccttcagaggaatgtgtacaccacacaggtcatgtgccattgtgacctttatgaataaaactttgggcacattctccattgcagtggcgcatcatctgggccacaacctgggcatgaaccacgatgaagatacgtgccggtgcagccagcccaggtgcatcatgcacgagggaaacccccctatcaccaagttttctaattgctcctacggcgatttttgggaatacaccgtggagaggaccaaatgcttgctggaaaccgtgcacaccaaagacatttttaacgttaaacgctgtggtaatggtgtcgtggaggagggcgaagaatgcgattgcgggcccttaaagcattgtgcaaaggacccctgctgcttatcaaactgtacactaaccgatgggagcacatgtgcgttcggtctttgttgcaaagactgcaagtttctcccttccggaaaagtctgtagaaaggaggtgaatgagtgtgatctgcctgaatggtgtaacggaactagccacaagtgtcccgatgatttctatgtggaagacggcattccatgcaaggagcggggctactgctatgaaaaatcatgccacgatagaaacgagcagtgtaggagaatattcggtgcaggggcaaacacagcatctgagacatgttacaaagaacttaacacgttgggcgaccgggtgggtcactgcggaatcaaaaacgctacttatattaaatgcaatatttcggacgttcaatgtggccggatccaatgtgaaaacgtgactgaaattccaaatatgagtgaccacaccacagtccactgggctcgctttaatgacattatgtgctggtcaacagattaccacctgggaatgaagggccccgatattggagaggtgaaggatgggactgagtgcggaatcgaccacatctgcatacaccgccactgcgtacacatcacaatccttaattctaactgctccccagcattttgcaataaacggggtatttgcaataacaaacaccattgtcactgcaactacctctgggatcctccgaactgcctcatcaaaggatacggcggctctgtggacagtggccccccccctaaacgaaagaagaaaaagaagttttgttacctgtgtatactgctcttgatcgtccttttcattctcttgtgttgcctctatagactctgtaagaaatccaagccaattaagaaacagcaggacgtgcagaccccgagcgctaaagaagaagagaaaatccagcgtcgtccgcatgagctgcccccccagtcacagccgtgggtcatgccctcacagtcccaaccacctgtgaccccctctcaaagtcatcctcaggtaatgccgagccagagccagccccccgtgactccatcccagtctcaaccgagggtaatgccatcccagagtcagccacccgtgatgcccagccagagtcacccgcaactaacccccagtcagtctcaacccccagtaacccccagtcaacgccaaccccagctaatgccttcacagtcacagcccccagtgactccttcctag

SEQ ID NO: 97730 - DNA, 135 bp, Artificial Sequence
  derived and/or modified sequence
atgaagatgttgttgttgctgcattgtctgggcgttttcctctcgtgctcgggacacattcaggacgagcatccccagtaccacagcccgcctgatgtggttatacccgtccgaatcaccgggacaaccagatag

SEQ ID NO: 97731 - DNA, 273 bp, Artificial Sequence
  derived and/or modified sequence
atgaaaatgcttctattgctgcactgccttggcgttttcttgtcttgttccggtcacattcaggatgaacatccacagtaccattccccacctgatgtggtcattcccgtgaggattaccggcacaactcgcggaatgaccccccctggatggctaagctacatcctgccgttcgggggccaaaaacacataattcacataaaggttaaaaaactattattcagcaaacacctgcccgtgtttacttataccgaccagggggcaatcctatag

SEQ ID NO: 97732 - DNA, 2463 bp, Artificial Sequence
  derived and/or modified sequence
atgaaaatgctgctgttgctccattgtttgggagtattcttgtcttgcagcgggcatatccaggacgaacacccgcagtaccactctccgcctgatgtcgtgattcctgtgcgaataacagggacaacccggggaatgacaccccccggttggctctcatatattctgccctttggaggacagaagcacatcatccacatcaaggtgaagaaactgctcttttctaaacacctgcctgtgtttacatacacagatcagggcgcaatactcgaggaccagccctttgtgcaaaataactgctattatcacgggtacgtggaaggggatcccgaaagcctggtttctctgagcacatgctttggaggcttccaagggattctgcaaatcaatgactttgcttatgaaatcaagcccctggctttcagcaccacattcgagcatctagtatacaaaatggattccgaagagaagcagttcagcaccatgcggtcaggttttatgcagaatgaaatcacatgtcggatggagttcgaagagatcgataattctacccagaagcagtcctcttatgtgggatggtggattcatttccggatagtagaaatagtcgtggttatagataattatttgtatataaggtacgaaaggaacgatagcaagcttctggaggatttgtacgtcattgttaatatcgttgattcgattctggatgtgatcggtgtgaaggttctccttttcggactggagatctggactaataaaaatctaattgtggtggacgacgtgaggaagagcgtgcatctgtactgtaaatggaaaagcgaaaatattacacccaggatgcagcatgatacaagtcacctttttacaacactgggtctgaggggcttgtcaggcatcggtgcttttaggggaatgtgtacaccacataggagctgcgctatagtaacttttatgaacaaaactctggggacattttccattgccgtggctcaccatcttggtcacaatctcgggatgaatcacgacgaggatacatgtcgatgtagtcagcctagatgtatcatgcatgaaggaaatccccctattacgaagtttagtaactgttcttatggggatttctgggaatacaccgttgagagaactaaatgcctccttgagacagtgcacactaaggacattttcaacgtgaagaggtgtggaaatggggtggtggaagaaggagaggagtgcgattgcggccctctgaagcattgcgcaaaagacccgtgttgcctgtcgaactgcaccctcacagacggtagcacttgcgcctttggcctttgttgtaaagattgcaaatttctcccctccggcaaggtctgtagaaaggaagttaacgaatgcgatctcccagaatggtgtaacggaacctcccacaagtgccctgacgatttttacgtcgaggatggaatcccctgcaaagagcgcggttactgttacgaaaaatcatgccacgaccgaaatgagcagtgccgccgcatcttcggtgcgggcgccaatactgccagtgagacctgctacaaagaactgaataccttgggggatagagtgggtcattgcggcatcaaaaatgccacctacataaaatgcaatatttctgacgttcagtgtggccgcatccagtgcgagaacgtcacggaaatcccgaacatgagtgaccacacaaccgtgcactgggcccgctttaatgacatcatgtgctggtccacagactatcacttgggtatgaaaggaccagacataggtgaagtgaaagacggcaccgaatgtggcatagaccacatatgcatccatcgccattgcgtgcacatcacaattcttaactcaaactgcagtcctgccttctgcaacaagaggggaatctgcaacaacaagcatcattgccactgcaactatctgtgggacccacctaattgtctgatcaagggctatggaggaagtgtagactccggacctccaccaaagcgcaagaagaaaaagaaattttgctatctgtgcattctgcttctcatagtcctgtttatccttctgtgctgcttgtacagactgtgtaaaaagtcaaagccgatcaagaaacagcaagatgtgcagaccccaagtgcaaaggaggaagaaaagatacaacgcagaccacatgaactccccccacagtcccagccatgggtcatgccttcccaatcccagccgccagtcacaccgagtcagagccatccacaggttatgcccagccagtcccagccaccagttaccccctcccagtctcaacctagagtgatgcctagccagtctcagccccccgttatgcccagtcagagtcatcctcaacttacaccttcgcagagtcaaccccccgtcactcccagtcagaggcaaccgcagttgatgccgagtcagtcacaaccaccagtcacccccagttag

SEQ ID NO: 97733 - DNA, 2463 bp, Artificial Sequence
  derived and/or modified sequence
atgaagatgctgctgctgctgcactgcctgggcgtcttcctgagctgcagcggccacatccaggatgagcacccccagtaccacagccccccagatgtggtgattcctgtgcgcatcaccggcaccacccggggcatgaccccacctggctggctgagctacatcctgccctttggaggccagaagcacatcatccacatcaaggtgaagaagctgctcttcagcaagcacctgcctgtgttcacctacacagaccagggcgccatcctggaggaccagccctttgtgcagaacaactgctactaccacggctacgtggagggggaccctgagagcctggtgtccctgagcacctgcttcggcggcttccagggcatcctgcagatcaatgactttgcctatgagatcaagcccctggccttcagcaccacctttgagcacctggtgtacaagatggacagcgaggagaagcagttcagcaccatgaggagcggcttcatgcagaatgagatcacctgcaggatggagtttgaggagattgacaacagcacccagaagcagagcagctatgtgggctggtggatccacttcagaattgtggagatcgtggtggtgattgacaactacctgtacatccgctatgaaagaaatgacagcaagctgctggaggacctgtatgtgattgtgaacatcgtggacagcatcctggatgtgattggagtgaaggtgctgctgtttggcctggagatctggaccaacaagaacctgattgtggtggatgatgtgaggaagtctgtgcacctgtactgcaagtggaagtctgagaacatcacccccaggatgcagcacgacaccagccacctgttcaccaccctgggcctgcggggcctgagcggcatcggggccttccggggcatgtgcaccccccacaggagctgtgccatcgtgaccttcatgaacaagaccctgggcaccttcagcattgctgtggcccaccacctgggccacaacctgggcatgaaccatgatgaggacacctgccgctgcagccagccccgctgcatcatgcatgagggcaacccccccatcaccaagttcagcaactgcagctatggagacttctgggagtacacagtggagaggaccaagtgcctgctggagaccgtgcacaccaaggacatcttcaacgtgaagagatgtggaaatggagtggtggaggagggggaggagtgtgactgtggccccctgaagcactgtgccaaggacccctgctgcctgagcaactgcaccctgacagatggcagcacctgtgccttcggcctgtgctgcaaggactgcaagttcctgcccagcggcaaggtgtgcaggaaggaggtgaatgaatgtgacctgcctgagtggtgcaatggcaccagccacaagtgcccagatgacttctacgtggaggatggcatcccctgcaaggagcggggctactgctatgagaagagctgccacgacagaaatgagcagtgccgccgcatctttggagctggggccaacacagccagcgagacctgctacaaggagctgaacaccctgggggacagagtgggccactgcggcatcaagaatgccacctacatcaagtgcaacatcagtgatgtgcagtgtggccgcatccagtgtgaaaatgtgacagagatccccaacatgtctgaccacaccaccgtgcactgggcccgcttcaatgacatcatgtgctggagcacagactaccacctgggcatgaagggccctgacattggagaggtgaaggatggaacagaatgtggcatcgaccacatctgcatccaccgccactgtgtgcacatcaccatcctgaacagcaactgcagccctgccttctgcaacaagaggggcatctgcaacaacaagcaccactgccactgcaactacctgtgggacccccccaactgcctgatcaagggctacggcggctctgtggacagcggccccccacccaagaggaagaagaagaagaagttctgctacctgtgcatcctgctgctgattgtgctcttcatcctgctgtgctgcctgtaccgcctgtgcaagaagagcaagcccatcaagaagcagcaggatgtgcagacccccagcgccaaggaggaggagaagatccagaggcggccccatgagctgcccccccagagccagccctgggtgatgcccagccagagccagccccctgtgacccccagccagagccacccccaggtgatgcccagccagagccagccccctgtgacccccagccagagccagccccgggtgatgcccagccagagccagccccctgtgatgcccagccagagccacccccagctgacccccagccagagccagccccctgtgacccccagccagaggcagccccagctgatgcccagccagagccagccccctgtgacccccagctag

SEQ ID NO: 97734 - DNA, 135 bp, Artificial Sequence
  derived and/or modified sequence
atgaagatgctgctgctgctgcactgcctgggcgtcttcctgagctgcagcggccacatccaggatgagcacccccagtaccacagccccccagatgtggtgattcctgtgcgcatcaccggcaccaccaggtag

SEQ ID NO: 97735 - DNA, 273 bp, Artificial Sequence
  derived and/or modified sequence
atgaagatgctgctgctgctgcactgcctgggcgtcttcctgagctgcagcggccacatccaggatgagcacccccagtaccacagccccccagatgtggtgattcctgtgcgcatcaccggcaccacccggggcatgaccccacctggctggctgagctacatcctgccctttggaggccagaagcacatcatccacatcaaggtgaagaagctgctcttcagcaagcacctgcctgtgttcacctacacagaccagggcgccatcctgtag

SEQ ID NO: 97736 - DNA, 2463 bp, Artificial Sequence
  derived and/or modified sequence
atgaagatgctgctgctgctgcactgcctgggcgtgttcctgagctgcagtggccacatccaggatgaacacccccagtatcacagtccaccagatgtggtcatcccagtgagaataactggcactactcgtggcatgacgccaccaggctggttatcttatatcctgccttttggtggtcagaagcacatcatccatataaaggtgaaaaagcttctcttcagtaagcatcttcccgtttttacctacacagatcaaggagctatccttgaggatcaaccattcgttcagaacaattgttactaccacggctacgtcgagggagaccctgaatctctggtgagtttgagcacgtgtttcgggggattccaaggcattttacagataaacgatttcgcctacgagatcaaaccgcttgctttctctacaacattcgagcacttagtgtataaaatggatagcgaggagaaacagttttcaacaatgagaagtgggtttatgcagaatgagataacctgccgcatggaatttgaggaaattgacaattcaacccagaagcagtccagctacgtgggctggtggattcacttccgaatcgtcgaaattgtagtagtgatagacaactacttatatataaggtatgaaaggaatgattctaagcttttggaagacctgtacgtgatcgtgaacattgttgattcaatactcgatgttatcggtgtgaaggtccttctcttcggacttgagatctggaccaataaaaatcttattgtcgtggacgatgttcgcaaatccgtgcacttatactgtaagtggaagtctgaaaatattactccgcgaatgcagcatgacaccagccacttgtttaccacactcggactccgtggactgagcggaattggggctttcagggggatgtgcaccccacatcggtcttgcgccatcgtgacatttatgaacaagaccttaggaacctttagcatcgcagtggcacaccacctgggtcacaatcttggaatgaaccatgatgaggatacttgccggtgctcacagccgcgttgtattatgcatgaaggtaatcctcctatcactaagttttctaactgctcatacggggacttctgggagtacaccgtggagcggaccaaatgtctgctagagactgtgcacaccaaagacattttcaatgtgaaaaggtgcggtaatggagtggtcgaggagggagaagagtgcgactgcggccctcttaagcattgtgccaaagacccatgttgtctctctaattgcactctcaccgacggctctacctgtgcattcggtctttgctgcaaggattgcaaatttctacctagcggcaaagtgtgccgaaaagaggttaatgagtgtgacctgccagagtggtgtaatgggacttcccacaaatgtcccgacgatttttatgttgaggatggtattccttgcaaagaaagaggctattgttacgaaaagtcttgccatgacagaaacgaacagtgtcgaagaattttcggagccggtgccaatactgcgtccgagacgtgctacaaagaattgaataccctgggcgatagggttggccattgcggcatcaagaacgccacatatatcaagtgtaacatcagtgacgtgcagtgcggtcgcatccagtgtgaaaatgtgacagagatccccaacatgagcgaccacacgacagtccattgggcccgattcaatgacatcatgtgttggtcgaccgactaccatctgggcatgaaggggcctgacattggcgaggttaaggatgggactgaatgcggcattgaccatatctgtatccaccgacactgtgtccacataaccatcctgaatagtaattgctcccctgctttttgtaacaaacgggggatctgtaataataaacaccactgccactgcaactacctgtgggacccacctaactgtctgatcaaggggtacggtggtagtgtggattcaggaccgcctcctaaaaggaagaagaaaaaaaagttttgctatctgtgcattctgcttctgatcgtcctcttcatattgctgtgctgtctctaccgtctctgtaagaagtccaaacccatcaagaagcagcaggatgtgcagactccctccgccaaagaggaggagaagattcagcggcggccacacgaattgccaccccagtcacagccctgggtcatgccatcccagtcacaacctcctgtcactccatctcagagccatccgcaggtcatgcccagccagagccagccccctgttacaccctctcagtctcagcccagagtgatgcccagccagtctcaaccaccagtgatgccttctcagagccacccacagctaacaccatcacagtctcagccccctgtgacaccgagccagcggcaaccccaacttatgccatcgcagtctcagccaccagtaaccccttcttag

SEQ ID NO: 97737 - DNA, 2463 bp, Artificial Sequence
  derived and/or modified sequence
atgaagatgctgctgctgctgcactgcctgggcgtgttcctgagctgctctggccatattcaggatgagcatccacagtaccactcaccgcccgacgtcgtcattcccgtacggattaccggcacgaccagaggtatgacacctccagggtggctgtcatatatactgccttttggggggcagaagcacatcattcatatcaaagttaaaaagctcctatttagtaaacacctgcccgtgttcacatacaccgatcagggtgcgattttagaggatcaaccattcgtgcagaataactgttactatcatgggtacgtagagggggatcccgagagcctcgtttcattgagcacgtgttttggaggcttccaggggatccttcaaattaatgacttcgcctacgaaattaaacctctggccttctcaacaacatttgaacatctcgtctataaaatggatagtgaggagaagcagttctctacgatgagatctggctttatgcagaacgagataacctgcaggatggaatttgaagaaatcgataattctacccagaaacagtcatcctacgtaggatggtggatacacttccgcatcgtggagatcgtggtggttattgataactacttgtacatacggtacgaacggaatgactcaaaacttcttgaagacctgtacgttatcgttaatatcgtcgatagtatccttgacgtcataggggtgaaggtgctcctgttcggtctcgagatctggactaataaaaatctcatcgttgtggatgacgtgaggaagtcggtgcacctgtactgtaaatggaagagcgaaaacatcacccccaggatgcaacatgacacctctcacttgtttactacccttggtctcagagggttgtccggaatcggagcctttcgtggcatgtgcactcctcaccggtcttgcgcgattgttacgttcatgaataaaacccttggtacattttctatcgctgtggcgcatcatttaggacataatctggggatgaaccacgacgaagacacctgcaggtgcagccagccgcgctgtatcatgcatgaagggaacccgccgataactaagttctccaattgctcctacggcgatttttgggagtatacagtcgagcgcactaagtgcttgcttgagacggttcatacgaaggatattttcaacgtgaagcgatgcggaaacggagttgtcgaggagggagaagaatgcgattgtggaccattgaaacactgtgctaaggatccctgctgcctctccaactgcactctcactgacgggagcacctgcgctttcggtctgtgttgcaaagactgtaagtttctcccctctggtaaagtgtgcagaaaagaggtgaacgagtgcgacctgccagaatggtgcaacggtacctcccacaagtgtccagatgatttttacgtggaggacgggataccctgtaaagagcgcgggtattgctatgaaaagtcatgtcacgacagaaacgagcaatgcaggcgaatcttcggcgcaggtgccaacaccgcaagcgaaacctgctataaagaactaaacacattgggggaccgggtggggcactgcggaattaaaaatgccacatatataaaatgtaacatatctgatgttcagtgtggacggatccagtgcgaaaatgtcaccgagatacctaatatgagcgatcatactactgtgcattgggcaagattcaacgacattatgtgctggagtacggattaccatcttggtatgaaggggccagacattggggaggtaaaagatggaactgaatgcggaatagatcatatctgcatccatcgccactgtgtgcatattactattcttaactcaaattgcagtcccgctttttgcaacaagagggggatttgcaataacaagcatcactgtcactgcaattatctgtgggaccccccgaactgtttaatcaagggatacgggggatctgtggacagtggaccacctcccaaacggaagaagaaaaaaaagttctgttatctgtgtattcttttgctcatcgtgctatttatccttttgtgttgtctgtatcgtctatgtaagaaatccaaacccattaagaaacagcaagatgtccaaacaccatccgccaaggaggaggagaaaatccagcgtcgcccacacgagctgcccccccagagccagccctgggtcatgccttcacagagccagccccctgtcacacctagccagagccatccacaggtgatgcctagccagtcccagcctcccgtgactccatcacaaagtcaacctcgcgtaatgccctcccaaagtcaacccccggtgatgcctagccagagtcatcctcagttgactccatcacagagccagccacccgtcacgccctctcaaaggcaacctcagctcatgcctagccagtcacagccacctgttactccctcctag

SEQ ID NO: 97738 - DNA, 2463 bp, Artificial Sequence
  derived and/or modified sequence
atgaagatgctgctgctgctgcactgcctgggcgtgttcctgagctgctcgggccacatccaagacgaacacccacagtaccattctccacctgacgttgtgattccagtgcggattacaggaacaacccggggcatgacccccccaggctggctgtcatatattctcccctttggtgggcaaaaacatatcattcacatcaaagtcaaaaaattgctcttcagtaagcacctgcccgtgttcacgtatactgaccaaggggccattctcgaggatcagccctttgtgcagaacaactgctactaccatggctatgtggaaggagacccagagagtctcgtttccctatccacctgctttggcggattccagggcattcttcagatcaatgattttgcatatgaaatcaagcctttagcattttctactactttcgagcacttagtgtataaaatggactctgaggagaaacaattctctacaatgcgtagcggctttatgcaaaatgaaatcacttgtaggatggagtttgaggagatagataacagcacacagaagcagagcagttatgttggatggtggatccattttagaatagtcgagatcgttgtggtcattgataactacctctacattagatacgagcgtaatgacagtaagcttctggaagacctgtacgtgatcgtgaacatcgtggactcaattctcgatgtgatcggggtcaaggtgcttctgttcgggctggaaatctggacaaacaagaatctgatagtcgtggacgacgtgcggaagagtgtacacctatattgcaaatggaagagcgagaacattacacctcgcatgcaacacgatacgagccacctgttcaccacgctgggtttaagaggattgagcggcatcggcgcattccgaggcatgtgtacaccccatagatcttgtgctatcgtgacgttcatgaataagacactcggaaccttttcaattgccgtggcacatcacctcggtcataatttaggtatgaatcacgatgaggatacatgtcgctgttcccagccccggtgcatcatgcacgagggcaacccccccattactaagttttccaactgttcctacggtgacttttgggagtatacagtggagaggacgaaatgtctcctcgagacggtccacaccaaagatatattcaatgtaaaaaggtgcgggaatggggtggtggaggaaggcgaagagtgtgactgtggcccactgaagcattgtgccaaggatccctgctgcttatccaactgcacgctaactgacggtagcacctgcgcattcggcttgtgttgcaaagactgcaagttcctaccaagtggcaaagtgtgtcgcaaggaggttaacgagtgcgacctgccagagtggtgtaatgggacctcccacaaatgtcctgatgacttttatgtggaggacgggattccctgcaaagagcgggggtactgctacgagaagagctgtcacgaccggaacgagcagtgtcggagaatattcggtgctggcgctaataccgctagtgagacctgctacaaggagctaaatacattgggggacagagtaggccattgtggtattaagaatgcgacttatatcaaatgtaatatcagcgatgtccaatgcggacgaattcagtgcgagaacgtcactgagattccgaacatgagcgaccatacaaccgtccactgggcgagattcaacgacatcatgtgttggtctactgattaccatctaggaatgaagggtccagacatcggcgaagttaaagacgggaccgaatgtgggatcgatcacatctgtatccacaggcactgtgtccatataactatcctcaacagtaactgcagccctgcattctgcaacaagcgtggaatatgtaacaataagcaccactgccactgtaactacctttgggatcctcctaactgcctcattaaagggtacgggggatcagttgattcaggtccacctccaaagcgtaaaaagaaaaaaaaattttgttacctctgcatcctcctgctgattgtattattcattctcctgtgttgtctttatcgactgtgcaaaaaaagtaaaccgattaagaagcagcaggatgtacagacaccgtccgccaaggaggaagaaaagattcaaaggcggccccatgagctacccccacagtcccagccctgggtgatgccaagccagtcccagccgcctgtgacccccagccaatctcatccacaggtgatgccctctcagagccagccacccgttacaccttctcagagccagcctagagttatgcccagtcagtcacaaccccccgtcatgccatctcagtcccatccccagttgacaccctcccagagtcagccaccagtaacccctagccagcggcagcctcaactgatgccatcccaaagtcagcctccagtaaccccctcatag

SEQ ID NO: 97739 - DNA, 135 bp, Artificial Sequence
  derived and/or modified sequence
atgaagatgctgctgctgctgcactgcctgggcgtgttcctgagctgttccggacatatccaggatgaacatccgcaatatcactctccccccgatgtggtgatcccagtaagaatcacagggaccacaaggtag

SEQ ID NO: 97740 - DNA, 273 bp, Artificial Sequence
  derived and/or modified sequence
atgaagatgctgctgctgctgcactgcctgggcgtgttcctgagctgttcgggccacatccaggacgagcacccgcagtaccactctccacctgacgtcgtcatacctgtcagaatcaccggtaccacgcgaggtatgacacccccaggatggttgtcatatattttacccttcggtggccagaagcatatcatacacataaaggtgaaaaaattgttgtttagcaagcacctgcccgtttttacctacacagatcagggtgcgattctttag

SEQ ID NO: 97741 - DNA, 2463 bp, Artificial Sequence
  derived and/or modified sequence
atgaagatgctgctgctgctgcactgcctgggcgtgttcctgagctgctccggacacatccaggatgaacacccacagtatcacagccctcccgatgtagtcattccagtgaggattacaggtacgacgaggggcatgaccccacctgggtggcttagctacattctgcccttcggggggcagaagcatattatacacattaaagtgaagaaattactgttctctaaacatttgccagtgtttacctacaccgaccagggagccatccttgaggaccagccgttcgttcagaataactgttattatcatggctacgtggaaggggaccctgagagtttggtttcattatccacctgcttcggagggttccagggaattctgcaaataaacgattttgcttatgaaatcaaaccactcgctttctctaccaccttcgagcatctggtgtacaagatggactcggaagagaagcagttctctaccatgagatccggttttatgcaaaatgaaataacgtgcaggatggaatttgaagaaattgataacagtacccagaagcagagctcctatgtcggttggtggatccatttccgcatcgtggagatcgtcgtcgtgatcgacaactatctctacattaggtacgaacgcaacgattccaaactgctcgaagatctgtatgttatagtcaatatagttgattcaatcctggatgtgataggcgtcaaggtgctcctgtttggactggagatttggacgaataaaaacttaattgtcgtcgatgatgtccgcaagtcggttcacctgtattgtaagtggaagtcggagaacatcacacccaggatgcagcacgacacatcgcacctgtttacgacactgggcctgcggggtctgagcggtatcggcgccttccgggggatgtgcacccctcataggtcttgtgctatcgtgaccttcatgaataaaacactggggacattttccattgccgtggctcatcaccttgggcataacctggggatgaaccacgacgaagatacctgccgctgcagtcagcccagatgtatcatgcatgaagggaacccgcctattaccaagttctccaactgcagctacggggatttctgggagtatactgtggagagaacaaagtgcctgttggaaaccgtgcacaccaaagacatctttaacgtgaagcgatgcggaaacggagttgtcgaagaaggggaggagtgtgattgtggcccactgaagcactgtgccaaggatccctgttgtctttccaactgtacactcaccgatggctcgacttgtgcgttcggtctgtgctgcaaagattgtaaatttctgccttccgggaaggtatgccgaaaggaggttaatgagtgtgacctgcccgaatggtgcaacgggacatcccataagtgtcccgacgacttctatgtggaagacggcatcccctgcaaggagcggggttactgctatgagaagtcgtgtcacgaccgtaacgagcagtgtagaagaattttcggagccggagcaaatacagccagcgaaacctgctacaaagagctgaatactctcggcgatcgggttggtcactgtggcatcaagaatgccacatatattaagtgtaacatatctgatgtccagtgcggccgaatccagtgcgagaatgtgaccgagattcccaatatgtcagatcataccaccgttcactgggctcgatttaacgacatcatgtgctggtcaaccgactatcatcttgggatgaaggggcccgacattggcgaagtgaaagatggaacagagtgcgggatcgatcacatttgcatacaccgccactgcgtgcacattacaattctgaacagtaattgtagccctgccttttgcaacaagcggggaatttgcaataacaaacaccattgccactgcaattatctgtgggatcccccaaattgcctcattaagggatacggcgggtctgtcgattctggcccccctccaaaacgaaagaaaaaaaagaaattttgctatttgtgtatcctactgttgatagttctctttattctgctgtgctgcctatacaggttgtgcaaaaaaagtaagcctattaagaagcagcaggatgtccagacaccttcagccaaagaggaggagaaaatccaacggagaccccacgaattgccacctcagtcacaaccttgggtgatgccttctcagtcccagccaccagtcaccccatcgcaaagccatcctcaggtgatgccctcccaaagtcagccccccgtgacacctagccagtcacaacctcgggtcatgccaagtcagtcacaacccccggtcatgccgtcccagtcccacccgcagcttaccccatctcaaagtcagccacccgtgaccccatctcagcggcagcctcagttgatgccaagccagtctcagcctcccgtgactccctcttag

SEQ ID NO: 97742 - DNA, 2463 bp, Artificial Sequence
  derived and/or modified sequence
atgaaaatgctgctacttctccactgtctgggagtatttctcagctgttcgggccacatccaagacgaacacccgcagtaccactctccccctgatgtggtgattcctgtgaggatcacgggaaccacgcggggaatgacaccgccaggttggctctcatatatccttcccttcggcggtcaaaagcatattatccacatcaaagtgaaaaaactgctgttttcaaaacacctacctgtgttcacatatacagaccaaggagcgatcctggaggatcagccttttgtccagaataattgctattatcatggctacgtcgaaggagatcctgagagcctggtgagcctgagtacatgtttcggcggatttcaggggattctacagatcaacgacttcgcttatgaaatcaagccactcgcgttcagtaccacctttgaacaccttgtctacaagatggactctgaggagaagcagttctccacgatgaggtcggggttcatgcagaatgaaattacgtgcagaatggaattcgaagaaattgataacagcacacagaagcagagtagctacgttggatggtggatccactttcgtattgtggagatcgtggtggtcattgataattatctgtatatcagatatgagcgcaacgacagtaaattactggaagacctgtatgtcattgtgaatattgtggactccatccttgacgtgataggcgttaaggtgctgctgtttgggctggaaatctggactaacaagaaccttatcgtggtggatgacgttcggaagtctgttcacctgtattgcaagtggaagtccgagaacatcaccccgcgaatgcaacatgatacttctcatttgtttactaccctgggtttacgaggcctgtcaggtataggtgctttcaggggcatgtgtactcctcacaggtcctgcgccatcgtcaccttcatgaacaaaacactcggcactttttctatcgcagttgctcatcacctaggccataacctgggaatgaatcacgacgaagatacttgcagatgttcccagcctaggtgcatcatgcatgaaggtaacccacccataaccaagttcagtaactgtagctatggcgacttctgggagtatactgtagaaagaactaagtgcttattagaaaccgtgcacaccaaggacatttttaacgttaaacgctgtggcaacggagttgtcgaagagggagaagagtgtgactgcggacctctaaaacattgtgccaaagatccctgctgtttatccaactgcacgctgaccgacggctcaacctgcgcctttgggttgtgctgtaaggattgcaagttcctgccttctggaaaggtgtgcagaaaagaggtcaacgaatgcgacttgcccgagtggtgcaacggcacgtctcataagtgtccggatgatttttatgtggaggacgggattccttgtaaggagagaggatattgctatgagaagtcttgccatgacaggaatgaacagtgcagaaggattttcggggctggtgctaataccgcctccgagacatgctataaggagctgaataccctaggcgaccgagtaggccactgtggtataaaaaatgctacttatatcaagtgcaatattagtgatgtccagtgcgggaggattcagtgcgagaatgtcacagaaatccccaacatgtcagaccacaccactgtgcattgggcgcgttttaacgacatcatgtgctggagtacagattaccatctcggcatgaaaggtccagatatcggcgaggtgaaagacggcacagaatgtgggattgaccacatctgcattcaccggcattgtgtccatatcaccatcctaaacagcaattgtagccctgctttctgtaacaagcgcggtatctgtaataataaacaccactgccactgtaactacctgtgggaccctcccaattgcctgattaagggctacggtggcagcgtggattctggaccaccacccaagcgaaagaagaaaaaaaagttctgctacctgtgcattctgctcctgatcgtcttgttcattttactgtgctgtttgtataggctgtgtaagaaatctaagccaatcaaaaagcagcaggacgtgcaaactccaagtgccaaggaggaagagaagatccagcgcaggccccatgaattacccccacagagccaaccatgggttatgcctagccagagccagccgccagtaacgcctagccagagtcatccacaagttatgccttctcagtctcaacctcctgtgaccccatcccagagccaaccacgtgtgatgcccagccagtcccagccacccgtcatgccctcccaatctcacccccagctgactccgtcccagagtcagccacctgtgacaccgtcacaacggcagcctcagctgatgccgtcccagagccagccacctgtcaccccctcttag

SEQ ID NO: 97743 - DNA, 2463 bp, Artificial Sequence
  derived and/or modified sequence
atgaaaatgttactccttctgcactgtctgggagttttccttagctgttccggtcatatacaggatgagcatccgcagtatcacagtccacccgatgtcgtcattcctgtccgtatcaccgggaccacccgaggtatgaccccccctggatggttaagttatattctgcctttcggcggacagaagcacattatccatattaaagttaagaaactcctgttcagtaaacatttgccagtctttacttacaccgatcagggcgcaattctggaagaccagcctttcgtccagaataactgttactaccatggctatgtggagggcgacccagagtctctggtctcgctgtccacatgtttcggtggcttccagggtatcctccagattaacgacttcgcttacgagattaaaccactggctttcagcacgacctttgagcacctggtttacaagatggatagcgaagaaaaacagttttctactatgaggtcaggcttcatgcagaatgaaatcacttgccggatggaattcgaggaaatcgacaacagtacccagaagcagtctagctatgtgggatggtggatccacttccgaatcgtggaaattgtggttgtgatagacaattatctgtacattagatacgagcgaaatgactctaagctgctcgaagacctctacgtgatagtgaatatcgttgatagtatactggatgtgatcggcgttaaagtgcttctgttcgggttggagatctggactaacaaaaacctgatcgttgtcgacgatgttcggaaatctgtccacctgtattgcaaatggaaatccgaaaatataacgcccagaatgcaacacgatacttctcacctgttcacaaccctaggactaaggggtctttcaggtattggggcattccgcggaatgtgtactccgcaccggtcctgtgctatcgttacttttatgaacaaaactttgggcactttctcgatcgccgtcgcacatcatttgggccataacctcggaatgaaccacgatgaggacacgtgtaggtgtagtcaaccacggtgtatcatgcacgaaggcaacccaccgattacaaagttctcaaactgctcttatggggatttctgggaatatactgtggaaaggactaaatgcttactggaaacggtgcatacaaaagacatctttaatgtgaagcgctgcggaaatggagtcgtggaggaaggcgaagaatgtgattgtgggccattgaaacactgcgctaaagatccatgctgcctgagcaactgtacgttgaccgacggctctacttgcgcctttggactgtgttgcaaagattgtaaatttctcccatccgggaaagtgtgccgaaaggaagtgaatgaatgcgacttgccagagtggtgcaacgggaccagccataagtgtcccgacgacttctacgtggaggatggtattccttgtaaggaacgcggttactgctatgagaagagctgccacgaccgaaacgaacaatgtaggcgaatttttggagcaggggctaacaccgccagtgaaacctgctataaggagctgaacacactgggggatagagtgggccactgcggcattaagaacgctacctatatcaagtgcaatatatccgacgttcagtgcggcaggattcagtgtgaaaatgtcaccgagatccctaatatgtcagatcataccactgttcattgggccagattcaacgacattatgtgctggtcaaccgattatcatctcgggatgaagggccctgatatcggggaggtgaaggacggcacagagtgcgggattgaccatatctgcatacacaggcactgcgttcacatcacaatactgaactccaattgctctcctgccttttgtaacaagcgcggtatatgtaacaataaacatcattgtcactgtaattatctgtgggatcctcccaattgtctgatcaagggctacggaggttctgtggattctggacccccacctaagaggaagaagaaaaaaaaattctgttacttgtgcatactactgctgattgttcttttcattcttctgtgttgtctttaccgattatgcaaaaaaagtaagcccatcaaaaagcagcaggacgtgcaaacaccgagtgccaaagaggaggagaagatccaacgccgtccgcatgagctccctccacagtcacagccttgggttatgccgtcacagtctcagcccccagtgacgccgtctcagagtcatcctcaagtgatgccaagtcaatcccaaccgcctgttacacctagtcagagccaaccacgcgtcatgcctagccagagtcagccaccagttatgccctcccagagtcaccctcagttaaccccctctcagagccagccccctgtgacaccttcccagagacagcctcagctcatgcccagccagtcccaaccaccagtcacaccttcttag

SEQ ID NO: 97744 - DNA, 2463 bp, Artificial Sequence
  derived and/or modified sequence
atgaaaatgttgttgctgttgcactgcctaggagtgttcctctcctgctcaggtcatatccaggatgagcatccgcagtaccactcgcccccagatgttgtgatcccagtgcgtatcacaggcacaacacgtggcatgactcccccaggctggcttagttatattctcccattcgggggacagaagcatattatccatatcaaagtcaagaagttgctgttttccaaacatctccctgtgttcacatacaccgatcagggggcaatcctggaggatcagcctttcgttcaaaacaactgctactatcatggctacgtcgagggagaccccgagagcctggtatctctgtccacttgtttcggaggttttcagggaattctccaaattaatgacttcgcatatgaaataaaaccattagcattcagtaccacattcgaacacctggtgtacaagatggacagcgaggagaagcagtttagcaccatgagatccgggtttatgcagaatgagattacttgtcgaatggaattcgaggagatcgataattccacgcagaaacagtcatcttacgtgggctggtggatacactttaggatcgtggaaatcgtggtcgtaatcgacaattatctttacataaggtatgaacgaaacgattccaagcttcttgaggacttgtatgtcattgtgaacatcgtggattcgatacttgatgttatcggtgttaaggtccttctatttggactcgaaatttggacaaacaagaacctaatcgtggttgatgacgtgcggaagtctgtccacttgtactgtaagtggaagtctgaaaatattacccctagaatgcagcatgatacatcgcaccttttcaccactctgggcctccgaggcctgtcagggatcggagctttcaggggaatgtgcacaccccatcgatcctgtgctatcgtcaccttcatgaataaaacgctcggaacgttttccatcgcagtggcacatcatctgggccataacctcggcatgaaccatgatgaggatacctgtcggtgtagtcagcctcggtgcattatgcacgaaggcaaccccccaattacgaagttcagtaattgctcttacggtgatttctgggaatacacagtagaaaggactaagtgtctgctggagaccgtgcataccaaagatatttttaatgtaaagagatgcgggaacggagtcgttgaggagggagaggagtgcgactgtggacccctcaagcactgtgcaaaagatccgtgctgtctttcaaactgcactcttactgatggatctacctgcgctttcgggctgtgttgtaaagattgcaagtttctccccagcgggaaggtttgtaggaaagaggtgaatgaatgtgacctccccgaatggtgcaacggaacctcacacaagtgtcccgatgacttttatgtggaagacgggatcccctgtaaagagcgcggatattgctacgaaaaatcctgccatgatcggaatgaacagtgcaggcgcatttttggcgcaggtgctaatacagcctccgaaacttgttataaggaactgaatacgctgggcgaccgagtgggacattgtggaatcaaaaacgctacatatatcaagtgcaacatcagtgacgtccaatgcggaagaattcagtgcgagaatgttaccgagattccgaatatgagcgatcacacaacggtgcattgggcaaggtttaatgacattatgtgttggagcaccgactaccacctcggcatgaagggaccagatatcggggaggtgaaggacggaaccgagtgtggtatcgatcacatttgtattcacaggcactgtgtgcacataacgattctgaacagtaattgcagtcccgctttctgcaataagaggggcatctgcaacaataagcaccactgccattgcaattacctctgggatccccctaattgtctcatcaaagggtatggtgggtccgtcgactctggacctccccctaagcgaaagaaaaaaaaaaagttttgctacctctgtattcttctgctgatagtgcttttcatcctactctgttgtctgtaccggttgtgcaagaagagcaaacccatcaagaagcaacaagatgtacagacacctagcgccaaagaggaagagaaaattcaacgcagaccacacgagttgccaccccaaagtcagccctgggttatgccctcccaaagtcagcctcccgttacacccagccagtcgcatccccaggtgatgccatctcagtctcagccacccgtcaccccttcccaaagccagccccgtgtcatgccttcacagtctcaacccccagtgatgccatcccaatcacatccacagctcactccttcccagtcacagcctccagtgacaccgtcccagcgccagccacagctgatgccttcccagagccagccacctgtcactccaagttag

SEQ ID NO: 97745 - DNA, 135 bp, Artificial Sequence
  derived and/or modified sequence
atgaagatgttgctcttacttcactgtttgggagtcttcctgagctgcagtgggcatatccaggacgaacacccacaataccatagcccacctgacgtggtgatccctgtgcgcatcacagggacaacccgttag

SEQ ID NO: 97746 - DNA, 273 bp, Artificial Sequence
  derived and/or modified sequence
atgaagatgcttctccttttacattgtcttggggtcttcctgagctgcagcgggcacattcaggacgagcacccccagtatcattccccccctgacgtggtaatccccgtgaggatcacggggaccactagaggaatgactcctcctggttggctgagttatatcctccctttcggtggccaaaaacatattattcacattaaggtgaagaagctgttattctcgaaacatttgcctgtcttcacatataccgaccagggcgctatactatag

SEQ ID NO: 97747 - DNA, 2463 bp, Artificial Sequence
  derived and/or modified sequence
atgaaaatgctcctccttctccattgcttgggtgtgtttctatcatgctcgggccacattcaggacgagcacccacagtaccactcgcctcccgacgtcgtgatccccgtacggattacagggaccacccgcggaatgacgcctcctggatggctcagctacatattgccatttggaggtcagaagcacattatccatataaaagtgaagaagctattattcagcaaacacctgcccgtgtttacctacacggaccagggggcaattctcgaagaccagcccttcgtccagaacaattgctattaccacggatatgttgaaggagacccagagtctcttgtctctttatctacttgtttcggcggatttcagggaattctgcaaatcaatgacttcgcgtacgaaatcaaacctttggctttcagtacgacctttgagcatctcgtctacaaaatggactcagaggagaaacagtttagtacaatgcggagcggctttatgcaaaacgaaatcacgtgtcggatggaattcgaagagatcgacaatagcacccagaagcagagttcttacgtgggatggtggatccacttcagaatagttgaaatcgtggtggtcattgacaactacctgtacattcgatacgagcgcaatgattccaaactgttagaggacctgtatgtaatcgtcaacattgtggactccatccttgatgtgattggtgtaaaggtcttactgttcggccttgaaatatggactaataaaaacttgatcgtggtagacgacgtacggaagagcgtgcacttgtactgtaagtggaaatccgagaacatcactcctcgaatgcagcacgatactagtcatttgttcactactctcgggctccgaggccttagcgggatcggcgctttcaggggcatgtgcacgccacacaggagttgtgcaatagtgacgtttatgaacaagactctgggcaccttctccatagccgttgcccatcacttagggcacaacctcggaatgaaccacgacgaggatacctgtagatgctctcaacctaggtgcatcatgcatgaaggaaatccccctatcactaagttttcgaactgctcctacggggacttctgggaatacaccgtggaacgcacaaagtgcctgttggaaacagtccacacaaaagacatttttaatgtgaagagatgtggaaacggggtggtggaggagggcgaggagtgtgactgcggcccactgaaacattgcgcaaaagatccgtgctgcctgagcaactgtaccctgaccgacggaagtacttgcgcttttggcttgtgctgtaaggactgcaagttcctaccatcaggtaaggtgtgccgcaaggaggtgaatgagtgtgatctgcccgaatggtgtaacgggacatctcacaagtgccccgatgacttctacgtagaagacgggatcccctgcaaggagagaggctactgttacgagaagtcgtgccatgataggaatgagcaatgcagaagaatcttcggcgcaggcgctaacaccgcttcagaaacatgttacaaggagctcaatacgttgggagatcgcgtcgggcactgtggtatcaagaatgcgacttacattaagtgcaatatctctgacgtacagtgtggacgcattcaatgcgagaacgttacagaaatcccgaatatgagcgaccataccactgtccactgggccagattcaacgacatcatgtgttggagcactgattatcatctgggcatgaagggtccggacatcggggaagtgaaagacgggaccgaatgcggcatcgatcatatctgcattcaccggcactgcgtccacatcactatcttgaactctaattgctcccccgcattctgtaacaaacgcggtatctgtaacaacaaacaccactgtcattgtaattatctttgggacccgcctaattgtctcatcaaaggttacgggggatccgtggacagtgggcctccacccaagcgcaaaaagaaaaagaaattctgctacctgtgcattctgcttctgattgtgctcttcatcctgctttgctgtctgtacagactctgcaagaagagcaaacccatcaagaaacagcaagacgtgcaaactccttcggcaaaggaagaggagaagatccaaaggagaccccacgaactaccaccgcagtcacagccctgggtaatgccctcccagagtcagccacctgtgaccccctcacagagtcatccccaagtgatgccatcacagagccaacccccagtgacccctagtcaatcacagcccagagttatgcctagccagtctcaacctcctgtgatgccatcccagtcccatccccagctgacacccagccagagccagcctccggtaaccccttcccagcgccagcctcaactgatgcccagtcagtcccagcccccagtaacccccagttag

SEQ ID NO: 97748 - DNA, 2463 bp, Artificial Sequence
  derived and/or modified sequence
atgaagatgctgctgctgctgcactgcctgggcgtgttcctgagctgcagcggccacatccaggacgagcacccccagtaccacagcccccccgacgtggtgatccccgtgagaatcaccggcaccaccagaggcatgaccccccccggctggctgagctacatcctgcccttcggcggccagaagcacatcatccacatcaaggtgaagaagctgctgttcagcaagcacctgcccgtgttcacctacaccgaccagggcgccatcctggaggaccagcccttcgtgcagaacaactgctactaccacggctacgtggagggcgaccccgagagcctggtgagcctgagcacctgcttcggcggcttccagggcatcctgcagatcaacgacttcgcctacgagatcaagcccctggccttcagcaccaccttcgagcacctggtgtacaagatggacagcgaggagaagcagttcagcaccatgagaagcggcttcatgcagaacgagatcacctgcagaatggagttcgaggagatcgacaacagcacccagaagcagagcagctacgtgggctggtggatccacttcagaatcgtggagatcgtggtggtgatcgacaactacctgtacatcagatacgagagaaacgacagcaagctgctggaggacctgtacgtgatcgtgaacatcgtggacagcatcctggacgtgatcggcgtgaaggtgctgctgttcggcctggagatctggaccaacaagaacctgatcgtggtggacgacgtgagaaagagcgtgcacctgtactgcaagtggaagagcgagaacatcacccccagaatgcagcacgacaccagccacctgttcaccaccctgggcctgagaggcctgagcggcatcggcgccttcagaggcatgtgcaccccccacagaagctgcgccatcgtgaccttcatgaacaagaccctgggcaccttcagcatcgccgtggcccaccacctgggccacaacctgggcatgaaccacgacgaggacacctgcagatgcagccagcccagatgcatcatgcacgagggcaacccccccatcaccaagttcagcaactgcagctacggcgacttctgggagtacaccgtggagagaaccaagtgcctgctggagaccgtgcacaccaaggacatcttcaacgtgaagagatgcggcaacggcgtggtggaggagggcgaggagtgcgactgcggccccctgaagcactgcgccaaggacccctgctgcctgagcaactgcaccctgaccgacggcagcacctgcgccttcggcctgtgctgcaaggactgcaagttcctgcccagcggcaaggtgtgcagaaaggaggtgaacgagtgcgacctgcccgagtggtgcaacggcaccagccacaagtgccccgacgacttctacgtggaggacggcatcccctgcaaggagagaggctactgctacgagaagagctgccacgacagaaacgagcagtgcagaagaatcttcggcgccggcgccaacaccgccagcgagacctgctacaaggagctgaacaccctgggcgacagagtgggccactgcggcatcaagaacgccacctacatcaagtgcaacatcagcgacgtgcagtgcggcagaatccagtgcgagaacgtgaccgagatccccaacatgagcgaccacaccaccgtgcactgggccagattcaacgacatcatgtgctggagcaccgactaccacctgggcatgaagggccccgacatcggcgaggtgaaggacggcaccgagtgcggcatcgaccacatctgcatccacagacactgcgtgcacatcaccatcctgaacagcaactgcagccccgccttctgcaacaagagaggcatctgcaacaacaagcaccactgccactgcaactacctgtgggacccccccaactgcctgatcaagggctacggcggcagcgtggacagcggccccccccccaagagaaagaagaagaagaagttctgctacctgtgcatcctgctgctgatcgtgctgttcatcctgctgtgctgcctgtacagactgtgcaagaagagcaagcccatcaagaagcagcaggacgtgcagacccccagcgccaaggaggaggagaagatccagagaagaccccacgagctgcccccccagagccagccctgggtgatgcccagccagagccagccccccgtgacccccagccagagccacccccaggtgatgcccagccagagccagccccccgtgacccccagccagagccagcccagagtgatgcccagccagagccagccccccgtgatgcccagccagagccacccccagctgacccccagccagagccagccccccgtgacccccagccagagacagccccagctgatgcccagccagagccagccccccgtgacccccagctag

SEQ ID NO: 97749 - DNA, 135 bp, Artificial Sequence
  derived and/or modified sequence
atgaagatgctgctgctgctgcactgcctgggcgtgttcctgagctgcagcggccacatccaggacgagcacccccagtaccacagcccccccgacgtggtgatccccgtgagaatcaccggcaccaccagatag

SEQ ID NO: 97750 - DNA, 273 bp, Artificial Sequence
  derived and/or modified sequence
atgaagatgctgctgctgctgcactgcctgggcgtgttcctgagctgcagcggccacatccaggacgagcacccccagtaccacagcccccccgacgtggtgatccccgtgagaatcaccggcaccaccagaggcatgaccccccccggctggctgagctacatcctgcccttcggcggccagaagcacatcatccacatcaaggtgaagaagctgctgttcagcaagcacctgcccgtgttcacctacaccgaccagggcgccatcctgtag

SEQ ID NO: 97751 - DNA, 3325 bp, Artificial Sequence
  derived and/or modified sequence
gtgacatcacatccactaaccaaatggggtggtgtgagtatctcctataaaataaaagctctcctgatggcctgttcctgcacatttcctgaggacgccctcgatcacaagcagcttgctggatgaataaaggaaagaaggtttatatacactaataatagaaatgttttgggatggttcatgatttcgaaaagcttcagagaaaataaagatgcttaatgttagagtacaaaacattctccctgcagtctcacgaactgtgaacaaaaactgaagtgaaaactcatagtgcataactcgtcaatactcctgtgatcgtataaccatcagcaagaaaacaaatttgattgagcccccatccagtcctctttgcgtggaatcagacctcttttgcagtggaaaggagcagagaatgtgactttcctgaacaacaggagcaagaatcaatgccagattctcttctctaaaaataatcaatttgttactacagtgctgcagctctgatggttcaactctgccaaaagatggatctttaatgattagcactacacactgaccaactcagaagaaggagccacaccacctgtgactccagccctgacttctgctctggaccagtgtttccataacagggacttcaaaatcactgtgatttgaagcctttttgaacatgaagatgttactcctgctgcattgccttggggtgtttctgtcctgttctggacacatccaggatgagcacccccaatatcacagccctccggatgtggtgattcctgtgaggataactggcaccaccagaggcatgacacctccaggctggctctcctatatcctgccctttggaggccagaaacacattatccacataaaggtcaagaagcttttgttttccaaacacctccctgtgttcacctacacagaccagggtgctatccttgaggaccagccatttgtccagaataactgctactatcatggttatgtggaaggggacccagaatccctggtttccctcagtacctgttttgggggttttcaaggaatattacagataaatgactttgcttatgaaatcaagcccctagcattttctaccacgtttgaacatctggtatacaagatggacagtgaggagaaacaattttcaaccatgagatccggatttatgcaaaatgaaataacatgccgaatggaatttgaagaaattgataattccactcagaagcaaagttcttatgtgggctggtggatccattttaggattgttgaaattgtagtcgtcattgataattatctgtacattcgttatgaaaggaacgactcaaagttgctggaggatctatatgttattgttaatatagtggattccattttggatgtcattggtgttaaggtgttattatttggtttggagatctggaccaataaaaacctcattgtagtagatgatgtaaggaaatctgtgcacctgtattgcaagtggaagtcggagaacattacgccccggatgcaacatgacacctcacatcttttcacaactctaggattaagagggttaagtggcataggagcttttagaggaatgtgtacaccacaccgtagttgtgcaattgttactttcatgaacaaaactttgggcactttttcaattgcagtggctcatcatctaggtcataatttgggcatgaaccatgatgaggatacatgtcgttgttcacaacctagatgcataatgcatgaaggcaacccaccaataactaaatttagcaattgtagttatggtgatttttgggaatatactgtagagaggacaaagtgtttgcttgaaacagtacacacaaaggacatctttaatgtgaagcgctgtgggaatggtgttgttgaagaaggagaagagtgtgactgtggacctttaaagcattgtgcaaaagatccctgctgtctgtcaaattgcactctgactgatggttctacttgtgcttttgggctttgttgcaaagactgcaagttcctaccatcagggaaagtgtgtagaaaggaggtcaatgaatgtgatcttccagagtggtgcaatggtacttcccataagtgcccagatgacttttatgtggaagatggaattccctgtaaggagaggggctactgctatgaaaagagctgtcatgaccgcaatgaacagtgtaggaggatttttggtgcaggcgcaaatactgcaagtgagacttgctacaaagaattgaacaccttaggtgaccgtgttggtcactgtggtatcaaaaatgctacatatataaagtgtaatatctcagatgtccagtgtggaagaattcagtgtgagaatgtgacagaaattcccaatatgagtgatcatactactgtgcattgggctcgcttcaatgacataatgtgctggagtactgattaccatttggggatgaagggacctgatattggtgaagtgaaagatggaacagagtgtgggatagatcatatatgcatccacaggcactgtgtccatataaccatcttgaatagtaattgctcacctgcattttgtaacaagaggggcatctgcaacaataaacatcactgccattgcaattatctgtgggaccctcccaactgcctgataaaaggctatggaggtagtgttgacagtggcccaccccctaagagaaagaagaaaaagaagttctgttatctgtgtatattgttgcttattgttttgtttattttattatgttgtctttatcgactttgtaaaaaaagtaaaccaataaaaaagcagcaagatgttcaaactccatctgcaaaagaagaggaaaaaattcagcgtcgacctcatgagttacctccccagagtcaaccttgggtgatgccttcccagagtcaacctcctgtgacgccttcccagagtcatcctcaggtgatgccttcccagagtcaacctcctgtgacaccctcccagagtcaacctcgggtgatgccttctcagagtcaacctcctgtgatgccttcccagagtcatcctcagttgacgccttcccagagtcaacctcctgtgacaccctcccagaggcaacctcagttgatgccttcccagagtcaacctcctgtgacgccctcctagagccaacctcagttgatgccttcccagagtcaacctcctgtgacgccctcccagagccaacctcgggtgacaccctcccagagtcaacctcatgtgacaccttaccggagtaaaagtggtaaacaaaagcaatcagtaccaattccaaaaactgtatccagaaaaggtacattaaaaaaataattcctagta

SEQ ID NO: 97752 - DNA, 3152 bp, Artificial Sequence
  derived and/or modified sequence
aaaataaaagctctcctgatggcctgttcctgcacatttcctgaggacgccctcgatcacaagcaggttagagtacaaaacattctccctgcagtctcacgaactgtgaacaaaaactgaagtgaaaactcatagtgcataactcgtcaatactcctgtgatcgtataaccatcagcaagaaaacaaatttgattgagcccccatccagtcctctttgcgtggaatcagacctcttttgcagtggaaaggagcagagaatgtgactttcctgaacaacaggagcaagaatcaatgccagattctcttctctaaaaataatcaatttgttactacagtgctgcagctctgatggttcaactctgccaaaagatggatctttaatgattagcactacacactgaccaactcagaagaaggagccacaccacctgtgactccagccctgacttctgctctggaccagtgtttccataacagggacttcaaaatcactgtgatttgaagcctttttgaacatgaagatgttactcctgctgcattgccttggggtgtttctgtcctgttctggacacatccaggatgagcacccccaatatcacagccctccggatgtggtgattcctgtgaggataactggcaccaccagaggcatgacacctccaggctggctctcctatatcctgccctttggaggccagaaacacattatccacataaaggtcaagaagcttttgttttccaaacacctccctgtgttcacctacacagaccagggtgctatccttgaggaccagccatttgtccagaataactgctactatcatggttatgtggaaggggacccagaatccctggtttccctcagtacctgttttgggggttttcaaggaatattacagataaatgactttgcttatgaaatcaagcccctagcattttctaccacgtttgaacatctggtatacaagatggacagtgaggagaaacaattttcaaccatgagatccggatttatgcaaaatgaaataacatgccgaatggaatttgaagaaattgataattccactcagaagcaaagttcttatgtgggctggtggatccattttaggattgttgaaattgtagtcgtcattgataattatctgtacattcgttatgaaaggaacgactcaaagttgctggaggatctatatgttattgttaatatagtggattccattttggatgtcattggtgttaaggtgttattatttggtttggagatctggaccaataaaaacctcattgtagtagatgatgtaaggaaatctgtgcacctgtattgcaagtggaagtcggagaacattacgccccggatgcaacatgacacctcacatcttttcacaactctaggattaagagggttaagtggcataggagcttttagaggaatgtgtacaccacaccgtagttgtgcaattgttactttcatgaacaaaactttgggcactttttcaattgcagtggctcatcatctaggtcataatttgggcatgaaccatgatgaggatacatgtcgttgttcacaacctagatgcataatgcatgaaggcaacccaccaataactaaatttagcaattgtagttatggtgatttttgggaatatactgtagagaggacaaagtgtttgcttgaaacagtacacacaaaggacatctttaatgtgaagcgctgtgggaatggtgttgttgaagaaggagaagagtgtgactgtggacctttaaagcattgtgcaaaagatccctgctgtctgtcaaattgcactctgactgatggttctacttgtgcttttgggctttgttgcaaagactgcaagttcctaccatcagggaaagtgtgtagaaaggaggtcaatgaatgtgatcttccagagtggtgcaatggtacttcccataagtgcccagatgacttttatgtggaagatggaattccctgtaaggagaggggctactgctatgaaaagagctgtcatgaccgcaatgaacagtgtaggaggatttttggtgcaggcgcaaatactgcaagtgagacttgctacaaagaattgaacaccttaggtgaccgtgttggtcactgtggtatcaaaaatgctacatatataaagtgtaatatctcagatgtccagtgtggaagaattcagtgtgagaatgtgacagaaattcccaatatgagtgatcatactactgtgcattgggctcgcttcaatgacataatgtgctggagtactgattaccatttggggatgaagggacctgatattggtgaagtgaaagatggaacagagtgtgggatagatcatatatgcatccacaggcactgtgtccatataaccatcttgaatagtaattgctcacctgcattttgtaacaagaggggcatctgcaacaataaacatcactgccattgcaattatctgtgggaccctcccaactgcctgataaaaggctatggaggtagtgttgacagtggcccaccccctaagagaaagaagaaaaagaagttctgttatctgtgtatattgttgcttattgttttgtttattttattatgttgtctttatcgactttgtaaaaaaagtaaaccaataaaaaagcagcaagatgttcaaactccatctgcaaaagaagaggaaaaaattcagcgtcgacctcatgagttacctccccagagtcaaccttgggtgatgccttcccagagtcaacctcctgtgacgccttcccagagtcatcctcaggtgatgccttcccagagtcaacctcctgtgacaccctcccagagtcaacctcgggtgatgccttctcagagtcaacctcctgtgatgccttcccagagtcatcctcagttgacgccttcccagagtcaacctcctgtgacaccctcccagaggcaacctcagttgatgccttcccagagtcaacctcctgtgacgccctcctagagccaacctcagttgatgccttcccagagtcaacctcctgtgacgccctcccagagccaacctcgggtgacaccctcccagagtcaacctcatgtgacaccttaccggagtaaaagtggtaaacaaaagcaatcagtaccaattccaaaaactgtatccagaaaaggtacatt

SEQ ID NO: 97753 - DNA, 3244 bp, Artificial Sequence
  derived and/or modified sequence
gtgacatcacatccactaaccaaatggggtggtgtgagtatctcctataaaataaaagctctcctgatggcctgttcctgcacatttcctgaggacgccctcgatcacaagcagcttgctggatgaataaaggaaagaaggtttatatacactaataatagaaatgttttgggatggttcatgatttcgaaaagcttcagagaaaataaagatgcttaatgttagagtacaaaacattctccctgcagtctcacgaactgtgaacaaaaactgaagtgaaaactcatagtgcataactcgtcaatactcctgtgatcgtataaccatcagcaagaaaacaaatttgattgagcccccatccagtcctctttgcgtggaatcagacctcttttgcagtggaaaggagcagtgctgcagctctgatggttcaactctgccaaaagatggatctttaatgattagcactacacactgaccaactcagaagaaggagccacaccacctgtgactccagccctgacttctgctctggaccagtgtttccataacagggacttcaaaatcactgtgatttgaagcctttttgaacatgaagatgttactcctgctgcattgccttggggtgtttctgtcctgttctggacacatccaggatgagcacccccaatatcacagccctccggatgtggtgattcctgtgaggataactggcaccaccagaggcatgacacctccaggctggctctcctatatcctgccctttggaggccagaaacacattatccacataaaggtcaagaagcttttgttttccaaacacctccctgtgttcacctacacagaccagggtgctatccttgaggaccagccatttgtccagaataactgctactatcatggttatgtggaaggggacccagaatccctggtttccctcagtacctgttttgggggttttcaaggaatattacagataaatgactttgcttatgaaatcaagcccctagcattttctaccacgtttgaacatctggtatacaagatggacagtgaggagaaacaattttcaaccatgagatccggatttatgcaaaatgaaataacatgccgaatggaatttgaagaaattgataattccactcagaagcaaagttcttatgtgggctggtggatccattttaggattgttgaaattgtagtcgtcattgataattatctgtacattcgttatgaaaggaacgactcaaagttgctggaggatctatatgttattgttaatatagtggattccattttggatgtcattggtgttaaggtgttattatttggtttggagatctggaccaataaaaacctcattgtagtagatgatgtaaggaaatctgtgcacctgtattgcaagtggaagtcggagaacattacgccccggatgcaacatgacacctcacatcttttcacaactctaggattaagagggttaagtggcataggagcttttagaggaatgtgtacaccacaccgtagttgtgcaattgttactttcatgaacaaaactttgggcactttttcaattgcagtggctcatcatctaggtcataatttgggcatgaaccatgatgaggatacatgtcgttgttcacaacctagatgcataatgcatgaaggcaacccaccaataactaaatttagcaattgtagttatggtgatttttgggaatatactgtagagaggacaaagtgtttgcttgaaacagtacacacaaaggacatctttaatgtgaagcgctgtgggaatggtgttgttgaagaaggagaagagtgtgactgtggacctttaaagcattgtgcaaaagatccctgctgtctgtcaaattgcactctgactgatggttctacttgtgcttttgggctttgttgcaaagactgcaagttcctaccatcagggaaagtgtgtagaaaggaggtcaatgaatgtgatcttccagagtggtgcaatggtacttcccataagtgcccagatgacttttatgtggaagatggaattccctgtaaggagaggggctactgctatgaaaagagctgtcatgaccgcaatgaacagtgtaggaggatttttggtgcaggcgcaaatactgcaagtgagacttgctacaaagaattgaacaccttaggtgaccgtgttggtcactgtggtatcaaaaatgctacatatataaagtgtaatatctcagatgtccagtgtggaagaattcagtgtgagaatgtgacagaaattcccaatatgagtgatcatactactgtgcattgggctcgcttcaatgacataatgtgctggagtactgattaccatttggggatgaagggacctgatattggtgaagtgaaagatggaacagagtgtgggatagatcatatatgcatccacaggcactgtgtccatataaccatcttgaatagtaattgctcacctgcattttgtaacaagaggggcatctgcaacaataaacatcactgccattgcaattatctgtgggaccctcccaactgcctgataaaaggctatggaggtagtgttgacagtggcccaccccctaagagaaagaagaaaaagaagttctgttatctgtgtatattgttgcttattgttttgtttattttattatgttgtctttatcgactttgtaaaaaaagtaaaccaataaaaaagcagcaagatgttcaaactccatctgcaaaagaagaggaaaaaattcagcgtcgacctcatgagttacctccccagagtcaaccttgggtgatgccttcccagagtcaacctcctgtgacgccttcccagagtcatcctcaggtgatgccttcccagagtcaacctcctgtgacaccctcccagagtcaacctcgggtgatgccttctcagagtcaacctcctgtgatgccttcccagagtcatcctcagttgacgccttcccagagtcaacctcctgtgacaccctcccagaggcaacctcagttgatgccttcccagagtcaacctcctgtgacgccctcctagagccaacctcagttgatgccttcccagagtcaacctcctgtgacgccctcccagagccaacctcgggtgacaccctcccagagtcaacctcatgtgacaccttaccggagtaaaagtggtaaacaaaagcaatcagtaccaattccaaaaactgtatccagaaaaggtacattaaaaaaataattcctagta

SEQ ID NO: 97754 - DNA, 788 bp, Artificial Sequence
  derived and/or modified sequence
actaaccaaatggggtggtgtgagtatctcctataaaataaaagctctcctgatggcctgttcctgcacatttcctgaggacgccctcgatcacaagcagcttgctggatgaataaaggaaagaaggtttatatacactaataatagaaatgttttgggatggttcatgatttcgaaaagcttcagagaaaataaagatgcttaatgttagagtacaaaacattctccctgcagtctcacgaactgtgaacaaaaactgaagtgaaaactcatagtgcataactcgtcaatactcctgtgatcgtataaccatcagcaagaaaacaaatttgattgagcccccatccagtcctctttgcgtggaatcagacctcttttgcagtggaaaggagcagagaatgtgactttcctgaacaacaggagcaagaatcaatgccagattctcttctctaaaaataatcaatttgttactacagtgctgcagctctgatggttcaactctgccaaaagatggatctttaatgattagcactacacactgaccaactcagaagaaggagccacaccacctgtgactccagccctgacttctgctctggaccagtgtttccataacagggacttcaaaatcactgtgatttgaagcctttttgaacatgaagatgttactcctgctgcattgccttggggtgtttctgtcctgttctggacacatccaggatgagcacccccaatatcacagccctccggatgtggtgattcctgtgaggataactggcaccaccaga

SEQ ID NO: 97755 - DNA, 555 bp, Artificial Sequence
  derived and/or modified sequence
acatccactaaccaaatggggtggtgtgagtatctcctataaaataaaagctctcctgatggcctgttcctgcacatttcctgaggacgccctcgatcacaagcagtgctgcagctctgatggttcaactctgccaaaagatggatctttaatgattagcactacacactgaccaactcagaagaaggagccacaccacctgtgactccagccctgacttctgctctggaccagtgtttccataacagggacttcaaaatcactgtgatttgaagcctttttgaacatgaagatgttactcctgctgcattgccttggggtgtttctgtcctgttctggacacatccaggatgagcacccccaatatcacagccctccggatgtggtgattcctgtgaggataactggcaccaccagaggcatgacacctccaggctggctctcctatatcctgccctttggaggccagaaacacattatccacataaaggtcaagaagcttttgttttccaaacacctccctgtgttcacctacacagaccagggtgctatcct

SEQ ID NO: 97756 - DNA, 3010 bp, Artificial Sequence
  derived and/or modified sequence
aaaagctctcctgatggcctgttcctgcacatttcctgaggacgccctcgatcacaagcaggttagagtacaaaacattctccctgcagtctcacgaactgtgaacaaaaactgaagtgaaaactcatagtgcataactcgtcaatactcctgtgatcgtataaccatcagcaagaaaacaaatttgattgagcccccatccagtcctctttgcgtggaatcagacctcttttgcagtggaaaggagcagtgctgcagctctgatggttcaactctgccaaaagatggatctttaatgattagcactacacactgaccaactcagaagaaggagccacaccacctgtgactccagccctgacttctgctctggaccagtgtttccataacagggacttcaaaatcactgtgatttgaagcctttttgaacatgaagatgttactcctgctgcattgccttggggtgtttctgtcctgttctggacacatccaggatgagcacccccaatatcacagccctccggatgtggtgattcctgtgaggataactggcaccaccagaggcatgacacctccaggctggctctcctatatcctgccctttggaggccagaaacacattatccacataaaggtcaagaagcttttgttttccaaacacctccctgtgttcacctacacagaccagggtgctatccttgaggaccagccatttgtccagaataactgctactatcatggttatgtggaaggggacccagaatccctggtttccctcagtacctgttttgggggttttcaaggaatattacagataaatgactttgcttatgaaatcaagcccctagcattttctaccacgtttgaacatctggtatacaagatggacagtgaggagaaacaattttcaaccatgagatccggatttatgcaaaatgaaataacatgccgaatggaatttgaagaaattgataattccactcagaagcaaagttcttatgtgggctggtggatccattttaggattgttgaaattgtagtcgtcattgataattatctgtacattcgttatgaaaggaacgactcaaagttgctggaggatctatatgttattgttaatatagtggattccattttggatgtcattggtgttaaggtgttattatttggtttggagatctggaccaataaaaacctcattgtagtagatgatgtaaggaaatctgtgcacctgtattgcaagtggaagtcggagaacattacgccccggatgcaacatgacacctcacatcttttcacaactctaggattaagagggttaagtggcataggagcttttagaggaatgtgtacaccacaccgtagttgtgcaattgttactttcatgaacaaaactttgggcactttttcaattgcagtggctcatcatctaggtcataatttgggcatgaaccatgatgaggatacatgtcgttgttcacaacctagatgcataatgcatgaaggcaacccaccaataactaaatttagcaattgtagttatggtgatttttgggaatatactgtagagaggacaaagtgtttgcttgaaacagtacacacaaaggacatctttaatgtgaagcgctgtgggaatggtgttgttgaagaaggagaagagtgtgactgtggacctttaaagcattgtgcaaaagatccctgctgtctgtcaaattgcactctgactgatggttctacttgtgcttttgggctttgttgcaaagactgcaagttcctaccatcagggaaagtgtgtagaaaggaggtcaatgaatgtgatcttccagagtggtgcaatggtacttcccataagtgcccagatgacttttatgtggaagatggaattccctgtaaggagaggggctactgctatgaaaagagctgtcatgaccgcaatgaacagtgtaggaggatttttggtgcaggcgcaaatactgcaagtgagacttgctacaaagaattgaacaccttaggtgaccgtgttggtcactgtggtatcaaaaatgctacatatataaagtgtaatatctcagatgtccagtgtggaagaattcagtgtgagaatgtgacagaaattcccaatatgagtgatcatactactgtgcattgggctcgcttcaatgacataatgtgctggagtactgattaccatttggggatgaagggacctgatattggtgaagtgaaagatggaacagagtgtgggatagatcatatatgcatccacaggcactgtgtccatataaccatcttgaatagtaattgctcacctgcattttgtaacaagaggggcatctgcaacaataaacatcactgccattgcaattatctgtgggaccctcccaactgcctgataaaaggctatggaggtagtgttgacagtggcccaccccctaagagaaagaagaaaaagaagttctgttatctgtgtatattgttgcttattgttttgtttattttattatgttgtctttatcgactttgtaaaaaaagtaaaccaataaaaaagcagcaagatgttcaaactccatctgcaaaagaagaggaaaaaattcagcgtcgacctcatgagttacctccccagagtcaaccttgggtgatgccttcccagagtcaacctcctgtgacgccttcccagagtcatcctcaggtgatgccttcccagagtcaacctcctgtgacaccctcccagagtcaacctcgggtgatgccttctcagagtcaacctcctgtgatgccttcccagagtcatcctcagttgacgccttcccagagtcaacctcctgtgacaccctcccagaggcaacctcagttgatgccttcccagagtcaacctcctgtgacgccctcctagagccaacctcagttgatgccttcccagagtcaacctcctgtgacgccctcccagagccaacctcgggtgacaccctcccagagtcaacctcatgtgacaccttaccggagtaaaagt

SEQ ID NO: 97757 - protein, 1194 aa, Artificial Sequence
  derived and/or modified sequence
MASQVLVYPPYVYQTQSSAFCSVKKLKVEPSSCVFQERNYPRTYVNGRNFGNSHPPTKGSAFQTKIPFNRPRGHNFSLQTSAVVLKNTAGATKVIAAQAQQAHVQAPQIGAWRNRLHFLEGPQRCGLKRKSEELDNHSSAMQIVDELSILPAMLQTNMGNPVTVVTATTGSKQNCTTGEGDYQLVQHEVLCSMKNTYEVLDFLGRGTFGQVVKCWKRGTNEIVAIKILKNHPSYARQGQIEVSILARLSTENADEYNFVRAYECFQHRNHTCLVFEMLEQNLYDFLKQNKFSPLPLKVIRPILQQVATALKKLKSLGLIHADLKPENIMLVDPVRQPYRVKVIDFGSASHVSKTVCSTYLQSRYYRAPEIILGLPFCEAIDMWSLGCVIAELFLGWPLYPGALEYDQIRYISQTQGLPGEQLLNVGTKSTRFFCKETDMSHSGWRLKTLEEHEAETGMKSKEARKYIFNSLDDVAHVNTVMDLEGSDLLAEKADRREFVSLLKKMLLIDADLRITPAETLNHPFVNMKHLLDFPHSNHVKSCFHIMDICKSHLNSCDTNNHNKTSLLRPVASSSTATLTANFTKIGTLRSQALTTSAHSVVHHGIPLQAGTAQFGCGDAFQQTLIICPPAIQGIPATHGKPTSYSIRVDNTVPLVTQAPAVQPLQIRPGVLSQTWSGRTQQMLVPAWQQVTPLAPATTTLTSESVAGSHRLGDWGKMISCSNHYNSVMPQPLLTNQITLSAPQPVSVGIAHVVWPQPATTKKNKQCQNRSNSLQNTNIPHSAFISPKIINGKDVEEVSCIETQDNQNSEGEARNCCETSIRQDSDSSVSDKQRQTIIIADSPSPAVSVITISSDTDEEETSQRHSLRECKGSLDCEACQSTLNIDRMCSLSSPDSTLSTSSSGQSSPSPCKRPNSMSDEEQESSCDTVDGSPTSDSSGHDSPFAESTFVEDTHENTELVSSADTETKPAVCSVVVPPVELENGLNADEHMANTDSICQPLIKGRSAPGRLNQPSAVGTRQQKLTSAFQQQHLNFSQVQHFGSGHQEWNGNFGHRRQQAYIPTSVTSNPFTLSHGSPNHTAVHAHLAGNTHLGGQPTLLPYPSSATLSSAAPVAHLLASPCTSRPMLQHPTYNISHPSGIVHQVPVGLNPRLLPSPTIHQTQYKPIFPPHSYIAASPAYTGFPLSPTKLSQYPYM

SEQ ID NO: 97758 - DNA, 3585 bp, Artificial Sequence
  derived and/or modified sequence
atggcgtcccaagtgctagtgtacccgccttacgtctaccaaacgcagtcctcagctttctgttcggtcaaaaaattgaaagtggagcccagttcgtgcgtctttcaggagcggaattacccccgcacttatgtaaacggacgcaactttgggaactctcatcctcctactaagggaagtgctttccagactaagataccattcaatcggccacggggccataactttagcttgcagactagcgcagtggtccttaagaataccgccggtgccacaaaggtcatcgctgcgcaggctcagcaggcccacgttcaggcacctcagatcggcgcttggagaaacaggttgcatttcttagaggggccgcagcggtgtggcctaaaacgcaaatccgaggagctggacaatcatagttccgcaatgcagattgtcgatgagctcagtatactccccgctatgctgcaaaccaacatgggaaatcccgtcacggtggttaccgccaccacaggcagcaagcaaaattgtactactggggagggcgactaccagcttgtgcagcacgaggttctgtgttctatgaagaatacctatgaggtgcttgactttctcgggagaggcaccttcggtcaggttgtgaaatgctggaaacgagggaccaatgaaattgtggccataaagatcctcaaaaaccatccatcttacgcgagacaggggcagatcgaggtatccatcctggcaagattatccacggagaacgcagatgaatataatttcgtacgggcttatgaatgcttccagcaccgaaaccacacatgcctggtgttcgaaatgctggagcaaaatctttacgatttccttaagcagaataagttttcaccactgccactcaaagtgatcagaccgatactccagcaagtggccactgcactgaagaagctgaaatctttagggctgatacacgctgacttgaaacctgaaaacatcatgctggtggaccctgtgcgacagccttacagggttaaggttattgacttcgggagtgcatcccatgtatcaaagaccgtgtgttccacctacctgcaatcccggtattacagagcccctgaaatcatcctaggccttcctttttgtgaagccatagacatgtggtctctgggctgtgtcattgcagagttgtttcttgggtggcccctgtaccctggggctctcgaatatgaccagattaggtatatctcccagacgcaggggcttccaggagagcaactgttgaacgtagggaccaaaagtacccgattcttttgcaaagaaaccgatatgagtcactccggatggagactcaagaccctagaagagcacgaggctgaaacaggtatgaaatccaaggaggcccgaaaatacatatttaattcactcgacgatgtcgcccacgtaaatactgtgatggaccttgaggggagcgatctgttggccgaaaaagcggacaggagagagtttgtgtcactcttgaaaaaaatgctgttaatcgatgctgatctgcgaatcacacccgcagagacactgaaccaccccttcgtaaacatgaaacacctactggattttccgcacagcaaccatgtaaagtcatgttttcacattatggacatttgcaagagccatctgaactcatgcgatactaacaaccataacaagacaagcctattgaggcccgttgctagttcatccactgccacattgaccgcaaactttacaaagatcggtactttgaggtcccaagccttgacaacatctgcacattctgtggtccaccacgggatcccactgcaggctgggacggcgcagttcggctgtggtgacgctttccaacagaccctaattatttgtcctcccgctattcaaggaattcccgcgacacatggaaagccaacttcatattccatcagggtggacaatactgtgcctctggtgactcaggcccccgctgtgcagcctctgcagatacgtcctggcgtattgtcacagacatggagtggacgtacgcaacagatgctggttcccgcctggcagcaggtgacgcccctggcccccgccactacgactctaaccagtgagtccgtcgcgggctctcacaggcttggcgactggggcaagatgatttcgtgctccaatcactataactccgtcatgccacagcctttgctcaccaatcagatcacactcagtgcccctcagccggtctctgtgggcattgcccacgtggtttggccacagccagctacaaccaaaaagaacaagcagtgtcagaatcgctcaaatagcctacaaaacactaatatcccacatagcgccttcatcagcccaaagattatcaacggaaaggatgttgaggaagtctcatgtatcgagacgcaggataaccagaactcagagggcgaggcccgcaactgctgcgaaacatctattagacaggattctgattcttctgtttcagacaagcagcgacagaccatcatcattgcagactccccctccccagctgtttcggttataaccattagctccgatacagacgaggaagagacgagtcaacggcacagcctgagggaatgtaagggcagcctggattgcgaagcctgtcaaagcactctgaatattgaccgcatgtgtagcctctcgagccccgactcaaccctctcaacttcatcgtctggccaatccagcccatcaccatgcaaacggcctaattcaatgagtgacgaagagcaggagagttcatgtgacacggtggacggatcccctacatccgactctagcggacacgattccccttttgccgaatctaccttcgtggaggatactcatgagaacacagagctagtatcctctgctgatacagaaactaaaccggctgtgtgctcggttgttgtgcctccggtggagctcgagaacggactgaatgcagatgaacacatggccaataccgactccatttgccagccactgatcaaggggaggagtgctcccgggcggttgaatcagccttccgctgtaggaacccgacagcagaaactgacgagcgcatttcagcagcagcacctcaacttctcccaggtgcagcatttcgggagcggccaccaagagtggaatggtaacttcgggcaccgaagacagcaggcttatatccctacgtccgtgacgtccaatccgttcaccttgtctcatggctccccaaatcatactgcggtacatgctcacctagccgggaatactcacctaggaggccaaccaacacttctgccttatccctcaagtgcaacattatcaagcgctgctcccgtggcccacctgttggccagtccctgcacaagccggccaatgctgcaacaccctacatacaacataagccatccaagcggaattgtgcaccaggtgcctgtgggcctgaatccgcggctgttgccgtcccctaccattcatcagacgcagtataaacccatctttcctcctcatagctacatcgctgcgagccccgcgtataccggattccccctctctccaacaaaactctcgcaatatccttatatgtag

SEQ ID NO: 97759 - DNA, 3585 bp, Artificial Sequence
  derived and/or modified sequence
atggcgagtcaggtgttagtgtatccgccctacgtgtatcaaacacagtctagcgcattctgttcagtgaagaagttgaaagtggagccaagcagctgcgtctttcaggagcgtaattaccctagaacttacgtaaacgggcggaattttggcaacagccacccccctacgaagggctccgcatttcagaccaaaatcccattcaacagaccccgcggccataacttttctttacagacctcggctgtggtgctcaaaaacaccgccggtgctactaaagtgattgcggcacaagcacaacaggcacacgtgcaagcccctcaaattggggcctggaggaacaggcttcatttcctggaaggcccgcagagatgcggtctgaaaaggaagtcagaggagctggacaaccacagttccgctatgcagatcgttgacgagctatccatacttcctgccatgctccagacaaacatgggaaacccagttaccgtggtgacagcaacaacagggtccaaacagaactgcaccacgggtgagggggattatcagctggtccaacatgaggtcttatgcagcatgaagaacacatatgaagttttagattttctcggacgcggtacattcggccaggttgtgaagtgttggaagcgcggaaccaatgaaatagttgctattaagattctgaagaaccaccccagttacgcccgacagggtcaaatcgaagtctccattctggctcggctgtcgacagagaatgccgacgaatataatttcgtgagagcgtatgaatgtttccagcatagaaaccacacctgtcttgtcttcgaaatgctggaacaaaacttgtacgactttctcaagcagaataagttcagccctttacctctgaaggtgattcgccccattctgcaacaggtggccaccgctcttaagaaattgaagtcactgggcctcattcacgccgacttaaagcccgagaacattatgctggtcgaccccgtccgacagccttatcgtgttaaagtcatcgacttcgggagtgcaagccacgtgtccaaaactgtctgctccacatacctccagtccagatattaccgcgccccagagattatcttggggctgcccttctgcgaggcaatcgacatgtggagtttgggctgtgtgatcgccgaactttttcttggctggcctctatatccaggcgcgttagaatacgaccagatacgttacatttcacaaacgcaggggctgcccggcgagcagctgctgaatgttggcacgaaaagcacccggttcttttgcaaagaaaccgacatgagccacagcggatggaggctgaaaactctggaagaacacgaagcggaaactgggatgaagtccaaggaagccagaaagtacattttcaacagcctcgacgacgtggcccacgttaataccgtgatggacctggagggttccgatctgctggcagaaaaggctgatcggcgcgaatttgttagtctgcttaagaagatgctgctgattgatgcagaccttaggatcacccctgctgagacattaaaccacccctttgtcaacatgaaacaccttctggattttccccatagcaaccatgtgaaaagttgctttcacataatggacatctgtaaaagtcacctgaatagttgcgataccaataaccacaataagacctcgttactgaggccagtggctagctcctcaactgccactttgactgcgaacttcaccaagatcggtactctacggtcccaggcgttaacgaccagcgcacatagcgtggtgcaccacggaatccccctacaggcaggaaccgcacagttcggctgtggtgatgccttccagcaaactctgatcatttgtcctcccgctattcaaggcataccggcaactcatggcaagccgacatcttactcaattagagttgacaatactgtgccactggttactcaagccccggctgtccagcctttgcaaatcagaccaggagtactgtcccaaacttggtcgggccggacccagcagatgttagttcctgcatggcaacaggtcacgcccctggcccctgcgacaactaccttgacaagtgaatcagtagccggctcacacaggctgggagactggggcaaaatgatctcttgcagcaaccattacaattccgtgatgccacaacctctcttaaccaatcagatcactctaagcgccccccagcctgtctcggtgggcatagcccacgtagtgtggcctcagcctgcaacaacaaaaaaaaacaaacaatgccagaaccgcagcaactcactgcagaatacaaacatcccacattccgctttcattagtcctaagattattaacggcaaggatgtggaggaagttagctgcattgaaacccaggacaatcagaatagtgagggagaggcgagaaattgttgtgaaacctctattcgccaggacagcgattccagtgttagtgataagcagcgccagactatcataatcgcagactcgccatctcctgccgtgtctgttatcacgatctcctctgatactgacgaggaagagacttcacagcggcactctttaagggagtgtaaaggcagtctcgactgtgaggcatgtcagtcaacactgaatatagacaggatgtgttctctgagcagtcctgactctactcttagcaccagttctagcgggcagtcctctccctcaccctgtaagagacccaatagtatgagcgacgaggagcaggagtctagctgcgacacagtggatggtagtccaacttctgattcttccggccatgactccccttttgcggagtcaactttcgtggaagatacacacgagaatacagagctggtgagcagcgctgatactgagaccaaaccagctgtgtgcagcgtcgtcgtgccccctgtggagctcgagaacggcctcaatgccgatgagcacatggcgaacaccgatagcatctgtcagccccttataaagggacgttcagcccctggccgtctgaaccaaccctcggccgtggggactaggcagcagaagctgacctctgcattccagcaacagcatttgaacttttcccaggttcagcactttggatccggccatcaggaatggaacggtaacttcggtcaccgccgtcagcaggcttatatccctacaagtgtgacttccaatcccttcaccctgtctcatgggtctcctaatcatactgccgtgcacgcccacctggctggtaatacacacttgggagggcagcccactttgcttccgtatccctcctccgccacacttagcagtgcagctcccgtcgctcatctgctggccagcccatgtacttcgaggcccatgttacagcatccgacctacaatataagtcatccctccggaatcgtgcatcaagtgccagtcgggctgaacccacgtctgctgcctagccctacgatccaccagacccagtacaagcctatcttccctcctcatagctatatcgctgcatctcccgcctataccggtttccccctaagtccaacaaagctaagccagtacccatacatgtag

SEQ ID NO: 97760 - DNA, 3585 bp, Artificial Sequence
  derived and/or modified sequence
atggctagccaggtgctagtctaccccccttatgtgtaccaaacccagagctctgccttctgtagtgtcaagaagctgaaagttgaaccatcttcctgcgtcttccaggagagaaactacccgcggacctacgtgaacggcaggaatttcggtaactcccatccccctaccaaaggatccgcctttcagactaagatccccttcaatcgtccacgcggccacaacttctctctccaaactagcgccgttgtcctgaagaatactgcaggcgccacgaaggtgatcgctgcacaggcccagcaggcccatgtgcaggcccctcagatcggagcttggagaaatcggctccactttttggaagggccacaacgctgcgggctgaagagaaaatcagaagagttagataatcattcaagcgctatgcagattgtcgatgagctgtccattttgccagccatgctccagaccaatatgggcaaccctgtgactgtcgttaccgcaacaaccggcagtaaacagaactgcaccaccggggaaggtgattaccagctggtccagcacgaggtactttgttccatgaaaaatacttacgaagtgctggacttcctcggacggggcactttcggtcaggtggtaaagtgctggaagaggggtacgaatgagatcgttgcaataaagatcttgaaaaatcacccctcctacgcccgacagggacaaatcgaagtctcaatactggctaggctgtccacggagaatgctgatgagtataattttgtgcgagcgtatgaatgctttcagcatcgcaatcacacctgcctggtgttcgagatgctggaacagaatctgtatgactttttgaagcagaataagttttctccactaccattgaaggtaataaggccgatactgcagcaggtcgccacagccctgaaaaagctgaaatctctcgggctgatccatgcagatctgaaacctgagaatatcatgctcgtggaccctgtcagacagccttatcgagtgaaagtgatagattttggcagtgctagccacgtttcaaaaacagtgtgctcaacttacttgcaaagtagatattaccgggctccagaaatcatcctgggtctgcctttctgtgaagccatcgatatgtggtccctcgggtgcgtaatcgcggagttgtttttaggctggccattgtatccaggcgcattggagtacgatcagattagatacatttctcaaacgcaggggttacccggcgaacagctcctgaatgtggggacgaaatctactaggtttttttgcaaagagactgatatgtcacattccggctggcggttgaaaactctggaagaacacgaagccgagaccggaatgaagagcaaggaagcacgaaaatacattttcaactcactcgatgacgtggctcacgtgaacactgtaatggacttagaaggctcggacctcctcgccgagaaggcagatcggcgtgagtttgtgtccttgctcaagaaaatgctgctgatcgacgcagacctacgcattacccctgcagaaaccctcaaccaccccttcgtaaatatgaaacaccttcttgacttcccccactcaaaccacgtcaagagttgctttcatataatggacatatgcaaatctcacctgaattcctgtgacacaaacaaccataataagacatcgctgttgagaccggtggcaagctcgtctaccgcgaccctcacggctaactttaccaaaatcgggacccttcggagccaagcactcaccactagcgctcactctgtcgtacaccacggtatccccctccaggcgggtacggcccaattcggctgcggagatgccttccagcagacacttatcatttgcccacccgcaatccaagggattcctgctactcacggaaagcctacatcgtacagcatcagggtagataataccgtaccattggtgactcaggctcctgccgtgcagcccctccagatccgcccgggcgtgttaagccaaacctggagcggaagaacccaacagatgctggtccctgcatggcaacaggtgacaccattggctcccgctaccaccacccttaccagcgagtcggtggctggctcccaccgtttgggcgactgggggaagatgataagctgtagtaaccactacaattctgtaatgccccagccgctgttaaccaatcagatcactttgagcgctccgcagcccgtttcagtgggtattgcacatgtcgtgtggccccagccagcgactacaaagaagaacaaacaatgtcaaaacaggagtaatagcttacagaacaccaacattccccactccgccttcattagcccaaagattatcaatgggaaggacgtggaagaagttagctgtattgaaacacaagataatcagaactcggaaggggaagctcggaactgttgtgaaaccagcatccgccaagactccgatagttctgtatccgacaaacagagacaaacaatcattatcgccgactcgccatctcctgccgtgtctgttataacgattagctccgatactgatgaggaagaaacgtcacagagacactccctgcgcgagtgcaagggtagcttagactgcgaagcatgccagtctactctgaatattgatagaatgtgcagtctcagtagcccagattcaacattatccacttcgtcatccggacagtcctcaccctcaccctgcaagcgacctaactccatgtcagacgaagaacaagagtccagctgcgatacggtagacgggagtcccacctcggattcatctggccacgattcaccattcgctgagagtacgttcgtggaggatactcacgagaataccgaactcgtgtcaagtgctgacacagagactaagcccgctgtctgctccgtggtggtgcctcctgtggagttagagaacgggctgaacgccgacgagcacatggcaaacacggacagcatttgtcagcctttgattaagggtcggagcgccccgggaaggctcaaccaaccttccgcagtgggtacacggcaacagaagctgacatccgcattccaacaacagcacctgaatttcagtcaagtgcagcatttcggcagcggacaccaggagtggaacggcaactttggtcaccggcggcaacaagcatatattcccacgtccgtcacatcgaacccgtttacactctcccacgggtcccccaaccataccgccgtacacgctcatctcgccggcaacactcatctgggggggcagcccactttgctcccctatccctcctctgcaacattgtcttccgctgctccagtggcccacttactcgcctccccctgcacatctcgtcccatgttgcagcatccaacatataacatatcccaccccagcggcatcgtacatcaggtgcctgtgggacttaacccacgcctgttgcccagccctacaatccaccagacacagtacaagcccatattcccccctcattcatatattgccgcttccccggcatacacagggtttccactgtctcccacaaaattgagtcagtacccatacatgtag

SEQ ID NO: 97761 - DNA, 7345 bp, Artificial Sequence
  derived and/or modified sequence
cctcgccctagccaagccgtccccaccccaaatccccgggaaggaagatgagggagacgggcccggcgcttagcagccagagcagcagcagcagcagcagcggtcgggggagggtgtttcgccgtttcctctcagccgccaggacaagatggcagcggccgcggagaggggctgagcccgggctgggtggtgccgcctgctgaagcgcctggctcccggtccccggcacggccctgcgccccaccccggacatgctcagggctgcggccgcccgaagaggagagagcgcgggcctctaggaaggtatggcctcacaagtcttggtctacccaccatatgtttatcaaactcagtcaagtgccttttgtagtgtgaagaaactcaaagtagagccaagcagttgtgtattccaggaaagaaactatccacggacctatgtgaatggtagaaactttggaaattctcatcctcccactaagggtagtgcttttcagacaaagataccatttaatagacctcgaggacacaacttttcattgcagacaagtgctgttgttttgaaaaacactgcaggtgctacaaaggtcatagcagctcaggcacagcaagctcacgtgcaggcacctcagattggggcgtggcgaaacagattgcatttcctagaaggcccccagcgatgtggattgaagcgcaagagtgaggagttggataatcatagcagcgcaatgcagattgtcgatgaattgtccatacttcctgcaatgttgcaaaccaacatgggaaatccagtgacagttgtgacagctaccacaggatcaaaacagaattgtaccactggagaaggtgactatcagttagtacagcatgaagtcttatgctccatgaaaaatacttacgaagtccttgattttcttggtcgaggcacgtttggccaggtagttaaatgctggaaaagagggacaaatgaaattgtagcaatcaaaattttgaagaatcatccttcttatgcccgtcaaggtcaaatagaagtgagcatattagcaaggctcagtactgaaaatgctgatgaatataactttgtacgagcttatgaatgctttcagcaccgtaaccatacttgtttagtctttgagatgctggaacaaaacttgtatgactttctgaaacaaaataaatttagtcccctgccactaaaagtgattcggcccattcttcaacaagtggccactgcactgaaaaaattgaaaagtcttggtttaattcatgctgatctcaagccagagaatattatgttggtggatcctgttcggcagccttacagggttaaagtaatagactttgggtcggccagtcatgtatcaaagactgtttgttcaacatatctacaatctcggtactacagagctccagagattatattggggttgccattttgtgaagccatagacatgtggtcattgggatgtgtgattgcagaattatttcttggatggccgctctacccaggagccttggagtatgatcagattcgatacatttctcagactcaaggtttgccaggagaacagttgttaaatgtgggtactaaatccacaagatttttttgcaaagaaacagatatgtctcattctggttggagattaaagacattggaagagcatgaggcagagacaggaatgaagtctaaagaagccagaaaatacattttcaacagtctggatgatgtagcgcatgtgaacacagtgatggatttggaaggaagtgatcttttggctgagaaagctgatagaagagaatttgttagtctgttgaagaaaatgttgctgattgatgcagatttaagaattactccagctgagaccctgaaccatccttttgttaatatgaaacatcttctagatttccctcatagcaaccatgtaaagtcctgttttcatattatggatatttgtaagtcccacctaaattcatgtgacacaaataatcacaacaaaacttcacttttaagaccagttgcttcaagcagtactgctacactgactgcaaattttactaaaatcggaacattaagaagtcaggcattgaccacatctgctcattcagttgtgcaccatggaatacctctgcaggcaggaactgctcagtttggttgtggtgatgcttttcagcagacattgattatctgtcccccagctattcaaggtattcctgcaacacatggtaaacccaccagttattcaataagggtagataatacagttccacttgtaactcaggccccagctgtgcagccactacagatccgaccaggagttctttctcagacgtggtctggtagaacacagcagatgctggtgcctgcctggcaacaggtgacacccctggctcctgctactactacactaacttctgagagtgtggctggttcacacaggcttggagactgggggaagatgatttcatgcagcaatcattataactcagtgatgccgcagcctcttctgaccaatcagataactttatctgcccctcagccagttagtgtggggattgcacatgttgtctggcctcagcctgccactaccaagaaaaataaacagtgccagaacaggagtaattcattacagaataccaatatcccacattcagcatttatttctccaaagataattaatgggaaagatgtcgaggaagtaagttgtatagaaacacaggacaatcagaactcagaaggagaggcaagaaattgctgtgaaacatctatcagacaggactctgattcatcagtttcagacaaacagcggcaaaccatcattattgccgactccccgagtcctgcagtgagtgtcatcactatcagcagtgacactgatgaggaagagacttcccagagacattcactcagagaatgtaaaggtagtctagattgtgaagcttgccagagcactttgaatattgatcggatgtgttcattaagtagtcctgatagtactctgagtaccagctcctcagggcagtccagcccatccccctgcaagagaccgaatagtatgtcagatgaagagcaagaaagtagttgtgatacggtggatggctctccgacatctgactcttccgggcatgacagtccatttgcagagagcacttttgtggaggacactcatgaaaacacagaattggtatcctctgctgacacagaaaccaagccagctgtctgttctgttgtggtgccaccagtggaactagaaaatggcttaaatgccgatgagcatatggcaaacacagattctatatgccagccattaataaaaggacgatctgcccctggaagattaaaccagccttctgcagtgggtactcgtcagcaaaaattgacatcagcattccagcagcagcatttgaacttcagtcaggttcagcactttggatctgggcatcaagagtggaatggaaactttgggcacagaagacagcaagcttatattcctactagtgttaccagtaatccattcactctttctcatggaagtcccaatcacacagcagtgcatgcccacctggctggaaatacacacctcggaggacagcctactctacttccatacccatcatcagccaccctcagtagtgctgcaccagtggcccacctgttagcctctccgtgtacctcaagacctatgttacagcatccaacttataatatctcccatcccagtggcatagttcaccaagtcccagtgggcttaaatccccgtctgttaccatccccaaccattcatcagactcagtacaaaccaatcttcccaccacattcttacattgcagcatcacctgcatatactggatttccactgagtccaacaaaactcagccagtatccatatatgtgaaaaacagtatattggggaagctcaatgatacaaacatttgattaaaaataaaaacatggtatttaatattagccatggcacaagaaaattatttttgaatcatgtagacttgggtgcaatttaaacaactttgagctttaaaaactcacttttgatgtgttttgcacatttggtataacttgtctttggtcatgttatcttcttatgtagtaactctagacaggtgacttatgggagcagaagtccagttttgctcctgctattttttataaattgccttctaactagtgcaagacacgtctacatttgggaagccattctgtgtacagacttagagcaacagatgcacatatgtcagaattacagcatacaagtgaattgtattatccgtgtcttagtgtataaatgttgggtcacttacctaagaaattgagctattgttctttacatttgcatgtgtcttttgcatgggcaaaatgttgcctagactttgctcttaaatgttgttctaataatctcagctgcattgtaaaccgttcctacacatagtgccttaaatatttgaggttgttaatgttattacctatatataaatgttgaggactgcagcacttaaaattcagacctactatttagtttccttttgatagcgtaatgttcatttttgtttttgtgtggtatgatttcaggtagtagctgtttttttccttattaagagggcagcatgtttgctatagctgaattctgctgtctgatttttcagaatgatctagcttcaagaaaagcaagcagttagtagtgcttaagaaaaattgattcagtatctaatggatagttgataactgtcacagcacagcattttatatactgttaagtgaaactgcaatacaatctaagtttattttgagagtgtttgctgtataattggacttaataaaatgtttagaggtacagtaggcatgactttgggtagataataaaatgcaaaatgctcattgattcatgatgtggttttatcttagcttgggcaaaccatgcagtatttaataaatagtagcagaacttttactattgaagcttgaaaagatgtgagttctttgtgtgcaatttttgatttatgcatgtgagagggttttttttttttttaagtatttttacattgcagtacttgttttgcttgttggtgatgtttgcttatttaatacattccgtcagggacagaaattacatgcttttttttctttctaggaagtgtgttgagttccccccttccccgacatttttttcttttttgggtggtggtgatggtagtggttatgtctgtttaaatgaagttgcttttacagcaccaaagacttaatcatccatttcctatataaaggtagctactttttgcatagacctcaagtatattgtagtgtaaaggtggaatttaaggaaaggtattaaattgaggctgtgttttagcttacaggcaagtaataaattgtatcatttatcttgaatgtatcatagataagctgctatataacgattgccacttcagatagctgtgaaattaggtgattaactagttgttatttagccttctaatttctgtataagtctaattacatgaatagaaattggggttttgattttttactttgcttttctgtttggagtgtcattgtaactactgtattgtaaatggtggaaaataattgcatttgttactttggggtgtgttatttgcatcagtattttatctctattaatgtttgtgctcatcactgcatattaaaaaaacttggatgtatcagtgtaacttaattttttattttcatactggcattgtagacacttgagaaagctgtatcttgcaggcttgacttaacttttttccttaaaaatctggaatataatcttacagcatttactggaataaacagtacaaagcattggagtgtaaaactctagatgttttggatttacagcgtttctttgataaatgaattgtataccactagtacagctctagtacagcgttcacaataagctaataatggataagttttcttcactccattaacacaagcagtgttttatttaataatcatcaatgaaataaatgtgcctgaaattgattttaaaaattacagtattagatcataaagtaaaaaccagcagtacatttttagtcacactgaaaatgaaggacttaattttccccacaagtttcagtgtttttagtaattaattctatgcattttatacaaatagaaatatatatatataaaaaattaaatgtttaaaaaggagtagcctaagattaatttaaaagattatttacagatgacacatttatggggtcactatttaagtaaatttgctgccctccacagccttctaattttatttatatgttccagcagattattaggatctgcttacttcttaggaaagaatcaatgctggcaacacattgtttcagaaacaccaagtgcaaaggattgattgtatcacaacaggtacaaaactgacagagttttctttttgtttagggccatgtttactaccctgaaatgttgtattttttgtctttaatttccaagacttaaagcagtcttgttaaattgacataaatggtaaacttcaacattttcataatacagtattaatgtttgataaaggtatatcccagttaactacactgctctttaattgcaatcatgggcattttaatgtattttaaaataaatttcaaaattctgctaaattcttaatttagcatattgacaaagtaatctggatttataccttttaaaaaccattttgaccagttttcttcggttttaatgctttcttaaataaaacactgcatgatttccaagttgcatatttgcatactattttaatttgcaaaatgttttttaaatcaaatatcctgatatttagttgttttttttttcctccagcgtgtttaattaaatatgttactgtattagcaaaacattttcatttttaaaatctgctaattttaaacttggactgtgttaagtaaaagttaaatcatacactgcaaggtgtaggaagatttgttttaatgaatccaatgatacagatttgattactaagtttgaactgttaattgtttaacaattttagacttgtggctttctttctttggtttatttgtttttgcttttactcctatgctacactagtttgccatgtagcaattgcactgtgcaatattacaataaggactgggaaaattttatggatgtaatgtctattacggtttgcgatagtatttctctctagttctcagtgatttaaatgtgaccaagccttctgtactttgtcacaaaaagcgggttttccaggtgactattttggtgagtgtcaaaataagaatttatggtgtattactgtcgattcactttgaattaaaatatatatattgcagcaaa

SEQ ID NO: 97762 - DNA, 4478 bp, Artificial Sequence
  derived and/or modified sequence
ttcattaaggggaacaaacaaacgcgcaggcacgcagcttgagcaccccagccgatggccgcgtcccgggctttgtggccccgtccccagcgtcgcggagcagcgggtttgcagggtgtcaactctggggacgtgcgtgcgtgtgtgtgattgttggggaggagaaatgtgatccgcggctccgcgtccccagcggcggcgggaggaaggcgtggcggccgcgcggcggggctgttgccggcttctctcgttacggtggctgccgcccgcttcccttcgccgcactgggagaactggcggaaagactttggatgaaaatgtctgtttctctgtcgggagggagacggctgttgtaaaatggtatggcctcacaagtcttggtctacccaccatatgtttatcaaactcagtcaagtgccttttgtagtgtgaagaaactcaaagtagagccaagcagttgtgtattccaggaaagaaactatccacggacctatgtgaatggtagaaactttggaaattctcatcctcccactaagggtagtgcttttcagacaaagataccatttaatagacctcgaggacacaacttttcattgcagacaagtgctgttgttttgaaaaacactgcaggtgctacaaaggtcatagcagctcaggcacagcaagctcacgtgcaggcacctcagattggggcgtggcgaaacagattgcatttcctagaaggcccccagcgatgtggattgaagcgcaagagtgaggagttggataatcatagcagcgcaatgcagattgtcgatgaattgtccatacttcctgcaatgttgcaaaccaacatgggaaatccagtgacagttgtgacagctaccacaggatcaaaacagaattgtaccactggagaaggtgactatcagttagtacagcatgaagtcttatgctccatgaaaaatacttacgaagtccttgattttcttggtcgaggcacgtttggccaggtagttaaatgctggaaaagagggacaaatgaaattgtagcaatcaaaattttgaagaatcatccttcttatgcccgtcaaggtcaaatagaagtgagcatattagcaaggctcagtactgaaaatgctgatgaatataactttgtacgagcttatgaatgctttcagcaccgtaaccatacttgtttagtctttgagatgctggaacaaaacttgtatgactttctgaaacaaaataaatttagtcccctgccactaaaagtgattcggcccattcttcaacaagtggccactgcactgaaaaaattgaaaagtcttggtttaattcatgctgatctcaagccagagaatattatgttggtggatcctgttcggcagccttacagggttaaagtaatagactttgggtcggccagtcatgtatcaaagactgtttgttcaacatatctacaatctcggtactacagagctccagagattatattggggttgccattttgtgaagccatagacatgtggtcattgggatgtgtgattgcagaattatttcttggatggccgctctacccaggagccttggagtatgatcagattcgatacatttctcagactcaaggtttgccaggagaacagttgttaaatgtgggtactaaatccacaagatttttttgcaaagaaacagatatgtctcattctggttggagattaaagacattggaagagcatgaggcagagacaggaatgaagtctaaagaagccagaaaatacattttcaacagtctggatgatgtagcgcatgtgaacacagtgatggatttggaaggaagtgatcttttggctgagaaagctgatagaagagaatttgttagtctgttgaagaaaatgttgctgattgatgcagatttaagaattactccagctgagaccctgaaccatccttttgttaatatgaaacatcttctagatttccctcatagcaaccatgtaaagtcctgttttcatattatggatatttgtaagtcccacctaaattcatgtgacacaaataatcacaacaaaacttcacttttaagaccagttgcttcaagcagtactgctacactgactgcaaattttactaaaatcggaacattaagaagtcaggcattgaccacatctgctcattcagttgtgcaccatggaatacctctgcaggcaggaactgctcagtttggttgtggtgatgcttttcagcagacattgattatctgtcccccagctattcaaggtattcctgcaacacatggtaaacccaccagttattcaataagggtagataatacagttccacttgtaactcaggccccagctgtgcagccactacagatccgaccaggagttctttctcagacgtggtctggtagaacacagcagatgctggtgcctgcctggcaacaggtgacacccctggctcctgctactactacactaacttctgagagtgtggctggttcacacaggcttggagactgggggaagatgatttcatgcagcaatcattataactcagtgatgccgcagcctcttctgaccaatcagataactttatctgcccctcagccagttagtgtggggattgcacatgttgtctggcctcagcctgccactaccaagaaaaataaacagtgccagaacaggagtaattcattacagaataccaatatcccacattcagcatttatttctccaaagataattaatgggaaagatgtcgaggaagtaagttgtatagaaacacaggacaatcagaactcagaaggagaggcaagaaattgctgtgaaacatctatcagacaggactctgattcatcagtttcagacaaacagcggcaaaccatcattattgccgactccccgagtcctgcagtgagtgtcatcactatcagcagtgacactgatgaggaagagacttcccagagacattcactcagagaatgtaaaggtagtctagattgtgaagcttgccagagcactttgaatattgatcggatgtgttcattaagtagtcctgatagtactctgagtaccagctcctcagggcagtccagcccatccccctgcaagagaccgaatagtatgtcagatgaagagcaagaaagtagttgtgatacggtggatggctctccgacatctgactcttccgggcatgacagtccatttgcagagagcacttttgtggaggacactcatgaaaacacagaattggtatcctctgctgacacagaaaccaagccagctgtctgttctgttgtggtgccaccagtggaactagaaaatggcttaaatgccgatgagcatatggcaaacacagattctatatgccagccattaataaaaggacgatctgcccctggaagattaaaccagccttctgcagtgggtactcgtcagcaaaaattgacatcagcattccagcagcagcatttgaacttcagtcaggttcagcactttggatctgggcatcaagagtggaatggaaactttgggcacagaagacagcaagcttatattcctactagtgttaccagtaatccattcactctttctcatggaagtcccaatcacacagcagtgcatgcccacctggctggaaatacacacctcggaggacagcctactctacttccatacccatcatcagccaccctcagtagtgctgcaccagtggcccacctgttagcctctccgtgtacctcaagacctatgttacagcatccaacttataatatctcccatcccagtggcatagttcaccaagtcccagtgggcttaaatccccgtctgttaccatccccaaccattcatcagactcagtacaaaccaatcttcccaccacattcttacattgcagcatcacctgcatatactggatttccactgagtccaacaaaactcagccagtatccatatatgtgaaaaacagtatattggggaagctcaatgatacaaacatttgattaaaaataaaaacatggtatttaatattagccatggcacaagaaaattatttttgaatcatgtagacttgggtgcaatttaaacaactttgagctttaaaaactcacttttgatgtgttttgcacatttggtataacttgtctttggtcatgttatcttcttatgtagtaactctagacaggtgacttatgggagcagaagtccagttttgctcctgctattttttataaattgccttctaactagtgcaagacacgtctacatttgggaagccattctgtgtacagacttagagcaacagatgcacatatgtcagaattacagcatacaagtgaattgtattatccgtgtcttagtgtataaatgttgggtcacttacctaagaaattgagctattgttctttacatttgcatgtgtcttttgcatgggcaaaatgttgcctagactttgctcttaaatgttgttctaataatctcagctgcattgta

SEQ ID NO: 97763 - DNA, 3668 bp, Artificial Sequence
  derived and/or modified sequence
gatttcctaatctccaggaggaaagaaactagtctttgggagttaaaccgactaatttaacggagaattaccaatgtggaggtatggcctcacaagtcttggtctacccaccatatgtttatcaaactcagtcaagtgccttttgtagtgtgaagaaactcaaagtagagccaagcagttgtgtattccaggaaagaaactatccacggacctatgtgaatggtagaaactttggaaattctcatcctcccactaagggtagtgcttttcagacaaagataccatttaatagacctcgaggacacaacttttcattgcagacaagtgctgttgttttgaaaaacactgcaggtgctacaaaggtcatagcagctcaggcacagcaagctcacgtgcaggcacctcagattggggcgtggcgaaacagattgcatttcctagaaggcccccagcgatgtggattgaagcgcaagagtgaggagttggataatcatagcagcgcaatgcagattgtcgatgaattgtccatacttcctgcaatgttgcaaaccaacatgggaaatccagtgacagttgtgacagctaccacaggatcaaaacagaattgtaccactggagaaggtgactatcagttagtacagcatgaagtcttatgctccatgaaaaatacttacgaagtccttgattttcttggtcgaggcacgtttggccaggtagttaaatgctggaaaagagggacaaatgaaattgtagcaatcaaaattttgaagaatcatccttcttatgcccgtcaaggtcaaatagaagtgagcatattagcaaggctcagtactgaaaatgctgatgaatataactttgtacgagcttatgaatgctttcagcaccgtaaccatacttgtttagtctttgagatgctggaacaaaacttgtatgactttctgaaacaaaataaatttagtcccctgccactaaaagtgattcggcccattcttcaacaagtggccactgcactgaaaaaattgaaaagtcttggtttaattcatgctgatctcaagccagagaatattatgttggtggatcctgttcggcagccttacagggttaaagtaatagactttgggtcggccagtcatgtatcaaagactgtttgttcaacatatctacaatctcggtactacagagctccagagattatattggggttgccattttgtgaagccatagacatgtggtcattgggatgtgtgattgcagaattatttcttggatggccgctctacccaggagccttggagtatgatcagattcgatacatttctcagactcaaggtttgccaggagaacagttgttaaatgtgggtactaaatccacaagatttttttgcaaagaaacagatatgtctcattctggttggagattaaagacattggaagagcatgaggcagagacaggaatgaagtctaaagaagccagaaaatacattttcaacagtctggatgatgtagcgcatgtgaacacagtgatggatttggaaggaagtgatcttttggctgagaaagctgatagaagagaatttgttagtctgttgaagaaaatgttgctgattgatgcagatttaagaattactccagctgagaccctgaaccatccttttgttaatatgaaacatcttctagatttccctcatagcaaccatgtaaagtcctgttttcatattatggatatttgtaagtcccacctaaattcatgtgacacaaataatcacaacaaaacttcacttttaagaccagttgcttcaagcagtactgctacactgactgcaaattttactaaaatcggaacattaagaagtcaggcattgaccacatctgctcattcagttgtgcaccatggaatacctctgcaggcaggaactgctcagtttggttgtggtgatgcttttcagcagacattgattatctgtcccccagctattcaaggtattcctgcaacacatggtaaacccaccagttattcaataagggtagataatacagttccacttgtaactcaggccccagctgtgcagccactacagatccgaccaggagttctttctcagacgtggtctggtagaacacagcagatgctggtgcctgcctggcaacaggtgacacccctggctcctgctactactacactaacttctgagagtgtggctggttcacacaggcttggagactgggggaagatgatttcatgcagcaatcattataactcagtgatgccgcagcctcttctgaccaatcagataactttatctgcccctcagccagttagtgtggggattgcacatgttgtctggcctcagcctgccactaccaagaaaaataaacagtgccagaacaggagtaattcattacagaataccaatatcccacattcagcatttatttctccaaagataattaatgggaaagatgtcgaggaagtaagttgtatagaaacacaggacaatcagaactcagaaggagaggcaagaaattgctgtgaaacatctatcagacaggactctgattcatcagtttcagacaaacagcggcaaaccatcattattgccgactccccgagtcctgcagtgagtgtcatcactatcagcagtgacactgatgaggaagagacttcccagagacattcactcagagaatgtaaaggtagtctagattgtgaagcttgccagagcactttgaatattgatcggatgtgttcattaagtagtcctgatagtactctgagtaccagctcctcagggcagtccagcccatccccctgcaagagaccgaatagtatgtcagatgaagagcaagaaagtagttgtgatacggtggatggctctccgacatctgactcttccgggcatgacagtccatttgcagagagcacttttgtggaggacactcatgaaaacacagaattggtatcctctgctgacacagaaaccaagccagctgtctgttctgttgtggtgccaccagtggaactagaaaatggcttaaatgccgatgagcatatggcaaacacagattctatatgccagccattaataaaaggacgatctgcccctggaagattaaaccagccttctgcagtgggtactcgtcagcaaaaattgacatcagcattccagcagcagcatttgaacttcagtcaggttcagcactttggatctgggcatcaagagtggaatggaaactttgggcacagaagacagcaagcttatattcctactagtgttaccagtaatccattcactctttctcatggaagtcccaatcacacagcagtgcatgcccacctggctggaaatacacacctcggaggacagcctactctacttccatacccatcatcagccaccctcagtagtgctgcaccagtggcccacctgttagcctctccgtgtacctcaagacctatgttacagcatccaacttataatatctcccatcccagtggcatagttcaccaagtcccagtgggcttaaatccccgtctgttaccatccccaaccattcatcagactcagtacaaaccaatcttcccaccacattcttacattgcagcatcacctgcatatactggatttccactgagtccaacaaaactcagccagtatccatatatgtga

SEQ ID NO: 97764 - DNA, 591 bp, Artificial Sequence
  derived and/or modified sequence
ttcattaaggggaacaaacaaacgcgcaggcacgcagcttgagcaccccagccgatggccgcgtcccgggctttgtggccccgtccccagcgtcgcggagcagcgggtttgcagggtgtcaactctggggacgtgcgtgcgtgtgtgtgattgttggggaggagaaatgtgatccgcggctccgcgtccccagcggcggcgggaggaaggcgtggcggccgcgcggcggggctgttgccggcttctctcgttacggtggctgccgcccgcttcccttcgccgcactgggagaactggcggaaagactttggatgaaaatgtctgtttctctgtcgggagggagacggctgttgtaaaatggtatggcctcacaagtcttggtctacccaccatatgtttatcaaactcagtcaagtgccttttgtagtgtgaagaaactcaaagtagagccaagcagttgtgtattccaggaaagaaactatccacggacctatgtgaatggtagaaactttggaaattctcatcctcccactaagggtagtgcttttcagacaaagataccatttaatagacctcgaggacacaactttt

SEQ ID NO: 97765 - DNA, 3585 bp, Artificial Sequence
  derived and/or modified sequence
atggccagccaggtgctggtgtacccaccctacgtgtaccagacccagagcagcgccttctgcagcgtgaagaagctgaaggtggagcccagcagctgtgtgttccaggagaggaactaccccaggacctacgtgaatggaagaaactttggaaacagccacccccccaccaagggcagcgccttccagaccaagatccccttcaaccggccccggggccacaacttcagcctgcagaccagcgctgtggtgctgaagaacacagctggggccaccaaggtgattgctgcccaggcccagcaggcccacgtgcaggccccccagattggagcctggaggaaccggctgcacttcctggagggcccccagagatgtggcctgaagaggaagtctgaggagctggacaaccacagcagcgccatgcagatcgtggatgagctgagcatcctgcctgccatgctgcagaccaacatgggcaaccctgtgacagtggtgacagccaccaccggcagcaagcagaactgcaccactggagagggggactaccagctggtgcagcacgaggtgctgtgcagcatgaagaacacctatgaggtgctggacttcctgggccggggcaccttcggccaggtggtgaagtgctggaagaggggcaccaatgagatcgtggccatcaagatcctgaagaaccaccccagctatgcccggcagggccagatcgaggtgtccatcctggcccggctgagcacagaaaatgctgatgagtacaactttgtgcgggcctatgagtgcttccagcacaggaaccacacctgcctggtgtttgagatgctggagcagaacctgtatgacttcctgaagcagaacaagttcagccccctgcccctgaaggtgatccggcccatcctgcagcaggtggccacagccctgaagaagctgaagagcctgggcctcatccatgctgacctgaagccagagaacatcatgctggtggaccctgtgcggcagccctacagagtgaaggtgattgactttggaagtgccagccacgtgtccaagacagtgtgcagcacctacctgcagagccgctactaccgggcccctgagatcatcctgggcctgcccttctgtgaggccatcgacatgtggagcctgggctgtgtgattgctgagctgttcctgggctggcccctgtacccaggggccctggagtatgaccagatccgctacatcagccagacccagggcctgcccggggagcagctgctgaatgtgggcaccaagagcacccgcttcttctgcaaggagacagacatgagccacagcggctggaggctgaagaccctggaggagcacgaggccgagaccggcatgaagagcaaggaggccaggaagtacatcttcaacagcctggatgatgtggcccacgtgaacacagtgatggacctggagggcagtgacctgctggccgagaaggctgacagaagagaatttgtgtccctgctgaagaagatgctgctgattgatgctgacctgcgcatcaccccagctgagaccctgaaccacccctttgtgaacatgaagcacctgctggacttcccccacagcaaccacgtgaagagctgcttccacatcatggacatctgcaagagccacctgaacagctgtgacaccaacaaccacaacaagaccagcctgctgcggcctgtggccagcagcagcacagccaccctgacagccaacttcaccaagattggcaccctgcggagccaggccctgaccaccagcgcccacagcgtggtgcaccacggcatccccctgcaggccggcacagcccagtttggctgtggagatgccttccagcagaccctcatcatctgccccccagccatccagggcatcccagccacccacggcaagcccaccagctacagcatccgggtggacaacacagtgcccctggtgacccaggccccagctgtgcagcccctgcagatccggcctggggtgctgagccagacctggagcggccgcacccagcagatgctggtgcctgcctggcagcaggtgacccccctggccccagccaccaccaccctgaccagcgagagcgtggccggcagccaccggctgggggactggggcaagatgatcagctgcagcaaccactacaacagcgtgatgccccagcccctgctgaccaaccagatcaccctgagcgccccccagcctgtgtctgtgggcatcgcccacgtggtgtggccccagcctgccaccaccaagaagaacaagcagtgccagaacagaagcaacagcctgcagaacaccaacatcccccacagcgccttcatcagccccaagatcatcaacgggaaggatgtggaggaggtgtcctgcatcgagacccaggacaaccagaacagcgagggggaggccaggaactgctgtgagaccagcatccggcaggacagcgacagctctgtgtctgacaagcagaggcagaccatcatcatcgctgacagccccagccctgctgtgtctgtcatcaccatcagcagtgacacagatgaggaggagaccagccagaggcacagcctgcgggagtgcaagggcagcctggactgtgaggcctgccagagcaccctgaacatcgacaggatgtgcagcctgagcagcccagacagcaccctgagcaccagcagcagcggccagagcagccccagcccctgcaagaggcccaacagcatgtctgatgaggagcaggagagcagctgtgacacagtggatggcagccccaccagtgacagcagcggccatgacagcccctttgctgagagcacctttgtggaggacacccatgagaacacagagctggtgtcctctgctgacacagagaccaagccagctgtgtgcagcgtggtggtgccccctgtggagctggagaatggcctgaatgctgatgagcacatggccaacacagacagcatctgccagcccctcatcaagggccgcagcgcccctggccgcctgaaccagcccagcgctgtgggcacccggcagcagaagctgaccagcgccttccagcagcagcacctgaacttcagccaggtgcagcacttcggcagcggccaccaggagtggaatggaaactttggccaccggcggcagcaggcctacatccccacctctgtgaccagcaaccccttcaccctgagccacggcagccccaaccacacagctgtgcacgcccacctggccggcaacacccacctgggcggccagcccaccctgctgccctaccccagcagcgccaccctgagcagcgctgcccctgtggcccacctgctggccagcccctgcaccagccggcccatgctgcagcaccccacctacaacatcagccaccccagcggcatcgtgcaccaggtgcctgtgggcctgaacccccggctgctgcccagccccaccatccaccagacccagtacaagcccatcttccccccccacagctacatcgccgccagccctgcctacacaggcttccccctgagccccaccaagctgagccagtacccctacatgtag

SEQ ID NO: 97766 - DNA, 3585 bp, Artificial Sequence
  derived and/or modified sequence
atggccagccaggtgctggtgtaccccccctacgtgtaccagacccagtccagcgctttctgttcagtcaagaagcttaaagtggaaccttcttcatgtgttttccaggagaggaactacccaaggacctacgttaacggccgtaatttcggaaatagccacccgcctaccaagggttcggctttccagactaagatcccatttaatcgaccccgcggccataacttctcactgcagacaagcgccgttgtgctgaaaaacaccgcaggcgctactaaggtgattgccgcgcaagcccaacaggctcacgtgcaggctcctcagattggggcttggcgcaaccgccttcactttttggaagggcctcagcgatgcggactgaaaaggaagtccgaggagctcgataaccattcctccgctatgcagatagtggatgaactctccatcctcccggctatgcttcagactaacatgggcaaccctgtcacagttgttaccgctactactggcagtaagcagaattgtactactggagagggcgattatcagttagtccagcatgaggtgttatgcagcatgaagaacacttacgaagttctcgatttcttaggtcgaggcacctttgggcaagtagtgaagtgctggaagagggggacaaacgagatcgtagctattaagattctgaagaatcacccctcttatgcgcgccaggggcagatcgaggtttcgattctcgcccgactgtccactgagaacgcagatgaatacaactttgtccgggcctatgaatgttttcagcatagaaaccatacatgtctcgtctttgagatgttggaacagaatctgtacgattttctgaaacagaacaagtttagccctctgccgctaaaagtgattaggccaatccttcagcaggtagccacagccctgaagaagctgaaaagcttgggtctgatacatgctgatctgaaaccagagaatattatgctcgtggatcctgtccgccagccttaccgagtgaaggtcatagactttgggtccgcttctcatgtctcaaagaccgtttgttccacatacctgcaatcccgctactatcgggctcccgaaataatcctgggactgcctttctgcgaagccatcgatatgtggtctctgggatgtgtgatcgctgaactcttcctcgggtggcctctgtatcccggcgcattggaatacgaccagataaggtatataagccaaacccagggactgccaggcgaacagctccttaatgttgggactaaaagtacccggttcttttgtaaagaaactgacatgtcccacagtggttggaggctgaaaaccctggaggagcacgaggccgagactggtatgaaatccaaggaggctaggaagtatatattcaacagtttggacgatgtggcccatgtgaatactgtcatggacttggaagggtccgacctgctggccgaaaaagccgatcgaagggagtttgtctctctgctgaaaaagatgctattgatcgacgccgacttgcgtatcacacctgctgaaaccctgaaccatcccttcgttaacatgaaacacctgctggacttcccccattctaaccatgtaaagtcctgttttcatatcatggacatatgtaagtcacacttgaatagttgtgatactaataaccataataagacctcactcctccggcccgttgcctcttctagtacagcgactctgacagctaacttcaccaagatcggtaccctgcggtcgcaagccttaaccacttccgcacactccgtcgtgcatcatggcattccactacaggccggcaccgcacagttcggctgtggggacgcctttcagcagactctgatcatttgcccgccggcaatccagggtatccccgctacccacggaaagccaacctcctatagcataagagttgacaacacggtgcctctggtcacgcaggctcccgctgtgcagccgctccaaatccgaccaggtgttctatcgcagacctggagtggccgcacacagcaaatgctggtgcccgcctggcagcaagtcaccccactggctcctgccactactacactgacctccgaatctgtcgcaggtagtcacagactgggagactgggggaaaatgatctcctgctcaaatcactacaactcagtcatgccccaacccttactgacaaaccagatcacactgtctgccccccaaccagtgagtgtgggcattgcccatgttgtctggccccagccggctaccaccaaaaaaaacaagcagtgccagaatagaagtaattccttacagaacaccaacattccacattccgccttcatctcccccaaaatcatcaatggtaaggacgttgaggaggtgtcctgtattgaaacacaagacaaccagaacagcgaaggcgaggcccggaactgctgtgagacctccatacgccaggattcagactcctcagtcagtgataaacagcgccagaccatcatcattgcggacagcccgagccccgccgtgtccgttataacgatttcctctgatactgatgaagaagaaactagccagcggcattcactcagggagtgcaaggggtccctggactgtgaagcctgccagagcaccctgaacattgatcgtatgtgttcactgtcaagcccagattcaaccctgtccacgagctcttccggccaatcttctccctcaccgtgcaaaaggcctaatagcatgagcgacgaggaacaggaaagctcttgcgatacagttgacgggtcccctaccagtgactcttccggccacgattctccttttgccgaatcaacatttgttgaagatacacacgagaatacggaactcgttagtagcgccgacaccgaaactaaaccagccgtgtgcagcgtcgtcgtaccccctgtggagctggaaaacggtttgaatgccgacgaacatatggctaacacagactctatctgccagccactcattaagggtagatctgctccaggccgactgaatcagccgtcggcagtgggaacccggcaacagaagctgacaagtgcgtttcagcagcagcacttaaacttctctcaggtccagcatttcggaagtggccaccaagagtggaatgggaattttggccacagacggcagcaggcttatatccccacatctgttacctccaacccttttactttaagtcatggttccccaaaccacactgccgtgcatgcacaccttgctggcaatactcacttgggcggtcagccaacgttactcccttaccccagcagcgcaactttgtcatctgcggcccccgtggcccatctacttgcgtccccttgtacatcacggcccatgctgcagcaccctacctacaatatcagtcacccttcaggtattgtacaccaggtacccgtgggactcaaccctcgcctgctgccatctcccacaatacatcagacacagtataaacctattttccccccgcatagttatattgccgcctcacctgcttacacgggattcccactgtctcctaccaagttgtcacagtatccctacatgtag

SEQ ID NO: 97767 - DNA, 3585 bp, Artificial Sequence
  derived and/or modified sequence
atggccagccaggtgctggtgtaccccccctacgtgtaccagacccagtcttccgctttctgctctgtgaagaagctgaaagtggagccatcaagctgtgttttccaggaaagaaattatcctcgtacttatgtgaatgggagaaactttgggaactctcatccacctacgaaaggtagcgcctttcaaactaaaataccattcaacagaccacgggggcacaacttctcgctacagacatctgctgttgtgctcaagaataccgcgggtgcgactaaagtgattgcagcacaggctcagcaagctcacgttcaggctccccaaattggcgcttggcgtaaccgcctccacttcctggagggtccacagagatgcggtctgaagcgcaaatccgaggaactggataaccactctagtgctatgcagatcgtggatgagttgtcaatcctaccggccatgctccagacaaatatggggaatccagtgaccgtggtcactgccaccacaggcagtaagcagaactgtacgaccggtgagggagattatcagctcgtgcagcacgaggtgctctgtagcatgaagaacacatacgaggtgctggactttctggggagggggactttcggacaggttgtaaaatgctggaaacgcgggacaaacgagattgtggccatcaagatcctaaaaaaccatccatcctatgctcgacagggacagatcgaggtgagtatactggctagactgtcaaccgagaatgctgatgaatacaactttgttagggcatacgaatgctttcagcatcgcaatcatacctgtctggtgtttgagatgctcgagcagaacttgtatgattttttaaagcaaaacaaatttagtcctctgccacttaaggtgatccgccctattctgcaacaggttgccacagccctcaagaaactcaaaagtctgggcttaatccatgccgacctgaagccggaaaatatcatgcttgtggatcccgttagacaaccctatcgcgtgaaagtgattgatttcggaagtgctagccacgtgtccaagaccgtttgctcaacatatttgcaatcccggtactaccgcgccccagagatcattctgggcctgcctttctgcgaagcaatagacatgtggtccttgggttgcgtaatagccgaactgttcctggggtggccgctatacccaggagccttagagtacgatcagatcaggtatatcagccaaacacagggattaccgggggaacagctactgaacgttgggactaaatcgaccaggtttttctgcaaagagaccgatatgagccatagcggatggagactgaagacattggaagaacacgaagccgaaactggtatgaaatctaaggaagctcgcaagtacatctttaacagcttggacgacgtggcccatgtgaacactgttatggacctggaggggtcagatctgttggcggaaaaggcagaccgaagggagttcgtgtccctactcaaaaagatgctactgattgatgccgacctgagaattactccagctgagaccctgaaccatccattcgtgaacatgaagcacctcctcgatttcccacatagcaaccacgtgaagagctgctttcacattatggacatctgtaagagccacttaaacagctgtgacaccaacaaccataataagaccagtcttttgcgccccgtggcgtcatcttcaactgcaactctgacggctaactttactaagatcgggacgctgaggagccaagccttgacaactagcgcacatagcgtggtgcaccacgggattcccttacaggccgggacagcgcagttcgggtgtggtgacgccttccagcagacgctgatcatctgccccccagccatccaaggaattcctgcgacgcatggcaagcctaccagttatagtatccgcgttgataacacagttccacttgtgactcaggcccccgcagttcagccgctgcagattagacccggagtcctgtcccagacatggtcggggcggacacaacagatgctggtgcccgcatggcagcaggtgacccctttagcacccgcgaccactacactgactagcgagtctgtggcaggatctcaccggctgggagactggggaaagatgatcagctgtagcaatcattataactccgttatgccccagccactgctgactaaccaaatcacactgagcgcccctcagcctgtgtccgtcggaatcgctcacgtggtgtggcctcaacccgcaaccaccaaaaagaacaaacagtgccagaacaggtccaacagcctgcagaatacaaacatcccgcacagtgcattcatttcccctaaaatcatcaatggcaaggatgttgaagaagtcagctgtatcgagacccaggataaccagaacagcgaaggcgaggcgagaaactgctgcgagacaagtatcaggcaggattccgattctagtgttagcgacaaacaacggcagactatcattatcgccgactccccatcccccgcggtatccgtaattactatctcatctgacaccgacgaggaagaaacgtcccagagacattcactgagggagtgcaagggtagcctggactgtgaagcctgccagagcacactgaatattgatagaatgtgttccttgagctccccagacagtacactgtccacttctagctcaggccagtcatcaccaagcccttgcaagcgaccaaatagtatgtccgatgaagagcaggaatcctcctgcgatacagtggacggcagtcccaccagtgattccagcggacacgacagtccattcgctgagagcacgttcgtggaggatacgcacgagaatactgaactggtgagctctgccgacaccgaaactaagccagccgtctgctcagtagtggtacccccagtagagttagagaacgggttaaacgcggatgagcacatggccaacacagactccatttgccagcctcttattaaagggagatccgctcccggacgcctgaatcaaccctctgcggttgggacacggcaacaaaaactcacatctgcctttcagcagcagcacctgaacttttcacaggtacagcatttcggcagcggccaccaggagtggaatggaaactttgggcatcgaagacagcaggcatatatcccaacatccgtgaccagcaatccattcactctgtcccacggatcaccgaaccataccgctgttcacgcccatctggccggtaacacccacctgggcggacagccaactctgctcccgtacccctcctctgccaccctgtcctcggctgcccccgttgcccacctgcttgcgagcccttgcacctcacgtccaatgctccaacatcctacgtataacatcagccacccatcaggaatcgtgcatcaggtgccagtgggactcaacccccgacttctgcccagtcccacaattcatcagactcagtataaacctatttttccgccacactcatacatagctgcttcgccagcatatacaggattccccctgagtcctacaaagctgagccaatacccatacatgtag

SEQ ID NO: 97768 - DNA, 3585 bp, Artificial Sequence
  derived and/or modified sequence
atggccagccaggtgctggtgtaccccccctacgtgtaccagacccagagcagcgccttttgtagcgtgaagaagctgaaggttgagccctcatcttgtgtcttccaggagcgtaactacccacgtacatacgtgaacggacggaactttggtaattcccaccccccaaccaagggttcagcctttcagaccaagatccccttcaatcgcccccgcggtcataacttttctctacagacttctgctgtagttctaaaaaacacagctggggccaccaaagttattgcagcccaagcccagcaggctcatgtgcaggccccacagatcggtgcctggcgtaatcgcctccactttcttgaggggccacagagatgtggcctcaagcgaaagagtgaagagctagacaatcactcttcggcgatgcagatcgtggatgagctgagcatcctcccagctatgttgcaaacaaacatgggaaacccagtgactgttgtgacagccaccacaggaagtaaacagaactgtactaccggagaaggtgactatcagctggtgcagcatgaagtgctttgttccatgaagaatacctatgaggtcttggactttttgggtagggggacatttggacaggtggtcaaatgctggaagcgaggcaccaacgagatagttgccatcaagatactcaagaaccaccccagttacgctagacaaggccagatcgaagtctccatacttgctcgtctatcaaccgagaatgcagacgaatacaactttgtacgggcttatgagtgcttccagcatcgcaatcacacctgcctcgtgttcgagatgctcgaacagaacttgtatgactttctaaaacagaacaagttctcacctctgccccttaaggtgattcggccgatcctgcagcaggtggcaacagcacttaagaaattaaaatcgctgggcctcatccacgctgacctgaagccagaaaacataatgcttgtcgacccagtcagacaaccataccgggttaaagtcatcgactttggcagcgcgtcccatgtatcgaaaactgtctgcagcacttacctgcagtcccggtattaccgcgcccccgaaattattctgggcctgcctttttgtgaagctatcgatatgtggtccctggggtgtgtaattgccgaattatttctcggatggcccctgtatcctggtgcacttgaatacgatcagattcggtatatcagtcagacccagggacttcccggggaacagttgcttaatgtggggaccaaatcaacccgcttcttctgcaaagagaccgatatgtcccactcaggatggcgtttgaagacccttgaggaacacgaggctgagactggtatgaagagtaaggaagcccgcaaatatatcttcaattcactcgatgacgttgcccacgtgaacacagttatggacctggagggctcagatctccttgcagagaaggctgacagaagggaatttgtgagccttcttaagaagatgctgctgattgatgccgacctgagaatcacacctgccgaaactctaaatcatccgttcgttaacatgaagcacttacttgattttcctcacagtaaccatgtcaagagctgcttccatatcatggacatctgcaagtctcacctgaatagctgcgatactaataaccataacaagacctctctcttgaggcctgtagccagctcctctacagccactcttactgcaaacttcactaagatcgggaccctccggtcgcaggcattgaccacttcagcccatagcgtcgtgcaccatgggatccccctgcaggccggaaccgcgcaatttggatgtggcgacgcatttcagcagaccctcattatctgcccaccagcaatccaaggcatccccgccactcacggaaaaccaacctcctattccatcagagtggacaatacagtgcccctggtgacacaagcccctgccgttcagcccctccagatccgtccaggcgtcttgagtcagacttggtctggaagaacacagcagatgcttgtgccagcctggcaacaggtcacccccctggcccctgctactaccacgttaacttctgaatccgttgctggatcgcaccggctcggagattggggtaagatgatttcttgctccaatcattacaattcggttatgcctcagcctttgctcactaaccaaatcacactgagtgctccacagcctgtgtccgtagggattgcccatgtagtgtggcctcaaccagccacaactaagaagaacaagcaatgtcagaaccggtccaatagcctgcagaacactaacattccccactctgcttttattagtcccaaaatcattaacggaaaagatgtagaggaggttagctgtatcgaaacccaggacaatcagaactccgaaggagaagccaggaattgctgtgaaacttctatccggcaggactcagacagctcagtgtcagataaacagaggcagaccatcatcatcgcagattctccatctcctgctgtcagcgtcattacaattagcagcgatactgacgaagaagagaccagtcagcggcactcactgcgggagtgtaagggaagcctggattgcgaggcatgccagtccactttgaacattgacagaatgtgcagtctgagttcccctgactccaccctttcaacgtcatcgtccggccagtctagcccttccccgtgcaagaggcccaattctatgagcgacgaagagcaggaatcttcctgtgacacagtggacggtagcccgaccagcgactcgtctgggcacgacagtccgtttgcagagagcacatttgtagaagatactcatgagaacacagagttggtctcaagtgcagacacggagaccaagccagctgtatgcagtgtggtcgtcccgcccgttgaactagaaaatgggctgaatgccgatgaacacatggcaaatacagattccatttgccagccactgattaaaggaaggtcagccccggggaggctcaaccaaccatcagccgttggaaccaggcagcaaaaactcacttcagctttccagcagcagcacctgaatttttcccaggtccagcattttgggtctggccaccaggagtggaacgggaacttcggtcaccgcaggcagcaggcgtacattccgacctcagtgacctctaatccatttactctgtcccatggcagtcccaatcacaccgctgtccacgctcacctggctggcaatacgcacctgggcgggcagcctacacttctcccatacccttcctcagcaacacttagtagcgccgcacccgtagcgcatctcttggcctccccttgtacaagccgtcctatgcttcagcatccaacatacaacataagtcacccttcaggcatcgtgcatcaggtgcccgtgggattgaatcctcgattgctaccctcccctacgatccatcaaacacagtataagcccatctttccaccccatagttatatcgcagcctcaccggcttatacagggtttccccttagtcccaccaagctgtcccagtacccctatatgtag

SEQ ID NO: 97769 - DNA, 3585 bp, Artificial Sequence
  derived and/or modified sequence
atggcctcccaggtattagtctacccaccatacgtataccagacacagtcctcagccttttgctcagtgaagaaattgaaggtggagccctcttcgtgtgtcttccaggagcgtaattaccccaggacctacgtgaatggcaggaactttggcaactcccatcccccaacaaagggatctgccttccaaactaagatcccattcaaccgaccacgaggtcataacttcagcctccagaccagtgcggtggtgcttaagaacaccgccggagctaccaaggtgattgccgcacaggcgcagcaggcacacgtccaagcccctcagataggcgcttggaggaaccgcctgcatttcctcgaaggtccccaacgctgtggactgaaaagaaaaagcgaagagttggacaatcactcaagcgctatgcaaatcgttgacgaattgtcaatactcccggcaatgttacaaacgaacatggggaatccagtgaccgtggttacagctacaactggttccaagcagaactgtaccacaggagagggcgactatcagctggtccagcatgaggtgctatgttccatgaaaaatacctatgaggtgctggacttcttgggcaggggaaccttcgggcaagtggtgaagtgctggaaaaggggtaccaatgagatcgtggccataaaaattcttaagaatcaccctagctatgccagacaaggccagatcgaagtctccatcttagcaagactctccacggaaaacgcggatgagtacaacttcgtgagagcctacgaatgctttcagcatcgtaatcatacatgcttagtattcgagatgctggagcagaatctgtacgatttccttaagcagaacaagttcagccctctgcccctcaaggtcatacggcctatcctgcagcaggtggccacagctctaaagaagcttaaaagcctcggcctgatccatgccgacctcaagcccgagaatatcatgctggtagacccagtgagacagccctaccgagtaaaagtgattgacttcggttcggcctcacacgtttctaaaaccgtctgttcaacctacctgcagtctcgatattaccgcgcaccggaaataatattaggactccccttctgtgaagctatcgacatgtggtctctgggctgtgtgattgcagaattatttctgggctggcccctgtatccgggtgccctggagtatgaccagatccgatacatatcgcagacccagggcctgcctggtgaacaactgttgaatgtgggtacaaagtctactagattcttttgtaaagagacggatatgagtcattcaggctggagactgaaaacacttgaggaacatgaggcagagaccgggatgaaatccaaagaggccagaaagtacatattcaatagcctggacgatgtcgctcacgtcaacacagtgatggatttggagggcagcgatctcttagccgaaaaggctgatagaagggagtttgtgtcactgctcaagaagatgctgctgatcgatgctgatttgcgaatcacccctgcagaaacactgaatcacccattcgtgaacatgaagcatcttctggattttcctcacagcaaccatgtgaaaagctgcttccacatcatggacatttgcaaatcccaccttaactcctgtgacacgaacaaccataacaaaaccagcctgctccggcctgtggccagcagttccaccgcaacattgactgcaaattttaccaaaatcgggactctgaggagtcaggcactcactacgtcagcgcattctgtcgtccatcacgggatcccactgcaggcaggcacggctcaattcggctgtggagacgcatttcaacagacgttgatcatttgtccacctgctattcaaggcatacccgcaacccatggcaagcctaccagctattccatccgtgtggataatacagtgccactagtgacgcaggcgccagcggtccaacccctgcagatccgcccaggcgtgctgtcccaaacctggtcggggcgaacacagcagatgctggtgccagcctggcagcaggtgactcctctagcgccagcgaccacaaccttgaccagtgagtcagtcgcaggctcccacagactaggcgactggggaaagatgatctcgtgtagcaaccattacaactccgttatgccccagcctctcttgactaatcagattaccttatccgccccacagcctgtgtccgtaggcatcgctcacgtggtctggccacaacctgctaccacaaagaaaaataagcagtgccagaatcgaagcaacagtctccagaacactaacattccccactccgcttttatctcgcccaaaatcatcaacgggaaagacgttgaagaagtctcatgcattgaaactcaggataatcagaattcagagggggaagccaggaactgttgtgaaaccagtatccggcaggactccgactcctctgtgagcgacaagcagcggcaaacgattatcatcgccgactccccatctcccgcagtatctgtgataactatctcaagcgacaccgacgaggaagagaccagccagcgccatagcttacgtgaatgcaaaggatccctagactgcgaagcttgtcagtccaccttgaatatagatcggatgtgctctctctcaagtcccgattccactctctccacctccagtagcgggcaaagcagcccgtccccctgtaagcgccctaattccatgagcgatgaagagcaagaatcaagttgcgacactgtagacggatccccaacctccgactcctctgggcatgattcaccttttgcggagtcaacctttgtcgaagacactcatgaaaatactgagctggtctcaagtgcagacactgaaacaaaacccgcagtgtgcagcgttgttgtgccacctgtggagctggagaacggactgaacgcggatgagcacatggccaatactgactctatttgccagcccctcatcaaagggcgaagtgccccaggccgtttgaatcagccttctgcagtgggaactcgacagcagaaattgacatcagcctttcagcagcagcaccttaatttctcacaagtgcagcattttggatccggccaccaggaatggaatgggaacttcgggcatcggagacagcaggcatatattcctacaagcgtgacaagtaatcctttcactctgtcgcacggctcccctaatcacactgccgtccatgcccatctggccggtaatacccatctggggggacagcccaccttattaccatatcccagctccgccactttgagcagtgctgcaccagtggctcatctcctggcgtcaccctgcacttctcgaccgatgttacaacacccaacttacaacatttcacatccctcagggattgtccaccaggtgccagtgggtttaaatcctaggctgctaccatcaccgactattcaccaaacccagtacaagccaatcttcccaccccacagttatatcgccgctagtcccgcatataccggtttcccactctccccgacaaaacttagtcagtacccctacatgtag

SEQ ID NO: 97770 - DNA, 3585 bp, Artificial Sequence
  derived and/or modified sequence
atggcttctcaggttctggtctatcctccctatgtttaccagacgcagtcaagcgcgttctgttcggttaagaaactgaaagtagagccttcttcttgtgtattccaggagagaaattacccaagaacgtatgttaatgggagaaacttcggtaacagtcacccaccaaccaaaggttctgcctttcagacaaagatcccatttaatcgcccaagggggcataacttcagcttgcaaactagtgcagttgtccttaagaatacagctggggctactaaggtgatcgctgctcaggcccagcaggcccacgtccaggccccacagattggagcatggcgcaacaggcttcattttctagagggtccacaacgctgtgggttgaaacggaaatccgaagagttagataatcactccagcgcaatgcaaattgtggacgagctgtctattctgcccgctatgcttcagacaaacatgggtaaccccgtaaccgtagtgacagctaccaccgggagcaaacagaactgtacaaccggagagggagactaccagctcgtccagcacgaggttttgtgcagcatgaaaaacacctatgaagtactggacttccttgggagaggtacctttgggcaggtggtcaagtgttggaagaggggaacaaacgagatcgtcgcaattaaaattctgaaaaatcacccaagttacgcgagacaggggcagattgaggtgtccatactggccagactctccactgaaaacgccgacgaatacaacttcgtgagggcttacgagtgctttcaacaccggaatcatacttgcctagtattcgaaatgctggaacaaaatctgtatgattttctaaaacagaataagttttcccccctgcctcttaaggtcattaggccaatcttgcagcaggttgctactgcgctgaagaagctgaaatcgctgggactcattcatgcagacttgaagcccgagaatattatgctcgtggaccccgttcgccagccctaccgtgttaaagtaattgatttcggaagcgccagtcatgtgtctaaaaccgtatgttcgacctaccttcaatcacgatattaccgagccccagagattattctgggattaccattctgtgaagcaatcgacatgtggagcctcggctgtgtgatagcagagcttttcttgggttggcctctctaccctggtgcattggaatacgatcaaatccgctatatatcccagacgcaaggactgcctggtgagcaactcttgaatgtggggaccaaaagcacccgattcttctgtaaagaaactgacatgtcacacagcgggtggaggctgaagacactcgaggagcacgaggccgagacagggatgaagagcaaggaggcccgtaagtatatctttaatagtctagacgacgtggcccacgtgaacaccgtgatggaccttgaaggatctgatctcctggctgagaaagcagacagacgagagtttgtgagcctactgaaaaaaatgctccttatcgatgccgacctcagaataactcccgcagagacactgaatcatccattcgttaatatgaaacacttgctcgatttcccgcactctaatcatgtgaagtcctgttttcacattatggatatctgtaaatcacacctgaactcttgcgataccaacaaccataacaaaacctctcttcttaggcccgtggcaagttcctccaccgccacgcttactgcaaatttcaccaagattgggactcttagatcccaggccctgacaacctccgcccactctgtggtccaccacgggatcccactgcaggctggtacagcccagtttgggtgcggggatgccttccagcagacccttatcatttgcccacccgcaattcagggcatccctgcaacacatggtaagcctacatcatactctatcagggtagataacacggtgccacttgtcactcaggcaccggcagtgcagcctttacagattaggcctggagttctcagccagacatggtccggccgtactcaacagatgttagttcccgcttggcagcaagtgaccccgctggcgccagctacgaccacgctgacctccgagagtgtggcagggtcccaccgactgggcgactggggtaaaatgattagctgttctaatcattacaactccgtgatgccccagcccttactgacaaatcagattactctgagtgccccacagcctgtaagcgtcggcattgcccacgtagtctggcctcagccagccactaccaagaagaataagcagtgccagaaccgctcaaatagtctgcagaacactaacataccgcactctgccttcatttcaccaaaaataataaatggcaaagatgtcgaggaggtgtcctgcattgaaacccaggataaccaaaattccgaaggcgaggcacgcaactgctgtgagacatcaattagacaggacagcgacagctctgtgtctgacaagcagaggcaaaccattatcatcgcagatagcccaagccccgcagtatctgttattaccatcagctccgataccgacgaagaagagacctcacagagacacagtctgcgggaatgtaaaggaagcctagactgcgaggcctgtcaatccacactgaatattgaccgcatgtgcagtctgtctagtccagacagcactcttagcacctccagctcaggacaatcctcccccagtccgtgtaagcgcccaaatagtatgtccgatgaagaacaggaatctagttgtgatactgtggatggttctccaacatcggacagctccggtcatgatagcccatttgctgaatctacctttgtggaagacacccacgaaaacactgagctcgtgtcttccgccgacaccgagaccaagccagccgtctgcagcgtcgttgtgccacccgtcgaactagaaaatggccttaatgcagatgagcacatggcgaatacagattctatctgccagcccctgatcaaaggtcgcagcgctccaggacgtctaaaccagccgtctgctgtggggacgcgacagcagaagctcacttccgcttttcagcaacagcatctgaacttttcccaggttcagcatttcggttcaggacaccaggaatggaacggtaattttggacaccgccgacagcaggcctatattccaacaagcgtgacgagcaatcctttcacactgtctcatggttccccaaaccacactgctgtgcatgctcatcttgccggtaacacacacctgggcggtcagcctacactgctgccataccccagctcagcaaccttatcttcagcagccccagtggctcatttgcttgcctccccttgcacatcaaggcccatgctccagcaccccacatacaacatatctcaccctagtggcatcgtgcaccaggtaccagtcgggctcaatccgcgtctgctcccatcccccaccatccatcagactcagtataagcccattttccctcctcacagttatattgcagcatcacctgcctatacaggcttccccctgagcccaactaagctttcccagtacccctatatgtag

SEQ ID NO: 97771 - DNA, 3585 bp, Artificial Sequence
  derived and/or modified sequence
atggcttctcaagttctcgtttatccaccttatgtgtatcagacacagtcaagtgcattctgtagcgtgaagaaattaaaggtggaaccaagttcttgcgtattccaggagcgcaactaccccaggacctacgtgaatggtaggaacttcggcaattcacatccacccacaaagggctctgcgttccagacaaagatcccgttcaaccgaccacgcggacataatttctccctccaaacatccgccgtcgtgctgaagaacactgcgggtgcaaccaaggttatcgctgctcaggctcaacaggcacacgtacaagctccccaaatcggggcttggaggaaccggctccatttccttgagggccctcaaaggtgcgggctaaaaaggaaatccgaggagcttgataaccacagcagcgcaatgcaaatcgttgacgagctgtcaatcctgcctgccatgctgcagactaatatgggcaatccagtgaccgttgtaaccgcaaccactgggtcaaagcagaactgcactactggcgaaggggactatcagctggtacaacatgaagtgctatgctccatgaagaacacttatgaggtgcttgatttcttgggtagagggacattcggacaggtcgtgaagtgctggaaaagagggaccaacgagatcgtcgcgatcaagatattgaagaatcatccaagttacgcccgacagggccaaatagaggtttccattctggccaggctctcaacagagaatgcggacgaatacaattttgtaagagcttatgaatgcttccaacatcgcaatcacacttgtctggtgtttgagatgttggaacagaatctctacgactttttaaagcagaacaaattttcacccctccctttgaaagtgatccggccaatactgcagcaggtcgcaaccgccctcaagaagctaaagagtttaggactgatccacgccgacctgaagcctgaaaatatcatgctggtggacccagtgcggcagccttatcgggtcaaggtgatcgacttcggaagcgcatctcacgtctccaaaaccgtgtgttctacatacctccagtcaaggtattacagggcccctgagattatattgggtttgcccttctgcgaagcaattgatatgtggtctctcgggtgcgtgatcgccgaactattccttgggtggccactgtacccgggagccctggaatatgatcagatccgatacataagccaaactcagggactgccaggagagcagctcctgaacgtgggcacgaagagtaccagatttttctgcaaagagaccgacatgagccattctggctggaggctgaaaacactggaggagcatgaggcagaaaccggaatgaagtccaaggaagccaggaaatatattttcaattctctggatgacgtggcccacgtgaataccgtgatggacctggagggatccgacttgctggcagagaaggctgacagaagggaattcgtgtctctgctgaagaagatgctcctgattgatgcagaccttagaataaccccagctgagaccctgaatcaccctttcgtgaacatgaaacacctactcgactttccccattctaatcacgtaaagtcctgtttccacattatggacatttgcaaatctcatctcaactcatgtgacaccaacaatcataataaaacgagcctgctgcgccctgttgcatcctccagcaccgctacgttgactgccaactttaccaagatcggaaccctgaggtctcaggccctcaccacttccgcgcactccgtggtacatcacggcataccgctgcaggcaggaaccgcccagtttggctgcggtgacgccttccagcaaacgctcatcatctgccctccagccatccaaggaatcccagctacgcacggaaaaccaacatcctatagcatccgcgtggataataccgtaccgctggtcactcaggctcccgctgtccaacctctgcagataagaccaggtgttctgtctcagacttggtcaggtaggacccagcagatgttagtaccggcttggcaacaagtcacccccttggcgccagccacgactaccttgacaagtgagtctgttgccggaagccacagactcggcgactggggcaagatgattagctgttctaaccattacaatagtgtaatgccgcagccgctgttaacaaaccagatcaccttgtcagcaccccaacccgtgagcgtgggaattgctcacgttgtatggccacagcccgctaccacaaaaaagaataagcaatgtcagaatcgaagtaattcactgcagaacactaatataccacactctgcattcatcagtccaaaaattattaacggtaaggacgtggaagaggtttcatgtattgagacacaagacaaccagaatagcgagggcgaagccaggaactgctgtgaaacctccatccgtcaggatagtgattcatccgtgtctgacaagcaacgccaaacaataattattgctgattccccatcacctgccgtcagcgtaatcacaatctcttccgatactgacgaggaagagacatcccagcgacatagtctacgcgaatgtaaggggtctctggattgtgaagcctgccaaagcaccctgaacatagacaggatgtgttccctgtctagcccagactctaccttgagcacctcatccagtggacagtccagtccttcgccttgcaaacgccctaacagcatgtccgacgaagaacaagagagttcttgtgataccgtggatgggagcccaacctcagattcctctgggcatgactcacccttcgcagagtcgacatttgtggaagatacccatgagaatacggagctggtgtcgagcgccgacactgaaacaaagcctgctgtttgcagcgtcgtggttcctcccgtggagctggaaaacggcctcaatgcagatgagcacatggccaacaccgactcaatctgccagcctctgatcaaaggcaggagcgcacccggtaggctgaaccaacctagtgcagtcggaactaggcaacagaagttgacctctgccttccaacagcaacacctgaatttctctcaggttcaacacttcggttcagggcaccaagagtggaacggcaactttggccatcgcagacagcaagcctacatccccacatccgtgacgagtaaccccttcactttgtcccacgggagtccaaatcacacagccgtacacgctcacctcgcaggaaacactcatctggggggacagccgactttgctcccttacccttcctcagcaactctatcttccgccgcacctgtcgcgcatctgcttgccagcccctgtaccagcaggccaatgttacagcatcccacatacaacatctcccatcccagcgggattgtgcaccaggtgccggtaggccttaatccccgacttctgccatccccgacgatccatcaaacacagtacaagcccatctttccgccacactcttacattgctgcatcaccagcatacaccggctttcccctctcccctacaaagttaagccaatatccttacatgtag

SEQ ID NO: 97772 - DNA, 3585 bp, Artificial Sequence
  derived and/or modified sequence
atggccagccaggtgctggtgtaccccccctacgtgtaccagacccagagcagcgccttctgcagcgtgaagaagctgaaggtggagcccagcagctgcgtgttccaggagagaaactaccccagaacctacgtgaacggcagaaacttcggcaacagccacccccccaccaagggcagcgccttccagaccaagatccccttcaacagacccagaggccacaacttcagcctgcagaccagcgccgtggtgctgaagaacaccgccggcgccaccaaggtgatcgccgcccaggcccagcaggcccacgtgcaggccccccagatcggcgcctggagaaacagactgcacttcctggagggcccccagagatgcggcctgaagagaaagagcgaggagctggacaaccacagcagcgccatgcagatcgtggacgagctgagcatcctgcccgccatgctgcagaccaacatgggcaaccccgtgaccgtggtgaccgccaccaccggcagcaagcagaactgcaccaccggcgagggcgactaccagctggtgcagcacgaggtgctgtgcagcatgaagaacacctacgaggtgctggacttcctgggcagaggcaccttcggccaggtggtgaagtgctggaagagaggcaccaacgagatcgtggccatcaagatcctgaagaaccaccccagctacgccagacagggccagatcgaggtgagcatcctggccagactgagcaccgagaacgccgacgagtacaacttcgtgagagcctacgagtgcttccagcacagaaaccacacctgcctggtgttcgagatgctggagcagaacctgtacgacttcctgaagcagaacaagttcagccccctgcccctgaaggtgatcagacccatcctgcagcaggtggccaccgccctgaagaagctgaagagcctgggcctgatccacgccgacctgaagcccgagaacatcatgctggtggaccccgtgagacagccctacagagtgaaggtgatcgacttcggcagcgccagccacgtgagcaagaccgtgtgcagcacctacctgcagagcagatactacagagcccccgagatcatcctgggcctgcccttctgcgaggccatcgacatgtggagcctgggctgcgtgatcgccgagctgttcctgggctggcccctgtaccccggcgccctggagtacgaccagatcagatacatcagccagacccagggcctgcccggcgagcagctgctgaacgtgggcaccaagagcaccagattcttctgcaaggagaccgacatgagccacagcggctggagactgaagaccctggaggagcacgaggccgagaccggcatgaagagcaaggaggccagaaagtacatcttcaacagcctggacgacgtggcccacgtgaacaccgtgatggacctggagggcagcgacctgctggccgagaaggccgacagaagagagttcgtgagcctgctgaagaagatgctgctgatcgacgccgacctgagaatcacccccgccgagaccctgaaccaccccttcgtgaacatgaagcacctgctggacttcccccacagcaaccacgtgaagagctgcttccacatcatggacatctgcaagagccacctgaacagctgcgacaccaacaaccacaacaagaccagcctgctgagacccgtggccagcagcagcaccgccaccctgaccgccaacttcaccaagatcggcaccctgagaagccaggccctgaccaccagcgcccacagcgtggtgcaccacggcatccccctgcaggccggcaccgcccagttcggctgcggcgacgccttccagcagaccctgatcatctgcccccccgccatccagggcatccccgccacccacggcaagcccaccagctacagcatcagagtggacaacaccgtgcccctggtgacccaggcccccgccgtgcagcccctgcagatcagacccggcgtgctgagccagacctggagcggcagaacccagcagatgctggtgcccgcctggcagcaggtgacccccctggcccccgccaccaccaccctgaccagcgagagcgtggccggcagccacagactgggcgactggggcaagatgatcagctgcagcaaccactacaacagcgtgatgccccagcccctgctgaccaaccagatcaccctgagcgccccccagcccgtgagcgtgggcatcgcccacgtggtgtggccccagcccgccaccaccaagaagaacaagcagtgccagaacagaagcaacagcctgcagaacaccaacatcccccacagcgccttcatcagccccaagatcatcaacggcaaggacgtggaggaggtgagctgcatcgagacccaggacaaccagaacagcgagggcgaggccagaaactgctgcgagaccagcatcagacaggacagcgacagcagcgtgagcgacaagcagagacagaccatcatcatcgccgacagccccagccccgccgtgagcgtgatcaccatcagcagcgacaccgacgaggaggagaccagccagagacacagcctgagagagtgcaagggcagcctggactgcgaggcctgccagagcaccctgaacatcgacagaatgtgcagcctgagcagccccgacagcaccctgagcaccagcagcagcggccagagcagccccagcccctgcaagagacccaacagcatgagcgacgaggagcaggagagcagctgcgacaccgtggacggcagccccaccagcgacagcagcggccacgacagccccttcgccgagagcaccttcgtggaggacacccacgagaacaccgagctggtgagcagcgccgacaccgagaccaagcccgccgtgtgcagcgtggtggtgccccccgtggagctggagaacggcctgaacgccgacgagcacatggccaacaccgacagcatctgccagcccctgatcaagggcagaagcgcccccggcagactgaaccagcccagcgccgtgggcaccagacagcagaagctgaccagcgccttccagcagcagcacctgaacttcagccaggtgcagcacttcggcagcggccaccaggagtggaacggcaacttcggccacagaagacagcaggcctacatccccaccagcgtgaccagcaaccccttcaccctgagccacggcagccccaaccacaccgccgtgcacgcccacctggccggcaacacccacctgggcggccagcccaccctgctgccctaccccagcagcgccaccctgagcagcgccgcccccgtggcccacctgctggccagcccctgcaccagcagacccatgctgcagcaccccacctacaacatcagccaccccagcggcatcgtgcaccaggtgcccgtgggcctgaaccccagactgctgcccagccccaccatccaccagacccagtacaagcccatcttccccccccacagctacatcgccgccagccccgcctacaccggcttccccctgagccccaccaagctgagccagtacccctacatgtag

SEQ ID NO: 97773 - DNA, 1281 bp, Artificial Sequence
  derived and/or modified sequence
atgcacccactacagtgtgttctgcaagtgcagcggtctcttggctggggccctttagccagcgtgagctggctcagcttgcgcatgtgcagggcccactcaagcctgtcgtcgacaatgtgtccatcccccgagcgccaggaggatggtgcaaggaaggatttttcatctcgtttggctgctggccctactttccaacactttttaaaatccgcctctgccccccaggagaaactgagtagtgaagtggaggacccccctccatacctgatgatggatgagttactcgggagacagagaaaggtttatctggaaacatatgggtgtcagatgaacgtgaacgataccgagatcgcctggtccatcctgcagaagagtgggtacctgagaacatcaaatctacaggaagccgatgtgattctgctggtcacatgttctattagagagaaggcagagcagactatctggaatcgcctccaccaactgaaggcactgaagaccaggagacctcgctcaagggtgcccctcaggatcggcattctgggctgtatggccgaacgcctgaaagaagaaatcctgaatagagagaagatggtagacatccttgctgggcccgacgcctatagagacttgcctagactgttggcagttgctgaatctggacagcaagccgcaaatgtgttgcttagtctggatgagacatacgccgatgtcatgccggtccaaacttccgcctcagccacatcagctttcgtcagcatcatgcggggttgcgacaatatgtgttcatattgcatcgttccatttacccgcgggcgggagaggagtcggccaattgctagtatactcgaagaagtgaagaagttgagtgagcagggcctgaaggaggtcactctattgggccaaaatgtgaattccttcagggacaattctgaagtgcagtttaattcagcggtgccgacaaacttgtctaggggctttacgactaattacaaaaccaaacagggcggacttagattcgcacacctgctggaccaggtcagccgggtggatcccgaaatgcggattcggttcactagcccgcacccaaaggattttcccgacgaggtgctgcaactgatccatgagcgggataatatttgtaaacagatccatctgcccgcccagagcggatcgagccgcgtactggaggccatgaggcgtggatattcgcgagaggcctatgttgagttagttcaccacatcagagaatcaattcctgaggacactggtatatcttag

SEQ ID NO: 97774 - DNA, 1281 bp, Artificial Sequence
  derived and/or modified sequence
atgcaccccctgcagtgtgtgctgcaggtgcagaggagcctgggctggggccccctggcctctgtgtcctggctgagcctgaggatgtgccgggcccacagcagcctgagcagcaccatgtgccccagccctgagcggcaggaggatggagccaggaaggacttcagcagccggctggccgccggccccaccttccagcacttcctgaagagcgccagcgccccccaggagaagctgagcagcgaggtggaggaccccccaccctacctgatgatggatgagctgctgggccggcagaggaaggtgtacctggagacctacggctgccagatgaatgtgaatgacacagagatcgcctggagcatcctgcagaagagcggctacctgcggaccagcaacctgcaggaggctgatgtgatcctgctggtgacctgcagcatccgggagaaggccgagcagaccatctggaaccggctgcaccagctgaaggccctgaagacccggcggcccaggagccgggtgcccctgcgcatcggcatcctgggctgcatggccgagcggctgaaggaggagatcctgaaccgggagaagatggtggacatcctggccggcccagatgcctacagagacctgccccggctgctggccgtggccgagagcggccagcaggccgccaacgtgctgctgagcctggatgagacctatgcagatgtgatgcctgtgcagaccagcgccagcgccaccagcgcctttgtgtccatcatgaggggctgtgacaacatgtgcagctactgcatcgtgcccttcacccggggccgggagaggagccggcccatcgccagcatcctggaggaggtgaagaagctgtctgagcagggcctgaaggaggtgaccctgctgggccagaatgtgaacagcttccgggacaacagcgaggtgcagttcaacagcgctgtgcccaccaacctgagccggggcttcaccaccaactacaagaccaagcagggcggcctgcgctttgcccacctgctggaccaggtgtcccgggtggaccctgagatgaggatccgcttcaccagcccccaccccaaggacttcccagatgaggtgctgcagctgattcatgagcgggacaacatctgcaagcagatccacctgcctgcccagagcggcagcagccgggtgctggaggccatgaggcggggctacagccgggaggcctacgtggagctggtgcaccacatccgggagagcatccctgaggacaccggcatctcctag

SEQ ID NO: 97775 - DNA, 1281 bp, Artificial Sequence
  derived and/or modified sequence
atgcaccccctgcagtgcgtgctgcaggtgcagcggagcctgggctgggggcccctggcatccgtatcctggctgtccctgagaatgtgcagagctcattctagcctttcgagcaccatgtgtccaagtcccgaaagacaggaggatggcgctcggaaagacttcagttcgcgtctggctgctggccccacatttcagcactttctgaagtccgccagcgcccctcaggagaaattatcttctgaagtagaggacccacccccctacctgatgatggatgaattgcttgggcggcagcggaaggtgtacctagagacatatggttgtcaaatgaatgtcaacgataccgagatagcctggagcatcttgcagaaatccggatacctccggacgtccaacctgcaggaggccgacgtaattttactggtcacttgctctatacgagaaaaggctgaacagaccatatggaacaggctacaccagctgaaggcccttaagacaagaagaccacggtcacgagtgcctctgaggattggaatactcgggtgcatggcggagaggctgaaggaggagatcctgaatcgcgagaagatggtggacatcctcgccggtcccgacgcttatcgcgacctgcccaggctgctcgccgttgcagagtccggacagcaagccgccaacgtcctgttgtctctcgatgaaacctatgctgatgttatgcccgtccagacaagcgcctccgccacctcagcattcgtgagcatcatgaggggctgtgacaacatgtgttcttactgtatcgtacccttcacacggggaagagaacgatctcggccgattgccagcatcctcgaggaagttaaaaagctgagtgaacaagggctgaaagaggtaactctcctcggccagaatgttaatagtttccgggacaactccgaagtccaattcaactccgccgttcccactaacttgagccgcggctttaccactaactacaagaccaaacaaggcggcctgagatttgcacacctgctggatcaagtaagccgagtggaccccgaaatgcggataagattcacgagtcctcatcctaaagactttcctgatgaagtcctgcaactaatacacgagagggataatatttgtaagcaaattcatttgcctgcacagtctggatcatcccgggttctggaagcgatgagaaggggatactctcgcgaagcctacgtagaactcgttcaccacatacgcgagtccatcccagaagataccgggattagctag

SEQ ID NO: 97776 - DNA, 1281 bp, Artificial Sequence
  derived and/or modified sequence
atgcatcccctccaatgtgtcctgcaagtacagcggtctctgggctgggggccactcgccagcgtgtcttggctctcactgagaatgtgtcgagcgcatagttccctcagctccactatgtgcccatcgcctgagcgccaagaagatggagcacgcaaggacttctcttctcgcctggccgctggacccacattccagcactttttgaagagcgcaagcgccccacaggagaagttgtcttctgaagttgaagatcctcctccttacttgatgatggacgagctgctgggaaggcagcgcaaggtgtacctggagacctatggttgccaaatgaacgtcaacgacactgaaatcgcctggtctatcctgcagaagtctggctacctgaggacttccaatctgcaagaagccgacgttatccttctggtcacctgcagtatccgggaaaaggccgaacagactatctggaataggctccatcagctgaaggcactgaagacccgtcgccctcggtcaagggtgccactgagaattggaatcctggggtgtatggctgaaaggctcaaggaagagatactcaaccgggagaaaatggtggatattctcgctggcccagacgcctaccgtgatctcccccgactgctggccgtggcggagtctgggcagcaggctgctaatgtcctcctcagtctggatgaaacctatgccgacgtcatgcccgtgcagacctctgccagtgcaacatccgccttcgtctctataatgagaggttgtgacaatatgtgcagctactgtatcgttcctttcaccagggggagagaaagatcccgacctattgccagtattctggaagaggtgaagaagctgtcagaacaggggttaaaagaggttactctgctgggtcagaacgtcaacagctttcgggataacagcgaggtccagttcaactcagctgtgcccacaaacctcagcagaggcttcaccaccaactacaaaacaaaacagggagggctgagatttgcacatctcctcgaccaagtttctagagtggacccggaaatgcgaatcagatttacctctccacatccaaaagattttcccgacgaggtgcttcaactaatccacgagcgggataacatttgcaaacagattcatctccctgcccagtcaggatcctctagggtcctcgaggccatgagacggggttattccagggaagcttatgtagagctggtccatcacatccgtgagagtattcctgaggatactggcatatcttag

SEQ ID NO: 97777 - DNA, 1791 bp, Artificial Sequence
  derived and/or modified sequence
gtgtatgaacgcagcggcggacctgtgaggggatccgacttgccggcagaacttacgctgcgggaccccgggcactgttgctgctgcgggagactgtgggctgtttagtgccatgcaccctttacagtgtgtcctccaagtgcagaggtctctggggtggggaccattggcctctgtgtcttggctgtcgctgaggatgtgcagggcacacagcagtctctctagtaccatgtgtcccagtccagagaggcaggaggatggagctcggaaggatttcagctccaggctggctgctggaccgacttttcaacattttttaaaaagtgcctcagctcctcaggagaagctgtcttcagaagtggaagacccacctccctatctcatgatggatgaacttcttggaaggcagagaaaagtctacctcgagacctatggctgccagatgaatgtgaatgacacagagatagcctggtccatcttacagaagagtggctacctgcggaccagtaacctccaagaggcagatgtgattctccttgtcacatgctctatcagggagaaggctgagcagaccatctggaaccgtttacatcagcttaaagccttgaagacaaggcggccccgctcccgggttcctctgaggattggaattctaggctgcatggctgagaggttgaaggaggagattctcaacagagagaaaatggtagatattttggctggtcctgatgcctaccgggaccttccccggctgctggctgttgctgagtcgggccagcaagctgccaacgtgctgctctctctggacgagacctatgctgatgtcatgccagtccagacaagcgccagtgccacgtctgcctttgtgtcaatcatgcgaggctgtgacaacatgtgtagctactgcattgttcctttcacccggggcagggagaggagtcggcctattgcctccattctagaggaagtgaagaagctttctgagcaggggctgaaagaagtgacacttcttggtcagaatgttaatagttttcgggacaattcggaggtccagttcaacagtgcagtgcctaccaatctcagtcgtggctttaccaccaactataaaaccaagcaaggaggacttcgttttgctcatcttctggatcaggtctccagagtagatcctgaaatgaggatccgttttacctctccccaccccaaggattttcctgatgaggttctgcagctgattcatgagagagataacatctgtaaacagatccacctgccagcccagagtggaagcagccgtgtgttggaggccatgcggaggggatattcaagagaagcttatgtggagttagttcaccatattagagaatctattccagaagacacgggcatatcataggctgaaggatgatgtcccggaagaggtaaaattaaggcgtttggaggaactcatcactatcttccgagaagaagcaacaaaagccaatcagacctctgtgggctgtacccagttggtgctagtggaagggctcagtaaacgctctgccactgacctgtgtggcaggaatgatggaaaccttaaggtgatcttccctgatgcagagatggaggatgtcaataaccctgggctcagggtcagagcccagcctggggactatgtgctggtgaaggtgaggagtccttttgggcttttggcttgcactgtgaaatgagtgttggtttggatatttgtggtaataaagttttttcctagagacacattttagtaaaataaaaatcccctctcaaccagtacaa

SEQ ID NO: 97778 - DNA, 1281 bp, Artificial Sequence
  derived and/or modified sequence
atgcaccccctgcagtgcgtgctgcaggtgcagagaagcctgggctggggccccctggccagcgtgagctggctgagcctgagaatgtgcagagcccacagcagcctgagcagcaccatgtgccccagccccgagagacaggaggacggcgccagaaaggacttcagcagcagactggccgccggccccaccttccagcacttcctgaagagcgccagcgccccccaggagaagctgagcagcgaggtggaggacccccccccctacctgatgatggacgagctgctgggcagacagagaaaggtgtacctggagacctacggctgccagatgaacgtgaacgacaccgagatcgcctggagcatcctgcagaagagcggctacctgagaaccagcaacctgcaggaggccgacgtgatcctgctggtgacctgcagcatcagagagaaggccgagcagaccatctggaacagactgcaccagctgaaggccctgaagaccagaagacccagaagcagagtgcccctgagaatcggcatcctgggctgcatggccgagagactgaaggaggagatcctgaacagagagaagatggtggacatcctggccggccccgacgcctacagagacctgcccagactgctggccgtggccgagagcggccagcaggccgccaacgtgctgctgagcctggacgagacctacgccgacgtgatgcccgtgcagaccagcgccagcgccaccagcgccttcgtgagcatcatgagaggctgcgacaacatgtgcagctactgcatcgtgcccttcaccagaggcagagagagaagcagacccatcgccagcatcctggaggaggtgaagaagctgagcgagcagggcctgaaggaggtgaccctgctgggccagaacgtgaacagcttcagagacaacagcgaggtgcagttcaacagcgccgtgcccaccaacctgagcagaggcttcaccaccaactacaagaccaagcagggcggcctgagattcgcccacctgctggaccaggtgagcagagtggaccccgagatgagaatcagattcaccagcccccaccccaaggacttccccgacgaggtgctgcagctgatccacgagagagacaacatctgcaagcagatccacctgcccgcccagagcggcagcagcagagtgctggaggccatgagaagaggctacagcagagaggcctacgtggagctggtgcaccacatcagagagagcatccccgaggacaccggcatcagctag

SEQ ID NO: 97779 - protein, 510 aa, Artificial Sequence
  derived and/or modified sequence
MHPLQCVLQVQRSLGWGPLASVSWLSLRMCRAHSSLSSTMCPSPERQEDGARKDFSSRLAAGPTFQHFLKSASAPQEKLSSEVEDPPPYLMMDELLGRQRKVYLETYGCQMNVNDTEIAWSILQKSGYLRTSNLQEADVILLVTCSIREKAEQTIWNRLHQLKALKTRRPRSRVPLRIGILGCMAERLKEEILNREKMVDILAGPDAYRDLPRLLAVAESGQQAANVLLSLDETYADVMPVQTSASATSAFVSIMRGCDNMCSYCIVPFTRGRERSRPIASILEEVKKLSEQVLQLIHERDNICKQIHLPAQSGSSRVLEAMRRGYSREAYVELVHHIRESIPGVSLSSDFIAGFCGETEEDHVQTVSLLREVQYNMGFLFAYSMRQKTRAYHRLKDDVPEEVKLRRLEELITIFREEATKANQTSVGCTQLVLVEGLSKRSATDLCGRNDGNLKVIFPDAEMEDVNNPGLRVRAQPGDYVLVKITSASSQTLRGHVLCRTTLRDSSAYC

SEQ ID NO: 97780 - protein, 327 aa, Artificial Sequence
  derived and/or modified sequence
MNVNDTEIAWSILQKSGYLRTSNLQEADVILLVTCSIREKAEQTIWNRLHQLKALKTRRPRSRVPLRIGILGCMAERLKEEILNREKMVDILAGPDAYRDLPRLLAVAESGQQAANVLLSLDETYADVMPVQTSASATSAFVYSREAYVELVHHIRESIPGVSLSSDFIAGFCGETEEDHVQTVSLLREVQYNMGFLFAYSMRQKTRAYHRLKDDVPEEVKLRRLEELITIFREEATKANQTSVGCTQLVLVEGLSKRSATDLCGRNDGNLKVIFPDAEMEDVNNPGLRVRAQPGDYVLVKITSASSQTLRGHVLCRTTLRDSSAYC

SEQ ID NO: 97781 - DNA, 1533 bp, Artificial Sequence
  derived and/or modified sequence
atgcatcctcttcaatgtgtgctgcaggtccagcgctccctgggatggggcccgctagcatcagtttcctggctgtccctgcgaatgtgccgcgcgcattcaagcctgtcttccaccatgtgcccctctcccgagcgccaggaggatggcgcccgcaaggatttctcctccagactggcagccggtccaacatttcaacactttctgaaatctgcttcggcaccccaggagaagctgagttccgaagtcgaggatcctcccccttatctgatgatggatgagctgctcggccgtcaaaggaaggtttatctcgagacatacggatgtcagatgaacgttaacgatacagaaatcgcttggagtatcctacagaagagtgggtatctgaggacgtccaatctccaggaggccgatgtgatcctgctcgtgacctgttccatcagagagaaggccgaacagaccatttggaatcggctgcaccagctgaaggctctgaaaacccgcaggcctagaagcagagtgcctttgaggattggcattctaggttgtatggcagaacggctgaaagaggagatcctcaatcgagaaaaaatggtcgacatactcgcaggacccgatgcttaccgcgacctcccacggctcctggcggtcgcagagtctgggcagcaggcggcaaacgtgctcttaagtctggacgagacttacgccgatgttatgcccgtccagacatctgcatctgcaacaagtgcgttcgtgagtatcatgcgggggtgcgataatatgtgctcctattgcattgttccttttaccagggggcgtgagcggagtaggcccatcgccagtatcttggaagaagtgaagaaacttagtgagcaggtgctccagctgatacacgagcgcgacaacatttgcaagcagatccatcttccagcacagagcggttccagtcgtgtgttagaagccatgaggcgcggttattctagggaggcttatgtggagctggtgcaccatatcagggaaagtatccccggagtgtccttgtcttcggattttattgcgggattctgtggggagactgaggaggatcacgtgcagacagtgtctttgcttcgagaggttcagtataacatgggttttctattcgcctacagcatgcgtcagaaaacgagggcgtaccacaggctcaaggacgacgtcccagaggaagtgaaattgaggagactggaggaactgatcacaatctttcgggaagaagccacaaaagccaatcaaacatcagtgggatgcacacaactggtcctcgtagagggactgagcaagaggtccgccaccgacctgtgcggccgaaacgatgggaacctgaaggtgattttccccgacgccgagatggaagacgtcaacaaccctgggttgagggtgagagcccaacccggagactacgtgctcgttaaaatcacgagcgcatcgtcacaaacactgagagggcacgtgctgtgtcggacaactctcagagacagcagcgcctattgctag

SEQ ID NO: 97782 - DNA, 1533 bp, Artificial Sequence
  derived and/or modified sequence
atgcaccccctgcagtgtgtgctgcaggtgcagaggagcctgggctggggccccctggcctctgtgtcctggctgagcctgaggatgtgccgggcccacagcagcctgagcagcaccatgtgccccagccctgagcggcaggaggatggagccaggaaggacttcagcagccggctggccgccggccccaccttccagcacttcctgaagagcgccagcgccccccaggagaagctgagcagcgaggtggaggaccccccaccctacctgatgatggatgagctgctgggccggcagaggaaggtgtacctggagacctacggctgccagatgaatgtgaatgacacagagatcgcctggagcatcctgcagaagagcggctacctgcggaccagcaacctgcaggaggctgatgtgatcctgctggtgacctgcagcatccgggagaaggccgagcagaccatctggaaccggctgcaccagctgaaggccctgaagacccggcggcccaggagccgggtgcccctgcgcatcggcatcctgggctgcatggccgagcggctgaaggaggagatcctgaaccgggagaagatggtggacatcctggccggcccagatgcctacagagacctgccccggctgctggccgtggccgagagcggccagcaggccgccaacgtgctgctgagcctggatgagacctatgcagatgtgatgcctgtgcagaccagcgccagcgccaccagcgcctttgtgtccatcatgaggggctgtgacaacatgtgcagctactgcatcgtgcccttcacccggggccgggagaggagccggcccatcgccagcatcctggaggaggtgaagaagctgtctgagcaggtgctgcagctgatccacgagcgggacaacatctgcaagcagatccacctgcctgcccagagcggcagcagccgggtgctggaggccatgagaagaggctacagccgggaggcctacgtggagctggtgcaccacatccgggagagcatccctggggtgtccctgagcagtgacttcatcgccggcttctgtggggagacagaagaagatcatgtgcagacagtgtccctgctgcgggaggtgcagtacaacatgggcttcctgtttgcctacagcatgaggcagaagacccgggcctaccaccggctgaaggatgatgtgcctgaggaggtgaagctgcggcggctggaggagctgatcaccatcttccgggaggaggccaccaaggccaaccagacctctgtgggctgcacccagctggtgctggtggagggcctgagcaagaggtctgccacagacctgtgtggcagaaatgatggcaacctgaaggtgatcttcccagatgctgagatggaggatgtgaacaaccctggcctgcgggtgcgggcccagcccggggactatgtgctggtgaagatcaccagcgccagcagccagaccctgcggggccacgtgctgtgcaggaccaccctgcgggacagcagcgcctactgctag

SEQ ID NO: 97783 - DNA, 1533 bp, Artificial Sequence
  derived and/or modified sequence
atgcaccccctgcagtgcgtgctgcaggtgcagcggagcctgggctgggggccactggcctccgtgtcttggctgagtttacgcatgtgccgggctcactcttcactaagtagcacgatgtgccctagccctgagcgacaggaggatggcgctaggaaggacttctcatcacgactggctgccggccccacatttcagcacttcctgaagagcgcctccgccccccaggaaaaacttagcagcgaggtggaggatcccccaccttacttgatgatggacgagctgctcgggcggcagagaaaggtatatttggagacatacggttgtcagatgaacgtgaacgacacagaaatcgcctggtctatattacagaaatcgggctatctgcggacgtccaaccttcaggaggcagacgttatcctgctggttacgtgttctattcgggagaaggcggagcaaacaatttggaaccgtctgcatcagctgaaagcactgaagacacggcgtcctaggtcaagagtaccattgcggataggcattctgggctgcatggctgagaggttgaaagaagagattttaaaccgggagaaaatggtagacattcttgctggccccgacgcataccgggatctaccccgacttctggctgtggctgagagtggccagcaggcagcgaatgtcctcctttctctggatgagacgtacgctgacgtgatgcctgtgcaaacttcggccagcgccacatctgcctttgttagcataatgagaggctgtgataacatgtgttcttattgcattgtacccttcacccgagggcgagagagaagtcgtccgatagccagcattctcgaagaggtaaaaaagctgtcagaacaagttctgcaacttatacacgagcgggacaacatttgcaagcagattcatttgccagctcagtcaggcagctctcgcgtacttgaagctatgaggaggggatacagccgagaagcctacgtggaactggtacaccacatcagggaatcaatacccggcgtgtccctgagttccgattttattgccggcttctgcggagagaccgaggaagaccacgtgcagactgtctccctacttcgtgaagtgcagtataatatgggctttttgttcgcctacagcatgcgccagaagaccagggcttatcatagactgaaggatgacgtacccgaggaggtcaagctaaggcggttagaagagctcatcactatcttccgggaggaagcgactaaggcgaatcagacctccgtgggttgtacccagctcgttcttgtcgagggcttaagtaaacgctccgctacagatctgtgcgggcggaatgacggtaacctgaaagtaattttccccgatgcagagatggaggacgttaacaacccagggttgcgcgtgcgtgctcagcctggcgactacgtcctggtgaagatcacatccgcatccagccaaacacttcgaggtcacgtgctgtgtcgcacaaccctaagggacagctccgcgtactgctag

SEQ ID NO: 97784 - DNA, 1533 bp, Artificial Sequence
  derived and/or modified sequence
atgcatcctctgcagtgcgtcctgcaagtgcaacgttccctcggctggggacccttggccagcgtgagctggcttagtttacgtatgtgcagagctcatagttcattgtccagtaccatgtgcccctcgcctgaacggcaggaagatggggctcgaaaagatttcagttccagactcgctgccggacctaccttccagcatttcttgaaatctgcctctgccccacaggaaaaactgtcctctgaggtggaggaccctccaccatacctgatgatggacgaactgctcggacggcagcggaaagtgtatttagaaacttacggatgccagatgaatgtaaacgatacagagatcgcgtggtctatcttgcagaaaagcggctatcttaggacttcaaatcttcaagaagctgatgtaattctcttagtcacttgctcaataagggagaaggcggaacagacaatctggaatcggctgcaccaactgaaagctctgaaaaccagacgcccaaggagccgcgtcccactgcgcataggcattctggggtgtatggccgaacgcttgaaggaagagatcctgaatagggagaagatggtggatatcctggccggaccagatgcttaccgggacctgccacgcctgctggccgtggctgagagtggccaacaggccgcaaacgttttgctgagtcttgacgagacatatgctgatgtcatgcccgtgcagacctccgctagcgccacgagtgcattcgttagcatcatgcggggttgtgataacatgtgttcttattgtattgtcccattcacgcgcggacgggaaaggagtagacccattgcctctatcctcgaagaagtgaaaaaactgagcgagcaagtgctgcagttaatccatgaacgcgataacatctgcaagcagattcatctcccagcacaatcaggatcaagccgggtgctggaagccatgaggcgaggttacagccgagaagcctacgtagagcttgtacaccatatcagagaaagcatcccaggggtcagcctcagttctgacttcatagccggattctgtggggaaaccgaagaggatcatgttcagacagtatctctactcagggaagtacagtacaacatggggtttttgttcgcatattccatgcggcagaagacgagggcttaccaccgacttaaggatgacgtcccggaggaggttaagttgaggcgcttggaagagctgattaccattttccgagaggaagctaccaaagctaatcagacatcggtagggtgcacacagctggtgctggtggaagggctgtccaagagatcggcaacggacctgtgtggacggaatgacggaaatctgaaagtcattttccccgacgcagagatggaagacgtgaacaacccaggccttagggtgcgcgctcaaccgggtgattatgtgttagtgaaaatcacgtcagcctctagtcaaactctgcgcggtcacgtgttgtgtaggaccacactgagagattcctctgcatattgctag

SEQ ID NO: 97785 - DNA, 1891 bp, Artificial Sequence
  derived and/or modified sequence
agcatgacccggcctgaagtagcggcggaacggaagtcgcttgtgtatgaacgcagcggcggacctgtgaggggatccgacttgccggcagaacttacgctgcgggaccccgggcactgttgctgctgcgggagactgtgggctgtttagtgccatgcaccctttacagtgtgtcctccaagtgcagaggtctctggggtggggaccattggcctctgtgtcttggctgtcgctgaggatgtgcagggcacacagcagtctctctagtaccatgtgtcccagtccagagaggcaggaggatggagctcggaaggatttcagctccaggctggctgctggaccgacttttcaacattttttaaaaagtgcctcagctcctcaggagaagctgtcttcagaagtggaagacccacctccctatctcatgatggatgaacttcttggaaggcagagaaaagtctacctcgagacctatggctgccagatgaatgtgaatgacacagagatagcctggtccatcttacagaagagtggctacctgcggaccagtaacctccaagaggcagatgtgattctccttgtcacatgctctatcagggagaaggctgagcagaccatctggaaccgtttacatcagcttaaagccttgaagacaaggcggccccgctcccgggttcctctgaggattggaattctaggctgcatggctgagaggttgaaggaggagattctcaacagagagaaaatggtagatattttggctggtcctgatgcctaccgggaccttccccggctgctggctgttgctgagtcgggccagcaagctgccaacgtgctgctctctctggacgagacctatgctgatgtcatgccagtccagacaagcgccagtgccacgtctgcctttgtgtcaatcatgcgaggctgtgacaacatgtgtagctactgcattgttcctttcacccggggcagggagaggagtcggcctattgcctccattctagaggaagtgaagaagctttctgagcaggttctgcagctgattcatgagagagataacatctgtaaacagatccacctgccagcccagagtggaagcagccgtgtgttggaggccatgcggaggggatattcaagagaagcttatgtggagttagttcaccatattagagaatctattccaggtgtgagcctcagcagcgatttcattgctggcttttgtggtgagacggaggaagatcacgtccagacagtctctttgctccgggaagttcagtacaacatgggcttcctctttgcctacagcatgagacagaagacacgggcatatcataggctgaaggatgatgtcccggaagaggtaaaattaaggcgtttggaggaactcatcactatcttccgagaagaagcaacaaaagccaatcagacctctgtgggctgtacccagttggtgctagtggaagggctcagtaaacgctctgccactgacctgtgtggcaggaatgatggaaaccttaaggtgatcttccctgatgcagagatggaggatgtcaataaccctgggctcagggtcagagcccagcctggggactatgtgctggtgaagatcacctcagccagttctcagacacttaggggacatgttctctgcaggaccactctgagggactcttctgcatattgctgacctgagaggatggcctcagagctgacttgggcaatcctccccaacaggaaggggagacattgcctgccactgaggaaacaggtcatgaaggtggagataagctgcaaggggcgaagcaactttatgtcagtggaaaacgtgtctctttaaagctgctatgtgaacagcttttacagtcattaaatttacctaaactaaggttaa

SEQ ID NO: 97786 - DNA, 1628 bp, Artificial Sequence
  derived and/or modified sequence
gtgtatgaacgcagcggcggacctgtgaggggatccgacttgccggcagaacttacgctgcgggaccccgggcactgttgctgctgcgggagactgtgggctgtttagtgccatgcaccctttacagtgtgtcctccaagtgcagaggtctctggggtggggaccattggcctctgtgtcttggctgtcgctgaggatgtgcagggcacacagcagtctctctagtaccatgtgtcccagtccagagaggcaggaggatggagctcggaaggatttcagctccaggctggctgctggaccgacttttcaacattttttaaaaagtgcctcagctcctcaggagaagctgtcttcagaagtggaagacccacctccctatctcatgatggatgaacttcttggaaggcagagaaaagtctacctcgagacctatggctgccagatgaatgtgaatgacacagagatagcctggtccatcttacagaagagtggctacctgcggaccagtaacctccaagaggcagatgtgattctccttgtcacatgctctatcagggagaaggctgagcagaccatctggaaccgtttacatcagcttaaagccttgaagacaaggcggccccgctcccgggttcctctgaggattggaattctaggctgcatggctgagaggttgaaggaggagattctcaacagagagaaaatggtagatattttggctggtcctgatgcctaccgggaccttccccggctgctggctgttgctgagtcgggccagcaagctgccaacgtgctgctctctctggacgagacctatgctgatgtcatgccagtccagacaagcgccagtgccacgtctgcctttgtatattcaagagaagcttatgtggagttagttcaccatattagagaatctattccaggtgtgagcctcagcagcgatttcattgctggcttttgtggtgagacggaggaagatcacgtccagacagtctctttgctccgggaagttcagtacaacatgggcttcctctttgcctacagcatgagacagaagacacgggcatatcataggctgaaggatgatgtcccggaagaggtaaaattaaggcgtttggaggaactcatcactatcttccgagaagaagcaacaaaagccaatcagacctctgtgggctgtacccagttggtgctagtggaagggctcagtaaacgctctgccactgacctgtgtggcaggaatgatggaaaccttaaggtgatcttccctgatgcagagatggaggatgtcaataaccctgggctcagggtcagagcccagcctggggactatgtgctggtgaagatcacctcagccagttctcagacacttaggggacatgttctctgcaggaccactctgagggactcttctgcatattgctgacctgagaggatggcctcagagctgacttgggcaatcctccccaacaggaaggggagacattgcctgccactgaggaaacaggtcatgaaggtggagataagctgcaaggggcgaagcaactttatgtcagtggaaaacgtgtctctttaaagctgctatgtgaacagcttttacagtcattaaatttacctaaactaaggtt

SEQ ID NO: 97787 - DNA, 1533 bp, Artificial Sequence
  derived and/or modified sequence
atgcaccccctgcagtgcgtgctgcaggtgcagagaagcctgggctggggccccctggccagcgtgagctggctgagcctgagaatgtgcagagcccacagcagcctgagcagcaccatgtgccccagccccgagagacaggaggacggcgccagaaaggacttcagcagcagactggccgccggccccaccttccagcacttcctgaagagcgccagcgccccccaggagaagctgagcagcgaggtggaggacccccccccctacctgatgatggacgagctgctgggcagacagagaaaggtgtacctggagacctacggctgccagatgaacgtgaacgacaccgagatcgcctggagcatcctgcagaagagcggctacctgagaaccagcaacctgcaggaggccgacgtgatcctgctggtgacctgcagcatcagagagaaggccgagcagaccatctggaacagactgcaccagctgaaggccctgaagaccagaagacccagaagcagagtgcccctgagaatcggcatcctgggctgcatggccgagagactgaaggaggagatcctgaacagagagaagatggtggacatcctggccggccccgacgcctacagagacctgcccagactgctggccgtggccgagagcggccagcaggccgccaacgtgctgctgagcctggacgagacctacgccgacgtgatgcccgtgcagaccagcgccagcgccaccagcgccttcgtgagcatcatgagaggctgcgacaacatgtgcagctactgcatcgtgcccttcaccagaggcagagagagaagcagacccatcgccagcatcctggaggaggtgaagaagctgagcgagcaggtgctgcagctgatccacgagagagacaacatctgcaagcagatccacctgcccgcccagagcggcagcagcagagtgctggaggccatgagaagaggctacagcagagaggcctacgtggagctggtgcaccacatcagagagagcatccccggcgtgagcctgagcagcgacttcatcgccggcttctgcggcgagaccgaggaggaccacgtgcagaccgtgagcctgctgagagaggtgcagtacaacatgggcttcctgttcgcctacagcatgagacagaagaccagagcctaccacagactgaaggacgacgtgcccgaggaggtgaagctgagaagactggaggagctgatcaccatcttcagagaggaggccaccaaggccaaccagaccagcgtgggctgcacccagctggtgctggtggagggcctgagcaagagaagcgccaccgacctgtgcggcagaaacgacggcaacctgaaggtgatcttccccgacgccgagatggaggacgtgaacaaccccggcctgagagtgagagcccagcccggcgactacgtgctggtgaagatcaccagcgccagcagccagaccctgagaggccacgtgctgtgcagaaccaccctgagagacagcagcgcctactgctag

SEQ ID NO: 97788 - protein, 705 aa, Artificial Sequence
  derived and/or modified sequence
MQLGEQLLVSSVNLPGAHFYPLESARGGSGGSAGHLPSAAPSPQKLDLDKASKKFSGSLSCEAVSGEPAAASAGAPAAMLSDTDAGDAFASAAAVAKPGPPDGRKGSPCGEEELPSAAAAAAAAAAAAAATARYSMDSLSSERYYLQSPGPQGSELAAPCSLFPYQAAAGAPHGPVYPAPNGARYPYGSMLPPGGFPAAVCPPGRAQFGPGAGAGSGAGGSSGGGGGPGTYQYSQGAPLYGPYPGAAAAGSCGGLGGLGVPGSGFRAHVYLCNRPLWLKFHRHQTEMIITKQGRRMFPFLSFNINGLNPTAHYNVFVEVVLADPNHWRFQGGKWVTCGKADNNMQGNKMYVHPESPNTGSHWMRQEISFGKLKLTNNKGANNNNTQMIVLQSLHKYQPRLHIVEVTEDGVEDLNEPSKTQTFTFSETQFIAVTAYQNTDITQLKIDHNPFAKGFRDNYDSMYTASENDRLTPSPTDSPRSHQIVPGGRYGVQSFFPEPFVNTLPQARYYNGERTVPQTNGLLSPQQSEEVANPPQRWLVTPVQQPGTNKLDISSYESEYTSSTLLPYGIKSLPLQTSHALGYYPDPTFPAMAGWGGRGSYQRKMAAGLPWTSRTSPTVFSEDQLSKEKVKEEIGSSWIETPPSIKSLDSNDSGVYTSACKRRRLSPSNSSNENSPSIKCEDINAEEYSKDTSKGMGGYYAFYTTP

SEQ ID NO: 97789 - protein, 570 aa, Artificial Sequence [sequence omitted]

SEQ ID NO: 97790 - protein, 410 aa, Artificial Sequence
  derived and/or modified sequence
MFPFLSFNINGLNPTAHYNVFVEVVLADPNHWRFQGGKWVTCGKADNNMQGNKMYVHPESPNTGSHWMRQEISFGKLKLTNNKGANNNNTQMIVLQSLHKYQPRLHIVEVTEDGVEDLNEPSKTQTFTFSETQFIAVTAYQNTDITQLKIDHNPFAKGFRDNYDSMYTASENDRLTPSPTDSPRSHQIVPGGRYGVQSFFPEPFVNTLPQARYYNGERTVPQTNGLLSPQQSEEVANPPQRWLVTPVQQPGTNKLDISSYESEYTSSTLLPYGIKSLPLQTSHALGYYPDPTFPAMAGWGGRGSYQRKMAAGLPWTSRTSPTVFSEDQLSKEKVKEEIGSSWIETPPSIKSLDSNDSGVYTSACKRRRLSPSNSSNENSPSIKCEDINAEEYSKDTSKGMGGYYAFYTTP

SEQ ID NO: 97791 - DNA, 2118 bp, Artificial Sequence
  derived and/or modified sequence
atgcagttgggcgagcagctgctggtgtcttcagtgaatttgccaggggctcacttttacccactggagtctgctagaggaggatcaggaggctccgctggccatctgcccagcgcggctccctccccgcaaaaactcgacctcgataaagcctctaagaagttctcaggttctctgtcctgtgaagcagtctcaggcgagcccgccgctgcgtccgccggcgcccctgccgccatgctgtcggacacagatgccggagatgccttcgcaagtgccgccgcggtcgctaagcctgggcctcccgacggtaggaaaggaagtccttgtggcgaggaggaactgccttcagcggctgcagccgcagccgccgctgctgcggcagccgcagccactgcccgttattctatggacagcttgtcaagtgagcggtattacctgcaatcacctgggcctcagggatccgaactggctgccccctgtagtcttttcccatatcaggcagccgcaggtgcgcctcatggtcccgtatatcctgctcccaacggtgcacggtatccgtacggttcaatgctgcctccgggcgggttccctgccgccgtttgcccccccggacgagcccagttcgggccaggagctggcgccggctctggtgccggcggcagcagtggcggcggcggcgggccaggtacctaccagtacagccagggtgcccccctgtacggcccatatcctggagccgcagcggcaggctcatgcggggggttgggagggctcggcgttcctggtagcggtttccgcgcccatgtttacctgtgtaatcggcctctgtggcttaagttccaccggcaccagaccgagatgatcattactaagcagggtcgtcgcatgtttccattcctcagctttaatatcaatggtctcaaccctacagctcattataatgtgtttgtcgaagtcgttttagccgatccaaatcactggaggttccaggggggaaaatgggtgacctgtggaaaagccgataacaatatgcagggtaataagatgtacgtacaccctgaatcgcctaataccgggtcacactggatgcgccaggaaattagcttcggtaagctgaagctcacaaacaacaaaggagcaaacaataacaacacgcagatgatagtgctgcagtctctgcacaagtatcaacccagactgcacatcgtcgaagtcacagaagatggcgttgaggatctaaacgagccgagcaaaacacagacgttcaccttttcagaaacccaatttattgccgtgacagcttaccagaataccgacattactcagctgaagattgaccacaacccctttgccaagggatttagggacaattatgacagcatgtacactgccagcgaaaatgaccgcctgacaccttcacctacagacagcccacgatcccaccagatcgtccctggcggccgctacggtgttcaatcatttttcccggagcctttcgtcaacacactcccccaagccagatattataacggggaacggacagtcccacagaccaacgggttactgagcccccaacagtcggaggaagtggccaatcccccccagagatggttggtaacacctgtacaacagcctggcactaacaagctcgatattagctcctacgagtcagagtatacaagtagcacactgctgccctatggaatcaagtccctgccactgcaaacctcccatgcactgggatactaccctgacccgacttttcccgcaatggcagggtggggaggacgcggaagctatcagaggaaaatggccgctggtctcccctggacctcccgcacctccccaacagtgttctctgaggaccagctctctaaagaaaaggtaaaagaagaaatcggctcaagttggatcgagacgcctcctagtatcaagagcttggactcgaatgattctggagtgtacacctccgcatgtaagcgcaggcgtctgtcaccgtctaacagctccaatgagaattctccctcaatcaagtgcgaggatatcaacgccgaggagtactccaaagacacatcaaagggaatgggaggctactatgccttctatactacaccctag

SEQ ID NO: 97792 - DNA, 1713 bp, Artificial Sequence
  derived and/or modified sequence
atggactccctgtcctccgagcgctactatctccagagccctggcccccagggctcagaacttgctgctccttgttcactctttccttatcaggctgcagctggggccccacacggccccgtttaccccgcacctaacggcgccaggtacccctacggcagcatgctccccccagggggcttccccgccgccgtctgcccccctggccgcgcacagtttggaccaggcgccggtgccggctcaggggcaggaggcagcagtgggggaggcggaggccccggcacatatcagtacagtcagggcgctcctttgtatggaccataccctggggccgcggcggcagggtcctgcggtggtttaggcgggctcggtgtgcccggtagtggattccgcgcgcacgtctacctgtgtaatagaccactgtggttaaaatttcaccggcaccagaccgagatgatcattactaagcaaggtcggagaatgttcccctttctgtcctttaatattaatggactgaaccccaccgcccattacaacgttttcgtcgaagtggtgctggcagatccaaatcactggcggttccagggcgggaagtgggtgacatgtggaaaagcagacaataacatgcaaggcaataaaatgtatgtgcatccagagtctccgaatacaggatcccactggatgcggcaggaaatttcctttggcaaattaaaactgacaaacaacaaaggtgcgaacaataacaatacacagatgatagtgttgcagtcactgcataaataccaaccacggctgcatattgtggaggtgactgaggacggcgtagaggaccttaacgaaccatccaaaacccagacctttacatttagtgagacccaatttattgccgtcactgcctatcagaataccgacattactcagttaaaaatagaccacaacccattcgcaaagggctttcgtgacaactacgacagcatgtataccgccagtgaaaacgaccgactgacaccatcaccgacagattcccctaggagccaccagatcgtgcctggcggccggtatggagtgcaaagcttcttcccagaacccttcgtgaacactctgccgcaagccagatattacaacggcgaaagaaccgtgccccagacaaatggcttactcagcccacagcagtccgaggaggtcgccaaccctccccaacgctggctggtcactccagtgcagcagccaggaaccaataaactggatattagtagttacgagtcagagtatacctcttcaactctgctcccctatgggatcaagtctctcccccttcaaaccagccatgcgttgggctactaccccgacccgactttccctgccatggcagggtgggggggtcggggctcatatcagcggaaaatggctgccgggctaccttggacctcacggacaagccccactgtgttttctgaagatcagctgagtaaagagaaagtgaaggaggagattgggtcgagctggattgaaacacctccgagcatcaagtctctggattcgaacgacagcggtgtctacacctcggcctgtaagaggcggcggttatcgccctccaattcctctaatgagaacagcccatctattaaatgtgaggatattaatgcagaagagtactccaaggacacatccaaggggatggggggctattacgcgttttacacaactccttag

SEQ ID NO: 97793 - DNA, 2118 bp, Artificial Sequence
  derived and/or modified sequence
atgcagctgggggagcagctgctggtgtcctctgtgaacctgcccggggcccacttctaccccctggagagcgcccggggcggcagcggcggcagcgctggccacctgcccagcgctgcccccagcccccagaagctggacctggacaaggccagcaagaagttcagcggcagcctgagctgtgaggccgtgtctggagagcctgctgctgccagcgctggggccccagctgccatgctgagtgacacagatgctggagatgcctttgccagcgctgctgctgtggccaagccaggccccccagatggcaggaagggcagcccctgtggggaggaggagctgcccagcgctgctgctgctgctgctgctgctgctgctgctgctgctgccacagcccgctacagcatggacagcctgagcagcgagcgctactacctgcagagccctggcccccagggcagcgagctggccgccccctgcagcctcttcccctaccaggccgctgctggggcccctcatggccctgtgtacccagccccaaatggagcccgctacccctacggctccatgctgcccccaggcggcttccctgctgctgtgtgccccccaggccgggcccagtttggacctggggccggggccggcagcggggccggcggcagcagcggcggcggcggcggccctggcacctaccagtacagccagggcgcccccctgtatggcccctacccaggagctgctgctgctggcagctgtggcggcctgggcggcctgggcgtgcccggcagcggcttccgggcccacgtgtacctgtgcaaccggcccctgtggctgaagttccaccgccaccagacagagatgatcatcaccaagcagggccgcaggatgttccccttcctgtccttcaacatcaatggcctgaaccccacagcccactacaacgtgtttgtggaggtggtgctggccgaccccaaccactggaggttccagggcggcaagtgggtgacctgtgggaaggctgacaacaacatgcagggcaacaagatgtatgtgcaccctgagagccccaacacaggcagccactggatgaggcaggagatcagctttgggaagctgaagctgaccaacaacaagggggccaacaacaacaacacccagatgattgtgctgcagagcctgcacaagtaccagccccggctgcacatcgtggaggtgacagaagatggagtggaggacctgaatgagcccagcaagacccagaccttcaccttcagcgagacccagttcatcgctgtgacagcctaccagaacacagacatcacccagctgaagattgaccacaacccctttgccaagggcttccgggacaactatgacagcatgtacacagcctctgaaaatgaccggctgacccccagccccacagacagccccaggagccaccagatcgtgcctgggggccgctatggagtgcagagcttcttccctgagccctttgtgaacaccctgccccaggcccgctactacaacggggagaggacagtgccccagaccaacggcctgctgagcccccagcagagcgaggaggtggccaaccccccccagcgctggctggtgacccctgtgcagcagcccggcaccaacaagctggacatcagcagctatgaaagtgagtacaccagcagcaccctgctgccctacggcatcaagagcctgcccctgcagaccagccacgccctgggctactacccagaccccaccttccctgccatggccggctggggcggccggggcagctaccagaggaagatggccgccggcctgccctggaccagcaggaccagccccaccgtcttcagcgaggaccagctgagcaaggagaaggtgaaggaggagatcggcagctcctggattgagaccccacccagcatcaagagcctggacagcaatgacagcggcgtgtacaccagcgcctgcaagagaagaaggctgagccccagcaacagcagcaatgaaaacagccccagcatcaagtgtgaggacatcaatgctgaggagtacagcaaggacaccagcaagggcatgggcggctactatgccttctacaccaccccctag

SEQ ID NO: 97794 - DNA, 1713 bp, Artificial Sequence
  derived and/or modified sequence
atggacagcctgagcagcgagcgctactacctgcagagccctggcccccagggcagcgagctggccgccccctgcagcctcttcccctaccaggccgccgccggggccccccacggccctgtgtacccagcccccaacggggcccgctacccctacggctccatgctgcccccaggcggcttccctgctgctgtgtgccccccaggccgggcccagtttggacctggagctggagctggcagcggggccggcggcagcagcggcggcggcggcggccctggcacctaccagtacagccagggcgcccccctgtatggcccctacccaggagctgctgctgctggcagctgtggcggcctgggcggcctgggcgtgcccggcagcggcttccgggcccacgtgtacctgtgcaaccggcccctgtggctgaagttccaccgccaccagacagagatgatcatcaccaagcagggccgcaggatgttccccttcctgtccttcaacatcaatggcctgaaccccacagcccactacaacgtgtttgtggaggtggtgctggccgaccccaaccactggaggttccagggcggcaagtgggtgacctgtgggaaggctgacaacaacatgcagggcaacaagatgtatgtgcaccctgagagccccaacacaggcagccactggatgaggcaggagatcagctttgggaagctgaagctgaccaacaacaagggggccaacaacaacaacacccagatgattgtgctgcagagcctgcacaagtaccagccccggctgcacatcgtggaggtgacagaagatggagtggaggacctgaatgagcccagcaagacccagaccttcaccttcagcgagacccagttcatcgctgtgacagcctaccagaacacagacatcacccagctgaagattgaccacaacccctttgccaagggcttccgggacaactatgacagcatgtacacagcctctgaaaatgaccggctgacccccagccccacagacagccccaggagccaccagatcgtgcctgggggccgctatggagtgcagagcttcttccctgagccctttgtgaacaccctgccccaggcccgctactacaatggagagaggacagtgccccagaccaacggcctgctgagcccccagcagagcgaggaggtggccaaccccccccagcgctggctggtgacccctgtgcagcagcccggcaccaacaagctggacatcagcagctatgagagcgagtacaccagcagcaccctgctgccctacggcatcaagagcctgcccctgcagaccagccacgccctgggctactacccagaccccaccttccctgccatggccggctggggcggccggggcagctaccagaggaagatggctgctggcctgccctggaccagcaggaccagccccaccgtcttcagcgaggaccagctgagcaaggagaaggtgaaggaggagatcggcagctcctggattgagaccccacccagcatcaagagcctggacagcaatgattctggagtgtacaccagcgcctgcaagagaagaaggctgagccccagcaacagcagcaatgaaaacagccccagcatcaagtgtgaggacatcaatgctgaggagtacagcaaggacaccagcaagggcatgggcggctactatgccttctacaccaccccctag

SEQ ID NO: 97795 - DNA, 2118 bp, Artificial Sequence
  derived and/or modified sequence
atgcagctgggcgagcagctgctggtgagcagcgtgaacctgcccggcgcacacttctaccctctggagagtgctagaggtggtagtgggggaagcgccggacacctcccaagcgcggctccctcaccacagaaactggacctcgacaaagcttccaagaagttctccggttctctgagctgcgaggccgtctccggtgaacctgccgccgcctctgccggggcacctgcggctatgttgtccgatactgacgctggcgacgcatttgcctcagctgcggcagtggccaaaccaggccctcctgatggccgcaaggggtccccttgcggtgaggaggagttaccctcagcagcagctgccgccgcagctgctgctgctgccgccgccgcaacggctcgttattctatggattctttatcatcagaacgctattatcttcagagtccaggtccccaagggtcagaactggccgctccttgcagcctcttcccctatcaggcagccgccggagcccctcacgggcccgtgtacccagcccctaacggtgccagatacccgtacgggtccatgttaccacccggcggatttcctgctgccgtttgtccccccggtcgggctcagttcggacccggagcgggggcagggtcgggcgctggcggcagctccggtggcggcgggggccccgggacttaccagtactctcagggtgcgccgctctacgggccctaccctggggcggctgcagccggttcctgtggtggtctggggggactgggtgtgccaggctccggatttcgcgcacatgtgtacctgtgcaacagaccgctgtggctaaagtttcacagacaccagaccgagatgatcatcacaaagcaaggcaggcggatgtttcctttcctaagcttcaatattaacgggctcaaccccactgcccattataacgtcttcgtagaggtagttttagcagatcccaatcactggcggtttcagggaggaaaatgggttacgtgcggcaaagcagacaacaacatgcagggcaataaaatgtacgtgcacccggagtcccctaacaccgggtcgcattggatgcgccaggaaatatcgttcggaaagcttaaattaaccaataataagggtgcaaataacaataatactcagatgatcgtccttcagtcacttcataaataccagcctaggctccacattgtcgaggtgacagaggacggggtcgaagacctgaatgaaccttcaaagacccaaacttttacatttagcgagactcagtttatcgcggtcacggcttaccagaatacagacattacacaattgaaaatagatcacaatccctttgcaaagggtttccgggacaattatgattctatgtacacagcctccgaaaacgaccgcctgacaccctcccccacggattccccgcggagccatcagattgtgccaggcggccggtacggtgtccagtcgttctttcccgagccattcgttaacaccctgccacaagcccgttactataatggggaacgaactgttccccaaaccaacggtttactgtcaccacagcagtcagaggaggtcgccaaccctcctcaacgctggctggtcacacctgtacagcagcctggcacaaacaaactcgatatcagcagctatgaaagcgagtacacaagcagcacactgctcccttacggcatcaagtctctgcccctgcagactagccatgctctaggatattaccccgacccaacatttccggctatggccggatgggggggccggggcagctatcagaggaagatggctgctggcctgccatggacctcaaggacatccccaactgtgttctcagaagaccagctgtcaaaggagaaagtgaaagaagagatcggttcatcttggattgagacacccccatcgattaaaagcctggactccaatgattctggcgtgtacacctccgcgtgtaagcgtcgcaggttgtcgccttctaatagctcaaatgaaaactccccctctattaaatgcgaggacatcaatgcggaggaatactccaaggatacttccaaaggcatgggcgggtattatgcattttacaccacaccttag

SEQ ID NO: 97796 - DNA, 1713 bp, Artificial Sequence
  derived and/or modified sequence
atggacagcctgagcagcgagcggtactacctgcagagccccggcccacagggatccgaactggctgcaccttgcagcctgtttccttatcaagctgccgcaggcgctccacacggccccgtataccccgcccctaacggcgccaggtatccttacgggtccatgctgcctcctggcggcttcccagctgcggtctgtccccccgggagggctcagtttggacccggggctggcgcagggagtggagctggagggagttctggagggggtggcgggcccggaacctatcagtactcgcaaggtgcgcctctgtatggtccctaccctggtgccgccgccgctgggtcctgcggcggactcggagggctgggcgtaccaggctctgggttccgagctcacgtgtatctttgtaatcggccattatggctgaagtttcatcgccaccagacagagatgattattacaaagcaaggacgacgcatgttccccttcctctctttcaatataaatggcttgaacccaaccgcccactacaacgtcttcgtggaggtggtgctcgcagatcccaaccattggaggttccaaggaggaaagtgggtcacctgtggtaaggccgacaataatatgcagggaaataagatgtatgttcaccccgagtcaccaaacactggctcccattggatgcgacaggagatttcattcggaaagctcaaactgaccaataataaaggggcaaacaacaataacacacagatgatcgtgttacagagtttacataaataccagcctcggcttcacattgttgaggtgaccgaggacggcgtggaagatttgaacgagccctccaaaacccagactttcacgttctccgaaacccagttcatcgcggtgaccgcttaccaaaatacggacattacgcagctgaaaatagaccacaatccctttgcaaaaggctttagagataactacgacagtatgtatactgcatccgagaacgacaggctgacccccagcccaaccgactcccctagatcccatcaaattgtaccaggcgggagatatggcgtccagagctttttccctgaaccatttgttaataccttgccacaggccagatactacaacggagaacgtacagtcccgcagactaacgggctgctgtcacctcagcagtctgaggaggttgccaatcccccccagagatggctggttacacccgtccagcagccaggtacaaacaagctcgacattagtagctatgagtcagagtatactagttctaccctccttccctacggaatcaagagtcttccactacagaccagtcatgctctgggctattatccggatcctacctttcctgccatggcgggttggggaggccgcggttcttatcagcgcaagatggcggcaggtctgccatggacgagcaggacttcacccaccgtgttttcagaagaccagctgagtaaagaaaaggtcaaagaagaaattggttcctcgtggatagagactccccccagtattaaatccctcgattctaacgatagtggagtgtacacctcagcatgcaagcggaggaggctcagcccaagcaactcctctaacgagaacagtccctcaatcaaatgtgaggacataaacgccgaggaatactccaaggacacctcgaagggaatgggaggatactatgcattctatacaactccgtag

SEQ ID NO: 97797 - DNA, 2118 bp, Artificial Sequence
  derived and/or modified sequence
atgcagctgggagagcagcttctggtgagtagtgtgaacctgccaggggctcacttctatcctctcgagagtgccagaggcggttccggcggttccgctggtcatctgccttccgctgcaccgagcccccagaaattggacctcgataaagcatctaaaaaatttagcggatcgctgagttgcgaggctgtctcgggggaacccgcagccgctagcgccggtgcccctgctgctatgctgtccgatacggatgctggcgatgcctttgccagtgcagctgccgtggctaagccagggccacctgatggcagaaagggtagtccatgcggcgaggaggagttgcctagcgccgctgcggcagccgcagcagcagcggctgctgctgccgctactgctagatactctatggatagcctcagcagtgagcgatattacctccagtcccctggtccccagggttccgagctggcagccccttgttctcttttcccttaccaggccgcagccggagcacctcacggtccagtttaccccgcaccaaatggcgctaggtacccatacggatcaatgttgccccctggcggtttcccagccgctgtttgtcctcccggtcgtgcacaatttggcccaggcgcaggtgctggctccggagctgggggatcctcaggaggaggcggaggcccaggaacgtaccaatattcccagggcgctcccctctacggtccctacccaggcgctgcggcagcaggcagctgcggtggcttgggcggattgggggtgccaggttccgggttcagagctcacgtgtacctgtgtaaccgccctctgtggttgaaattccatcggcaccaaaccgagatgattatcactaaacagggcaggcgcatgttcccttttttgagctttaatattaacgggctgaaccccaccgcacactacaacgtgttcgtggaagtggtactggccgatcccaaccattggcggttccagggaggcaagtgggtgacttgtgggaaagccgacaataacatgcaaggcaataagatgtacgtgcaccccgaatcaccaaatactgggtctcactggatgcgccaagagatttccttcggcaaactgaagttgacaaacaacaagggtgctaacaataacaacacccaaatgatcgttctgcagtccctgcacaaataccagcctcgactgcatattgttgaggtgactgaagatggcgttgaggatttaaacgaaccaagcaagacacagacattcacgttctccgaaacacaattcatagccgtcacagcttatcagaacacagacattacacagcttaaaattgaccataatccctttgccaagggattcagggacaattacgacagtatgtacaccgcctcagagaatgacagactgaccccatcccctacagactcccctcgatcccatcagatagttcccggtggtcgctatggcgtgcagtcgttcttccccgaaccgtttgttaacactcttccacaagccagatactataacggagaacggacggttccacaaaccaacgggctactgtcaccgcaacaaagtgaggaggttgccaacccgcctcagcgatggcttgttacacctgtacagcagccaggcaccaacaaattggacatttcaagctatgaatctgagtatacgagtagtactctgctgccatatgggattaagtcattgcccctgcagacctctcacgccctcggatactatccagatccaactttcccagctatggcgggatggggtggacgcggatcatatcagcggaagatggcagctggattaccatggacatctagaacaagcccaaccgtgttctctgaggaccagttgagtaaggagaaagtaaaggaggagatcggaagtagttggatagaaacccccccatccattaagagtctggacagcaatgatagcggggtctacacatccgcctgtaaacggagaaggttgtcaccatcaaattcatcgaacgagaactcccctagcattaagtgtgaggatataaatgccgaggaatatagcaaagatacatcaaaaggaatggggggatattacgccttctacacaaccccttag

SEQ ID NO: 97798 - DNA, 1713 bp, Artificial Sequence
  derived and/or modified sequence
atggatagcctaagctcagaacgctactacctccagtcccccggaccacagggcagtgagctggcagccccttgttccctgttcccataccaggccgcagcaggggcaccccacggtccagtctatcccgctcccaatggagcaaggtatccatatggcagcatgctgcctccagggggattccccgcagccgtctgtccccctggccgagcccaattcggcccaggcgctggtgcagggtcaggcgctgggggatctagcgggggaggaggagggcctggcacatatcaatatagtcagggcgctcccttatatgggccttatccaggcgctgccgcagctggaagctgcggcggattgggcggattaggggtacctggctccggtttccgggctcacgtgtatctgtgcaatagaccattatggttgaagttccatcgccaccaaactgaaatgatcatcacaaaacagggtaggagaatgttcccctttctgtcttttaatatcaacgggctgaatcctacggctcactataacgtcttcgtagaggtagtgttagctgaccctaatcattggcgcttccagggcggtaaatgggtcacatgcgggaaggctgacaataacatgcaaggtaacaaaatgtacgtgcacccagagtctccaaacaccgggagccactggatgcgtcaggagatctcattcggcaagctcaagttgaccaacaataaaggggctaataacaacaacacacaaatgatcgtgctgcagagcttgcataaataccagccaagactccacatcgtggaggtaaccgaagacggagtggaagacctcaatgagcccagtaagacccagacattcacattctcggagactcagttcattgccgttaccgcgtatcaaaacacagacatcacacagcttaaaatagatcacaaccctttcgcaaagggattccgggacaattatgacagtatgtatacagcatcagaaaacgaccggctaacaccaagtcctacagatagccctcggtcacatcagattgtgccaggcggacgctacggcgtccagagcttcttccccgagccatttgtcaatacacttccacaggctagatactataacggtgaaagaactgttcctcaaaccaacggcttgctttccccgcaacagtccgaagaagtggcaaacccccctcaacggtggctggtgaccccagtgcagcaacctggcaccaataaactggacatctccagctacgagtccgaatatacctcttcaacacttctgccctacggaattaagagcctgcctttgcagacatcgcatgccctgggatactaccccgacccaacctttcccgctatggccggatggggtggacggggttcctatcagcgcaagatggcggctgggctcccttggacctctcggacaagtcccaccgtcttttccgaggaccagctaagcaaggaaaaggtgaaagaggagatcgggagcagctggattgagacacctccgtccattaaatcgttggattccaatgattctggcgtctacacttccgcgtgtaaacgcagacgtctctccccttccaactcttccaacgagaatagcccttcgattaagtgtgaggatattaatgcagaagaatacagcaaagacacttcaaagggcatgggcggttactatgccttttacaccaccccttag

SEQ ID NO: 97799 - DNA, 2118 bp, Artificial Sequence
  derived and/or modified sequence
atgcagctgggcgagcagctgctggtgagcagcgtgaacctgcccggcgcccacttctaccccctggagagcgccagaggcggcagcggcggcagcgccggccacctgcccagcgccgcccccagcccccagaagctggacctggacaaggccagcaagaagttcagcggcagcctgagctgcgaggccgtgagcggcgagcccgccgccgccagcgccggcgcccccgccgccatgctgagcgacaccgacgccggcgacgccttcgccagcgccgccgccgtggccaagcccggcccccccgacggcagaaagggcagcccctgcggcgaggaggagctgcccagcgccgccgccgccgccgccgccgccgccgccgccgccgccgccaccgccagatacagcatggacagcctgagcagcgagagatactacctgcagagccccggcccccagggcagcgagctggccgccccctgcagcctgttcccctaccaggccgccgccggcgccccccacggccccgtgtaccccgcccccaacggcgccagatacccctacggcagcatgctgccccccggcggcttccccgccgccgtgtgcccccccggcagagcccagttcggccccggcgccggcgccggcagcggcgccggcggcagcagcggcggcggcggcggccccggcacctaccagtacagccagggcgcccccctgtacggcccctaccccggcgccgccgccgccggcagctgcggcggcctgggcggcctgggcgtgcccggcagcggcttcagagcccacgtgtacctgtgcaacagacccctgtggctgaagttccacagacaccagaccgagatgatcatcaccaagcagggcagaagaatgttccccttcctgagcttcaacatcaacggcctgaaccccaccgcccactacaacgtgttcgtggaggtggtgctggccgaccccaaccactggagattccagggcggcaagtgggtgacctgcggcaaggccgacaacaacatgcagggcaacaagatgtacgtgcaccccgagagccccaacaccggcagccactggatgagacaggagatcagcttcggcaagctgaagctgaccaacaacaagggcgccaacaacaacaacacccagatgatcgtgctgcagagcctgcacaagtaccagcccagactgcacatcgtggaggtgaccgaggacggcgtggaggacctgaacgagcccagcaagacccagaccttcaccttcagcgagacccagttcatcgccgtgaccgcctaccagaacaccgacatcacccagctgaagatcgaccacaaccccttcgccaagggcttcagagacaactacgacagcatgtacaccgccagcgagaacgacagactgacccccagccccaccgacagccccagaagccaccagatcgtgcccggcggcagatacggcgtgcagagcttcttccccgagcccttcgtgaacaccctgccccaggccagatactacaacggcgagagaaccgtgccccagaccaacggcctgctgagcccccagcagagcgaggaggtggccaaccccccccagagatggctggtgacccccgtgcagcagcccggcaccaacaagctggacatcagcagctacgagagcgagtacaccagcagcaccctgctgccctacggcatcaagagcctgcccctgcagaccagccacgccctgggctactaccccgaccccaccttccccgccatggccggctggggcggcagaggcagctaccagagaaagatggccgccggcctgccctggaccagcagaaccagccccaccgtgttcagcgaggaccagctgagcaaggagaaggtgaaggaggagatcggcagcagctggatcgagaccccccccagcatcaagagcctggacagcaacgacagcggcgtgtacaccagcgcctgcaagagaagaagactgagccccagcaacagcagcaacgagaacagccccagcatcaagtgcgaggacatcaacgccgaggagtacagcaaggacaccagcaagggcatgggcggctactacgccttctacaccaccccctag

SEQ ID NO: 97800 - DNA, 1713 bp, Artificial Sequence
  derived and/or modified sequence
atggacagcctgagcagcgagagatactacctgcagagccccggcccccagggcagcgagctggccgccccctgcagcctgttcccctaccaggccgccgccggcgccccccacggccccgtgtaccccgcccccaacggcgccagatacccctacggcagcatgctgccccccggcggcttccccgccgccgtgtgcccccccggcagagcccagttcggccccggcgccggcgccggcagcggcgccggcggcagcagcggcggcggcggcggccccggcacctaccagtacagccagggcgcccccctgtacggcccctaccccggcgccgccgccgccggcagctgcggcggcctgggcggcctgggcgtgcccggcagcggcttcagagcccacgtgtacctgtgcaacagacccctgtggctgaagttccacagacaccagaccgagatgatcatcaccaagcagggcagaagaatgttccccttcctgagcttcaacatcaacggcctgaaccccaccgcccactacaacgtgttcgtggaggtggtgctggccgaccccaaccactggagattccagggcggcaagtgggtgacctgcggcaaggccgacaacaacatgcagggcaacaagatgtacgtgcaccccgagagccccaacaccggcagccactggatgagacaggagatcagcttcggcaagctgaagctgaccaacaacaagggcgccaacaacaacaacacccagatgatcgtgctgcagagcctgcacaagtaccagcccagactgcacatcgtggaggtgaccgaggacggcgtggaggacctgaacgagcccagcaagacccagaccttcaccttcagcgagacccagttcatcgccgtgaccgcctaccagaacaccgacatcacccagctgaagatcgaccacaaccccttcgccaagggcttcagagacaactacgacagcatgtacaccgccagcgagaacgacagactgacccccagccccaccgacagccccagaagccaccagatcgtgcccggcggcagatacggcgtgcagagcttcttccccgagcccttcgtgaacaccctgccccaggccagatactacaacggcgagagaaccgtgccccagaccaacggcctgctgagcccccagcagagcgaggaggtggccaaccccccccagagatggctggtgacccccgtgcagcagcccggcaccaacaagctggacatcagcagctacgagagcgagtacaccagcagcaccctgctgccctacggcatcaagagcctgcccctgcagaccagccacgccctgggctactaccccgaccccaccttccccgccatggccggctggggcggcagaggcagctaccagagaaagatggccgccggcctgccctggaccagcagaaccagccccaccgtgttcagcgaggaccagctgagcaaggagaaggtgaaggaggagatcggcagcagctggatcgagaccccccccagcatcaagagcctggacagcaacgacagcggcgtgtacaccagcgcctgcaagagaagaagactgagccccagcaacagcagcaacgagaacagccccagcatcaagtgcgaggacatcaacgccgaggagtacagcaaggacaccagcaagggcatgggcggctactacgccttctacaccaccccctag

SEQ ID NO: 97801 - DNA, 2829 bp, Artificial Sequence
  derived and/or modified sequence
gtctgcgctttgcaaagcatgcagttaggggagcagctcttggtgagctcagtgaacctgcctggcgcgcacttctacccgctggagagtgcgcgaggcggcagcggcgggagcgctggccacctccccagcgcggccccctctcctcagaagttggacttagacaaagcgtccaagaagttttccggcagtctctcctgcgaggcggtgagcggggagcccgcagccgccagcgcaggggcccccgcggccatgcttagtgacaccgacgccggggacgcatttgccagcgctgcggcagtggccaagccggggcccccggacggccgcaagggctccccctgcggggaggaggagctgccctccgccgctgcagccgccgccgccgccgccgccgcggctgcggccactgcgcgctactccatggacagcctgagctccgagcggtactacctccagtcccccggtcctcaggggtcggagctggctgcgccctgctcactcttcccgtaccaggcggcggctggggcgccccacggacctgtgtacccggctcctaacggggcgcgctacccctacggctccatgctgccccccggcggcttccccgcggctgtgtgcccacccgggagggcgcagttcggcccaggagccggtgcgggcagtggcgcgggcggtagcagcggcgggggcggcggcccgggcacctatcagtacagccagggggctccgctctacgggccgtaccctggagccgcagcggcgggatcttgcggaggactggggggcctgggggttccaggttctggcttccgtgcccacgtctacctgtgcaaccggcctctgtggctcaaattccaccgccaccaaactgagatgatcattacgaaacagggcaggcgcatgtttcctttcttgagcttcaacataaacggactcaatcccactgcccactacaatgtgttcgtagaggtggtgctggcggaccccaaccactggcgcttccaggggggcaaatgggtgacctgtggcaaagccgacaataacatgcagggcaacaaaatgtatgttcacccagagtctcctaatactggttcccactggatgagacaggagatttcattcgggaaattaaaactcaccaataacaaaggcgcaaataacaacaacacccagatgatagtcttacaatccttacacaaataccaaccccgactgcatattgttgaagttacagaggatggcgtggaggacttgaatgagccctcaaagacccagacttttaccttctcagaaacgcaattcattgcagtgactgcctaccaaaacaccgatattactcaactaaagattgatcataacccctttgcaaaaggcttcagagacaactatgattccatgtacaccgcttcagaaaatgacaggttaactccatctcccacggattctcctagatcccatcagattgtccctggaggtcggtacggcgttcaatccttcttcccggagccctttgtcaacactttacctcaagcccgctattataatggcgagagaaccgtgccacagaccaacggcctcctttcaccccaacagagcgaagaggtggccaaccctccccagcggtggcttgtcacgcctgtccagcaacctgggaccaacaaactagacatcagttcctatgaatctgaatatacttctagcacattgctcccatatggcattaaatccttgccccttcagacatcccatgccctggggtattacccagacccaacctttcctgcaatggcagggtggggaggtcgaggttcttaccagaggaagatggcagctggactaccatggacctccagaacaagccccactgtgttctctgaagatcagctctccaaggagaaagtgaaagaggaaattggctcttcttggatagagacacccccttccatcaaatctctagattccaatgattcaggagtatacaccagtgcttgtaagcgaaggcggctgtctcctagcaactccagtaatgaaaattcaccctccataaagtgtgaggacattaatgctgaagagtatagtaaagacacctcaaaaggcatgggagggtattatgctttttacacaactccctaaagagttattttaacctcaaaaattagctaactttttgcagatggacttggtggtgttttttgttgtcttctttgcctaggttgccaaaaagatgtttgccttccaccttgatgcatcctgttttgtgcaattctctaaaagaaggtgccaaagctttttgattgctgcaggtaactgaaacaaacctagcatttttaaaaaataagattaatggaagactttaaggtattttaaaattcgaagggtatccaaggttctgtatttatttattggggagacactaacccttcaaagaagcaggctgtgaacattgggtgcccagtgctatcagatgagttaaaacctttgattctcatttctatttgtaaattcttaagcaaatagaagccgagtgttaaggtgttttgcttctgaaagagggctgtgccttccgtttcagaaggagacattttgctgttacattctgccaggggcaaaagatactaggcccaggagtcaagaaaagcttttgtgaaagtgatagtttcacctgactttgattccttaacccccggcttttggaacaagccatgtttgccctagtccaggattgcctcacttgagacttgctaggcctctgctgtgtgctggggtggccagtgggactcaggagagagcaagctaaggagtcaccaaaaaaaaaaaaaaaaaaaa

SEQ ID NO: 97802 - DNA, 2354 bp, Artificial Sequence
  derived and/or modified sequence
aagtggtcaacttgaccgatgctttggcaattgaaaaagggcagaaaggcgcgggctagtgggtggatggggacaaagatctaagtcaccttcttccagcgtgtgagcctgggaggagggtgggggtcctgaggagctgccctccgccgctgcagccgccgccgccgccgccgccgcggctgcggccactgcgcgctactccatggacagcctgagctccgagcggtactacctccagtcccccggtcctcaggggtcggagctggctgcgccctgctcactcttcccgtaccaggcggcggctggggcgccccacggacctgtgtacccggctcctaacggggcgcgctacccctacggctccatgctgccccccggcggcttccccgcggctgtgtgcccacccgggagggcgcagttcggcccaggagccggtgcgggcagtggcgcgggcggtagcagcggcgggggcggcggcccgggcacctatcagtacagccagggggctccgctctacgggccgtaccctggagccgcagcggcgggatcttgcggaggactggggggcctgggggttccaggttctggcttccgtgcccacgtctacctgtgcaaccggcctctgtggctcaaattccaccgccaccaaactgagatgatcattacgaaacagggcaggcgcatgtttcctttcttgagcttcaacataaacggactcaatcccactgcccactacaatgtgttcgtagaggtggtgctggcggaccccaaccactggcgcttccaggggggcaaatgggtgacctgtggcaaagccgacaataacatgcagggcaacaaaatgtatgttcacccagagtctcctaatactggttcccactggatgagacaggagatttcattcgggaaattaaaactcaccaataacaaaggcgcaaataacaacaacacccagatgatagtcttacaatccttacacaaataccaaccccgactgcatattgttgaagttacagaggatggcgtggaggacttgaatgagccctcaaagacccagacttttaccttctcagaaacgcaattcattgcagtgactgcctaccaaaacaccgatattactcaactaaagattgatcataacccctttgcaaaaggcttcagagacaactatgattccatgtacaccgcttcagaaaatgacaggttaactccatctcccacggattctcctagatcccatcagattgtccctggaggtcggtacggcgttcaatccttcttcccggagccctttgtcaacactttacctcaagcccgctattataatggcgagagaaccgtgccacagaccaacggcctcctttcaccccaacagagcgaagaggtggccaaccctccccagcggtggcttgtcacgcctgtccagcaacctgggaccaacaaactagacatcagttcctatgaatctgaatatacttctagcacattgctcccatatggcattaaatccttgccccttcagacatcccatgccctggggtattacccagacccaacctttcctgcaatggcagggtggggaggtcgaggttcttaccagaggaagatggcagctggactaccatggacctccagaacaagccccactgtgttctctgaagatcagctctccaaggagaaagtgaaagaggaaattggctcttcttggatagagacacccccttccatcaaatctctagattccaatgattcaggagtatacaccagtgcttgtaagcgaaggcggctgtctcctagcaactccagtaatgaaaattcaccctccataaagtgtgaggacattaatgctgaagagtatagtaaagacacctcaaaaggcatgggagggtattatgctttttacacaactccctaaagagttattttaacctcaaaaattagctaactttttgcagatggacttggtggtgttttttgttgtcttctttgcctaggttgccaaaaagatgtttgccttccaccttgatgcatcctgttttgtgcaattctctaaaagaaggtgccaaagctttttgattgctgcaggtaactgaaacaaacctagcatttttaaaaaataagattaatggaagactttaaggtattttaaaattcgaagggtatccaaggttctgtatttatttattggggagacactaacccttcaaagaagcaggctgtgaacattgggtgcccagtgctatcagatgagttaaaacctttgattctcatttctatttgtaaattcttaagcaaatagaagccgagtgttaaggtgttttgcttctgaaagagggctgtgccttccgtttcag

SEQ ID NO: 97803 - DNA, 1233 bp, Artificial Sequence
  derived and/or modified sequence
atgttccccttcctttcattcaacatcaatggtctgaatccgaccgcacattacaacgtgtttgtggaggtcgtactggccgatcctaaccattggaggttccaggggggtaaatgggtcacatgcggaaaggccgacaacaacatgcaagggaacaaaatgtatgtgcatcccgagagccctaacaccggcagtcactggatgaggcaggagataagttttggcaaacttaaactgactaataataagggcgccaataataacaacacccagatgattgtgctgcagtctttacataaatatcagccccggttacatatagtagaggtgaccgaagacggggtggaagacctgaacgaaccttctaaaacacagaccttcacgttttctgagactcaatttattgctgtcaccgcttatcaaaacacagacattacacagcttaaaatagaccataatcccttcgcaaagggcttccgggataattacgactcaatgtataccgcttccgaaaacgacaggctgacgccatcccccaccgacagtcctcgcagtcatcagatcgtgcctggtggaagatatggggtccagtcattctttccagagccctttgtgaacacactgccacaggcacgatattacaatggagaacgcacggtgccgcagacaaacggactcctcagcccccagcagtctgaggaggtggctaaccctcctcaaagatggctggtcacacctgtgcagcagccggggacgaataaacttgatatctccagctatgaatccgaatatacgtcttccaccctgctgccttatggcatcaagagcttgcctctgcagacttctcacgctcttgggtattaccccgacccaactttccccgctatggcagggtggggaggcagagggagttaccaaaggaagatggccgccgggttgccttggaccagtcgtacatcccccaccgtcttcagtgaggatcagttgagcaaagagaaggtgaaggaggagatcggtagttcttggattgagacacccccgtctatcaagagcctcgacagtaatgactctggggtgtataccagcgcttgcaaacgccgccgtctctccccctccaactcaagtaacgagaattccccctccattaagtgtgaagacattaatgccgaggagtactcaaaggatacaagtaaaggcatgggcggctattacgcattctatacaacaccgtag

SEQ ID NO: 97804 - DNA, 1233 bp, Artificial Sequence
  derived and/or modified sequence
atgttccccttcctgtccttcaacatcaatggcctgaaccccacagcccactacaacgtgtttgtggaggtggtgctggccgaccccaaccactggaggttccagggcggcaagtgggtgacctgtgggaaggctgacaacaacatgcagggcaacaagatgtatgtgcaccctgagagccccaacacaggcagccactggatgaggcaggagatcagctttgggaagctgaagctgaccaacaacaagggggccaacaacaacaacacccagatgattgtgctgcagagcctgcacaagtaccagccccggctgcacatcgtggaggtgacagaagatggagtggaggacctgaatgagcccagcaagacccagaccttcaccttcagcgagacccagttcatcgctgtgacagcctaccagaacacagacatcacccagctgaagattgaccacaacccctttgccaagggcttccgggacaactatgacagcatgtacacagcctctgaaaatgaccggctgacccccagccccacagacagccccaggagccaccagatcgtgcctgggggccgctatggagtgcagagcttcttccctgagccctttgtgaacaccctgccccaggcccgctactacaatggagagaggacagtgccccagaccaacggcctgctgagcccccagcagagcgaggaggtggccaaccccccccagcgctggctggtgacccctgtgcagcagcccggcaccaacaagctggacatcagcagctatgagagcgagtacaccagcagcaccctgctgccctacggcatcaagagcctgcccctgcagaccagccacgccctgggctactacccagaccccaccttccctgccatggccggctggggcggccggggcagctaccagaggaagatggctgctggcctgccctggaccagcaggaccagccccaccgtcttcagcgaggaccagctgagcaaggagaaggtgaaggaggagatcggcagctcctggattgagaccccacccagcatcaagagcctggacagcaatgattctggagtgtacaccagcgcctgcaagagaagaaggctgagccccagcaacagcagcaatgaaaacagccccagcatcaagtgtgaggacatcaatgctgaggagtacagcaaggacaccagcaagggcatgggcggctactatgccttctacaccaccccctag

SEQ ID NO: 97805 - DNA, 1233 bp, Artificial Sequence
  derived and/or modified sequence
atgttccccttcctgagcttcaacatcaacggcctgaaccccaccgcacactataatgtgttcgtggaggtggtgctagctgatcctaaccactggaggtttcaaggcggcaagtgggttacatgcggcaaggccgacaacaacatgcaagggaacaaaatgtatgtgcatccggagagtcctaataccgggagccattggatgcgtcaggagatatcattcggtaagttaaaattgaccaacaataaaggcgctaataataataacacccaaatgatcgtcctgcaatccctgcacaaatatcagccacggctgcacattgtggaggtgaccgaagatggagttgaggatttgaacgaaccctcaaagacgcaaacatttacctttagcgaaacacagtttatcgccgtcaccgcctaccagaatactgacatcacacagcttaagatcgatcataacccattcgcaaagggcttcagggataattatgactctatgtacaccgccagcgagaatgaccggctgacaccaagtcctacagatagtccacggtctcatcagatcgtccctggtgggcgatacggagtgcaatccttcttccctgaacccttcgtgaatacactgccccaagcgaggtattataacggagagcggacagtaccgcaaaccaacgggttgctgagccctcagcaaagtgaggaggtggccaaccccccacagaggtggcttgtgaccccagttcagcagcccgggaccaacaagcttgacatttcctcatacgagtcagaatatacctcctcgactttgctaccttatggaataaaatccttgccactgcagacgtcccatgccctcgggtattaccctgaccccacctttcctgctatggcaggatggggcgggagaggcagctatcagcgcaagatggcagccggattaccttggacgtccagaacaagcccaacggttttttccgaggatcagctctcgaaagagaaggtgaaggaagagattggaagcagctggatagaaacacccccaagtattaaaagtttagattccaacgactccggcgtgtatacctctgcttgcaaaagaagaaggctttcaccctccaacagctcgaatgagaactctccctccattaagtgcgaagacatcaatgccgaggagtatagcaaagatacatcgaaaggcatgggcgggtattacgccttctacacgactccctag

SEQ ID NO: 97806 - DNA, 1233 bp, Artificial Sequence
  derived and/or modified sequence
atgtttccatttctgtcttttaacattaatgggctcaaccccactgcccattacaatgtctttgtcgaagtcgttctggccgaccccaaccactggagatttcaagggggaaagtgggtcacatgtggcaaggcggataacaatatgcagggcaataaaatgtatgtccacccagagagtccgaatacaggatctcattggatgcgacaggagatctctttcggcaaactcaaacttaccaacaataagggcgctaataataataacacgcagatgatcgtactgcagtccctgcataagtatcaacctagactgcatatcgtggaagtgaccgaggatggagtggaggatctgaatgagccatctaagacgcagaccttcacatttagcgaaacccagttcatcgctgtgactgcttatcagaacacagacatcactcagctgaaaattgaccacaatccgttcgccaaggggttccgcgataactacgactcaatgtataccgcctccgagaatgatcgtctcaccccatccccgaccgactcgcctaggtctcaccagattgtaccaggcggtaggtatggtgtccagtcatttttcccagaaccgtttgtgaataccctcccacaggccaggtattacaatggcgaaaggaccgttccccagacaaatgggcttctttctccgcagcagagtgaagaagtcgctaatccccctcagagatggctggtgacccccgttcaacagccgggtaccaataaactggacattagcagctacgagagtgagtacactagcagcaccctactcccttacggaattaaatcattaccacttcagacctcacacgcactagggtattacccagacccgaccttcccagcaatggccggatggggagggagggggagctatcaacgcaaaatggctgcaggcctgccatggacaagtagaacatcacccacagttttttctgaggatcagctcagcaaggagaaagtcaaagaagagatcggctctagctggatcgaaaccccaccatcaatcaaatctttagactccaatgattccggggtatatacctcagcctgtaagagacggaggttgagcccctcaaacagctccaatgagaattctcccagcattaaatgtgaagacatcaacgcagaggagtattcaaaagacaccagcaagggtatgggtggatactacgcattctataccactccctag

SEQ ID NO: 97807 - DNA, 1233 bp, Artificial Sequence
  derived and/or modified sequence
atgttccccttcctgagcttcaacatcaacggcctgaaccccaccgcccactacaacgtgttcgtggaggtggtgctggccgaccccaaccactggagattccagggcggcaagtgggtgacctgcggcaaggccgacaacaacatgcagggcaacaagatgtacgtgcaccccgagagccccaacaccggcagccactggatgagacaggagatcagcttcggcaagctgaagctgaccaacaacaagggcgccaacaacaacaacacccagatgatcgtgctgcagagcctgcacaagtaccagcccagactgcacatcgtggaggtgaccgaggacggcgtggaggacctgaacgagcccagcaagacccagaccttcaccttcagcgagacccagttcatcgccgtgaccgcctaccagaacaccgacatcacccagctgaagatcgaccacaaccccttcgccaagggcttcagagacaactacgacagcatgtacaccgccagcgagaacgacagactgacccccagccccaccgacagccccagaagccaccagatcgtgcccggcggcagatacggcgtgcagagcttcttccccgagcccttcgtgaacaccctgccccaggccagatactacaacggcgagagaaccgtgccccagaccaacggcctgctgagcccccagcagagcgaggaggtggccaaccccccccagagatggctggtgacccccgtgcagcagcccggcaccaacaagctggacatcagcagctacgagagcgagtacaccagcagcaccctgctgccctacggcatcaagagcctgcccctgcagaccagccacgccctgggctactaccccgaccccaccttccccgccatggccggctggggcggcagaggcagctaccagagaaagatggccgccggcctgccctggaccagcagaaccagccccaccgtgttcagcgaggaccagctgagcaaggagaaggtgaaggaggagatcggcagcagctggatcgagaccccccccagcatcaagagcctggacagcaacgacagcggcgtgtacaccagcgcctgcaagagaagaagactgagccccagcaacagcagcaacgagaacagccccagcatcaagtgcgaggacatcaacgccgaggagtacagcaaggacaccagcaagggcatgggcggctactacgccttctacaccaccccctag

SEQ ID NO: 97808 - DNA, 2084 bp, Artificial Sequence
  derived and/or modified sequence
aagtttccaagtggtcaacttgaccgatgctttggcaattgaaaaagggcagaaaggcgcgggctagtgggtggatggggacaaagatctaagtcaccttcttccagcgtgtgagcctgggaggagggtgggggtcctgaggagcaagaggtacgaggaaggaaaaggagagggcttctgggttagtttccacctcctgctttccaactcacggcgctttccttccggaaaggacgctggattcagggcgcgccagtacgcgcagtagcggcccgcgagtcggcaggcgcatgtttcctttcttgagcttcaacataaacggactcaatcccactgcccactacaatgtgttcgtagaggtggtgctggcggaccccaaccactggcgcttccaggggggcaaatgggtgacctgtggcaaagccgacaataacatgcagggcaacaaaatgtatgttcacccagagtctcctaatactggttcccactggatgagacaggagatttcattcgggaaattaaaactcaccaataacaaaggcgcaaataacaacaacacccagatgatagtcttacaatccttacacaaataccaaccccgactgcatattgttgaagttacagaggatggcgtggaggacttgaatgagccctcaaagacccagacttttaccttctcagaaacgcaattcattgcagtgactgcctaccaaaacaccgatattactcaactaaagattgatcataacccctttgcaaaaggcttcagagacaactatgattccatgtacaccgcttcagaaaatgacaggttaactccatctcccacggattctcctagatcccatcagattgtccctggaggtcggtacggcgttcaatccttcttcccggagccctttgtcaacactttacctcaagcccgctattataatggcgagagaaccgtgccacagaccaacggcctcctttcaccccaacagagcgaagaggtggccaaccctccccagcggtggcttgtcacgcctgtccagcaacctgggaccaacaaactagacatcagttcctatgaatctgaatatacttctagcacattgctcccatatggcattaaatccttgccccttcagacatcccatgccctggggtattacccagacccaacctttcctgcaatggcagggtggggaggtcgaggttcttaccagaggaagatggcagctggactaccatggacctccagaacaagccccactgtgttctctgaagatcagctctccaaggagaaagtgaaagaggaaattggctcttcttggatagagacacccccttccatcaaatctctagattccaatgattcaggagtatacaccagtgcttgtaagcgaaggcggctgtctcctagcaactccagtaatgaaaattcaccctccataaagtgtgaggacattaatgctgaagagtatagtaaagacacctcaaaaggcatgggagggtattatgctttttacacaactccctaaagagttattttaacctcaaaaattagctaactttttgcagatggacttggtggtgttttttgttgtcttctttgcctaggttgccaaaaagatgtttgccttccaccttgatgcatcctgttttgtgcaattctctaaaagaaggtgccaaagctttttgattgctgcaggtaactgaaacaaacctagcatttttaaaaaataagattaatggaagactttaaggtattttaaaattcgaagggtatccaaggttctgtatttatttattggggagacactaacccttcaaagaagcaggctgtgaacattgggtgcccagtgctatcagatgagttaaaacctttgattctcatttctatttgtaaattcttaagcaaatagaagccgagtgttaaggtgttttgcttctgaaagagggctgtgccttccgtttcagaaggagacattttgctgttacattctgccaggggcaaaagatactaggcccaggagtcaagaaaagcttttgtgaaagtgatagtttcacctgactttgattccttaacccccggcttttgg

SEQ ID NO: 97809 - DNA, 747 bp, Artificial Sequence
  derived and/or modified sequence
atggccggcatcaccaccatcgaggccgtgaagagaaagatccaggtgctgcagcagcaggccgacgacgccgaggagagagccgagagactgcagagagaggtggagggcgagagaagagccagagagcaggccgaggccgaggtggccagcctgaacagaagaatccagctggtggaggaggagctggacagagcccaggagagactggccaccgccctgcagaagctggaggaggccgagaaggccgccgacgagagcgagagaggcatgaaggtgatcgagaacagagccctgaaggacgaggagaagatggagctgcaggagatccagctgaaggaggccaagcacatcgccgaggaggccgacagaaagtacgaggaggtggccagaaagctggtgatcatcgagggcgacctggagagaaccgaggagagagccgagctggccgagagcagatgcagagagatggacgagcagatcagactgatggaccagaacctgaagtgcctgagcgccgccgaggagaagtacagccagaaggaggacaagtacgaggaggagatcaagatcctgaccgacaagctgaaggaggccgagaccagagccgagttcgccgagagaagcgtggccaagctggagaagaccatcgacgacctggaggacgagctgtacgcccagaagctgaagtacaaggccatcagcgaggagctggaccacgccctgaacgacatgaccagcatctag

SEQ ID NO: 97810 - DNA, 747 bp, Artificial Sequence
  derived and/or modified sequence
atggccggaatcaccacaatcgaggcagtgaagcgtaagatacaggtcctgcagcagcaggctgatgacgcagaggaacgcgcagagagactccagagagaggtggagggagagagaagggctagggaacaggccgaagcggaggtagctagtcttaaccgccgcatccagctggtggaggaagaactggatagagcacaggaacgtctggcgaccgccctccaaaaactggaggaagctgaaaaggccgctgatgagagcgagcggggaatgaaagtcatcgagaaccgagcccttaaggacgaagagaagatggagctccaggagatccagctgaaggaggccaaacacatagctgaggaggccgaccgcaaatacgaagaagttgcaagaaagttggtcattatcgaaggggatctcgaaagaaccgaggaaagggcagagttggctgaatcacgttgtagagagatggatgagcagatcaggcttatggaccaaaacttaaaatgcctgagtgccgcagaggaaaaatactcccaaaaagaggataaatacgaagaagagatcaagatcctgaccgataagctgaaagaggccgaaactcgtgcagagtttgctgagcggtccgtcgccaagttagaaaagaccattgacgatctagaggatgaattgtatgctcagaagctgaaatataaggctatttcagaagagctggaccacgccctgaatgacatgaccagtatctag

SEQ ID NO: 97811 - DNA, 747 bp, Artificial Sequence
  derived and/or modified sequence
atggccggcatcaccaccattgaagctgtgaagaggaagatccaggtgctgcagcagcaggctgatgatgctgaggagcgggcagagcggctgcagcgggaggtggagggggagcggcgggcccgggagcaggccgaggccgaggtggccagcctgaacagacgcatccagctggtggaggaggagctggaccgggcccaggagcggctggccacagccctgcagaagctggaggaggccgagaaggccgcagatgaaagtgagcggggcatgaaggtgattgaaaatagagccctgaaggatgaggagaagatggagctgcaggagatccagctgaaggaggccaagcacatcgccgaggaggccgacagaaaatatgaggaggtggccaggaagctggtgatcatcgagggggacctggagaggacagaggagagagctgagctggccgagagccgctgccgggagatggatgagcagatccggctgatggaccagaacctgaagtgcctgtctgctgctgaggagaagtacagccagaaggaggacaagtatgaggaggagatcaagatcctgacagacaagctgaaggaggccgagaccagggctgagtttgctgagaggtctgtggccaagctggagaagaccattgatgacctggaggatgagctgtatgcccagaagctgaagtacaaggccatcagcgaggagctggaccacgccctgaatgacatgaccagcatctag

SEQ ID NO: 97812 - DNA, 747 bp, Artificial Sequence
  derived and/or modified sequence
atggccggcatcaccaccatcgaggccgtgaagcggaagatccaggtcttgcagcagcaggcagatgacgccgaggagcgggccgagcgcctccagagggaggttgagggggaacgtagggcaagggaacaagccgaagccgaggtggccagccttaaccgccgtatccagctggtggaggaggaactggacagagcccaggagcggctcgccacagccctgcagaagctggaagaagccgaaaaggccgctgatgaatcagaacgcgggatgaaggtgatagagaatagagcactgaaggacgaggaaaagatggaactccaggaaatccagctgaaggaggcaaagcatattgctgaggaagctgaccgtaagtacgaggaggtggcccgaaaactggtcattatcgagggagatctggaacgcaccgaagagagagctgagttggctgaatcccgttgtagagagatggatgagcagattcgattgatggaccagaacctgaaatgcctctctgccgctgaggagaaatactcccagaaggaagataaatatgaggaggaaatcaagattttgaccgacaagctgaaagaggccgagaccagagcggagtttgccgagagaagcgtggccaaactggaaaagaccatagatgatctggaggacgaactttacgcccagaaactaaagtataaggccatatctgaggagctcgaccacgcactaaacgatatgaccagcatctag

SEQ ID NO: 97813 - DNA, 747 bp, Artificial Sequence
  derived and/or modified sequence
atggcaggcatcactaccatagaggccgtaaaacgcaagatacaagtcttgcagcagcaggccgacgacgccgaagaacgggctgaaagattgcagagagaagtggagggagaaagaagggcaagggaacaggctgaggcagaagtagcttccctgaaccgcagaattcaattagtggaagaagaactggaccgtgcccaggaacggttagctacagctctgcagaagctagaggaagctgaaaaggctgccgatgagtcagagagagggatgaaggtcatcgagaatcgggctctcaaggatgaagaaaagatggaactccaggaaattcagcttaaggaggcaaagcacattgcagaggaagccgacagaaaatacgaggaagtggcacgcaagctggtgattattgagggggacctggagcggactgaggagagagctgaactggcagaaagtcggtgtagagagatggacgaacaaattcgtctcatggaccaaaacttaaaatgcctgagcgcggctgaagaaaaatacagtcagaaagaggacaagtacgaggaggagatcaagatcttgacagacaaacttaaagaagctgaaaccagagccgaatttgctgagcgctcagtggctaagctcgagaagactattgacgaccttgaggacgaactgtacgcacagaagctgaagtataaagcaatttctgaagaactggatcacgccctgaatgatatgaccagcatctag

SEQ ID NO: 97814 - DNA, 1771 bp, Artificial Sequence
  derived and/or modified sequence
atggctgggatcaccaccatcgaggcggtgaagcgcaagatccaggttctgcagcagcaggcagatgatgcagaggagcgagctgagcgcctccagcgagaagttgagggagaaaggcgggcccgggaacaggctgaggctgaggtggcctccttgaaccgtaggatccagctggttgaagaagagctggaccgtgctcaggagcgcctggccactgccctgcaaaagctggaagaagctgaaaaagctgctgatgagagtgagagaggtatgaaggttattgaaaaccgggccttaaaagatgaagaaaagatggaactccaggaaatccaactcaaagaagctaagcacattgcagaagaggcagataggaagtatgaagaggtggctcgtaagttggtgatcattgaaggagacttggaacgcacagaggaacgagctgagctggcagagtcccgttgccgagagatggatgagcagattagactgatggaccagaacctgaagtgtctgagtgctgctgaagaaaagtactctcaaaaagaagataaatatgaggaagaaatcaagattcttactgataaactcaaggaggcagagacccgtgctgagtttgctgagagatcggtagccaagctggaaaagacaattgatgacctggaagatgagctctatgcccagaaactgaagtacaaggccattagcgaggagctggaccacgccctcaatgacatgacctctatataaactgaaatgcaccaaagaggagcacctctgtacacaaaggatgctggaccagaccctgcttgacctgaatgagatgtagaacgccccagtcccaccctgctgctgctcctccctctgacccagactccgcctgaggccagcctgcgggaagctgacctttaactgagggctgatctttaactggaaggctgctttctcctttcaccaccccctccttccctgtgtctttttcgccaaactgtctctgcctcttcccggagaatccagctgggctagaggctgagcacctttggaaacaacatttaagggaatgtgagcacaatgcataatgtctttaaaaagcatgttgtgatgtacacattttgtaattaccttttttgttgttttgtagcaaccatttgtaaaacattccaaataattccacagtcctgaagcagcaatcgaatccctttctcacttttggaaggtgacttttcaccttaatgcatattcccctctccatagaggagaggaaaaggtgtaggcctgccttaccgagagccaaacagagcccagggagactccgctgtgggaaacctcattgttctgtacaaagtactagctaaaccagaaaggtgattccaggaggagttagccaaacaacaacaaaaacaaaaaatgtgctgttcaagttttcagctttaagatatctttggataatgttatttctattttttatttttttcattagaagttaccaaattaagatggtaagacctctgagaccaaaattttgtcccatctctaccccctcacaactgcttacagaatggatcatgtcccccttatgttgaggtgaccacttaattgctttcctgcctccttgaaagaaagaaagaaagaagactgtgtttttgccactgatttagccatgtgaaactcatctcattacccttttctgggtttgaagctgctgtctctagaagtgccatctcaattgtgctttgtatcagtcagtgctggagaaatcttgaatagcttatgt

SEQ ID NO: 97815 - DNA, 2544 bp, Artificial Sequence
  derived and/or modified sequence
atgacccgctttaggatcgatgaactcgaaccacgccggccccgctatcgcgttccggacgttctcgttgcagacccacctattgccagactgagtgtgtcaggccgagacgagaacagcgtggaacttacaatggcggagggaccctacaaaatcatactgactgccaggccattccggctggatcttttggaagaccggagtctgttactctcagtgaacgcaagagggctgctggagtttgaacatcaaagagccccgcgtgtaagccagggttccaaggacccagccgagggggatggcgctcaacctgaggagactccacgggatggggacaagccagaggagacccagggaaaggcagaaaaagatgaacccggagcctgggaggagaccttcaagacgcactctgactccaaaccttacggtcccatgagcgtgggcctcgattttagcttgccgggcatggagcatgtgtatggcattccagaacatgccgacaatctcagactcaaagtcacagaaggcggcgagccctatagactgtacaatttggatgtcttccaatacgagctatataatcctatggctctgtacggctccgtgcctgtactgctggctcacaatccacaccgggatctcggcatcttctggcttaatgccgccgaaacctgggtggacatctccagcaacacagccggcaaaactctctttgggaaaatgatggactatctccaggggagtggcgagacacctcagaccgatgtacggtggatgtctgagaccggcatcattgacgttttcctcctccttggcccatctatcagtgacgtgttccgacagtatgcatcgctgactggcacacaggccctccctcccctgtttagtctggggtaccaccagagccgatggaactacagagacgaagcagacgttctggaagtcgaccaggggtttgacgaccacaacctcccttgcgatgttatttggcttgatattgagcatgcggacggaaagcggtacttcacctgggatccttcccgatttccacagccacggacaatgttagagagactggcctcaaaacgccgaaagttggtggctattgttgatccccatatcaaggtggatagcggatatcgagtccacgaagaactcaggaacctgggcctctacgttaaaacacgagatggcagtgactacgagggctggtgctggccgggtagcgctggctacccagattttacaaatcccactatgcgtgcttggtgggcgaatatgttctcttatgataactatgagggatctgcccctaatctatttgtgtggaacgatatgaacgagccttctgtcttcaacggccccgaggtgacgatgttaaaggacgctcaacactatggcggatgggaacaccgtgacgtgcataacatctacggattgtacgtgcacatggccactgccgacggcctgcggcaacggagcggcggaatggagcgcccattcgtcctggcacgtgccttttttgcaggcagccagagatttggcgctgtgtggaccggcgacaataccgcagagtgggatcacctgaagatatcaataccaatgtgtctatccttgggcctggtcggtctttccttttgcggtgctgacgttggggggtttttcaagaatcctgaaccagagctactggtcagatggtaccagatgggtgcttaccagcctttctttagggcccatgcccacttagacacggggcggcgggagccatggcttctcccgagccagcataacgacatcattcgtgacgccctaggacaaagatattccctgcttccattttggtataccctgttgtatcaagctcatcgcgaaggaatcccagttatgaggccactttgggtgcagtaccctcaagatgtgacaactttcaacatcgatgatcaatacctgctgggggacgctttactggtgcaccccgtgtccgattccggggcacacggcgtccaggtgtacttaccaggtcagggcgaggtctggtatgacatccagtcctaccaaaaacaccatgggccgcagactctgtacctacccgtaactctgtcctccatccctgtgttccagagaggcggcacaatcgtaccaagatggatgagggtcaggcgtagctctgagtgtatgaaggatgacccgatcaccctgtttgttgcactgtccccacagggtaccgctcaaggggagttgttcctggatgacggccacaccttcaactaccagactcgccaggaattcctgctgcgtagatttagcttctccggaaacacattggtgtcgtcctctgccgaccccgaggggcatttcgaaacccctatttggattgaacgcgtggtgatcatcggcgccggtaaaccagccgctgtggtcctgcagactaagggttcaccggaatctcggctgtcctttcagcacgaccctgaaactagtgtgttggtcctacgaaagcctggtattaatgtggcgtctgactggtcgatacacctgcgctag

SEQ ID NO: 97816 - DNA, 2544 bp, Artificial Sequence
  derived and/or modified sequence
atgacccgcttcagaattgatgagctggagccccggcggccccgctacagagtgcctgatgtgctggtggccgacccccccatcgcccggctgtctgtgtctggaagagatgagaacagcgtggagctgaccatggccgagggcccctacaagatcatcctgacagcccggcccttccggctggacctgctggaggacaggagcctgctgctgtctgtgaatgcccggggcctgctggagtttgagcaccagagggccccccgggtgtcccagggcagcaaggaccctgcagaaggagatggagcccagcctgaggagaccccaagagatggagacaagccagaggagacccagggcaaggccgagaaggatgagcccggggcctgggaggagaccttcaagacccacagcgacagcaagccctacggccccatgtctgtgggcctggacttcagcctgcccggcatggagcacgtgtatggcatccctgagcacgccgacaacctgcggctgaaggtgacagagggcggggagccctaccgcctgtacaacctggatgtgttccagtatgagctgtacaaccccatggccctgtatggctctgtgcctgtgctgctggcccacaacccccaccgggacctgggcatcttctggctgaatgctgctgagacctgggtggacatcagcagcaacacagctgggaagaccctgtttgggaagatgatggactacctgcagggcagcggggagaccccccagacagatgtgcgctggatgtctgagaccggcatcattgatgtgttcctgctgctgggccccagcatcagtgatgtgttccggcagtatgccagcctgaccggcacccaggccctgcccccactcttcagcctgggctaccaccagagccgctggaactacagagatgaagcagatgtgctggaggtggaccagggctttgatgaccacaacctgccctgtgatgtgatctggctggacattgaacatgctgatggcaagcgctacttcacctgggaccccagccgcttcccccagcccaggaccatgctggagcggctggccagcaagaggaggaagctggtggccatcgtggacccccacatcaaggtggacagcggctacagagtgcatgaggagctgaggaacctgggcctgtatgtgaagaccagagatggcagtgactatgagggctggtgctggccaggcagcgctggctacccagacttcaccaaccccaccatgagggcctggtgggccaacatgttctcctatgacaactatgagggcagcgcccccaacctgtttgtgtggaatgacatgaatgagcccagcgtcttcaatggacctgaggtgaccatgctgaaggatgcccagcactacggcggctgggagcacagagatgtgcacaacatctacggcctgtatgtgcacatggccacagcagatggcctgcggcagaggtctgggggcatggagcggccctttgtgctggcccgggccttctttgctggcagccagagatttggagctgtgtggacaggagacaacacagctgagtgggaccacctgaagatcagcatccccatgtgcctgagcctgggcctggtgggcctgtccttctgtggggctgatgtgggcggcttcttcaagaaccctgagcctgagctgctggtgcgctggtaccagatgggcgcctaccagcccttcttccgggcccacgcccacctggacaccggccggcgggagccctggctgctgcccagccagcacaatgacatcatcagagatgccctgggccagcgctacagcctgctgcccttctggtacaccctgctgtaccaggcccaccgggagggcatccctgtgatgaggcccctgtgggtgcagtacccccaggatgtgaccaccttcaacattgatgaccagtacctgctgggagatgccctgctggtgcaccctgtgtctgattctggggcccacggcgtgcaggtgtacctgcccggccagggcgaggtgtggtatgacatccagagctaccagaagcaccacggcccccagaccctgtacctgcctgtgaccctgagcagcatccctgtgttccagagaggaggcaccatcgtgccccgctggatgagggtgcggcgcagcagcgagtgcatgaaggatgaccccatcaccctgtttgtggccctgagcccccagggcacagcccagggcgagctgttcctggatgatggccacaccttcaactaccagacccggcaggagttcctgctgcggcgcttctccttcagcggcaacaccctggtgagcagcagcgctgaccctgagggccactttgagacccccatctggattgaaagagtggtgatcatcggggccggcaagccagctgctgtggtgctgcagaccaagggcagccctgagagccggctgtccttccagcacgaccctgagacctctgtgctggtgctgaggaagccaggcatcaacgtggccagtgactggagcatccacctgaggtag

SEQ ID NO: 97817 - DNA, 2544 bp, Artificial Sequence
  derived and/or modified sequence
atgacccggttccggatcgacgagctggagccccggcggccccggtatcgcgtgcctgacgtcctggtagccgatccacccattgcgcgtctctccgtcagcggacgtgacgagaactctgtcgagctaactatggccgaaggcccatacaagatcattctgactgcccggccattcagactggatctgctcgaagatcgaagtctactgctgtctgtgaatgctcgtggactgctggagttcgaacaccagcgtgcccccagagtctcacagggctctaaagacccagctgagggcgatggagcccagccagaagagactccaagggacggcgataagcccgaggagacccaaggcaaagcggaaaaagacgaaccaggagcttgggaagagacgttcaagacccacagtgattctaagccatatggccctatgagtgtggggttggacttttcgctgccggggatggagcacgtctacggcatacctgaacacgctgacaatctccgcctgaaggtgaccgagggtggggaaccatatagactgtacaatctggatgtttttcagtacgagctgtataacccaatggccctgtatggcagtgttcccgtgctgttagctcacaacccccatagagatcttggcattttttggctgaacgcagctgagacctgggtcgatataagttcaaacaccgctgggaaaaccctgtttggcaaaatgatggactacctgcaaggtagtggtgagacaccccagacggacgttaggtggatgagcgaaactggcattatcgacgtttttctgctactgggaccatcaatctccgacgtctttcgtcagtatgcttccttaacaggtacccaggctctgcccccactgttcagcctcggctaccaccagtctcgctggaactatagggacgaggcagatgtcctggaggtagaccagggatttgatgaccataacttaccttgtgacgtcatctggctggacattgaacatgccgacggtaagagatacttcacatgggatccgtcaaggttcccccagcccaggaccatgttggagagactcgcgagtaaaagacggaaattggtggctatcgtggatccacacatcaaagttgacagcgggtaccgggtccatgaagagctccgaaacctcgggttgtacgtcaagacccgcgacggtagtgattacgagggctggtgttggccgggatctgcagggtacccggacttcacaaatccaactatgagggcttggtgggcaaacatgttttcgtacgacaattacgaaggatctgctcctaatttgttcgtctggaatgacatgaacgagccctcggtcttcaatgggcccgaagtgacaatgctcaaggacgcacaacactacgggggatgggagcacagagatgtgcataacatatatggcctgtatgttcatatggccacagcggacggattaagacagagaagcggtgggatggaaaggcccttcgtgttggcgagagccttctttgccgggtctcagaggtttggggctgtttggaccggggacaatactgccgagtgggatcacctaaagatatctatcccaatgtgtctctccctggggctcgtcggattgtcattttgcggtgccgatgtcgggggcttcttcaaaaacccggaaccagaactgctggtcagatggtaccagatgggggcataccagccgtttttccgagcgcatgcccacctcgataccggacggagagaaccctggctgcttccttcccagcacaacgatatcattcgcgacgcgctgggccagaggtacagcctgttacctttctggtatacgctactgtatcaagcacaccgtgaaggtattcccgtgatgcggcctctttgggtgcagtatccccaggatgttaccacattcaacatcgatgatcaatacctgctgggagatgccctgctcgtccacccagtctcagacagcggcgcacatggagtccaggtgtatttgccaggccagggagaggtgtggtatgatattcagagctaccaaaagcaccatggcccccagacattgtatttgcccgtcaccctgtcatctatacccgtctttcaaagaggaggcaccatagtccctaggtggatgcgcgtgaggcgatcctctgagtgcatgaaagacgatcccatcaccttgtttgtggctctgtcccctcagggcactgcccagggcgagctgtttttggacgacggtcatacattcaactaccaaacaaggcaggagtttctgcttcgaaggttcagcttcagcggtaataccctcgtgtcttcttcagccgatcctgagggacactttgaaacccccatttggattgagcgggttgtgatcatcggcgcagggaaacccgcagccgtcgtcctgcagaccaaaggcagcccagaatccaggctgtccttccagcacgatcccgaaactagtgtcctggtacttagaaagccaggaatcaacgtcgcatccgactggagcattcacctgcggtag

SEQ ID NO: 97818 - DNA, 2544 bp, Artificial Sequence
  derived and/or modified sequence
atgacgaggtttcgcattgatgagctcgagcctcggagaccaagatatcgtgtaccagacgtgctcgtggccgacccacccatcgcgcgacttagtgtctccggacgcgatgagaatagtgtggaactcacgatggcagaaggtccgtacaaaattatcttaaccgctcggccattcagactggacctgctcgaggatagaagcctgctgctgtctgtgaacgcccgagggcttctggaattcgagcaccaaagggccccacgcgtctcacagggaagcaaggatccggctgaaggtgatggcgctcaaccagaagagaccccaagagacggcgataagcccgaagagacacaggggaaagctgaaaaagacgagcctggggcttgggaagagactttcaagacgcacagcgacagcaaaccatatggccctatgtcggtgggcttggacttctccctacccggtatggagcacgtgtatggcatccccgagcacgccgataacctgagacttaaggtgaccgaggggggtgagccatatcgactctataatttagacgtctttcagtacgaactgtataaccctatggccctctacggctcagttcccgtgttgcttgcacacaatccacacagagacctgggaatcttctggctgaatgctgctgaaacatgggttgacatctcctcgaataccgccggaaaaacactgttcggaaagatgatggattacttgcaagggtccggagagacaccacagacagatgttaggtggatgagtgagaccggtattattgatgtctttcttctgctagggcctagcatttctgacgttttccggcagtatgccagcctgaccggaacccaggcactgccccctctgttttccttggggtatcatcagagcaggtggaactacagggacgaagctgatgtgctcgaggtggatcaggggttcgacgaccacaacctgccttgcgacgtaatctggctggacatagaacatgcagatggcaagcgatactttacgtgggatccctcgagatttccgcagccgaggaccatgcttgagcgcctggcctccaagcgcaggaagctggtcgctatcgtcgatccgcacataaaggtggattccggttatcgggtacatgaggagctgaggaacttaggcctgtatgtcaagaccagggacggctcagactatgagggttggtgttggcccggatcagcgggatacccggactttactaatcctacaatgagagcctggtgggctaatatgttcagttatgataactatgaagggagtgcaccgaatctatttgtttggaacgatatgaacgaaccaagcgtcttcaatgggcctgaggtgactatgcttaaagatgcgcagcattacggtggctgggagcaccgcgacgttcacaatatttatggtctctatgtgcatatggcgacggcggatggactgcgccaaagatcaggcggtatggaacgacccttcgtgctggcaagagccttctttgctggctcacagcgctttggcgctgtgtggaccggggataataccgcagagtgggaccacctgaagatttccatacccatgtgcctgtctttagggctggtcggcctgtcattttgtggcgctgacgtcggaggtttttttaagaacccggagcccgaattgttagtgcgatggtaccagatgggagcatatcagccattttttagagctcacgcccacctagacaccggacggcgagagccttggctgctaccgtcgcaacacaacgacatcatacgagatgccctgggccaacggtacagtctgctcccattttggtacaccttgctgtatcaggcccaccgggaaggaattcccgtcatgagacccctgtgggtgcaatacccccaggacgtgaccacattcaacatcgatgatcagtaccttttaggcgatgctctgcttgtgcaccccgtgagcgatagcggggctcacggcgttcaagtgtatttacccggacagggggaggtttggtacgatattcagtcctatcagaaacatcacgggccacaaactttgtacctccccgtaaccctgagctcaatccctgtgttccaacgtggtggcaccatcgtgcccaggtggatgagggtcagaagaagtagcgagtgcatgaaagacgacccaatcacactgttcgtggcactgtcaccccagggcaccgcccaaggtgaactgtttctcgatgacggacatactttcaactatcagaccaggcaggagtttttgctgcgcaggtttagcttcagcgggaataccttagtgtccagttctgctgacccagaaggtcactttgagacgcccatctggatcgagcgtgttgtcattataggagccggaaagccggcagctgtggtactgcaaactaagggatcaccagagtcccgcttgtccttccaacacgatcctgaaacctctgtacttgtcttgcggaaacccggaataaacgtcgcatcagattggagtattcacctgagatag

SEQ ID NO: 97819 - DNA, 2544 bp, Artificial Sequence
  derived and/or modified sequence
atgaccagattcagaatcgacgagctggagcccagaagacccagatacagagtgcccgacgtgctggtggccgacccccccatcgccagactgagcgtgagcggcagagacgagaacagcgtggagctgaccatggccgagggcccctacaagatcatcctgaccgccagacccttcagactggacctgctggaggacagaagcctgctgctgagcgtgaacgccagaggcctgctggagttcgagcaccagagagcccccagagtgagccagggcagcaaggaccccgccgagggcgacggcgcccagcccgaggagacccccagagacggcgacaagcccgaggagacccagggcaaggccgagaaggacgagcccggcgcctgggaggagaccttcaagacccacagcgacagcaagccctacggccccatgagcgtgggcctggacttcagcctgcccggcatggagcacgtgtacggcatccccgagcacgccgacaacctgagactgaaggtgaccgagggcggcgagccctacagactgtacaacctggacgtgttccagtacgagctgtacaaccccatggccctgtacggcagcgtgcccgtgctgctggcccacaacccccacagagacctgggcatcttctggctgaacgccgccgagacctgggtggacatcagcagcaacaccgccggcaagaccctgttcggcaagatgatggactacctgcagggcagcggcgagaccccccagaccgacgtgagatggatgagcgagaccggcatcatcgacgtgttcctgctgctgggccccagcatcagcgacgtgttcagacagtacgccagcctgaccggcacccaggccctgccccccctgttcagcctgggctaccaccagagcagatggaactacagagacgaggccgacgtgctggaggtggaccagggcttcgacgaccacaacctgccctgcgacgtgatctggctggacatcgagcacgccgacggcaagagatacttcacctgggaccccagcagattcccccagcccagaaccatgctggagagactggccagcaagagaagaaagctggtggccatcgtggacccccacatcaaggtggacagcggctacagagtgcacgaggagctgagaaacctgggcctgtacgtgaagaccagagacggcagcgactacgagggctggtgctggcccggcagcgccggctaccccgacttcaccaaccccaccatgagagcctggtgggccaacatgttcagctacgacaactacgagggcagcgcccccaacctgttcgtgtggaacgacatgaacgagcccagcgtgttcaacggccccgaggtgaccatgctgaaggacgcccagcactacggcggctgggagcacagagacgtgcacaacatctacggcctgtacgtgcacatggccaccgccgacggcctgagacagagaagcggcggcatggagagacccttcgtgctggccagagccttcttcgccggcagccagagattcggcgccgtgtggaccggcgacaacaccgccgagtgggaccacctgaagatcagcatccccatgtgcctgagcctgggcctggtgggcctgagcttctgcggcgccgacgtgggcggcttcttcaagaaccccgagcccgagctgctggtgagatggtaccagatgggcgcctaccagcccttcttcagagcccacgcccacctggacaccggcagaagagagccctggctgctgcccagccagcacaacgacatcatcagagacgccctgggccagagatacagcctgctgcccttctggtacaccctgctgtaccaggcccacagagagggcatccccgtgatgagacccctgtgggtgcagtacccccaggacgtgaccaccttcaacatcgacgaccagtacctgctgggcgacgccctgctggtgcaccccgtgagcgacagcggcgcccacggcgtgcaggtgtacctgcccggccagggcgaggtgtggtacgacatccagagctaccagaagcaccacggcccccagaccctgtacctgcccgtgaccctgagcagcatccccgtgttccagagaggcggcaccatcgtgcccagatggatgagagtgagaagaagcagcgagtgcatgaaggacgaccccatcaccctgttcgtggccctgagcccccagggcaccgcccagggcgagctgttcctggacgacggccacaccttcaactaccagaccagacaggagttcctgctgagaagattcagcttcagcggcaacaccctggtgagcagcagcgccgaccccgagggccacttcgagacccccatctggatcgagagagtggtgatcatcggcgccggcaagcccgccgccgtggtgctgcagaccaagggcagccccgagagcagactgagcttccagcacgaccccgagaccagcgtgctggtgctgagaaagcccggcatcaacgtggccagcgactggagcatccacctgagatag

SEQ ID NO: 97820 - protein, 143 aa, Artificial Sequence
  derived and/or modified sequence
MAAIGVHLGCTSACVAVYKDGRAGVVANDAGDRVTPAVVAYSENEEIVGLAAKQSRIRNISNTVMKVKQILGRRVLSRDPQLQQLPQPFQRCSCSLSEQPHGQTGCVRGAQPLHQHQPQHSWGSLHTADSSLLFESWFCFWWG

SEQ ID NO: 97821 - DNA, 432 bp, Artificial Sequence
  derived and/or modified sequence
atggccgccatcggagtccacttgggttgcactagcgcatgcgtggctgtatacaaagacgggcgggcaggggtagtcgccaatgacgccggcgatcgcgtgacgcctgccgtcgtggcctatagtgagaacgaggagattgtcggactggctgctaagcagtcacgcatccgaaacatctctaacaccgtcatgaaagtgaagcaaatcctggggaggcgggtgctttccagagacccacagctgcagcagctgccccagccattccagaggtgttcctgctctcttagcgaacagccacatgggcagacagggtgtgtgcggggagcccagcctctgcaccagcaccagcctcagcatagctggggctctctgcacacagcagattcatccctcttgttcgaatcctggttttgtttctggtggggctag

SEQ ID NO: 97822 - DNA, 1978 bp, Artificial Sequence
  derived and/or modified sequence
gtgcctgatggggccgttgggcggccggtagctgttgctgttgggggaccccctcattcctgccgctgccgtccctgctgcctcatggcggccatcggagttcacctgggctgcacctcagcctgtgtggccgtctataaggatggccgggctggtgtggttgcaaatgatgccggtgaccgagttactccagctgttgttgcttactcagaaaatgaagagattgttggattggcagcaaaacaaagtagaataagaaatatttcaaatacagtaatgaaagtaaagcagatcctgggcagaagccagaaatgcggtccttggacctggcttctcagcttctccgaaatcagatagtgactgacccagacaacttaatggaggatgctgcttgggccaagcactgtgatcagaacttagtggcctctgacgccccaggggaagagggaaccggcattctaaaatcaaaaaggactcaggcagctgatcatcagcctatcttgaaaacagttaaggcatcagatgaggattgtcagctaagaatcagtgaccggatacgagaaaccagtgaccttgaggactcctgggatgaatcctcgggtgcagggtgctctcaagggacccccagctacagcagctcccacagccttttcagaggtgcagttgctccctgtcagagcagccccatggccagactgggtgtgtccggggagcccagcccctgcaccagcaccaaccgcagcactcctggggtagcctccacaccgcagactccagtctcctcttcgagagctggttttgtttctggtggggataggcccttgaccagtgagccccctccaaggtgggcaaggcgaagaaggcggtcagtggccaggactatcgcagccgagttggcagaaaacaggcgattggcacgagaactctcaaagcgggaggaagaaaaactggacaggctgattgctattggtgaggaggccagtgctcagcaagatactgccaatgagctccgcagggatgctgtcatcgcagtcagacgtttggcaacagcagtggaagaggcaactggtgcttttcagctaggccttgaaaaattgcttcagaggttgatttcgaataccaaaagctaggaaccaattacaaaaggctctgcttcctaaactggtagaagtctagttcccaaacctgccttctgaatccctggctccttttctgtgtcctcagaaaaaaacatggatgaaccatttatatccagatagtatgaaaataattgctagttcattttcccaagattctccaccaaatggaagacctttcagaaatgccaggggtgacctaatagaaaacgatggagccacgttctagacagctggttcatcctagctttgtcacagatgtgaagcagtttacctccctccagtggtttcctcatccgtaaaatggggatcaataataactcctgccctgcctacctcacagggttgttgtgaggatcacgtagttcatagatgtgaaagggtttaaaagtttaaaagcactgtacacatttaagttattaattcatatggccttggctgaggtaaggcagattggtttacaagatacagaagtatggatatatactgtgacttcattgcttgaatctttcctttgctggtctaacttgactgcttcatggagtttgaaatcttaatttttaaaatccctgtgtggctcattagacgactataagcacaacctgtatttgtaccttaatctcttacatttccactgctgtgtatctgacatatctactagtaagcactgttttgtcaaaccgtctttctctccttcattttactggttcttagtctcctatcaatataaggaaataagaagtgccagggagccgccattgtgtgttacggtttatatcgataatcttcaatataaaatactggccattttataaaatattaaatatatgtaaattctttgc

SEQ ID NO: 97823 - DNA, 1689 bp, Artificial Sequence
  derived and/or modified sequence
gaacgtgaagctccgcggtgcctgatggggccgttgggcggccggtagctgttgctgttgggggaccccctcattcctgccgctgccgtccctgctgcctcatggcggccatcggagttcacctgggctgcacctcagcctgtgtggccgtctataaggatggccgggctggtgtggttgcaaatgatgccggtgaccgagttactccagctgttgttgcttactcagaaaatgaagagattgttggattggcagcaaaacaaagtagaataagaaatatttcaaatacagtaatgaaagtaaagcagatcctgggcagaagggtgctctcaagggacccccagctacagcagctcccacagccttttcagaggtgcagttgctccctgtcagagcagccccatggccagactgggtgtgtccggggagcccagcccctgcaccagcaccaaccgcagcactcctggggtagcctccacaccgcagactccagtctcctcttcgagagctggttttgtttctggtggggataggcccttgaccagtgagccccctccaaggtgggcaaggcgaagaaggcggtcagtggccaggactatcgcagccgagttggcagaaaacaggcgattggcacgagaactctcaaagcgggaggaagaaaaactggacaggctgattgctattggtgaggaggccagtgctcagcaagatactgccaatgagctccgcagggatgctgtcatcgcagtcagacgtttggcaacagcagtggaagaggcaactggtgcttttcagctaggccttgaaaaattgcttcagaggttgatttcgaataccaaaagctaggaaccaattacaaaaggctctgcttcctaaactggtagaagtctagttcccaaacctgccttctgaatccctggctccttttctgtgtcctcagaaaaaaacatggatgaaccatttatatccagatagtatgaaaataattgctagttcattttcccaagattctccaccaaatggaagacctttcagaaatgccaggggtgacctaatagaaaacgatggagccacgttctagacagctggttcatcctagctttgtcacagatgtgaagcagtttacctccctccagtggtttcctcatccgtaaaatggggatcaataataactcctgccctgcctacctcacagggttgttgtgaggatcacgtagttcatagatgtgaaagggtttaaaagtttaaaagcactgtacacatttaagttattaattcatatggccttggctgaggtaaggcagattggtttacaagatacagaagtatggatatatactgtgacttcattgcttgaatctttcctttgctggtctaacttgactgcttcatggagtttgaaatcttaatttttaaaatccctgtgtggctcattagacgactataagcacaacctgtatttgtaccttaatctcttacatttccactgctgtgtatctgacatatctactagtaagcactgttttgtcaaaccgtctttctctccttcattttactggttcttagtctcctatcaatataaggaaataagaagtgccagggagccgccattgtgtgttacggtttatatcgataatcttcaatataaaatactggccattttataaaatattaaatatatgtaaattc

SEQ ID NO: 97824 - DNA, 819 bp, Artificial Sequence
  derived and/or modified sequence
atgaggagcctggacctggccagccagctgctgaggaaccagatcgtgacagatcctgacaacctgatggaggatgctgcctgggccaagcactgtgaccagaacctggtggccagtgatgcccctggagaggagggcaccggcatcctgaagagcaagaggacccaggccgctgaccaccagcccatcctgaagacagtgaaggccagtgatgaggactgccagctgcgcatcagtgaccgcatccgggagaccagtgacctggaggacagctgggatgagagcagcggggccggctgcagccagggcacccccagctacagcagcagccacagcctcttcagaggagctgtggccccctgccagagcagccccatggcccggctgggcgtgtctggagagcccagcccctgcaccagcaccaacagaagcaccccaggagtggccagcaccccccagacccctgtgagcagcagcagagctggctttgtgtctggaggagaccggcccctgaccagcgagcccccaccccgctgggccaggagaagaagaagatctgtggcccggaccatcgctgctgagctggctgaaaatagaaggctggcccgggagctgagcaagcgggaggaggagaagctggaccggctgattgccatcggggaggaggccagcgcccagcaggacacagccaatgagctgcggagagatgctgtgattgctgtgcggcggctggccacagctgtggaggaggccaccggggccttccagctgggcctggagaagctgctgcagaggctcatcagcaacaccaagagctag

SEQ ID NO: 97825 - DNA, 432 bp, Artificial Sequence
  derived and/or modified sequence
atggccgccatcggcgtgcacctgggctgcaccagcgcctgtgtggccgtgtacaaggatggccgggccggcgtggtggccaatgatgctggggacagagtgaccccagctgtggtggcctacagtgaaaatgaggagatcgtgggcctggccgccaagcagagccgcatccggaacatcagcaacacagtgatgaaggtgaagcagatcctgggcagaagagtgctgagccgggacccccagctgcagcagctgccccagcccttccagcgctgcagctgcagcctgtctgagcagccccacggccagacaggctgtgtgcggggggcccagcccctgcaccagcaccagccccagcacagctggggcagcctgcacacagctgacagcagcctgctgtttgagagctggttctgcttctggtggggctag

SEQ ID NO: 97826 - DNA, 432 bp, Artificial Sequence
  derived and/or modified sequence
atggccgccatcggcgtgcacctgggctgcaccagcgcctgcgtggcagtgtacaaggatggcagagccggagtagtcgctaacgacgctggagaccgcgtgacacccgccgtggtagcatattcggagaatgaagagatcgtaggtctcgcagctaagcagtccaggataagaaatatctcaaatacagtcatgaaggtcaaacagatcttagggcgccgtgtactgtctagagacccgcagctgcagcagcttcctcagccctttcagcgatgttcatgtagtctgagtgaacagcctcacgggcagaccgggtgtgttcgcggagcacaacctcttcaccagcatcagccacaacattcatggggatcattgcatactgccgatagttctttacttttcgagtcttggttttgcttctggtggggctag

SEQ ID NO: 97827 - DNA, 432 bp, Artificial Sequence
  derived and/or modified sequence
atggccgctatcggagttcatctgggttgtacatcagcgtgtgtggccgtctacaaggatggtagagccggtgtggtggcaaacgacgccggagatagagtcactccagccgtggtcgcctacagcgaaaacgaggagatcgtcggcttggcggcaaagcagtctaggatccgaaatatcagcaacacagtcatgaaggtgaagcaaatcctaggccgaagggtcctctccagagatcctcagctgcagcagctacctcagccattccagcggtgcagttgttctctctcggagcaaccacacgggcagactggttgcgtgcggggagcccagccacttcaccaacatcagcctcagcactcctgggggagcctccacactgcagactccagcctccttttcgaaagttggttttgcttctggtggggctag

SEQ ID NO: 97828 - DNA, 432 bp, Artificial Sequence
  derived and/or modified sequence
atggccgccatcggcgtgcacctgggctgcaccagcgcctgcgtggccgtgtacaaggacggcagagccggcgtggtggccaacgacgccggcgacagagtgacccccgccgtggtggcctacagcgagaacgaggagatcgtgggcctggccgccaagcagagcagaatcagaaacatcagcaacaccgtgatgaaggtgaagcagatcctgggcagaagagtgctgagcagagacccccagctgcagcagctgccccagcccttccagagatgcagctgcagcctgagcgagcagccccacggccagaccggctgcgtgagaggcgcccagcccctgcaccagcaccagccccagcacagctggggcagcctgcacaccgccgacagcagcctgctgttcgagagctggttctgcttctggtggggctag

SEQ ID NO: 97829 - DNA, 66 bp, Artificial Sequence
  derived and/or modified sequence
atggacagacccggcttcgtggccgccctggtgctgctgcacttcctgagccccatgaacatgtag

SEQ ID NO: 97830 - protein, 64 aa, Artificial Sequence
  derived and/or modified sequence
MAGQGLPLHVATLLTGLLECLGFAGVLFGWPSLVFVFKNEDYFKDLCGPDAGPIGNATGQAGRL

SEQ ID NO: 97831 - DNA, 195 bp, Artificial Sequence
  derived and/or modified sequence
atggccggccagggcctgcccctgcacgtggccaccctgctgaccggcctgctggagtgcctgggcttcgccggcgtgctgttcggctggcccagcctggtgttcgtgttcaagaacgaggactacttcaaggacctgtgcggccccgacgccggccccatcggcaacgccaccggccaggccggcagactgtag

SEQ ID NO: 97832 - DNA, 69 bp, Artificial Sequence
  derived and/or modified sequence
atggccggccagggcctgcccctgcacgtggccaccctgctgaccggcctgctggagtgcctgggctag

SEQ ID NO: 97833 - DNA, 195 bp, Artificial Sequence
  derived and/or modified sequence
atggccgggcagggcctgcctttacatgtagcaactctgctgaccggcttgctcgagtgcctgggctttgcaggagtattgtttggctggccttccctggtgttcgtgtttaaaaacgaggactacttcaaagacctgtgtgggccagacgctggtcccataggcaatgcgaccggtcaggctgggaggctttag

SEQ ID NO: 97834 - DNA, 69 bp, Artificial Sequence
  derived and/or modified sequence
atggctggccaagggttgccgctgcacgtggccacactcttgacaggcctgcttgaatgtctaggttag

SEQ ID NO: 97835 - DNA, 195 bp, Artificial Sequence
  derived and/or modified sequence
atggccggccagggcctgcccctgcacgtggccaccctgctgaccggcctgctggagtgcctgggctttgctggggtgctgtttggctggcccagcctggtgtttgtgttcaagaatgaagactacttcaaggacctgtgtggcccagatgctggccccatcggaaatgccaccggccaggccggccgcctgtag

SEQ ID NO: 97836 - DNA, 195 bp, Artificial Sequence
  derived and/or modified sequence
atggccggccagggcctgcccctgcacgtggccaccctgctgaccggccttttagagtgtctgggcttcgctggggttctattcggttggccgtccttagtgtttgtgtttaaaaacgaggactacttcaaggatctgtgcgggcctgatgccggtcctatagggaatgctacggggcaggctggccggttgtag

SEQ ID NO: 97837 - DNA, 69 bp, Artificial Sequence
  derived and/or modified sequence
atggccggccagggcctgcccctgcacgtggccaccctgctgaccggtctcttagagtgcctggggtag

SEQ ID NO: 97838 - DNA, 195 bp, Artificial Sequence
  derived and/or modified sequence
atggccggtcagggcctccctctccacgtggcaactttactgaccggcttgctcgagtgcctgggctttgccggagtcttgtttggatggccttccttggtttttgtttttaagaatgaagactattttaaggatctgtgcggtccagatgctggacccatcgggaatgccacaggccaggccggacgactatag

SEQ ID NO: 97839 - DNA, 69 bp, Artificial Sequence
  derived and/or modified sequence
atggccggtcaggggctgccccttcacgtcgcaacgttgctcaccggtctcctggaatgtttgggatag

SEQ ID NO: 97840 - DNA, 562 bp, Artificial Sequence
  derived and/or modified sequence
gcaaaatgcacaaatagagtgtgtgtgtccctatgccctcatgtgctgtctgtgtgtcctctgggtgctgggtgtgacattttccctaggggacggtattcagaattcgagcgcaggagctccgcttctccacctgctcccggggagctattgggcctcctcttccagcagcctctatctttattctacaggatccagagaatcacccgctgatggtttttgcccaggcctgaaacaaccagagagctacgggaaaggaagggcttggcttgccagaggaattttccaagtgctcaaacgccaggcttacggcgcctgtgatccgtccaggaggacaaagtgggatttgaagatccactccacttctgctcatggcgggccagggcctgcccctgcacgtggccacactgctgactgggctgctggaatgcctgggctttgctggcgtcctctttggctggccttcactagtgtttgtcttcaagaatgaagattactttaaggatctgtgtggaccagatgctgggccgattggcaatgccacagggcaggctggaaggct

SEQ ID NO: 97841 - protein, 1506 aa, Artificial Sequence
  derived and/or modified sequence
MASGAGGVGGGGGGKIRTRRCHQGPIKPYQQGRQQHQGILSRVTESVKNIVPGWLQRYFNKNEDVCSCSTDTSEVPRWPENKEDHLVYADEESSNITDGRITPEPAVSNTEEPSTTSTASNYPDVLTRPSLHRSHLNFSMLESPALHCQPSTSSAFPIGSSGFSLVKEIKDSTSQHDDDNISTTSGFSSRASDKDITVSKNTSLPPLWSPEAERSHSLSQHTATSSKKPAFNLSAFGTLSPSLGNSSILKTSQLGDSPFYPGKTTYGGAAAAVRQSKLRNTPYQAPVRRQMKAKQLSAQSYGVTSSTARRILQSLEKMSSPLADAKRIPSIVSSPLNSPLDRSGIDITDFQAKREKVDSQYPPVQRLMTPKPVSIATNRSVYFKPSLTPSGEFRKTNQRIDNKCSTGYEKNMTPGQNREQRESGFSYPNFSLPAANGLSSGVGGGGGKMRRERTRFVASKPLEEERQGLTVLPKLISSSCAQAIIPSWPLKVLRLQEMEVPVLPKISLPITSSSLPTFNFSSPEITTSSPSPINSSQALTNKVQMTSPSSTGSPMFKFSSPIVKSTEANVLPPSSIGFTFSVPVAKTAELSGSSSTLEPIISSSAHHVTTVNSTNCKKTPPEDCEGPFRPAEILKEGSVLDILKSPGFASPKIDSVAAQPTATSPVVYTRPAISSFSSSGIGFGESLKAGSSWQCDTCLLQNKVTDNKCIACQAAKLSPRDTAKQTGIETPNKSGKTTLSASGTGFGDKFKPVIGTWDCDTCLVQNKPEAIKCVACETPKPGTCVKRALTLTVVSESAETMTASSSSCTVTTGTLGFGDKFKRPIGSWECSVCCVSNNAEDNKCVSCMSEKPGSSVPASSSSTVPVSLPSGGSLGLEKFKKPEGSWDCELCLVQNKADSTKCLACESAKPGTKSGFKGFDTSSSSSNSAASSSFKFGVSSSSSGPSQTLTSTGNFKFGDQGGFKIGVSSDSGSINPMSEGFKFSKPIGDFKFGVSSESKPEEVKKDSKNDNFKFGLSSGLSNPVSLTPFQFGVSNLGQEEKKEELPKSSSAGFSFGTGVINSTPAPANTIVTSENKSSFNLGTIETKSASVAPFTCKTSEAKKEEMPATKGGFSFGNVEPASLPSASVFVLGRTEEKQQEPVTSTSLVFGKKADNEEPKCQPVFSFGNSEQTKDENSSKSTFSFSMTKPSEKESEQPAKATFAFGAQTSTTADQGAAKPVFSFLNNSSSSSSTPATSAGGGIFGSSTSSSNPPVATFVFGQSSNPVSSSAFGNTAESSTSQSLLFSQDSKLATTSSTGTAVTPFVFGPGASSNNTTTSGFGFGATTTSSSAGSSFVFGTGPSAPSASPAFGANQTPTFGQSQGASQPNPPGFGSISSSTALFPTGSQPAPPTFGTVSSSSQPPVFGQQPSQSAFGSGTTPNSSSAFQFGSSTTNFNFTNNSPSGVFTFGANSSTPAASAQPSGSGGFPFNQSPAAFTVGSNGKNVFSSSGTSFSGRKIKTAVRRRK

SEQ ID NO: 97842 - DNA, 4521 bp, Artificial Sequence
  derived and/or modified sequence
atggcctcaggcgccgggggcgtcgggggcgggggcgggggaaaaatcaggaccagaagatgccatcagggtccaatcaagccgtatcaacagggaagacaacagcaccaagggattctgtctagagtgactgagagtgtgaagaacatagtgcccggatggctacagaggtactttaacaagaatgaagatgtctgtagttgtagtaccgatacttctgaggttcctcggtggcctgagaataaggaagatcatctggtgtacgcggacgaagagtctagtaatatcaccgacggcaggattacccccgagcctgcagtgagtaacactgaagaaccgtctactacctcgacagctagcaactatccagacgtcctgacacgtccctcacttcaccgatcccatctcaacttttccatgctagaatcccccgccttgcattgccaacccagtaccagtagtgcctttccaataggcagtagcggctttagtctggtcaaagaaataaaggacagcaccagccagcacgacgacgataatattagcacaacaagcgggttctccagtagagccagcgataaggacattactgttagcaagaacactagcctacctccgctttggtccccagaagctgagagatcacactccctgtctcaacataccgccacctcttccaaaaaacccgcctttaacctctccgccttcggcacattaagtcccagccttgggaactctagcatcctgaagacttctcagctcggggactcccctttctatcctggcaagacgacctacgggggggccgcggccgcggtgcgacagagtaagctaagaaacaccccttaccaagcccccgttcggagacagatgaaagccaagcagctttccgcccaaagctatggcgtcacaagcagtaccgctagacggatactccagagcctcgagaagatgagttctccactggccgatgccaagagaatcccgtctattgtcagtagtcctctcaactcccctctggaccgttcgggaatcgatattactgattttcaagccaagcgcgagaaggttgatagccagtatcccccggttcaacgcctgatgacccctaaaccggtcagcatcgcaactaaccggtccgtctatttcaagccctcactgaccccgtctggcgagtttcggaagacgaatcaaaggatagacaacaaatgtagtaccggttacgaaaaaaatatgaccccaggccagaatagagaacaaagggagtcggggttttcctaccccaactttagcctaccagctgcaaatgggctcagctccggagtggggggcggcggtggaaagatgcggagagagagaacaaggtttgtcgcttcaaagcccttagaggaggaacgtcagggcttgacagtgctccccaagctgattagcagctcctgcgcgcaggctattattccatcgtggcccctgaaggttctgcgcctccaggaaatggaggtgcccgtcctccccaagatctcactacctatcacgagctctagcctgccaacgtttaatttttcttctcccgagattactactagcagcccttcccccatcaattcctcccaggctctgactaacaaggtacagatgacctctccttcctctacagggtccccgatgttcaaattctctagtccgatcgttaaatccactgaggctaacgtgttgccaccaagcagtattggtttcaccttttccgtaccagtggcaaaaacagctgagctgagtggttcatcaagcaccctcgaacccattatcagcagttctgcccaccatgtgactacggttaactccacaaattgcaaaaaaacaccccctgaagattgcgaggggccatttcggcccgctgagattcttaaggaaggtagtgtcttggatattctcaaatcgcctggctttgctagccccaaaatcgacagcgtcgccgcccagccaacagccacctctccagtggtctacacccgccccgcaatttcctcattctcctccagtgggatcgggttcggcgagtctctgaaagctggcagtagttggcagtgtgatacatgcttgctgcagaacaaagtgactgataataaatgtattgcatgccaagctgccaaactttcgcccagggataccgcgaagcaaaccggaatcgagacacccaataagtccggcaaaacaaccctgtcggcgtccggaactggcttcggcgataaatttaagccagtcatcggtacatgggactgcgatacttgcctggtccagaacaagccagaggccattaagtgtgtggcctgtgagactcctaagccaggaacatgtgtgaaacgcgctcttaccttgacagttgtgtcagaatctgcggaaacgatgactgcaagctccagctcctgcacggttaccactgggacactagggtttggagacaaatttaagcgcccaatcgggagctgggagtgtagtgtctgctgcgtgtctaataatgcagaggacaacaagtgtgtgtcttgcatgagcgagaaacccggatcgtccgtgccggcaagcagcagttcaacagtgcctgtgagtctcccatccggtggctcactcggcctcgagaagttcaagaaacctgaggggagctgggactgtgagctttgtctcgtccagaataaagccgacagtaccaaatgcctcgcctgcgagtcagccaagcctgggacaaagtcggggtttaaaggatttgatacaagcagcagtagttcaaactcagccgccagttcatctttcaaatttggagttagctccagtagtagtggcccgtcacagacccttacctctacgggtaactttaagttcggtgatcagggagggtttaagataggagtgagcagtgactctgggagtatcaacccaatgagtgagggatttaagtttagcaaacccatcggtgactttaagtttggcgtgtcgtcggaatcaaagccggaggaggtaaagaaagactccaaaaatgataatttcaagtttggactttcaagcggcttgagtaaccccgtgagcctgacacctttccaatttggagtcagtaatctcggccaggaagagaagaaagaagaattgccaaaatccagctccgctggtttttctttcggcacaggtgtgataaactccaccccagcgcctgctaacaccatagtgacttcagagaataaatccagtttcaacctggggacaatcgaaacaaaatcagcttcagtcgccccattcacatgtaaaaccagtgaggctaagaaagaggaaatgccagcaactaaagggggattcagctttggcaatgtcgagcccgccagccttccctcagccagcgtattcgtgctggggaggactgaggagaagcaacaggagcccgtaacctccaccagtctggttttcggaaagaaagctgataacgaggaaccgaagtgccaacctgtcttctctttcggcaactccgagcagacgaaggacgagaactcgtcaaaaagcacattttcgttttccatgactaagccaagtgagaaggagtctgagcagccagccaaagcaacattcgcattcggagcccagactagtaccacagctgatcagggcgcggccaaaccggtcttctcctttctcaacaactccagttcatctagctccacacccgcaacgagcgcaggcggggggatatttggatccagtacttccagcagtaatccacccgtggccacttttgtgttcggacagtcttccaacccagtgagctcatcagcgttcggaaataccgctgagagcagtactagtcaaagcctgttgttcagccaagattcaaaactagctacaaccagtagcacaggcacagccgtaacccctttcgtgtttggccctggggcaagcagcaataatacaaccacttcggggtttggcttcggtgcaactaccacctcctcttctgcaggaagctccttcgtgttcgggaccggaccgtctgctccctctgccagcccagctttcggcgccaatcaaacccccaccttcggccagagccagggggcctcacagccgaatcccccaggcttcggatctatcagcagcagtacggctctgttcccaacagggtcacaacccgcccctcccacctttggcaccgtatctagtagctctcagccccctgtcttcggtcaacagccctcccaatccgctttcggaagtggtacgacccctaacagttccagcgccttccagttcgggagcagtactactaacttcaatttcaccaataacagtccttccggagtcttcacctttggcgcaaactcaagtacaccagcagccagcgctcagccctctgggagtggtggattcccattcaatcagtctccagctgcttttacagtcggtagcaatggaaaaaacgtattctccagctctggtacttccttctccggcagaaagattaagaccgctgtccgcagaagaaaatag

SEQ ID NO: 97843 - DNA, 4521 bp, Artificial Sequence
  derived and/or modified sequence
atggccagcggggccggcggcgtgggcggcggcggcggcggcaagatccgcacccggcgctgccaccagggccccatcaagccctaccagcagggccggcagcagcaccagggcatcctgagccgggtgacagagagcgtgaagaacatcgtgcccggctggctgcagcgctacttcaacaagaatgaagatgtgtgcagctgcagcacagacaccagcgaggtgccccgctggccagagaacaaggaggaccacctggtgtatgcagatgaggagagcagcaacatcacagatggccgcatcaccccagagcctgctgtgagcaacacagaggagcccagcaccaccagcacagccagcaactacccagatgtgctgacccggcccagcctgcacaggagccacctgaacttctccatgctggagagccctgccctgcactgccagcccagcaccagcagcgccttccccatcggcagcagcggcttcagcctggtgaaggagatcaaggacagcaccagccagcatgatgatgacaacatcagcaccaccagcggcttcagcagccgggccagtgacaaggacatcaccgtgtccaagaacaccagcctgccccccctgtggagccctgaggccgagaggagccacagcctgagccagcacacagccaccagcagcaagaagccagccttcaacctgagcgccttcggcaccctgagccccagcctgggcaacagcagcatcctgaagaccagccagctgggggacagccccttctacccaggcaagaccacctacggcggcgctgctgctgctgtgcggcagagcaagctgaggaacaccccctaccaggcccctgtgcggcggcagatgaaggccaagcagctgagcgcccagagctatggagtgaccagcagcacagcccggcgcatcctgcagagcctggagaagatgagcagccccctggctgatgccaagaggatccccagcatcgtgagcagccccctgaacagccccctggacagaagtggcatcgacatcacagacttccaggccaagcgggagaaggtggacagccagtacccacctgtgcagaggctgatgacccccaagcctgtgtccatcgccaccaacagatctgtgtacttcaagcccagcctgacccccagcggggagttcaggaagaccaaccagagaattgacaacaagtgcagcacaggctatgagaagaacatgaccccaggccagaaccgggagcagcgggagagcggcttctcctaccccaacttcagcctgcctgctgccaacggcctgagcagcggcgtgggcggcggcggcggcaagatgaggcgggagaggaccaggtttgtggccagcaagcccctggaggaggagcggcagggcctgactgtgctgcccaagctgatcagcagcagctgtgcccaggccatcatccccagctggcccctgaaggtgctgcggctgcaggagatggaggtgcctgtgctgcccaagatcagcctgcccatcaccagcagcagcctgcccaccttcaacttcagcagccctgagatcaccaccagcagccccagccccatcaacagcagccaggccctgaccaacaaggtgcagatgaccagccccagcagcacaggcagccccatgttcaagttcagcagccccatcgtgaagagcacagaggccaacgtgctgccccccagcagcatcggcttcaccttctctgtgcctgtggccaagacagctgagctgagcggcagcagcagcaccctggagcccatcatcagcagcagcgcccaccacgtgaccaccgtgaacagcaccaactgcaagaagaccccacctgaggactgtgagggccccttccggcctgctgagatcctgaaggagggctctgtgctggacatcctgaagagccctggctttgccagccccaagattgattctgtggccgcccagcccacagccaccagccctgtggtgtacaccaggcctgccatcagcagcttcagcagcagcggcattggatttggagagagcctgaaggccggcagctcctggcagtgtgacacctgcctgctgcagaacaaggtgacagacaacaagtgcatcgcctgccaggccgccaagctgagcccccgggacacagccaagcagacaggcatcgagacccccaacaagagcggcaagaccaccctgagcgccagcggcaccggctttggagacaagttcaagcctgtgattggcacctgggactgtgacacctgcctggtgcagaacaagccagaggccatcaagtgtgtggcctgtgagacccccaagccaggcacctgtgtgaagagggccctgaccctgactgtggtgtctgagagcgctgagaccatgacagccagcagcagcagctgcaccgtgaccaccggcaccctgggctttggagacaagttcaagaggcccatcggctcctgggagtgcagcgtgtgctgcgtgagcaacaatgctgaggacaacaagtgtgtgtcctgcatgtctgagaagccaggcagctctgtgcctgccagcagcagcagcacagtgcctgtgtccctgcccagcggcggcagcctgggcctggagaagttcaagaagccagagggctcctgggactgtgagctgtgcctggtgcagaacaaggctgacagcaccaagtgcctggcctgtgagagcgccaagccaggcaccaagagcggcttcaagggctttgacaccagcagcagcagcagcaacagcgctgccagcagcagcttcaagtttggagtgagcagcagcagcagcggccccagccagaccctgaccagcacaggcaacttcaagtttggagaccagggcggcttcaagattggagtgtccagtgacagcggcagcatcaaccccatgtctgagggcttcaagttcagcaagcccatcggggacttcaagtttggagtgagcagcgagagcaagccagaggaggtgaagaaggacagcaagaatgacaacttcaagtttggcctgagcagcggcctgagcaaccctgtgtccctgacccccttccagtttggagtgagcaacctgggccaggaggagaagaaggaggagctgcccaagagcagcagcgctggcttctcctttggaactggagtcatcaacagcaccccagccccagccaacaccatcgtgaccagcgagaacaagagcagcttcaacctgggcaccatcgagaccaagagcgcctctgtggcccccttcacctgcaagaccagcgaggccaagaaggaggagatgcctgccaccaagggcggcttctcctttggaaatgtggagcccgccagcctgcccagcgcctctgtgtttgtgctgggccgcacagaggagaagcagcaggagcctgtgaccagcaccagcctggtgtttgggaagaaggctgacaatgaggagcccaagtgccagcccgtcttctcctttggaaattctgagcagaccaaggatgagaacagcagcaagagcaccttctccttctccatgaccaagcccagcgagaaggagagcgagcagcctgccaaggccacctttgccttcggggcccagaccagcaccacagctgaccagggcgccgccaagcctgtgttctccttcctgaacaacagcagcagcagcagcagcaccccagccaccagcgctgggggcggcatcttcggcagcagcaccagcagcagcaacccccctgtggccacctttgtgtttggccagagcagcaaccctgtgagcagcagcgcctttggaaacacagctgagagcagcaccagccagagcctgctcttcagccaggacagcaagctggccaccaccagcagcactggaacagctgtgaccccatttgtgtttggacctggggccagcagcaacaacaccaccaccagcggcttcggctttggagccaccaccaccagcagcagcgctggcagcagctttgtgtttggaacaggccccagcgcccccagcgccagccctgccttcggggccaaccagacccccaccttcggccagagccagggcgccagccagcccaaccccccaggcttcggcagcatcagcagcagcacagccctcttccccaccggcagccagcctgccccacccacctttggaacagtgagcagcagcagccagccccctgtgtttggccagcagcccagccagagcgccttcggcagcggcaccacccccaacagcagcagcgccttccagtttggcagcagcaccaccaacttcaacttcaccaacaacagccccagcggggtcttcaccttcggggccaacagcagcaccccagctgccagcgcccagcccagcggcagcggcggcttccccttcaaccagagccctgctgccttcaccgtgggcagcaatggcaagaatgtgttcagcagcagcggcaccagcttcagcggcaggaagatcaagacagctgtgagaagaaggaagtag

SEQ ID NO: 97844 - DNA, 4521 bp, Artificial Sequence
  derived and/or modified sequence
atggccagcggcgccggcggcgtgggcggcggcggcggcggcaagatcaggacgcggcgctgtcaccaaggccctatcaaaccataccagcagggcaggcagcagcatcaggggattctctcaagagtaaccgaatcggtgaagaatattgtgcccggctggttacagcggtactttaataaaaatgaagatgtttgcagctgttccactgatacctctgaggtacctcgctggccggaaaacaaagaagaccacctggtgtatgcggatgaggagtcctcaaatatcaccgatggaaggatcaccccagaacccgcagtgtctaacacagaagagccttctactactagcaccgcgagcaattaccctgacgtcctcacgcgccccagcctgcataggagtcaccttaatttctctatgctggagtcaccagctctgcactgccagccaagcaccagctcagccttccctatagggtcatcagggttctctctggttaaagaaataaaggattctacaagccagcacgatgacgataatattagcaccactagcgggtttagtagtcgcgcttccgacaaagatatcacagtgagcaaaaacacatcactacctccactgtggtcccccgaggccgagcgtagccactcactctcacagcatacagcaacgtcgtcaaaaaaacctgcgtttaacctgtctgcatttgggacgctgagcccgtccctcgggaattcctccattctgaagacttcccaactgggggatagccccttctacccagggaaaaccacatacggcggagcagctgccgccgtaaggcagtctaaactccggaacacaccctaccaggctcctgtgcggcggcaaatgaaggcaaaacagctcagcgcacaaagctacggcgtgactagctccactgctcggcgcatcttacaaagcctggaaaaaatgagctctccactggctgatgccaaaagaattccaagcattgtctccagccccctcaactccccccttgacaggtccgggatcgatatcaccgatttccaggctaaacgcgaaaaggtcgatagccagtacccccccgtccagcggctgatgaccccaaagcctgtcagcatagcgacaaaccggtccgtgtactttaagccaagcttgacgcctagcggcgagttcaggaagactaaccagcggatcgacaataaatgcagcaccggctacgagaagaacatgaccccgggccagaaccgagagcagcgtgaatccggattttcttacccaaacttctccctgccggctgcaaacggactatcgtctggcgtgggcgggggcggaggaaagatgagaagggagaggactaggtttgtggcgtcaaaacctctggaggaagaacgccagggcctgacggtcttacctaaactcatcagtagctcatgtgcacaagccattatcccctcttggccactaaaggtgctgcgcttgcaagaaatggaagtaccggtcctcccgaagatctcactccctatcacatctagctctctgccgaccttcaacttctccagccctgaaatcactacttcttcacctagccccattaattctagtcaggcactaactaataaagtacaaatgaccagccctagcagcaccggttcaccaatgttcaagttcagctctcctatcgtgaagtcgacagaagccaatgtacttccccctagtagtatcgggttcactttctctgttccagtcgctaagaccgcggagctgtccgggagcagctccaccctcgagccaattatttcttcaagtgcacaccacgtgaccaccgtcaactcgaccaactgcaagaagacaccacctgaagactgcgaaggcccatttcgtccagcggaaatcctgaaagaggggagcgttttggacatcttgaagagtcccggcttcgcctcccccaagattgattctgtggcagcccaaccaaccgctacctcccccgtagtttatactcggccagcaataagctctttcagctcctcaggcatcggatttggcgaatccctgaaagctggatccagttggcaatgtgatacttgtctgctgcagaataaagtgacggacaataagtgcatagcgtgccaggcagctaagctctcaccacgggacactgccaagcagactggtattgagacgcccaataagtccgggaaaaccaccctctccgcttcgggtaccggttttggggataaatttaagcccgtgatcgggacatgggactgtgacacatgtctagtccagaacaaaccagaagctattaaatgcgtggcctgtgaaacgcccaagcccggcacatgcgtgaaaagagcactgacactgactgtagttagcgaatccgccgaaaccatgactgccagctcaagctcttgtactgtgactaccggcactcttggttttggagacaaatttaagagacctatcggcagctgggagtgcagcgtgtgttgcgtttcgaataatgccgaagacaataagtgcgttagttgcatgagcgaaaagcctggaagctccgtacctgcctcttcttctagcactgtgccggtgagtttgcccagtggaggtagcctcggactggaaaaatttaagaagcctgagggaagctgggactgcgagctctgcctggtccagaataaggctgactccaccaagtgcttagcttgtgaatctgccaaaccaggaaccaagagtgggtttaaaggtttcgatacatcatcaagctcttccaacagcgccgcttcctcctcgtttaaatttggcgttagcagttcttcaagcggaccctctcagaccctcaccagcacgggaaactttaaattcggggatcagggagggtttaagattggagtgtcctcagactcaggctcaattaacccgatgtccgaaggctttaagttctccaaaccaatcggagactttaaattcggcgtgagctctgaaagcaaaccagaggaggtgaagaaagattctaagaacgacaactttaaatttggtctcagctctggcctgtcaaatccggtgtctctaactcccttccaatttggcgtaagtaacctgggtcaagaagaaaagaaagaggagttgccaaagtctagtagcgctggcttctcgtttggtaccggagtaatcaattccacccccgcccccgccaacaccatcgtgacatccgaaaacaagagcagcttcaacttggggaccattgagacaaagtcagcctcggtggccccttttacctgtaaaacatcagaagcaaaaaaagaagaaatgccggccactaagggaggatttagcttcggtaatgtggaacccgcttctcttccatccgcttccgtctttgtgctgggccgaacagaagagaaacagcaggagccggtgaccagtaccagccttgtgtttgggaagaaagcggacaatgaggagccaaaatgccagcccgtgttcagttttggcaatagtgaacaaacgaaagatgagaattccagcaagtcaaccttctcctttagcatgaccaaacctagcgaaaaagagtcagaacagccggccaaagccacatttgccttcggggcccagacctccacgaccgcagaccagggtgcagccaaacctgtcttctccttcctgaataatagttcttcctcttctagtacccctgccacatcagccggaggcggcatcttcgggagttcaacgtcctcctctaatccccctgtagccactttcgtcttcggtcagtctagcaaccctgtgtccagctcagcctttggaaacaccgcagagagctccacttcacaaagtcttctgttttcccaagactctaaattagccacaacttctagtactggaactgccgtgaccccctttgtcttcggtcctggcgctagttccaacaacacaacgacctccggctttggattcggagccaccacgactagcagtagtgctggctcctcattcgtcttcgggaccgggcccagcgccccctccgcctcccccgcttttggggccaaccagacacccacctttggtcagtcacagggcgccagccagccgaaccctccaggattcggctcaatttcatcctctaccgcgctgtttcctacgggtagtcagccagctccgcccacattcggcaccgtctcaagctctagccaaccccccgtattcggacagcaaccttctcagtctgctttcggaagcggtacaactcccaacagctcaagcgcctttcagttcgggagctcgaccacgaatttcaatttcactaataactccccatctggcgtctttaccttcggcgcaaacagcagtaccccggctgcatctgcccagcctagcgggtcaggcggctttcctttcaaccaaagccctgccgcttttaccgtgggctctaatggcaagaatgtgttctcaagctctggaacaagttttagcggcagaaagataaaaactgcggttagacggcggaaatag

SEQ ID NO: 97845 - DNA, 4613 bp, Artificial Sequence
  derived and/or modified sequence
ttacccgccccggagcgggaagcggcggaggctccgccatggcctcgggagccggaggagtcggagggggcggtggcggcaagatccggacgcggcgttgccaccaggggccaattaagccttaccagcaggggcgacaacagcatcagggcattcttagcagggttacagaatctgttaagaatattgtgccagggtggctacaaagatacttcaacaagaatgaagatgtatgcagctgttcaacagacacaagcgaggttccacgctggccagaaaataaagaggaccatctggtatatgccgatgaggagagctctaatattactgatgggagaatcacacctgagccagcagtcagtaatacagaagaaccttcaacaactagtactgcttcaaattatccagatgtgttaacaaggccttctcttcatcggagccatctgaatttttccatgttggaatcccctgcattacactgtcagccatctacatcctcggcattcccaattggcagttcgggattttcccttgtaaaggaaattaaagattctacctctcagcatgatgatgataacatctcaactaccagtggtttttcttcaagagcttctgataaagatataactgtttcaaagaacacttcattgccacctctgtggtccccagaagctgaacgttctcactcactctcacagcacactgccaccagctcaaaaaaaccagcattcaacttgtctgcctttggaacactttccccttcacttgggaattcttcaatccttaaaaccagtcagcttggagattctcctttttatcctggaaaaacaacatacggtggggcagcagctgctgtaagacagtctaaactacgaaatacaccttatcaggcaccagttagaagacaaatgaaagctaagcaactcagtgcacaatcttacggtgtgaccagttcaacagctcggcgaatattgcagtctttagagaagatgtcaagccctttagcggatgcaaaaagaattccatccattgtttcttctcctctgaattctcctcttgataggagtgggatagatatcacagattttcaggccaaaagagaaaaggtggattctcaatatcctcctgttcagagacttatgaccccaaagccagtttccatagcaacaaatcgaagtgtttattttaaaccatctctgactccttctggtgaattcaggaagactaatcaaagaatagataacaagtgcagtactggatatgaaaaaaatatgacacccggacaaaatagagaacaacgagaaagtggcttttcatatccaaatttcagtttgcctgcagccaatggtttatcttctggagtaggtggtggaggtggcaagatgagacgagaaagaacacgctttgttgcttctaaacctctggaggaggagagacaaggtctcaccgtattgcccaagctgatctcgagctcctgcgctcaagcgatcatcccatcttggcctctcaaagtgctgagattacaggaaatggaagttccagtattaccgaaaatctctctaccgatcaccagttcttcactgcctacctttaattttagttcccctgagatcacaacttcctctccatcacccatcaattcgtctcaagcattaacaaacaaggtacaaatgacctctccgagcagcactggcagtcccatgtttaaattttcatctccaatcgtaaaatctactgaggcaaatgtactacctccatcatctattggatttacatttagtgtgcctgttgcaaaaacagcagaactttctggttctagtagtactttagaaccaattataagtagttcagctcatcatgtcactacagtgaacagtacaaattgtaagaagacaccacctgaagattgtgagggtccttttagacctgcagaaatcctgaaagaaggaagtgttctagatattctgaaaagccctggtttcgcatcgccgaagatagattctgttgctgctcagcccaccgcaacaagcccagtagtttatacaagaccagcaataagtagcttttcttctagtggaattgggtttggggagagtttaaaagctgggtcatcatggcagtgtgatacatgtctactccagaacaaagttacagacaacaaatgcatagcctgtcaagcagcaaaattgtcacccagagatactgctaaacagactggaattgaaacaccaaataaaagtggcaaaacaactctttctgcatcagggacaggctttggagacaaatttaaaccagtgataggcacttgggattgtgatacctgtttagtgcaaaataaacctgaagcaataaaatgtgtagcctgtgaaacaccgaaacctggaacttgtgtgaagcgagcccttacattgacagtggtttcggaaagtgctgagactatgactgcttcatcttccagctgcactgtaaccactggtaccttaggatttggagataaattcaaaaggcccattggatcttgggagtgttcagtatgctgtgtttctaataatgcagaagacaataagtgtgtgtcctgtatgtctgagaaaccaggaagttcagtacctgcttcaagtagcagcactgtacctgtctctctgccttctggaggctctctaggattggaaaagttcaagaaacccgagggaagctgggactgtgaattgtgcctagtgcagaataaggcagactctaccaaatgtttggcatgtgaaagtgcaaagccaggcacaaaatctgggtttaaaggctttgacacatcttcctcatcttcgaactcagcagcctcctcatccttcaaatttggtgtctcatcatcctcttctgggccttctcagactttaacaagcactggaaattttaaatttggagatcagggaggattcaaaataggtgtgtcatccgattctgggtctataaaccccatgagtgaaggctttaaattttctaaaccaataggagattttaaatttggagtttcatctgaatctaagcccgaagaagttaaaaaagatagtaagaatgataattttaagtttggactttcttctggtttaagcaacccagtttctttaactccatttcaatttggggtatctaatcttggacaggaagaaaagaaagaggaactgcccaaatcttcctctgcaggttttagctttggtacaggtgttattaactccacccctgctcctgctaacaccatagtgacctctgagaacaagagcagcttcaaccttggaaccatagaaaccaagagtgcttcagtggctcctttcacatgtaagacatcagaagctaaaaaagaagaaatgcctgccaccaaaggaggattctcttttggcaacgtggagcctgcctctctgccatctgcctcagtgtttgttttgggaaggacagaagagaaacagcaagagcctgtcacttctacttccctagtttttgggaagaaagctgacaatgaagagccaaagtgtcaaccagtgttttcctttgggaattcagagcaaaccaaagatgagaattcttcaaagtccacatttagttttagtatgacaaaaccatctgagaaggaatctgaacagccagcaaaagccacttttgcctttggagctcaaactagtactacagctgatcaaggtgcagcaaagccagtttttagtttcttgaacaacagttcctctagttcaagtacaccagccacttctgctggtggtggcatatttggtagttccacctcttcctccaatccacctgtggctacctttgtgtttggacagtccagcaatcctgtgagcagctctgcctttggtaacactgctgaatccagcacctctcagtctttgctattttctcaagatagcaaactagcaaccacatccagcacaggtacagctgtcaccccatttgtctttggtccaggagccagcagtaataatactaccacctctggtttcggctttggagccacaaccacatctagctctgcaggatcctcctttgtatttggaactggaccctcagcaccatctgccagtccagcatttggtgctaaccagaccccaacatttggacaaagtcaaggtgccagccagcccaatcccccaggctttggatctatatcatcttccacagcattatttcccactggttctcagcctgcaccacctacttttgggacagtgtcaagcagtagccagccccctgtgtttggacagcaacctagtcagtctgcatttggctctggaacaactcctaattctagttcggctttccagtttggcagcagcactacaaatttcaacttcacaaacaacagtccatcaggagtgttcacatttggtgcaaattctagcacacctgcagcctcagcccagccttcaggctcggggggctttccatttaaccagtctccagcagcatttacagtggggtcaaatgggaaaaatgtgttctcttcttctggaacttcattctctggtcgcaagataaagactgctgttagacgcaggaaataaaggtcacattggtgttgtactcaattttaacaacagctggtgccctgctttcag

SEQ ID NO: 97846 - DNA, 4521 bp, Artificial Sequence
  derived and/or modified sequence
atggctagcggcgctgggggtgtggggggtggcggaggcggaaaaataagaacccggagatgccaccaggggccaattaaaccgtaccaacaagggaggcaacagcatcaggggatcttgtcccgggtcaccgaatctgttaagaacatagtgcctgggtggctgcagcgctattttaacaagaacgaggacgtgtgctcctgtagcacagatacgtcggaggtccctcgttggcccgaaaacaaggaggaccacctggtctacgcagacgaggagagttccaacatcactgacgggaggatcacacccgaaccagcagtcagcaatactgaggagcccagcaccacgtccaccgcctcgaactatcccgatgtcttgacacgcccttcccttcaccgatcacacctcaacttctcaatgctggaatcccctgcacttcactgtcagccttccactagtagcgcatttcctattggctcttcggggttttccttagtgaaagagatcaaggactctacatcacagcacgacgacgacaacattagtaccacttccgggttctcctcgagagctagtgacaaagatattactgtgagcaagaacacctccttgccacccttgtggtccccagaggctgaaaggtcacacagcctgtcccagcacactgcaacatcctccaaaaagcccgcttttaacttaagcgctttcggaactctttcaccgtcactgggaaatagcagcatactgaaaacaagtcagctgggggattctccattttatccaggtaagactacatatggcggtgcagccgcagcagtgaggcagtccaagttgcgcaacactccctaccaggctccggtccggaggcagatgaaagccaaacagctcagcgcccagagttacggtgtcacatcctctacggctcggcgtatcttacagagcctggagaagatgtcctcacctctggccgatgcaaagcgaataccaagcattgtctctagccccttgaacagcccactggaccggtctggcatagacattacagacttccaggccaagcgggagaaggtggatagccagtacccgcctgtccagagactgatgaccccaaagcctgtctctattgcaacaaaccgatctgtgtattttaagccatcgcttactccaagcggagaattccggaaaacaaaccagcgtattgacaataagtgctctactggctacgagaagaatatgactcccggacagaatagggagcaacgagaaagcggtttttcttatcctaattttagcctgcctgccgcaaatggcctctccagtggcgtggggggtggaggcggaaaaatgagacgtgagaggacgaggtttgtggccagcaagcccctcgaggaggagcgccagggacttaccgttctaccaaagctgatcagcagttcttgtgctcaggccattatcccatcgtggccccttaaggttcttcgcttgcaggaaatggaggtccctgtcctgccaaagattagtctacctatcactagcagctctctccccactttcaatttctcctcaccagaaatcaccacatcaagtccctcacctatcaactccagccaggcactgaccaacaaagtgcaaatgacctcaccatctagcactggctcccctatgtttaaatttagtagccccatcgtcaagtctactgaggccaatgtcctacccccaagtagcataggctttacgttttctgtacctgtcgcaaaaacagctgaactgtccggctctagctctaccctagaacccattatcagtagctctgctcaccacgttactaccgtcaattccactaattgcaaaaagacgccaccagaagactgtgaagggccatttcgtccggctgagatcctcaaagaggggtccgttctggacatactgaagtctccaggcttcgccagtccgaaaatcgactccgtggcagcccagccgactgccacatctcctgtcgtatacacgaggcctgccatctcatccttcagcagctccggcatcggtttcggcgaatctttaaaggccggatcttcttggcagtgcgacacatgtctactgcagaacaaggtgactgataacaagtgtattgcctgtcaagccgcaaagctctcccccagagacactgctaaacaaaccgggattgaaacacctaataagagcggcaaaaccacactaagtgcatccggcacgggattcggggataaattcaaaccggtgataggtacctgggactgcgatacctgcctggtgcagaataaacctgaagccatcaaatgtgtcgcctgtgagactccgaaacctggtacttgcgtcaaaagagcattaaccctcacggtggtgagcgaatccgccgagactatgactgcatcaagtagctcatgcaccgtgactaccggcacactgggtttcggtgacaagttcaaacggcctatcggctcttgggagtgttcggtctgctgtgtgagcaacaacgctgaggataataaatgtgtgtcctgtatgtccgaaaagccagggtccagcgtccccgctagttccagctctactgtgccagtgtccttaccctcaggcggtagcctggggctggaaaaatttaagaaacccgaggggagctgggattgcgaactatgcctcgttcagaataaagcggattcaactaagtgtcttgcttgtgagtccgcaaagcccggaaccaaatccggattcaaaggttttgacacttccagttcttcaagtaactcggccgctagctcttctttcaaattcggcgtttcgtcttcctccagtgggcctagccagactttaacgtctaccggaaattttaaattcggcgatcagggtggcttcaagattggggtctcctctgacagtgggagcatcaacccgatgtcagaggggttcaagttttctaagcccatcggagattttaagttcggagtatcctctgagagcaaaccagaggaagtgaaaaaagactccaaaaatgacaatttcaaattcggcctttctagtgggctctccaaccccgtttcactgactccatttcaattcggggtttcaaatctggggcaagaagagaaaaaggaggagcttcccaagtccagctccgcaggcttttcttttggcaccggtgttatcaacagcactccagcccctgctaacacaattgttacctcagaaaataaaagctcctttaacctgggcacaatagagactaagtccgccagcgtagcaccttttacctgcaagacatcagaggcgaagaaagaagagatgcccgctacaaagggtgggttctcttttgggaatgtggaaccagcctccctcccgtctgcttccgtctttgttcttggacgcactgaagaaaaacaacaagagccggtcacatctacctctctggtattcggtaagaaggccgataacgaggagccaaagtgccagcctgtcttctcatttgggaacagtgagcagaccaaggacgagaactcctccaaaagtacctttagcttttccatgactaaaccctcggaaaaagagagtgagcagcctgctaaggcaacctttgccttcggggcacagacgagtactactgccgatcagggagccgcaaagcccgtattctctttcctgaacaatagctcatcttcaagttcaacccctgccactagtgccggtggcggtatatttgggtcctcaactagtagttcaaacccacctgttgctacctttgtttttggccagtcctctaacccagtttccagcagtgcttttgggaacaccgccgaaagttcaacctcacaatcattattatttagtcaggacagtaagcttgccacaacgtcttctaccggaacggccgtcacaccattcgtgttcggccctggtgcttcttccaacaatactaccaccagcggctttggcttcggtgcaaccaccactagctcatccgccggttcttcatttgtcttcgggactggcccatcagcccctagcgcatccccagccttcggcgcaaatcaaaccccgacgttcggccagtcccagggcgcttctcagcccaatccccctggctttggtagtatctctagctccaccgctctgtttccaactggcagccagcccgcaccccctaccttcggcaccgtatccagcagtagccagcctcccgtatttggacaacagccatcgcagtctgccttcggaagcgggacaactcccaatagtagcagcgccttccaattcggttcctcaaccactaacttcaacttcacgaacaactctccctccggggtgtttactttcggcgctaatagcagtactcccgcagcaagcgcccagccaagtgggagtgggggatttccatttaatcagagccccgcagcattcaccgtcggcagtaacggtaaaaacgtattctcgagcagcggaacatcgttttctggacgtaaaattaagaccgccgtgaggcgaaggaagtag

SEQ ID NO: 97847 - DNA, 4521 bp, Artificial Sequence
  derived and/or modified sequence
atggccagcggcgccggcggcgtgggcggcggcggcggcggcaagatcagaaccagaagatgccaccagggccccatcaagccctaccagcagggcagacagcagcaccagggcatcctgagcagagtgaccgagagcgtgaagaacatcgtgcccggctggctgcagagatacttcaacaagaacgaggacgtgtgcagctgcagcaccgacaccagcgaggtgcccagatggcccgagaacaaggaggaccacctggtgtacgccgacgaggagagcagcaacatcaccgacggcagaatcacccccgagcccgccgtgagcaacaccgaggagcccagcaccaccagcaccgccagcaactaccccgacgtgctgaccagacccagcctgcacagaagccacctgaacttcagcatgctggagagccccgccctgcactgccagcccagcaccagcagcgccttccccatcggcagcagcggcttcagcctggtgaaggagatcaaggacagcaccagccagcacgacgacgacaacatcagcaccaccagcggcttcagcagcagagccagcgacaaggacatcaccgtgagcaagaacaccagcctgccccccctgtggagccccgaggccgagagaagccacagcctgagccagcacaccgccaccagcagcaagaagcccgccttcaacctgagcgccttcggcaccctgagccccagcctgggcaacagcagcatcctgaagaccagccagctgggcgacagccccttctaccccggcaagaccacctacggcggcgccgccgccgccgtgagacagagcaagctgagaaacaccccctaccaggcccccgtgagaagacagatgaaggccaagcagctgagcgcccagagctacggcgtgaccagcagcaccgccagaagaatcctgcagagcctggagaagatgagcagccccctggccgacgccaagagaatccccagcatcgtgagcagccccctgaacagccccctggacagaagcggcatcgacatcaccgacttccaggccaagagagagaaggtggacagccagtacccccccgtgcagagactgatgacccccaagcccgtgagcatcgccaccaacagaagcgtgtacttcaagcccagcctgacccccagcggcgagttcagaaagaccaaccagagaatcgacaacaagtgcagcaccggctacgagaagaacatgacccccggccagaacagagagcagagagagagcggcttcagctaccccaacttcagcctgcccgccgccaacggcctgagcagcggcgtgggcggcggcggcggcaagatgagaagagagagaaccagattcgtggccagcaagcccctggaggaggagagacagggcctgaccgtgctgcccaagctgatcagcagcagctgcgcccaggccatcatccccagctggcccctgaaggtgctgagactgcaggagatggaggtgcccgtgctgcccaagatcagcctgcccatcaccagcagcagcctgcccaccttcaacttcagcagccccgagatcaccaccagcagccccagccccatcaacagcagccaggccctgaccaacaaggtgcagatgaccagccccagcagcaccggcagccccatgttcaagttcagcagccccatcgtgaagagcaccgaggccaacgtgctgccccccagcagcatcggcttcaccttcagcgtgcccgtggccaagaccgccgagctgagcggcagcagcagcaccctggagcccatcatcagcagcagcgcccaccacgtgaccaccgtgaacagcaccaactgcaagaagaccccccccgaggactgcgagggccccttcagacccgccgagatcctgaaggagggcagcgtgctggacatcctgaagagccccggcttcgccagccccaagatcgacagcgtggccgcccagcccaccgccaccagccccgtggtgtacaccagacccgccatcagcagcttcagcagcagcggcatcggcttcggcgagagcctgaaggccggcagcagctggcagtgcgacacctgcctgctgcagaacaaggtgaccgacaacaagtgcatcgcctgccaggccgccaagctgagccccagagacaccgccaagcagaccggcatcgagacccccaacaagagcggcaagaccaccctgagcgccagcggcaccggcttcggcgacaagttcaagcccgtgatcggcacctgggactgcgacacctgcctggtgcagaacaagcccgaggccatcaagtgcgtggcctgcgagacccccaagcccggcacctgcgtgaagagagccctgaccctgaccgtggtgagcgagagcgccgagaccatgaccgccagcagcagcagctgcaccgtgaccaccggcaccctgggcttcggcgacaagttcaagagacccatcggcagctgggagtgcagcgtgtgctgcgtgagcaacaacgccgaggacaacaagtgcgtgagctgcatgagcgagaagcccggcagcagcgtgcccgccagcagcagcagcaccgtgcccgtgagcctgcccagcggcggcagcctgggcctggagaagttcaagaagcccgagggcagctgggactgcgagctgtgcctggtgcagaacaaggccgacagcaccaagtgcctggcctgcgagagcgccaagcccggcaccaagagcggcttcaagggcttcgacaccagcagcagcagcagcaacagcgccgccagcagcagcttcaagttcggcgtgagcagcagcagcagcggccccagccagaccctgaccagcaccggcaacttcaagttcggcgaccagggcggcttcaagatcggcgtgagcagcgacagcggcagcatcaaccccatgagcgagggcttcaagttcagcaagcccatcggcgacttcaagttcggcgtgagcagcgagagcaagcccgaggaggtgaagaaggacagcaagaacgacaacttcaagttcggcctgagcagcggcctgagcaaccccgtgagcctgacccccttccagttcggcgtgagcaacctgggccaggaggagaagaaggaggagctgcccaagagcagcagcgccggcttcagcttcggcaccggcgtgatcaacagcacccccgcccccgccaacaccatcgtgaccagcgagaacaagagcagcttcaacctgggcaccatcgagaccaagagcgccagcgtggcccccttcacctgcaagaccagcgaggccaagaaggaggagatgcccgccaccaagggcggcttcagcttcggcaacgtggagcccgccagcctgcccagcgccagcgtgttcgtgctgggcagaaccgaggagaagcagcaggagcccgtgaccagcaccagcctggtgttcggcaagaaggccgacaacgaggagcccaagtgccagcccgtgttcagcttcggcaacagcgagcagaccaaggacgagaacagcagcaagagcaccttcagcttcagcatgaccaagcccagcgagaaggagagcgagcagcccgccaaggccaccttcgccttcggcgcccagaccagcaccaccgccgaccagggcgccgccaagcccgtgttcagcttcctgaacaacagcagcagcagcagcagcacccccgccaccagcgccggcggcggcatcttcggcagcagcaccagcagcagcaacccccccgtggccaccttcgtgttcggccagagcagcaaccccgtgagcagcagcgccttcggcaacaccgccgagagcagcaccagccagagcctgctgttcagccaggacagcaagctggccaccaccagcagcaccggcaccgccgtgacccccttcgtgttcggccccggcgccagcagcaacaacaccaccaccagcggcttcggcttcggcgccaccaccaccagcagcagcgccggcagcagcttcgtgttcggcaccggccccagcgcccccagcgccagccccgccttcggcgccaaccagacccccaccttcggccagagccagggcgccagccagcccaacccccccggcttcggcagcatcagcagcagcaccgccctgttccccaccggcagccagcccgccccccccaccttcggcaccgtgagcagcagcagccagccccccgtgttcggccagcagcccagccagagcgccttcggcagcggcaccacccccaacagcagcagcgccttccagttcggcagcagcaccaccaacttcaacttcaccaacaacagccccagcggcgtgttcaccttcggcgccaacagcagcacccccgccgccagcgcccagcccagcggcagcggcggcttccccttcaaccagagccccgccgccttcaccgtgggcagcaacggcaagaacgtgttcagcagcagcggcaccagcttcagcggcagaaagatcaagaccgccgtgagaagaagaaagtag

SEQ ID NO: 97848 - protein, 1455 aa, Artificial Sequence
  derived and/or modified sequence
GLRLCLSRPLTRPGAGSGGGSAMASGAGGVGGGGGGKIRTRRCHQGPIKPYQQGRQQHQGILSRVTESVKNIVPGWLQRYFNKNEDVCSCSTDTSEVPRWPENKEDHLVYADEESSNITDGRITPEPAVSNTEEPSTTSTASNYPDVLTRPSLHRSHLNFSMLESPALHCQPSTSSAFPIGSSGFSLVKEIKDSTSQHDDDNISTTSGFSSRASDKDITVSKNTSLPPLWSPEAERSHSLSQHTATSSKKPAFNLSAFGTLSPSLGNSSILKTSQLGDSPFYPGKTTYGGAAAAVRQSKLRNTPYQAPVRRQMKAKQLSAQSYGVTSSTARRILQSLEKMSSPLADAKRIPSIVSSPLNSPLDRSGIDITDFQAKREKVDSQYPPVQRLMTPKPVSIATNRSVYFKPSLTPSGEFRKTNQRIDNKCSTGYEKNMTPGQNREQRESGFSYPNFSLPAANGLSSGVGGGGGKMRRERTRFVASKPLEEEEMEVPVLPKISLPITSSSLPTFNFSSPEITTSSPSPINSSQALTNKVQMTSPSSTGSPMFKFSSPIVKSTEANVLPPSSIGFTFSVPVAKTAELSGSSSTLEPIISSSGFASPKIDSVAAQPTATSPVVYTRPAISSFSSSGIGFGESLKAGSSWQCDTCLLQNKVTDNKCIACQAAKLSPRDTAKQTGIETPNKSGKTTLSASGTGFGDKFKPVIGTWDCDTCLVQNKPEAIKCVACETPKPGTCVKRALTLTVVSESAETMTASSSSCTVTTGTLGFGDKFKRPIGSWECSVCCVSNNAEDNKCVSCMSEKPGSSVPASSSSTVPVSLPSGGSLGLEKFKKPEGSWDCELCLVQNKADSTKCLACESAKPGTKSGFKGFDTSSSSSNSAASSSFKFGVSSSSSGPSQTLTSTGNFKFGDQGGFKIGVSSDSGSINPMSEGFKFSKPIGDFKFGVSSESKPEEVKKDSKNDNFKFGLSSGLSNPVSLTPFQFGVSNLGQEEKKEELPKSSSAGFSFGTGVINSTPAPANTIVTSENKSSFNLGTIETKSASVAPFTCKTSEAKKEEMPATKGGFSFGNVEPASLPSASVFVLGRTEEKQQEPVTSTSLVFGKKADNEEPKCQPVFSFGNSEQTKDENSSKSTFSFSMTKPSEKESEQPAKATFAFGAQTSTTADQGAAKPVFSFLNNSSSSSSTPATSAGGGIFGSSTSSSNPPVATFVFGQSSNPVSSSAFGNTAESSTSQSLLFSQDSKLATTSSTGTAVTPFVFGPGASSNNTTTSGFGFGATTTSSSAGSSFVFGTGPSAPSASPAFGANQTPTFGQSQGASQPNPPGFGSISSSTALFPTGSQPAPPTFGTVSSSSQPPVFGQQPSQSAFGSGTTPNSSSAFQFGSSTTNFNFTNNSPSGVFTFGANSSTPAASAQPSGSGGFPFNQSPAAFTVGSNGKNVFSSSGTSFSGRKIKTAVRRRK

SEQ ID NO: 97849 - DNA, 4368 bp, Artificial Sequence
  derived and/or modified sequence
ggtctcaggttgtgcttgtctcgccccctgactagacctggtgccggctctgggggtgggtccgctatggccagtggcgccgggggggtggggggaggtggaggaggtaagattcgtacaaggaggtgccatcagggacccatcaagccgtatcaacagggccgtcaacagcaccaggggatcctctcccgggtaaccgagagcgtgaagaatattgtacccggctggctgcagagatatttcaacaaaaatgaagacgtctgttcatgttccaccgacacatccgaggtgccccggtggcctgagaacaaggaagatcacttagtctatgccgatgaggagtcaagcaacattacagatggaaggattactcccgagccagccgtcagtaataccgaggaaccaagcaccacaagtacagcatcaaattacccagacgtgctgacccgaccaagcctgcatagatcccaccttaacttcagcatgctcgaatcgcctgcgttgcactgtcagccctcaacatcgtcagccttccctataggaagctccggcttcagcctcgtcaaagagattaaggacagcacctcccagcacgacgatgacaacatctcaaccactagcggcttctcctcgagggccagtgacaaggacatcactgtttccaaaaatacctcacttccccctttatggagtccagaagctgaacgttctcacagtctgagccagcataccgccacttcatcgaagaagcctgcatttaacttgagcgcgttcggcacgctctcccctagcctcggtaacagctccatcctgaaaaccagtcagctgggcgattcacccttctaccccggcaagacaacctacggtggtgcagccgccgcggttagacagagcaagcttaggaatacaccttaccaggctccagtgagaagacagatgaaagcaaaacaattgagtgcacagagttatggagtcacaagcagtactgctcgaagaatcctccagtctttagaaaagatgtcttcgccactggccgatgcaaaacgcatcccatccatcgtgagttcacccctgaacagcccacttgacagaagtggtattgatatcaccgatttccaggccaagagagaaaaggtcgactcccagtatcctccagtccaaaggctcatgacccctaagcccgtgtccatcgccacaaataggtcagtgtatttcaagccgtcactaaccccgagcggggagtttagaaagactaatcaacgtatcgacaataaatgttctaccggttacgagaagaacatgaccccaggccagaatcgggagcagcgggaaagcgggttcagttatcccaatttttcccttcctgctgctaacggattaagcagtggggtgggtggaggcggcgggaagatgaggagagagagaactcgtttcgttgcatccaaacccttggaggaggaggagatggaggtaccagttctgcctaagatctcacttcccattacgtcttctagcctgcctaccttcaatttctcatccccagagattaccactagctcgccatcaccaattaattcaagtcaggctcttacaaacaaggtgcaaatgacaagccccagctctaccggatctcctatgttcaagttcagttcgcccattgtgaagtcgaccgaagccaatgtcctgccccccagcagtattggttttacattcagtgtacctgtggcgaagaccgcagagctctctggatctagcagcaccctggagccaatcataagttcatctggctttgccagcccaaaaattgactcagtggccgcgcagccaactgccactagcccagtcgtttatacaaggcccgcaatatcttctttcagttcttctgggattggttttggggagagccttaaggccgggtcctcctggcagtgtgatacctgtcttctgcagaacaaagtgactgataacaagtgtattgcatgtcaggccgctaagctgtcaccaagggataccgcaaaacagacgggaattgagacccctaacaagtctgggaagacaacccttagtgcaagcgggacaggcttcggagacaaattcaagccagtgataggaacctgggattgtgatacttgtctggtccaaaataagcctgaggctatcaaatgcgtggcatgcgaaactccgaagcctggtacatgtgtcaaaagggccttgaccctaacagtagtaagcgaaagcgcagagacaatgacagcatcttcgtcttcatgtacggtgactacaggcacgcttggattcggagataagtttaagcgccccatcggctcctgggaatgctcagtttgttgtgttagcaacaacgctgaagataataaatgtgtttcctgcatgtcagagaagcccggctcaagtgtcccagcttcatcttcctccactgtcccagtatctctgccctcaggtggctccctaggacttgaaaagtttaaaaagcccgaagggtcctgggactgtgagctgtgcctggttcagaacaaggccgacagcacaaagtgccttgcgtgcgagtccgcgaagccagggactaaatccggcttcaaaggtttcgatactagctcatccagtagcaacagcgccgcatcaagctcctttaaatttggcgtgtcaagtagctccagtgggccctcccagactctaacatctaccggaaacttcaaattcggagatcaggggggttttaaaattggagtttcgtcagacagtggatctatcaatcctatgtccgagggcttcaagtttagcaagcctattggtgatttcaaattcggcgtgagtagcgaatcaaagcccgaggaggtgaagaaggactccaagaatgataattttaagtttggtttaagttctggcctgtctaaccctgtctccctgacgccctttcagttcggagtctcaaacctcgggcaggaggagaaaaaagaagagctgcccaagagttcctcagccggattctccttcggtactggagtgatcaattccacacctgccccggccaatacaatcgtcacgtccgagaacaaatcttcgtttaatctgggcacaattgaaactaaatccgcttcagtggcccccttcacctgtaagaccagtgaagccaagaaagaggagatgcctgccacgaagggaggattttccttcgggaacgttgagcctgctagcctgcctagcgccagcgtcttcgtcctcggcaggacagaggagaaacagcaggagcctgtgacgtccacatccctggtgttcggcaagaaagctgataacgaggagccaaagtgtcagcctgtgttttcgttcggaaacagcgaacagacgaaggacgaaaattcgagcaagagcacatttagcttcagtatgactaagccatcagagaaggagtctgagcagcctgccaaagccacattcgcctttggcgctcagacttcaacaaccgcagaccagggggccgccaagcctgtcttttcctttctgaacaattctagctctagctcctcaacccctgcaacctctgctggtggcggcattttcggttcttctacaagctcttcaaaccctcccgtggccaccttcgtgttcgggcagtcatccaaccctgtcagttcgtcagcatttggtaatactgccgagagctctaccagtcagagcctcctattttctcaggattccaaactggccaccacatctagtaccgggaccgctgtcactcctttcgtgtttggacccggcgcttctagcaataacaccaccacctccggatttgggttcggagctaccacaacctcttcttccgccggaagctcttttgttttcgggacaggccccagcgcaccctcagcatccccggcctttggggcaaaccaaactccgacattcggccaatcccagggcgctagccagcccaatccacccggcttcggctctatcagctcttctaccgccctgttccccactgggagtcagccagcaccacctacctttggaactgtctcttccagctcacaaccacccgtgtttgggcagcagccctcacagtcggccttcggctcaggcaccaccccgaattcttcgtccgcctttcagttcggatccagtactactaacttcaacttcactaacaacagcccctccggcgtgttcacattcggagcaaacagctccacgcccgccgccagcgcccaaccatcaggcagtggcggcttccccttcaatcagtctcccgcagccttcacggtaggttctaacggcaagaatgtgttttctagttcagggacctcgttctccggccgtaaaattaagactgccgtgaggaggcgcaaatag

SEQ ID NO: 97850 - DNA, 4368 bp, Artificial Sequence
  derived and/or modified sequence
ggcctgcggctgtgcctgagccggcccctgaccaggcctggagctggcagcggcggcggcagcgccatggccagcggggccggcggcgtgggcggcggcggcggcggcaagatccgcacccggcgctgccaccagggccccatcaagccctaccagcagggccggcagcagcaccagggcatcctgagccgggtgacagagagcgtgaagaacatcgtgcccggctggctgcagcgctacttcaacaagaatgaagatgtgtgcagctgcagcacagacaccagcgaggtgccccgctggccagagaacaaggaggaccacctggtgtatgcagatgaggagagcagcaacatcacagatggccgcatcaccccagagcctgctgtgagcaacacagaggagcccagcaccaccagcacagccagcaactacccagatgtgctgacccggcccagcctgcacaggagccacctgaacttctccatgctggagagccctgccctgcactgccagcccagcaccagcagcgccttccccatcggcagcagcggcttcagcctggtgaaggagatcaaggacagcaccagccagcatgatgatgacaacatcagcaccaccagcggcttcagcagccgggccagtgacaaggacatcaccgtgtccaagaacaccagcctgccccccctgtggagccctgaggccgagaggagccacagcctgagccagcacacagccaccagcagcaagaagccagccttcaacctgagcgccttcggcaccctgagccccagcctgggcaacagcagcatcctgaagaccagccagctgggggacagccccttctacccaggcaagaccacctacggcggcgctgctgctgctgtgcggcagagcaagctgaggaacaccccctaccaggcccctgtgcggcggcagatgaaggccaagcagctgagcgcccagagctatggagtgaccagcagcacagcccggcgcatcctgcagagcctggagaagatgagcagccccctggctgatgccaagaggatccccagcatcgtgagcagccccctgaacagccccctggacagaagtggcatcgacatcacagacttccaggccaagcgggagaaggtggacagccagtacccacctgtgcagaggctgatgacccccaagcctgtgtccatcgccaccaacagatctgtgtacttcaagcccagcctgacccccagcggggagttcaggaagaccaaccagagaattgacaacaagtgcagcacaggctatgagaagaacatgaccccaggccagaaccgggagcagcgggagagcggcttctcctaccccaacttcagcctgcctgctgccaacggcctgagcagcggcgtgggcggcggcggcggcaagatgaggcgggagaggaccaggtttgtggccagcaagcccctggaggaggaggagatggaggtgcctgtgctgcccaagatcagcctgcccatcaccagcagcagcctgcccaccttcaacttcagcagccctgagatcaccaccagcagccccagccccatcaacagcagccaggccctgaccaacaaggtgcagatgaccagccccagcagcacaggcagccccatgttcaagttcagcagccccatcgtgaagagcacagaggccaacgtgctgccccccagcagcatcggcttcaccttctctgtgcctgtggccaagacagctgagctgagcggcagcagcagcaccctggagcccatcatcagcagcagcggctttgccagccccaagattgacagcgtggccgcccagcccacagccaccagccctgtggtgtacaccaggcctgccatcagcagcttcagcagcagcggcatcggctttggagagagcctgaaggccggcagctcctggcagtgtgacacctgcctgctgcagaacaaggtgacagacaacaagtgcatcgcctgccaggccgccaagctgagcccccgggacacagccaagcagacaggaattgagacccccaacaagagcggcaagaccaccctgagcgccagcggcactggatttggagacaagttcaagcctgtgattggcacctgggactgtgacacctgcctggtgcagaacaagccagaggccatcaagtgtgtggcctgtgagacccccaagccaggcacctgtgtgaagagggccctgaccctgactgtggtgtctgagagcgctgagaccatgacagccagcagcagcagctgcaccgtgaccaccggcaccctgggctttggagacaagttcaagaggcccatcggctcctgggagtgcagcgtgtgctgcgtgagcaacaatgctgaggacaacaagtgtgtgtcctgcatgtctgagaagccaggcagctctgtgcctgccagcagcagcagcacagtgcctgtgtccctgcccagcggcggcagcctgggcctggagaagttcaagaagccagagggctcctgggactgtgagctgtgcctggtgcagaacaaggctgacagcaccaagtgcctggcctgtgagagcgccaagccaggcaccaagagcggcttcaagggctttgacaccagcagcagcagcagcaacagcgctgccagcagcagcttcaagtttggagtgagcagcagcagcagcggccccagccagaccctgaccagcactggaaacttcaagtttggagaccagggcggcttcaagattggagtgtccagtgacagcggcagcatcaaccccatgtctgagggcttcaagttcagcaagcccatcggggacttcaagtttggagtgtcctctgagagcaagccagaggaggtgaagaaggacagcaagaatgacaacttcaagtttggcctgagcagcggcctgagcaaccctgtgtccctgacccccttccagtttggagtgagcaacctgggccaggaggagaagaaggaggagctgcccaagagcagcagcgctggcttctcctttggcaccggggtcatcaacagcaccccagccccagccaacaccatcgtgaccagcgagaacaagagcagcttcaacctgggcaccatcgagaccaagagcgcctctgtggcccccttcacctgcaagaccagcgaggccaagaaggaggagatgcctgccaccaagggcggcttctcctttggaaatgtggagcccgccagcctgcccagcgcctctgtgtttgtgctgggccgcacagaggagaagcagcaggagcctgtgaccagcaccagcctggtgtttgggaagaaggctgacaatgaggagcccaagtgccagcctgtgttctcctttggaaacagcgagcagaccaaggatgagaacagcagcaagagcaccttctccttctccatgaccaagcccagcgagaaggagagcgagcagcctgccaaggccacctttgcctttggagcccagaccagcaccacagctgaccagggcgccgccaagcctgtgttctccttcctgaacaacagcagcagcagcagcagcaccccagccaccagcgctgggggcggcatcttcggcagcagcaccagcagcagcaacccccctgtggccacctttgtgtttggccagagcagcaaccctgtgagcagcagcgccttcggcaacacagctgagagcagcaccagccagagcctgctcttcagccaggacagcaagctggccaccaccagcagcactggaacagctgtgaccccatttgtgtttggacctggggccagcagcaacaacaccaccaccagcggctttggatttggagccaccaccaccagcagcagcgctggcagcagctttgtgtttggcaccggccccagcgcccccagcgccagccctgcctttggagccaaccagacccccaccttcggccagagccagggcgccagccagcccaaccccccaggcttcggcagcatcagcagcagcacagccctcttccccaccggcagccagcctgccccacccaccttcggcaccgtgagcagcagcagccagccccctgtgtttggccagcagcccagccagagcgcctttggaagtggcaccacccccaacagcagcagcgccttccagtttggcagcagcaccaccaacttcaacttcaccaacaacagccccagcggggtcttcacctttggagccaacagcagcaccccagctgccagcgcccagcccagcggcagcggcggcttccccttcaaccagagccctgctgccttcaccgtgggcagcaatggcaagaatgtgttcagcagcagcggcaccagcttcagcggcaggaagatcaagacagctgtgagaagaaggaagtag

SEQ ID NO: 97851 - DNA, 4368 bp, Artificial Sequence
  derived and/or modified sequence
ggcctgcggctgtgcctgagccggcccctgacccggcccggcgccggatccggaggcggctcagctatggccagtggcgccgggggagtgggaggggggggcggaggcaagattcgcaccagaagatgccaccagggtcccatcaaaccctaccaacaaggccggcagcagcaccagggaatattatcccgggttactgaatccgttaagaacattgtgccaggttggctacaacggtattttaacaagaatgaagatgtgtgtagttgcagtacagatacaagcgaggtacccagatggcctgagaataaagaagatcaccttgtgtacgccgacgaagaatcctccaatatcactgacggccgcatcactccggagccagcagtgagcaacacggaggagccaagtacaacttctacggcctccaactacccggacgttcttacccggccctccctgcaccgctctcacctcaatttctcaatgctggaatcgccagcactacactgtcagccaagcacatccagtgcattcccaataggcagttctggttttagcctcgtgaaggagattaaggacagcaccagccagcatgacgacgataatatatctactacctctgggtttagttcacgcgccagcgataaagacatcaccgtgagtaaaaatactagccttccgcctctgtggtctcccgaggccgaacgctctcattcgctctcacaacacacagcgacttcttccaaaaagcccgcattcaacctgtctgcatttgggaccctgagcccttcactgggaaatagcagcattttgaaaacctcacagctgggagactcccccttttatcctggtaaaacgacttacggcggcgccgccgcagctgtccgccaaagcaaattgcggaacacaccatatcaggctcccgtcaggagacagatgaaggccaagcagctgtcagctcagtcttacggtgtcacaagcagtactgcccgcagaatcctgcagagcttagagaagatgtcttccccactcgccgatgccaaacgcatcccgagcattgtgtcctccccgctcaactctcccctggatcggtctggtattgatatcacagattttcaggcaaagcgtgaaaaagtcgacagccagtaccctccagtgcaacgcttgatgacacctaagccagtgtcaattgccacaaaccggtcagtctattttaagccatctctgaccccgagcggcgaatttcggaaaactaatcagcgcatcgacaacaagtgctcaaccgggtatgagaagaatatgactcccgggcagaatcgcgaacagagggagtctggcttctcatatcctaacttcagcctgcccgctgctaatgggctctcatcgggagttggtgggggcggcggaaagatgcgcagggaaagaacaaggtttgtggcaagcaaaccccttgaagaagaggaaatggaagtaccagtgctgccgaaaatctcactgcccatcaccagcagctccctgccgacgttcaacttcagctctccggaaatcaccactagctctccatcccctatcaactccagtcaggcactgactaacaaggtccagatgacctccccatcatcgactggaagccctatgtttaagttcagtagcccaatcgttaaatcaaccgaggccaacgtactacccccctcctctatcggatttaccttctccgtccccgtggccaaaaccgcagagctttctggttcttcatccacactcgagcccattatctcaagttccgggtttgcaagtcccaagatcgatagtgtggctgcacaacctacagccactagcccagtggtgtatacccgcccggccatctcgtctttcagcagctccgggattgggtttggagaatcattgaaagctggatcaagttggcagtgtgatacttgcttgctgcagaataaagtgaccgacaacaagtgtatcgcttgccaggccgcaaaactgagccccagggacacagccaaacaaacagggatagagacccctaacaaatccggtaagacaactttgtctgcctccgggacgggatttggtgataagtttaaacccgtcataggtacgtgggattgtgatacctgcttggtgcaaaataaaccagaggccattaaatgtgtcgcctgtgagacccctaagccaggcacgtgtgtgaaaagggcgctgaccctaacagtggtttccgaaagcgctgagaccatgaccgcctctagtagtagttgcaccgttacaactggcacattgggattcggggataaatttaaaagaccaattggcagctgggagtgctctgtatgctgtgtgtctaacaatgccgaggacaataaatgcgtcagttgtatgagtgaaaagcccggctctagcgtacccgcatcctctagctctacggttcccgtctcgctccccagtggagggagtctgggtctcgaaaagttcaagaagcctgaaggatcatgggattgcgagctctgtctcgtccagaataaagctgattctacaaaatgtctggcctgcgagtctgccaaacctgggactaaatccggctttaagggattcgacacgtcgtcatcttcctcaaatagcgctgcttctagctcttttaagttcggggtcagtagtagttcaagcggtccaagtcaaacactcacttcaaccggaaacttcaagttcggagatcagggtggattcaagattggggtgtcaagtgacagtggttccataaatcctatgtcagaaggattcaaattcagcaaaccaatcggcgactttaaatttggcgtcagcagcgaaagcaaacctgaggaggtgaagaaggactctaagaacgacaatttcaaattcggcctgtcatctgggcttagcaacccagtctcgcttacgcccttccaattcggagtttcaaatttgggccaggaggagaagaaagaagagttgccaaaaagctcctctgccggcttttcatttggaacaggtgtgatcaattctactccagcaccagcaaatacaatcgttacctccgaaaacaagtcttcttttaatttggggaccattgagacaaagagcgccagtgtagccccttttacgtgtaagacttctgaagccaaaaaggaggaaatgccagcaacaaaaggcggcttttctttcggcaacgtggagccggcttcactgccctcagcctcggtatttgtcctaggtaggacagaagagaagcaacaggaaccagttacatcgacaagcctggtattcgggaaaaaagccgataacgaggagcccaagtgtcaacccgtgttcagctttggaaacagtgagcagaccaaggacgagaactcctccaaatccactttctcattttccatgaccaaaccaagcgagaaggagtctgagcagcccgccaaggccacttttgcgtttggcgcacagacctccactaccgcagatcagggagcggcaaaacctgtattttcctttctcaataactcatccagcagttcaagcacacctgccacaagtgctggcggaggcatttttggatcatctacgagctctagcaatccacccgtggccacattcgtgtttggacagagttccaatccggtctccagcagtgccttcggtaacacagccgagagcagcacctctcagtcactcctattctcccaggattctaaactcgctacaacctcgtctactggcacggccgttacccctttcgtttttggtcccggcgctagcagtaataacactacaaccagtggctttggcttcggtgcaaccacaacctcgtcaagcgccggctcatcttttgtcttcggcaccgggccatccgccccttcggcctccccagccttcggagcaaaccaaactcctactttcggacagtcccaaggagcttctcagcctaacccccccggctttgggtctatctcttctagtaccgcgctatttccaacaggaagccaacccgccccacctacattcggcacagtgagctccagctcccaaccgcccgtgttcggccagcagccctcccagtcagcatttggcagtggaacaacacctaactcatcctctgcatttcagtttggaagcagtacgacaaactttaatttcaccaacaattcacccagcggcgtgttcaccttcggagccaactcatcaactcctgccgcgtctgcccaaccctctggaagtggcgggtttccatttaaccagagtcccgccgcctttactgtggggagtaacgggaagaacgtctttagctctagcgggacctccttcagtggtagaaaaattaaaactgcagtccgacgccggaaatag

SEQ ID NO: 97852 - DNA, 5561 bp, Artificial Sequence
  derived and/or modified sequence
ttccccgctgccagcactcaccctctctccgctcctgctcgcaacctcgcggttcctggggtgcttgtgcccactgtgtggacagcgcgggcggacttttgggccggggccgggcggcgggggaggctctctaaggcctccgcctctgcctctcccgcccccttacccgccccggagcgggaagcggcggaggctccgccatggcctcgggagccggaggagtcggagggggcggtggcggcaagatccggacgcggcgttgccaccaggggccaattaagccttaccagcaggggcgacaacagcatcagggcattcttagcagggttacagaatctgttaagaatattgtgccagggtggctacaaagatacttcaacaagaatgaagatgtatgcagctgttcaacagacacaagcgaggttccacgctggccagaaaataaagaggaccatctggtatatgccgatgaggagagctctaatattactgatgggagaatcacacctgagccagcagtcagtaatacagaagaaccttcaacaactagtactgcttcaaattatccagatgtgttaacaaggccttctcttcatcggagccatctgaatttttccatgttggaatcccctgcattacactgtcagccatctacatcctcggcattcccaattggcagttcgggattttcccttgtaaaggaaattaaagattctacctctcagcatgatgatgataacatctcaactaccagtggtttttcttcaagagcttctgataaagatataactgtttcaaagaacacttcattgccacctctgtggtccccagaagctgaacgttctcactcactctcacagcacactgccaccagctcaaaaaaaccagcattcaacttgtctgcctttggaacactttccccttcacttgggaattcttcaatccttaaaaccagtcagcttggagattctcctttttatcctggaaaaacaacatacggtggggcagcagctgctgtaagacagtctaaactacgaaatacaccttatcaggcaccagttagaagacaaatgaaagctaagcaactcagtgcacaatcttacggtgtgaccagttcaacagctcggcgaatattgcagtctttagagaagatgtcaagccctttagcggatgcaaaaagaattccatccattgtttcttctcctctgaattctcctcttgataggagtgggatagatatcacagattttcaggccaaaagagaaaaggtggattctcaatatcctcctgttcagagacttatgaccccaaagccagtttccatagcaacaaatcgaagtgtttattttaaaccatctctgactccttctggtgaattcaggaagactaatcaaagaatagataacaagtgcagtactggatatgaaaaaaatatgacacccggacaaaatagagaacaacgagaaagtggcttttcatatccaaatttcagtttgcctgcagccaatggtttatcttctggagtaggtggtggaggtggcaagatgagacgagaaagaacacgctttgttgcttctaaacctctggaggaggaggaaatggaagttccagtattaccgaaaatctctctaccgatcaccagttcttcactgcctacctttaattttagttcccctgagatcacaacttcctctccatcacccatcaattcgtctcaagcattaacaaacaaggtacaaatgacctctccgagcagcactggcagtcccatgtttaaattttcatctccaatcgtaaaatctactgaggcaaatgtactacctccatcatctattggatttacatttagtgtgcctgttgcaaaaacagcagaactttctggttctagtagtactttagaaccaattataagtagttcaggtttcgcatcgccgaagatagattctgttgctgctcagcccaccgcaacaagcccagtagtttatacaagaccagcaataagtagcttttcttctagtggaattgggtttggggagagtttaaaagctgggtcatcatggcagtgtgatacatgtctactccagaacaaagttacagacaacaaatgcatagcctgtcaagcagcaaaattgtcacccagagatactgctaaacagactggaattgaaacaccaaataaaagtggcaaaacaactctttctgcatcagggacaggctttggagacaaatttaaaccagtgataggcacttgggattgtgatacctgtttagtgcaaaataaacctgaagcaataaaatgtgtagcctgtgaaacaccgaaacctggaacttgtgtgaagcgagcccttacattgacagtggtttcggaaagtgctgagactatgactgcttcatcttccagctgcactgtaaccactggtaccttaggatttggagataaattcaaaaggcccattggatcttgggagtgttcagtatgctgtgtttctaataatgcagaagacaataagtgtgtgtcctgtatgtctgagaaaccaggaagttcagtacctgcttcaagtagcagcactgtacctgtctctctgccttctggaggctctctaggattggaaaagttcaagaaacccgagggaagctgggactgtgaattgtgcctagtgcagaataaggcagactctaccaaatgtttggcatgtgaaagtgcaaagccaggcacaaaatctgggtttaaaggctttgacacatcttcctcatcttcgaactcagcagcctcctcatccttcaaatttggtgtctcatcatcctcttctgggccttctcagactttaacaagcactggaaattttaaatttggagatcagggaggattcaaaataggtgtgtcatccgattctgggtctataaaccccatgagtgaaggctttaaattttctaaaccaataggagattttaaatttggagtttcatctgaatctaagcccgaagaagttaaaaaagatagtaagaatgataattttaagtttggactttcttctggtttaagcaacccagtttctttaactccatttcaatttggggtatctaatcttggacaggaagaaaagaaagaggaactgcccaaatcttcctctgcaggttttagctttggtacaggtgttattaactccacccctgctcctgctaacaccatagtgacctctgagaacaagagcagcttcaaccttggaaccatagaaaccaagagtgcttcagtggctcctttcacatgtaagacatcagaagctaaaaaagaagaaatgcctgccaccaaaggaggattctcttttggcaacgtggagcctgcctctctgccatctgcctcagtgtttgttttgggaaggacagaagagaaacagcaagagcctgtcacttctacttccctagtttttgggaagaaagctgacaatgaagagccaaagtgtcaaccagtgttttcctttgggaattcagagcaaaccaaagatgagaattcttcaaagtccacatttagttttagtatgacaaaaccatctgagaaggaatctgaacagccagcaaaagccacttttgcctttggagctcaaactagtactacagctgatcaaggtgcagcaaagccagtttttagtttcttgaacaacagttcctctagttcaagtacaccagccacttctgctggtggtggcatatttggtagttccacctcttcctccaatccacctgtggctacctttgtgtttggacagtccagcaatcctgtgagcagctctgcctttggtaacactgctgaatccagcacctctcagtctttgctattttctcaagatagcaaactagcaaccacatccagcacaggtacagctgtcaccccatttgtctttggtccaggagccagcagtaataatactaccacctctggtttcggctttggagccacaaccacatctagctctgcaggatcctcctttgtatttggaactggaccctcagcaccatctgccagtccagcatttggtgctaaccagaccccaacatttggacaaagtcaaggtgccagccagcccaatcccccaggctttggatctatatcatcttccacagcattatttcccactggttctcagcctgcaccacctacttttgggacagtgtcaagcagtagccagccccctgtgtttggacagcaacctagtcagtctgcatttggctctggaacaactcctaattctagttcggctttccagtttggcagcagcactacaaatttcaacttcacaaacaacagtccatcaggagtgttcacatttggtgcaaattctagcacacctgcagcctcagcccagccttcaggctcggggggctttccatttaaccagtctccagcagcatttacagtggggtcaaatgggaaaaatgtgttctcttcttctggaacttcattctctggtcgcaagataaagactgctgttagacgcaggaaataaaggtcacattggtgttgtactcaattttaacaacagctggtgccctgctttcagatactggattgtactttgtgctggggttatctgaagtcagatctgcctaaggacttctttaattttggaattttcctcctttctctttcgttacagaagccccaccctgcctcacccacccttttttaaataaataaatagctagactggtgactgattcttcagcaaaaatattttatgatccagcagattattcactgatttgacatagtctggctgtacccaggaatggagcctgcacggtgaatggctttgtatagaacctctttgtctacaccattatgtgcgctgataagcgttcatggaacgcgttgaaattgtaattatatctgaggaattctgtatagattagaattctgtatagattagagagtgttgaaacggatgatttctatgctgagtttgtgctggtgtatgtgtgaagtgagtgagttgggtgtattgtgcgctaaacttttctgatagaggaagcctgattaaagaatggtccgtgctaaggacttgttagatctagttcactctccatttaataattatatgctatttctatattttcattctcctatcacctgtcttgcctttttcattattttattatgaaacttgtgtaaatacaattttgtttctgtactttttggcataacataaatctgtgaacttgaaatttgaattttgtgttagagatttttttgttgtttgtttagtcttgtctcagattttattatgtaaatcccattattcaaagttgcctaaatccatttggaaatctttaaaaaaaaaattggggattcttaaagttgaatttattggcttttctgatccagttttgtttggaccaaaaaccagtattgtacaaagtattaagcatatatttttatatttactaaaatggactgtggtgactttggataataaggaaaagtttaatattaaagccatgtttattacagtataattaacatgttaaaccatgggataaatgccatcaataaaaaattatgacat

SEQ ID NO: 97853 - DNA, 4368 bp, Artificial Sequence
  derived and/or modified sequence
gggctaagattgtgtctgtcacgtcctctgactcggcctggagctggctcaggcggagggtccgccatggcctcaggagccggaggagtagggggaggcggtggcggtaagattcgcactcgccgatgccaccaaggccctatcaaaccttaccaacagggaaggcagcaacaccaaggaatactctcaagagtgaccgaaagcgtgaaaaatattgtgcccggatggctccaaaggtacttcaacaagaatgaagatgtttgttcatgtagcactgatacctccgaggtaccacgatggcccgagaataaggaggaccatcttgtgtatgccgacgaggaaagcagcaacatcactgatggaaggatcacgcctgagccggctgtgtccaatacagaggaaccatccacaacttctactgcctccaattatcctgacgttttgacgaggccatctcttcaccgcagccacctgaacttttctatgttagagagtccagccctacactgccaaccgtcgactagcagtgcctttccgattggcagttccgggttcagtcttgtcaaggagataaaggactcaacatcacaacatgacgatgataatatctcaacaacctctggcttcagcagtcgggcatcagacaaggacatcaccgtcagtaaaaatacatctctgcctcctctgtggtccccagaggccgaacgatctcattctcttagtcagcataccgcgaccagctccaagaagcctgcctttaatctgagcgcgtttggtacactgtcccccagcctggggaacagctcaatcctgaaaacatcccaattgggagactcccccttctacccgggtaaaactacctacggcggagccgcagccgcagtgaggcaaagcaagctgaggaatactccctatcaggccccagtaagaagacagatgaaagctaagcagttgtctgcccagagctatggggtcacgagctcaacagccagacgaattttacagtctctggaaaagatgagcagccccttagctgatgccaaaaggattcccagtatcgtctcctcacctctgaattctcccctggaccggagcggcatcgacatcacagactttcaagccaagcgtgaaaaagtcgatagccaataccccccagtacagcgcctaatgacccctaagccagtgtctatagcgaccaacaggagtgtatattttaagccctctctgacgccatccggagaatttcgcaaaaccaatcagagaatcgacaacaaatgtagcaccggttacgagaagaatatgacccctggtcagaaccgcgagcaacgcgaatccggattctcttacccgaatttctcactgcctgccgcaaacggactgtcaagcggagtcggcggaggaggagggaagatgcggcgagaaagaacccgatttgtagcatccaaacccctggaagaggaagagatggaagtaccagtgttgcccaagatcagcttaccaattacttcaagctcacttcctacgttcaatttcagttcccccgagattaccaccagctcaccatccccaataaactcgagccaagccctgactaacaaggtgcaaatgacctctccttcctctacaggcagccctatgtttaaattctcttctccgatagtgaaatccacagaggccaacgtgttgcccccttcctcgatcggtttcaccttttcagttcccgttgcaaaaacggctgagctctccggctccagctctacattagagcctattataagcagctcaggcttcgcaagtccaaagattgacagcgtggcagctcagcccaccgccacctctccagtggtctatacacggccagctattagcagcttttcttcctccggaatcggctttggcgagtcgctgaaagccggaagctcttggcagtgcgacacctgcttgctccagaataaagtaacagacaacaaatgcatagcctgccaggccgcaaagctgagtcccagagatacagccaagcagacaggtatagaaacaccgaacaaaagcggcaaaactaccctctcggcctctggtaccgggtttggggacaagtttaagcccgtcataggcacatgggattgcgacacctgcctggtgcagaataaaccagaggcaataaaatgtgtggcctgtgagactcctaagccaggcacttgcgtcaagagagctctcactctgaccgtggtgtctgagagcgctgagactatgacagctagcagcagttcttgcaccgtgacaaccggaaccctcggtttcggcgacaagtttaagagacccattgggagctgggagtgcagtgtttgctgtgtcagcaataatgcggaggataacaaatgcgtttcatgtatgtctgaaaagccaggaagctcggttcccgcaagcagctcttctaccgtgcccgtcagccttccctccggcggaagtctgggtttagagaagttcaaaaaacctgaaggctcttgggactgtgagctgtgcttggtgcagaataaagccgactctaccaaatgtctggcttgtgagagcgccaaaccgggtactaaatccggatttaagggctttgacacctccagctctagtagcaacagtgctgcctcgtcctcattcaaatttggggtgtcgtcctcttcttctggaccaagtcagacattaacctctaccggcaacttcaaattcggcgatcagggaggatttaaaatcggtgtcagctcggactccgggagcatcaaccccatgtccgaagggtttaaatttagcaagcctattggtgattttaagtttggtgtgagcagcgaatccaagcccgaagaggttaaaaaggatagcaagaacgacaatttcaagttcggactgtcttctggtttgtcgaatccagtatccttgacgccatttcaatttggggtgtccaatctcggacaagaggagaaaaaggaggagcttccaaaaagctcatctgcgggtttctcattcggaaccggcgtcatcaactccacccccgcacccgctaatacgatagttacctccgaaaataagtccagtttcaatctgggcacaatcgagacaaagtctgccagcgttgcgccatttacctgtaaaaccagcgaagccaagaaagaggagatgcccgcaactaaagggggattctcctttgggaacgtagaacctgccagcctgccgtctgccagcgtgttcgtgctcggccgtacggaggagaagcagcaggaaccagtgacttccacatccctcgtgttcggtaagaaagccgacaacgaagagccaaaatgccaacccgtattctcattcggaaatagtgaacaaaccaaagacgaaaatagctccaagtctactttcagcttctccatgacgaagccttcagagaaggagtcagagcagcccgctaaggctacgtttgccttcggcgctcagacttccaccaccgcggaccaaggtgcggctaagccagtgtttagctttctcaataactcttcctccagctcgagtacccctgccacctctgccggtgggggtattttcggctctagcacatcgtccagcaacccccctgtggccacattcgttttcgggcagagttcaaaccccgtcagttcttctgcttttggcaacacggcagaaagctctacatcccagagcctactcttctcacaagattcaaagttggcaaccacgagctcaacaggcaccgctgtaacccccttcgtgtttggacccggagcttccagtaataacaccaccacaagtggcttcggcttcggtgctaccactaccagcagctcggcaggatcaagttttgttttcggaacgggcccttcggccccttctgcatcgcccgcatttggcgcaaaccagacacccacattcggacagagtcagggggcttcccaacccaatcctcctggatttggaagcatctcctcatctactgccctttttcctacggggtcccagccagctccacccaccttcggaaccgtgagctcttcgagtcaaccgcctgtgttcggccagcagccgagtcagtctgcctttggctcaggcacaaccccaaatagctctagtgcctttcagtttggctccagtactaccaattttaacttcaccaataactccccctctggagtattcacttttggcgctaattcttcaacccctgccgctagtgctcagccctctggcagtgggggtttcccttttaatcagtcgcccgctgcgtttacagttggctctaacggcaagaatgtgtttagctcgagtggcacctcatttagcggacggaaaattaaaaccgccgtgcggcgacggaaatag

SEQ ID NO: 97854 - DNA, 4368 bp, Artificial Sequence
  derived and/or modified sequence
ggcctgagactgtgcctgagcagacccctgaccagacccggcgccggcagcggcggcggcagcgccatggccagcggcgccggcggcgtgggcggcggcggcggcggcaagatcagaaccagaagatgccaccagggccccatcaagccctaccagcagggcagacagcagcaccagggcatcctgagcagagtgaccgagagcgtgaagaacatcgtgcccggctggctgcagagatacttcaacaagaacgaggacgtgtgcagctgcagcaccgacaccagcgaggtgcccagatggcccgagaacaaggaggaccacctggtgtacgccgacgaggagagcagcaacatcaccgacggcagaatcacccccgagcccgccgtgagcaacaccgaggagcccagcaccaccagcaccgccagcaactaccccgacgtgctgaccagacccagcctgcacagaagccacctgaacttcagcatgctggagagccccgccctgcactgccagcccagcaccagcagcgccttccccatcggcagcagcggcttcagcctggtgaaggagatcaaggacagcaccagccagcacgacgacgacaacatcagcaccaccagcggcttcagcagcagagccagcgacaaggacatcaccgtgagcaagaacaccagcctgccccccctgtggagccccgaggccgagagaagccacagcctgagccagcacaccgccaccagcagcaagaagcccgccttcaacctgagcgccttcggcaccctgagccccagcctgggcaacagcagcatcctgaagaccagccagctgggcgacagccccttctaccccggcaagaccacctacggcggcgccgccgccgccgtgagacagagcaagctgagaaacaccccctaccaggcccccgtgagaagacagatgaaggccaagcagctgagcgcccagagctacggcgtgaccagcagcaccgccagaagaatcctgcagagcctggagaagatgagcagccccctggccgacgccaagagaatccccagcatcgtgagcagccccctgaacagccccctggacagaagcggcatcgacatcaccgacttccaggccaagagagagaaggtggacagccagtacccccccgtgcagagactgatgacccccaagcccgtgagcatcgccaccaacagaagcgtgtacttcaagcccagcctgacccccagcggcgagttcagaaagaccaaccagagaatcgacaacaagtgcagcaccggctacgagaagaacatgacccccggccagaacagagagcagagagagagcggcttcagctaccccaacttcagcctgcccgccgccaacggcctgagcagcggcgtgggcggcggcggcggcaagatgagaagagagagaaccagattcgtggccagcaagcccctggaggaggaggagatggaggtgcccgtgctgcccaagatcagcctgcccatcaccagcagcagcctgcccaccttcaacttcagcagccccgagatcaccaccagcagccccagccccatcaacagcagccaggccctgaccaacaaggtgcagatgaccagccccagcagcaccggcagccccatgttcaagttcagcagccccatcgtgaagagcaccgaggccaacgtgctgccccccagcagcatcggcttcaccttcagcgtgcccgtggccaagaccgccgagctgagcggcagcagcagcaccctggagcccatcatcagcagcagcggcttcgccagccccaagatcgacagcgtggccgcccagcccaccgccaccagccccgtggtgtacaccagacccgccatcagcagcttcagcagcagcggcatcggcttcggcgagagcctgaaggccggcagcagctggcagtgcgacacctgcctgctgcagaacaaggtgaccgacaacaagtgcatcgcctgccaggccgccaagctgagccccagagacaccgccaagcagaccggcatcgagacccccaacaagagcggcaagaccaccctgagcgccagcggcaccggcttcggcgacaagttcaagcccgtgatcggcacctgggactgcgacacctgcctggtgcagaacaagcccgaggccatcaagtgcgtggcctgcgagacccccaagcccggcacctgcgtgaagagagccctgaccctgaccgtggtgagcgagagcgccgagaccatgaccgccagcagcagcagctgcaccgtgaccaccggcaccctgggcttcggcgacaagttcaagagacccatcggcagctgggagtgcagcgtgtgctgcgtgagcaacaacgccgaggacaacaagtgcgtgagctgcatgagcgagaagcccggcagcagcgtgcccgccagcagcagcagcaccgtgcccgtgagcctgcccagcggcggcagcctgggcctggagaagttcaagaagcccgagggcagctgggactgcgagctgtgcctggtgcagaacaaggccgacagcaccaagtgcctggcctgcgagagcgccaagcccggcaccaagagcggcttcaagggcttcgacaccagcagcagcagcagcaacagcgccgccagcagcagcttcaagttcggcgtgagcagcagcagcagcggccccagccagaccctgaccagcaccggcaacttcaagttcggcgaccagggcggcttcaagatcggcgtgagcagcgacagcggcagcatcaaccccatgagcgagggcttcaagttcagcaagcccatcggcgacttcaagttcggcgtgagcagcgagagcaagcccgaggaggtgaagaaggacagcaagaacgacaacttcaagttcggcctgagcagcggcctgagcaaccccgtgagcctgacccccttccagttcggcgtgagcaacctgggccaggaggagaagaaggaggagctgcccaagagcagcagcgccggcttcagcttcggcaccggcgtgatcaacagcacccccgcccccgccaacaccatcgtgaccagcgagaacaagagcagcttcaacctgggcaccatcgagaccaagagcgccagcgtggcccccttcacctgcaagaccagcgaggccaagaaggaggagatgcccgccaccaagggcggcttcagcttcggcaacgtggagcccgccagcctgcccagcgccagcgtgttcgtgctgggcagaaccgaggagaagcagcaggagcccgtgaccagcaccagcctggtgttcggcaagaaggccgacaacgaggagcccaagtgccagcccgtgttcagcttcggcaacagcgagcagaccaaggacgagaacagcagcaagagcaccttcagcttcagcatgaccaagcccagcgagaaggagagcgagcagcccgccaaggccaccttcgccttcggcgcccagaccagcaccaccgccgaccagggcgccgccaagcccgtgttcagcttcctgaacaacagcagcagcagcagcagcacccccgccaccagcgccggcggcggcatcttcggcagcagcaccagcagcagcaacccccccgtggccaccttcgtgttcggccagagcagcaaccccgtgagcagcagcgccttcggcaacaccgccgagagcagcaccagccagagcctgctgttcagccaggacagcaagctggccaccaccagcagcaccggcaccgccgtgacccccttcgtgttcggccccggcgccagcagcaacaacaccaccaccagcggcttcggcttcggcgccaccaccaccagcagcagcgccggcagcagcttcgtgttcggcaccggccccagcgcccccagcgccagccccgccttcggcgccaaccagacccccaccttcggccagagccagggcgccagccagcccaacccccccggcttcggcagcatcagcagcagcaccgccctgttccccaccggcagccagcccgccccccccaccttcggcaccgtgagcagcagcagccagccccccgtgttcggccagcagcccagccagagcgccttcggcagcggcaccacccccaacagcagcagcgccttccagttcggcagcagcaccaccaacttcaacttcaccaacaacagccccagcggcgtgttcaccttcggcgccaacagcagcacccccgccgccagcgcccagcccagcggcagcggcggcttccccttcaaccagagccccgccgccttcaccgtgggcagcaacggcaagaacgtgttcagcagcagcggcaccagcttcagcggcagaaagatcaagaccgccgtgagaagaagaaagtag

SEQ ID NO: 97855 - protein, 184 aa, Artificial Sequence
  derived and/or modified sequence
MLKKMGEAVARVARKVNETVESGSDTLDLAECKLVSFPIGIYKVLRNVSGQIHLITLANNELKSLTSKFMTTFSQLRELHLEGNFLHRLPSEVSALQHLKAIDLSRNQFQDFPEQLTALPALETINLEENEIVDVPVEKLAAMPALRSINLRFNPLNAEVRVIAPPLIKFDMLMSPEGARAPLP

SEQ ID NO: 97856 - protein, 175 aa, Artificial Sequence
  derived and/or modified sequence
MLKKMGEAVARVARKVNETVESGSDTLDLAECKLVSFPIGIYKVLRNVSGQIHLITLANNELKSLTSKFMTTFSQLRELHLEGNFLHRLPSEVSALQHLKAIDLSRNQFQDFPEQLTALPALETINLEENEIVDVPVEKLAAMPALRSINLRFNPLNAEVRVIAPPLIKFDMLMS

SEQ ID NO: 97857 - DNA, 555 bp, Artificial Sequence
  derived and/or modified sequence
atgctgaagaagatgggcgaggccgtggccagagtggccagaaaggtgaacgagaccgtggagagcggcagcgacaccctggacctggccgagtgcaagctggtgagcttccccatcggcatctacaaggtgctgagaaacgtgagcggccagatccacctgatcaccctggccaacaacgagctgaagagcctgaccagcaagttcatgaccaccttcagccagctgagagagctgcacctggagggcaacttcctgcacagactgcccagcgaggtgagcgccctgcagcacctgaaggccatcgacctgagcagaaaccagttccaggacttccccgagcagctgaccgccctgcccgccctggagaccatcaacctggaggagaacgagatcgtggacgtgcccgtggagaagctggccgccatgcccgccctgagaagcatcaacctgagattcaaccccctgaacgccgaggtgagagtgatcgccccccccctgatcaagttcgacatgctgatgagccccgagggcgccagagcccccctgccctag

SEQ ID NO: 97858 - DNA, 528 bp, Artificial Sequence
  derived and/or modified sequence
atgctgaagaagatgggcgaggccgtggccagagtggccagaaaggtgaacgagaccgtggagagcggcagcgacaccctggacctggccgagtgcaagctggtgagcttccccatcggcatctacaaggtgctgagaaacgtgagcggccagatccacctgatcaccctggccaacaacgagctgaagagcctgaccagcaagttcatgaccaccttcagccagctgagagagctgcacctggagggcaacttcctgcacagactgcccagcgaggtgagcgccctgcagcacctgaaggccatcgacctgagcagaaaccagttccaggacttccccgagcagctgaccgccctgcccgccctggagaccatcaacctggaggagaacgagatcgtggacgtgcccgtggagaagctggccgccatgcccgccctgagaagcatcaacctgagattcaaccccctgaacgccgaggtgagagtgatcgccccccccctgatcaagttcgacatgctgatgagctag

SEQ ID NO: 97859 - DNA, 555 bp, Artificial Sequence
  derived and/or modified sequence
atgctgaagaaaatgggcgaagctgtagcccgggtagcaaggaaggtgaacgagaccgtggaaagtggttcagatacactcgatctggccgaatgcaaactagtgtcattcccaatcggaatctacaaagttctcagaaatgtcagtgggcagattcatctaatcacactggctaataacgagctcaaatctcttacttccaagttcatgactaccttctcacaactgagagaactgcacctggagggaaacttcctacatagactcccatctgaagtttctgctctgcagcacttgaaagcaattgacctgagccgcaatcagttccaggacttcccggagcagctgactgccctacctgcactggagacaatcaaccttgaggagaacgagatcgtggatgtgcctgtggaaaagctggcagccatgcccgcgctcagaagcataaatcttcgctttaatccgctgaacgcagaagtccgtgtaattgcacctcccttgattaagttcgacatgctgatgtccccggaaggcgccagagccccgctgccttag

SEQ ID NO: 97860 - DNA, 555 bp, Artificial Sequence
  derived and/or modified sequence
atgctgaagaagatgggtgaagcggtcgccagggtggcccgtaaagtgaatgaaaccgtggagtccggaagcgataccctcgatctcgctgagtgtaagctcgtcagttttcctataggtatctacaaggtcttgcggaacgtatccggacagatccacctcatcacattggctaataatgagctgaaatcattgacttcgaagttcatgactactttcagtcagctgagggagctccatttggaaggaaactttctgcacagattgccgtcagaggtatctgctctacaacaccttaaggctatcgacctttcgaggaaccaattccaggactttcccgaacaattgaccgccctgccggcgcttgaaacaattaacctggaagagaacgagattgtggatgtcccagtcgaaaaattagccgccatgcccgccctgagaagtatcaatctccgcttcaacccactgaacgcagaggtccgtgtcatcgcacccccactgattaagttcgacatgctgatgtctccggaaggtgcccgtgcccctctgccctag

SEQ ID NO: 97861 - DNA, 528 bp, Artificial Sequence
  derived and/or modified sequence
atgctcaagaagatgggggaagctgttgctcgcgtagcccggaaagtgaacgagaccgtggaaagcggtagcgacacactggacctggctgaatgtaagttagtatcctttcctattggcatatataaggtgcttcgcaatgtgtctggccagatacatcttatcaccttggccaacaatgagcttaagtctctgactagtaaattcatgacaacatttagccaattaagagagttgcacctcgagggcaattttctgcatagactgccgagcgaagtgtccgcgttgcagcatttaaaagcgatagatctgagtaggaaccagttccaagactttcccgagcaacttaccgcactccccgctctggagacaattaacctagaagagaacgagattgtggacgtgcctgtagagaaactggcagccatgcccgcacttcgcagcatcaacttgcgcttcaaccccctgaacgccgaagtgagagttatagcaccccccctgatcaaattcgacatgctcatgtcctag

SEQ ID NO: 97862 - DNA, 555 bp, Artificial Sequence
  derived and/or modified sequence
atgctgaagaagatgggagaggccgtggcccgggtggccaggaaggtgaatgaaacagtggagagcggcagtgacaccctggacctggccgagtgcaagctggtgtccttccccatcggcatctacaaggtgctgagaaatgtgtctggccagatccacctgatcaccctggccaacaatgagctgaagagcctgaccagcaagttcatgaccaccttcagccagctgcgggagctgcacctggagggcaacttcctgcaccggctgcccagcgaggtgtctgccctgcagcacctgaaggccatcgacctgagcaggaaccagttccaggacttccctgagcagctgacagccctgcctgccctggagaccatcaacctggaggagaatgagatcgtggatgtgcctgtggagaagctggccgccatgcctgccctgcggagcatcaacctgcgcttcaaccccctgaatgctgaggtgcgggtgattgcccctcctctcatcaagtttgacatgctgatgagccctgagggcgcccgggcccccctgccctag

SEQ ID NO: 97863 - DNA, 528 bp, Artificial Sequence
  derived and/or modified sequence
atgctgaagaagatgggagaggccgtggcccgggtggccaggaaggtgaatgaaacagtggagagcggcagtgacaccctggacctggccgagtgcaagctggtgtccttccccatcggcatctacaaggtgctgagaaatgtgtctggccagatccacctgatcaccctggccaacaatgagctgaagagcctgaccagcaagttcatgaccaccttcagccagctgcgggagctgcacctggagggcaacttcctgcaccggctgcccagcgaggtgtctgccctgcagcacctgaaggccatcgacctgagcaggaaccagttccaggacttccctgagcagctgacagccctgcctgccctggagaccatcaacctggaggagaatgagatcgtggatgtgcctgtggagaagctggccgccatgcctgccctgcggagcatcaacctgcgcttcaaccccctgaatgctgaggtgcgggtgattgcccctcctctcatcaagtttgacatgctgatgtcctag

SEQ ID NO: 97864 - DNA, 3414 bp, Artificial Sequence
  derived and/or modified sequence
ggaggctcagtccgaggatgcctagatgttagcgagggagcacgcgctgagcttcccgaaccccatgccacaaaaacaaggcgccagcaggtcccgctcacgtcccagcgggcttctttccctggggtggggaagtgggtcaacttcgttctgatctgaaggggggtttgggactatttgggtcgctcctcacctccccacccgctccccggcttggcatggtccagagcccgggctggagccagcggtagggccagcttgcacacatggctccggaggctccggttgcccatccgagcccctgccaggctctaacgttcccaactgacaacaccagtaactaaatataggagcagatggtggggacgggctgtcgcagcggctcctttgcagaggtctccggactgcagataaggctcaggcccttttgtgagaagcagaccagcctgggggctggcggcaggacacctgtgtctgcatgctgaagaagatgggtgaggccgtggccagagtagcaaggaaggtcaacgagacggtggagagcggctctgacactctggacctggccgagtgcaagctggtctcctttcccattggcatctacaaggtcctgcggaatgtctctggccagatccacctcatcaccctggctaacaacgagcttaagtccctcaccagcaagttcatgaccacattcagtcagctccgagagctccacctggaggggaacttcctacaccgcctccccagcgaggtcagtgccctgcagcacctcaaggccattgacctgtcccggaaccagttccaggacttccctgagcagcttaccgccctgccggcgctggagaccatcaacctggaggagaacgagatcgtagatgtgcccgtggagaagctggccgccatgccagccttgcgcagcatcaacctccgcttcaacccactcaacgccgaggtgcgcgtgatcgccccgccgctcatcaagtttgacatgctcatgtctccggaaggcgcaagagcccccctaccttaggccaccctcctcatgcccacccagcaaggggcagaggccacaggcctggaaccctggaagggagggaggcccatgggaggccaagcctgggggctgggggcgggtgggccgagcagcacgtggtgggtggggtgcagctggtctggatagatagcttacagcagtagtgggctctggaatgcccaagggaagaggcaaggtggggcctgcagcctggactcggcactcacagctgctgtgcaaactcaggcagatctcctgccctctctgagccttgtcacttgaaaaaaacaggaccctttccctcctttgggctccctggaggtttttaagcagtacgtgcctccaagttacctccagatcagcaggcacaggtgggcattgccaggtattttctgagcccctgcgggtttgaggccttgtttttagtgctgagagccagttgctgccctgagaagagaagacaacctccatctatttattgcttcctgagaactgacctggatgcggccctctgcagggcccagtcttcagtcctgtggtccctggactggtgggaacctgaactaggagtcctgggagagctgtggtgggaatatgggctggcactgctgcagggcaagaacattcatgtaggagcccgaggaccagcaggctgggaatggggagcaagtcacgtcagctctgtcattccccacagttaacaaattggcggggtgggaagtcctgagtgctccgtccctctagcatcactcctgagctgcgggagaggtggcccagagaacagcagagtcagttacacctgcagctcttgtctaaagtgattagatggccaccctcaccactgtccagtccagcagcagcctggctgccttgtcatggcctcctgggggcagaaggcgatgtggaccacgggatttgtagccagccagctcccaggccaacgcccaaagccctgatgacctggttcttctgaggccctcaacctggcatcttagggtatggtcaggcaacagggtgaccagctgtcctggtttcccaggacatggaactttcaatgctaaaactgggacagtacccagcaagtggggatggttggtcccctaccaggagagggcctggggctcttgcttcccgagaacgcctgtggcttgaagaaccttgactgcttggtcctcaggtatctacctcccaccttctcctcatctgtggagcaagccaactcagtgccccagaccccacctgatctgcatctttgtttgcatctccagagacacctgaggccccagagcttgaggcaaagccaggccgtccaaatcctgtgtgccgtggacgagtggccactttactactcctaaggctaagatgttgagagctcagaccactgctcagagcagtaatccctgctcagaatgctcccagttccctcgtccctgcccaggtctcttgtctcttgggaaggaactgataggtcgggccattgttgggccatcactgagcgctcagtatctcaagagactctgttcattctgctcgtatcccaaggcctggttggtcaaactctgggcaaagggttttcaggatgaggaggtcaagacaggatctccagagctaccgagttcatctgtgggtgttgggggcaagtgggggctgaagtcctgtgcaggctgcgctggccccacctgccttgtgccctggagtggggtttctccttgttgaagaagaggcatccttctctgatgtgcacaaacacaatgtatgaccagagccttgcaactcaaagtgtggtctgtggaccagcagcggcagtgacacctgggagcttgttaggaatgcagagtctaggcctcaccctatacctcccgactcagaccctgcattttagcaagacccccagctgattcctataagcactttagagtttgagaagcaaggacctaggctggggatgtcctccgagcagagggtgaagtttctctcagttctctccctgccacttccagggatctgagcctgtgctcagcctcctccctaacccaccctgggagacacttggcctgttagattgttccagagtctgcatggcactcctgaagaagggagtgtgacctgcagtcaccaggagatgagggttaggtgtgcccagccctccagacccggcctttctggttaacccctgcatgccaagctgcctgctgccccaggtcctcacctcaggcctttgaaggggcagcttctggaagttgttttctcctctgcttggagagtttgcccttgtctgtcttggaaagtgtgggcagccacagatgcccccaaatcagagctcacagtgagtgagcccctaagcttcagtctgcaataaagaatgcattggtttcatc

SEQ ID NO: 97865 - DNA, 3095 bp, Artificial Sequence
  derived and/or modified sequence
gcgtgactgcgctgcgcagggcgctaggaggcattgtcgccgtaagtggagccaaaagcggcccggagcgggaccacacgcttcttgccccgcaaagctcaggcccttttgtgagaagcagaccagcctgggggctggcggcaggacacctgtgtctgcatgctgaagaagatgggtgaggccgtggccagagtagcaaggaaggtcaacgagacggtggagagcggctctgacactctggacctggccgagtgcaagctggtctcctttcccattggcatctacaaggtcctgcggaatgtctctggccagatccacctcatcaccctggctaacaacgagcttaagtccctcaccagcaagttcatgaccacattcagtcagctccgagagctccacctggaggggaacttcctacaccgcctccccagcgaggtcagtgccctgcagcacctcaaggccattgacctgtcccggaaccagttccaggacttccctgagcagcttaccgccctgccggcgctggagaccatcaacctggaggagaacgagatcgtagatgtgcccgtggagaagctggccgccatgccagccttgcgcagcatcaacctccgcttcaacccactcaacgccgaggtgcgcgtgatcgccccgccgctcatcaagtttgacatgctcatgtctccggaaggcgcaagagcccccctaccttaggccaccctcctcatgcccacccagcaaggggcagaggccacaggcctggaaccctggaagggagggaggcccatgggaggccaagcctgggggctgggggcgggtgggccgagcagcacgtggtgggtggggtgcagctggtctggatagatagcttacagcagtagtgggctctggaatgcccaagggaagaggcaaggtggggcctgcagcctggactcggcactcacagctgctgtgcaaactcaggcagatctcctgccctctctgagccttgtcacttgaaaaaaacaggaccctttccctcctttgggctccctggaggtttttaagcagtacgtgcctccaagttacctccagatcagcaggcacaggtgggcattgccaggtattttctgagcccctgcgggtttgaggccttgtttttagtgctgagagccagttgctgccctgagaagagaagacaacctccatctatttattgcttcctgagaactgacctggatgcggccctctgcagggcccagtcttcagtcctgtggtccctggactggtgggaacctgaactaggagtcctgggagagctgtggtgggaatatgggctggcactgctgcagggcaagaacattcatgtaggagcccgaggaccagcaggctgggaatggggagcaagtcacgtcagctctgtcattccccacagttaacaaattggcggggtgggaagtcctgagtgctccgtccctctagcatcactcctgagctgcgggagaggtggcccagagaacagcagagtcagttacacctgcagctcttgtctaaagtgattagatggccaccctcaccactgtccagtccagcagcagcctggctgccttgtcatggcctcctgggggcagaaggcgatgtggaccacgggatttgtagccagccagctcccaggccaacgcccaaagccctgatgacctggttcttctgaggccctcaacctggcatcttagggtatggtcaggcaacagggtgaccagctgtcctggtttcccaggacatggaactttcaatgctaaaactgggacagtacccagcaagtggggatggttggtcccctaccaggagagggcctggggctcttgcttcccgagaacgcctgtggcttgaagaaccttgactgcttggtcctcaggtatctacctcccaccttctcctcatctgtggagcaagccaactcagtgccccagaccccacctgatctgcatctttgtttgcatctccagagacacctgaggccccagagcttgaggcaaagccaggccgtccaaatcctgtgtgccgtggacgagtggccactttactactcctaaggctaagatgttgagagctcagaccactgctcagagcagtaatccctgctcagaatgctcccagttccctcgtccctgcccaggtctcttgtctcttgggaaggaactgataggtcgggccattgttgggccatcactgagcgctcagtatctcaagagactctgttcattctgctcgtatcccaaggcctggttggtcaaactctgggcaaagggttttcaggatgaggaggtcaagacaggatctccagagctaccgagttcatctgtgggtgttgggggcaagtgggggctgaagtcctgtgcaggctgcgctggccccacctgccttgtgccctggagtggggtttctccttgttgaagaagaggcatccttctctgatgtgcacaaacacaatgtatgaccagagccttgcaactcaaagtgtggtctgtggaccagcagcggcagtgacacctgggagcttgttaggaatgcagagtctaggcctcaccctatacctcccgactcagaccctgcattttagcaagacccccagctgattcctataagcactttagagtttgagaagcaaggacctaggctggggatgtcctccgagcagagggtgaagtttctctcagttctctccctgccacttccagggatctgagcctgtgctcagcctcctccctaacccaccctgggagacacttggcctgttagattgttccagagtctgcatggcactcctgaagaagggagtgtgacctgcagtcaccaggagatgagggttaggtgtgcccagccctccagacccggcctttctggttaacccctgcatgccaagctgcctgctgccccaggtcctcacctcaggcctttgaaggggcagcttctggaagttgttttctcctctgcttggagagtttgcccttgtctgtcttggaaagtgtgggcagccacagatgcccccaaatcagagctcacagtgagtgagcccctaagcttcagtctgcaataaagaatgcattggtttcatc

SEQ ID NO: 97866 - DNA, 663 bp, Artificial Sequence
  derived and/or modified sequence
ggaactcgcctggggcgccgccggcggcggagggagcgtgactgcgctgcgcagggcgctaggaggcattgtcgccgctcaggcccttttgtgagaagcagaccagcctgggggctggcggcaggacacctgtgtctgcatgctgaagaagatgggtgaggccgtggccagagtagcaaggaaggtcaacgagacggtggagagcggctctgacactctggacctggccgagtgcaagctggtctcctttcccattggcatctacaaggtcctgcggaatgtctctggccagatccacctcatcaccctggctaacaacgagcttaagtccctcaccagcaagttcatgaccacattcagtcagctccgagagctccacctggaggggaacttcctacaccgcctccccagcgaggtcagtgccctgcagcacctcaaggccattgacctgtcccggaaccagttccaggacttccctgagcagcttaccgccctgccggcgctggagaccatcaacctggaggagaacgagatcgtagatgtgcccgtggagaagctggccgccatgccagccttgcgcagcatcaacctccgcttcaacccactcaacgccgaggtgcgcgtgatcgccccgccgctcatcaagtttgacatgctcatgtc

SEQ ID NO: 97867 - DNA, 555 bp, Artificial Sequence
  derived and/or modified sequence
atgctgaagaagatgggcgaggccgtggcccgggtggcccggaaggtaaacgagactgtggaaagtggcagcgacactctagacttagccgagtgtaagctggtgtccttccctatcggcatttacaaggtgttgcgcaacgtgtccggccaaatccatttaatcacccttgcaaacaacgaattgaaatctctaacaagtaagttcatgactacttttagtcagctcagagagcttcatctggaaggaaactttctgcatcgcttaccatccgaggtgtcagccctccagcacttgaaggccattgacctatcacgaaaccaattccaggatttccctgaacagctgacggccctgccagctctggagactatcaatcttgaggaaaacgagatcgtagacgtccctgtggagaagcttgctgcaatgcccgcactccggtcaatcaatcttcggtttaatcctcttaatgcggaggtccgcgtgatcgctccacctctgattaaattcgatatgctgatgtcccctgaaggggcccgggcgcctctgccctag

SEQ ID NO: 97868 - DNA, 555 bp, Artificial Sequence
  derived and/or modified sequence
atgctgaagaagatgggcgaggccgtggcccgggtggcccggaaggtgaatgagaccgtggaatccgggtctgacactctagatcttgctgagtgcaaattggtgtcttttcctataggcatctataaggtgctcaggaatgtttctggtcagatccacctcatcactctggccaataacgagctgaaatctcttacgagtaaattcatgactaccttcagccagctgcgggagttgcatctggagggaaacttcctccaccgactcccgtccgaggtctcagccctgcagcatctgaaggccattgatttgagccgaaaccaattccaagacttcccggagcaactgaccgccctccctgcactggagaccatcaacctagaagagaatgagatagtggatgttccagtggaaaaactggcagcaatgcccgctcttaggagtatcaacttacgtttcaatcccctaaatgccgaggtccgggtgatagctcctccgctgataaagtttgacatgctgatgtcccctgaaggcgccagagctccactcccctag

SEQ ID NO: 97869 - DNA, 528 bp, Artificial Sequence
  derived and/or modified sequence
atgctgaagaagatgggcgaggccgtggcccgggtggcccggaaggtcaatgagaccgtggaatctggatctgatacgctcgatcttgctgagtgcaaattggtttccttccctatcggaatatacaaagtcttaagaaatgtgagcggccagatccatttaataacactggctaacaatgagctgaaatcactcaccagtaaattcatgacaacattttcacagcttcgtgagcttcatctcgaaggaaacttcctacacaggctgccatcagaggtctctgcacttcagcaccttaaggccattgacctgtcaaggaaccagttccaggatttccctgagcagctcaccgccttacccgcactggagaccattaatctggaggagaatgagatcgtggacgttcctgtagagaagctcgctgccatgcccgccctaagaagtattaacctccgcttcaatccattgaacgccgaagtgagggtgatcgccccccccctgatcaagtttgatatgctgatgagctag

SEQ ID NO: 97870 - DNA, 555 bp, Artificial Sequence
  derived and/or modified sequence
atgctaaaaaagatgggggaagccgttgcccgtgtggccagaaaagtcaacgaaactgtcgagtccgggtcagatactctcgatcttgccgagtgtaaactagtctcatttccgataggcatctacaaggtgttaagaaacgtcagtgggcaaatacacctgatcacgcttgctaacaacgaactaaaatctttgacttctaaattcatgacaactttctcacaactgagggagcttcacttagagggaaattttttacaccgcttgccctccgaagtgtctgctctgcagcatttaaaagccattgacctctcccgtaatcagttccaggattttccggaacaactgacggccttgcccgctctagagaccattaatctggaggaaaacgaaattgttgatgtccccgtcgagaagcttgcggcaatgcccgcactcagatctataaatttgcggttcaaccctttgaatgccgaagtgcgggtgattgcccctcccttgatcaaattcgatatgctgatgagccccgaaggggctagagctcccttgccttag

SEQ ID NO: 97871 - DNA, 555 bp, Artificial Sequence
  derived and/or modified sequence
atgttgaaaaaaatgggggaagcagtcgccagggtggcgaggaaggttaacgagacggtcgaatctggttctgacacactggacttagccgagtgcaagctcgtgtccttccccataggtatctacaaagtcctccgcaatgtctccgggcagattcatctcatcactctcgctaacaacgaactgaagtctctcacctcaaaatttatgactactttttcacagctgagggaattgcacttagaaggaaacttcctccataggctgccatcagaggtgagcgccttgcagcacctcaaggctattgacctgagccggaaccaattccaggatttcccagagcagctgacggccctgcccgctctggaaactattaacctcgaagagaacgagatcgtcgatgttcccgtcgagaagctagcagctatgcctgctcttagatctatcaatctgagattcaacccgttgaatgcagaagttcgagtcatcgcgcctcccctgatcaaatttgacatgttgatgtcaccggagggtgctcgggctccgctgccatag

SEQ ID NO: 97872 - DNA, 528 bp, Artificial Sequence
  derived and/or modified sequence
atgctgaaaaaaatgggggaagcagtcgctagggtggctcgaaaagtgaacgaaacagtcgagtcaggctcagatacattggacctggcagagtgtaaacttgtgtcattcccaattggcatctataaagtgcttcgcaacgttagcggtcaaattcacctgataacactagccaacaatgagctgaaatctctgaccagcaagttcatgaccaccttctcacaattgcgggagttacacctggagggtaattttctgcaccgcctcccatcggaagtctccgccctgcagcatctgaaagcgatcgacttgagccggaatcagtttcaggacttcccagaacaactcactgcgctaccagcccttgaaactataaatctggaggaaaatgagatcgttgatgtgcctgtggaaaagcttgcagccatgcccgctctaaggtccattaatctccgctttaatccactcaacgctgaggtgagggttatcgctccacccctgattaagttcgacatgcttatgagctag

SEQ ID NO: 97873 - protein, 612 aa, Artificial Sequence
  derived and/or modified sequence
MASPSPPPESKEEWDYLDPAQRSLYKDVMMENYGNLVSLDVLNRDKDEEPTVKQEIEEIEEEVEPQGVIVTRIKSEIDQDPMGRETFELVGRLDKQRGIFLWEIPRESLTQEQRMFRENTNIIRKRPNSEEKCHKCEECGKGFVRKAHFIQHQRVHTGEKPFQCNECGKSFSRSSFVIEHQRIHTGERPYECNYCGKTFSVSSTLIRHQRIHTGERPYQCNQCKQSFSQRRSLVKHQRIHTGEKPHKCSDCGKAFSWKSHLIEHQRTHTGEKPYHCTKCKKSFSRNSLLVEHQRIHTGERPHKCGECGKAFRLSTYLIQHQKIHTGEKPFLCIECGKSFSRSSFLIEHQRIHTGERPYQCKECGKSFSQLCNLTRHQRIHTGDKPHKCEECGKAFSRSSGLIQHQRIHTREKTYPYNETKESFDPNCSLVIQQEVYPKEKSYKCDECGKTFSVSAHLVQHQRIHTGEKPYLCTVCGKSFSRSSFLIEHQRIHTGERPYLCRQCGKSFSQLCNLIRHQGVHTGNKPHKCDECGKAFSRNSGLIQHQRIHTGEKPYKCEKCDKSFSQQRSLVNHQKIHAEVKTQETHECDACGEAFNCRISLIQHQKLHTAWMQ

SEQ ID NO: 97874 - DNA, 1755 bp, Artificial Sequence
  derived and/or modified sequence
atgatggagaactacggcaacctggtgagcctggacgtgctgaacagagacaaggacgaggagcccaccgtgaagcaggagatcgaggagatcgaggaggaggtggagccccagggcgtgatcgtgaccagaatcaagagcgagatcgaccaggaccccatgggcagagagaccttcgagctggtgggcagactggacaagcagagaggcatcttcctgtgggagatccccagagagagcctgacccaggagcagagaatgttcagagagaacaccaacatcatcagaaagagacccaacagcgaggagaagtgccacaagtgcgaggagtgcggcaagggcttcgtgagaaaggcccacttcatccagcaccagagagtgcacaccggcgagaagcccttccagtgcaacgagtgcggcaagagcttcagcagaagcagcttcgtgatcgagcaccagagaatccacaccggcgagagaccctacgagtgcaactactgcggcaagaccttcagcgtgagcagcaccctgatcagacaccagagaatccacaccggcgagagaccctaccagtgcaaccagtgcaagcagagcttcagccagagaagaagcctggtgaagcaccagagaatccacaccggcgagaagccccacaagtgcagcgactgcggcaaggccttcagctggaagagccacctgatcgagcaccagagaacccacaccggcgagaagccctaccactgcaccaagtgcaagaagagcttcagcagaaacagcctgctggtggagcaccagagaatccacaccggcgagagaccccacaagtgcggcgagtgcggcaaggccttcagactgagcacctacctgatccagcaccagaagatccacaccggcgagaagcccttcctgtgcatcgagtgcggcaagagcttcagcagaagcagcttcctgatcgagcaccagagaatccacaccggcgagagaccctaccagtgcaaggagtgcggcaagagcttcagccagctgtgcaacctgaccagacaccagagaatccacaccggcgacaagccccacaagtgcgaggagtgcggcaaggccttcagcagaagcagcggcctgatccagcaccagagaatccacaccagagagaagacctacccctacaacgagaccaaggagagcttcgaccccaactgcagcctggtgatccagcaggaggtgtaccccaaggagaagagctacaagtgcgacgagtgcggcaagaccttcagcgtgagcgcccacctggtgcagcaccagagaatccacaccggcgagaagccctacctgtgcaccgtgtgcggcaagagcttcagcagaagcagcttcctgatcgagcaccagagaatccacaccggcgagagaccctacctgtgcagacagtgcggcaagagcttcagccagctgtgcaacctgatcagacaccagggcgtgcacaccggcaacaagccccacaagtgcgacgagtgcggcaaggccttcagcagaaacagcggcctgatccagcaccagagaatccacaccggcgagaagccctacaagtgcgagaagtgcgacaagagcttcagccagcagagaagcctggtgaaccaccagaagatccacgccgaggtgaagacccaggagacccacgagtgcgacgcctgcggcgaggccttcaactgcagaatcagcctgatccagcaccagaagctgcacaccgcctggatgcagtag

SEQ ID NO: 97875 - DNA, 1839 bp, Artificial Sequence
  derived and/or modified sequence
atggccagccccagccccccccccgagagcaaggaggagtgggactacctggaccccgcccagagaagcctgtacaaggacgtgatgatggagaactacggcaacctggtgagcctggacgtgctgaacagagacaaggacgaggagcccaccgtgaagcaggagatcgaggagatcgaggaggaggtggagccccagggcgtgatcgtgaccagaatcaagagcgagatcgaccaggaccccatgggcagagagaccttcgagctggtgggcagactggacaagcagagaggcatcttcctgtgggagatccccagagagagcctgacccaggagcagagaatgttcagagagaacaccaacatcatcagaaagagacccaacagcgaggagaagtgccacaagtgcgaggagtgcggcaagggcttcgtgagaaaggcccacttcatccagcaccagagagtgcacaccggcgagaagcccttccagtgcaacgagtgcggcaagagcttcagcagaagcagcttcgtgatcgagcaccagagaatccacaccggcgagagaccctacgagtgcaactactgcggcaagaccttcagcgtgagcagcaccctgatcagacaccagagaatccacaccggcgagagaccctaccagtgcaaccagtgcaagcagagcttcagccagagaagaagcctggtgaagcaccagagaatccacaccggcgagaagccccacaagtgcagcgactgcggcaaggccttcagctggaagagccacctgatcgagcaccagagaacccacaccggcgagaagccctaccactgcaccaagtgcaagaagagcttcagcagaaacagcctgctggtggagcaccagagaatccacaccggcgagagaccccacaagtgcggcgagtgcggcaaggccttcagactgagcacctacctgatccagcaccagaagatccacaccggcgagaagcccttcctgtgcatcgagtgcggcaagagcttcagcagaagcagcttcctgatcgagcaccagagaatccacaccggcgagagaccctaccagtgcaaggagtgcggcaagagcttcagccagctgtgcaacctgaccagacaccagagaatccacaccggcgacaagccccacaagtgcgaggagtgcggcaaggccttcagcagaagcagcggcctgatccagcaccagagaatccacaccagagagaagacctacccctacaacgagaccaaggagagcttcgaccccaactgcagcctggtgatccagcaggaggtgtaccccaaggagaagagctacaagtgcgacgagtgcggcaagaccttcagcgtgagcgcccacctggtgcagcaccagagaatccacaccggcgagaagccctacctgtgcaccgtgtgcggcaagagcttcagcagaagcagcttcctgatcgagcaccagagaatccacaccggcgagagaccctacctgtgcagacagtgcggcaagagcttcagccagctgtgcaacctgatcagacaccagggcgtgcacaccggcaacaagccccacaagtgcgacgagtgcggcaaggccttcagcagaaacagcggcctgatccagcaccagagaatccacaccggcgagaagccctacaagtgcgagaagtgcgacaagagcttcagccagcagagaagcctggtgaaccaccagaagatccacgccgaggtgaagacccaggagacccacgagtgcgacgcctgcggcgaggccttcaactgcagaatcagcctgatccagcaccagaagctgcacaccgcctggatgcagtag

SEQ ID NO: 97876 - DNA, 1755 bp, Artificial Sequence
  derived and/or modified sequence
atgatggaaaactatggcaacctggtaagcctcgacgttctgaatcgtgacaaggacgaggagccaaccgttaagcaagaaatcgaggagatcgaggaggaagtggagccacagggagtgatcgtgacgagaatcaaatctgagattgaccaggaccctatgggacgggagacttttgaactcgtgggtaggcttgataagcagcggggtattttcctgtgggagatccctcgagagtccctaacacaggagcaaaggatgttcagagaaaacactaacattatacggaaaaggcccaactccgaagaaaagtgtcacaaatgcgaagaatgtgggaaaggattcgtgaggaaagcccatttcattcagcaccaacgtgtgcataccggggagaagccattccagtgtaacgagtgtggtaaaagttttagccgcagctcttttgtgattgagcaccagcggattcacactggggagcggccttatgaatgcaactactgcggaaagacattcagcgtgagttcgactttaattagacaccagagaatccataccggcgaaagaccttatcagtgcaaccaatgcaagcaaagcttttcccagcggcgttccttagtcaagcaccaaagaatccataccggtgaaaaaccgcataaatgctccgattgcggaaaggcctttagctggaaatctcaccttattgaacaccagaggactcacaccggggaaaagccctaccactgtacaaagtgtaaaaaaagcttttctcggaatagcttgctggtggagcaccagcgcatccacacgggagagaggcctcacaagtgcggagaatgtgggaaggcattccggctgtcaacctacctgattcaacaccaaaaaattcacaccggtgaaaagccatttctgtgtattgaatgcgggaaaagcttctcccgctcatcttttttaattgaacatcaaaggattcataccggggagcggccttatcaatgcaaagagtgtggaaaatccttcagccaactgtgtaaccttaccaggcatcagcgaatacataccggcgataaacctcataagtgcgaggagtgcgggaaagcttttagtcgatcctcaggattgattcagcatcagcgcatccacacccgtgagaagacatatccatacaacgaaaccaaggaatccttcgatcctaattgttcactagtgatccagcaagaagtgtatcctaaggaaaaatcatacaaatgcgatgagtgtgggaaaacattttccgtctctgcccatttggttcagcaccagcgtatacacacgggcgagaaaccgtacctttgcactgtgtgcggaaagtccttcagccggtccagtttcctgatcgagcaccagagaatacataccggagaaagaccctacctctgccggcaatgcgggaagagctttagccagctgtgtaacctgattagacaccagggagtgcacactggcaacaagcctcataaatgtgacgagtgtggcaaagccttcagtaggaattctggcctcattcagcaccagagaattcacactggagaaaagccctacaagtgtgagaaatgtgataagtctttcagccaacagagatcactcgttaatcaccagaagatccatgcagaggtgaagacgcaggagactcacgaatgcgatgcctgtggtgaggcatttaattgtcgaatctccctgatccagcatcaaaagctacacacagcctggatgcagtag

SEQ ID NO: 97877 - DNA, 1839 bp, Artificial Sequence
  derived and/or modified sequence
atggcctccccttcccccccgcctgaaagcaaggaggagtgggactaccttgatcctgcccaacgttctctttataaggacgtgatgatggaaaactatggaaacctggtgtcgctggatgtgttgaaccgggataaagatgaggagccaactgtcaaacaagaaatcgaagaaatagaggaagaagtcgagcctcagggggtgatcgtgaccaggattaagtctgagatcgatcaagatcctatgggccgtgaaacattcgaattagttgggagactagataaacagcggggcatcttcctctgggaaatccctcgggagagtttaacacaggaacaacgaatgttcagggaaaataccaacattatcagaaagcgtccgaacagcgaggaaaagtgtcataagtgcgaagagtgcggcaagggttttgttcgcaaagcccattttatccaacaccaacgcgtccacactggcgaaaagcccttccagtgtaatgagtgcgggaaaagcttcagtaggagctcattcgttatcgaacatcaacggattcatacaggggaaaggccgtatgaatgtaactattgtggcaaaaccttcagcgtatcttcaaccctcataagacatcagcgcatccacactggggaaaggccttaccaatgtaaccagtgtaagcagagcttctcacaaagacggtctctggtcaagcatcagcgcattcacacgggagagaaaccccataagtgcagtgattgcggaaaggccttcagctggaagtcccatctcatagagcatcagcgcactcacacaggggagaagccctaccactgtaccaagtgcaagaagagttttagcaggaattcccttcttgttgagcaccaacggattcatacaggggagcgcccccataagtgtggcgagtgcgggaaagcctttcgactctccacgtatcttattcagcatcagaagatacataccggtgagaaaccatttttgtgcattgagtgcgggaagtcgttttcgagatcatcttttctcattgaacatcaaagaatccacaccggagaacgcccctatcagtgcaaagagtgcggcaagtctttttctcagttgtgcaaccttacccggcaccagcgcatccacacaggggacaaacctcacaaatgtgaggagtgtgggaaagcgtttagcaggtcttcaggcctgattcagcatcaaagaattcacactcgcgagaaaacatacccttacaatgaaactaaggagtcttttgacccaaactgcagcctggtaattcagcaagaggtatatccaaaagaaaagtcatacaagtgcgatgaatgtggcaagacattcagcgtgtctgcgcatttagtacagcaccagcggatccacactggcgagaagccgtatctgtgcactgtttgtgggaaatcgttcagtcgctcctctttcctaattgaacaccagcggatccacactggggagcggccatatctttgcagacagtgcggcaagtctttctcccagttgtgcaatctaatcagacaccagggggttcacactggaaacaagcctcacaagtgtgatgagtgcggtaaggcattttctcgaaactctggccttattcaacatcagcgcatacataccggggagaaaccctacaagtgcgagaaatgtgataaaagcttttcgcaacagcggtcactagtcaaccaccagaagattcatgcggaagtaaaaacacaggagactcatgaatgtgacgcctgtggcgaagccttcaattgtagaatttccttgatccagcatcagaaactgcacaccgcctggatgcagtag

SEQ ID NO: 97878 - DNA, 1755 bp, Artificial Sequence
  derived and/or modified sequence
atgatggagaactacggcaacctggtgtccctggatgtgctgaacagagacaaggatgaggagcccaccgtgaagcaggagattgaggagattgaggaggaggtggagccccagggcgtgattgtgacccgcatcaagtcagaaattgaccaggaccccatgggccgggagacctttgagctggtgggccgcctggacaagcagaggggcatcttcctgtgggagatcccccgggagagcctgacccaggagcagaggatgttccgggagaacaccaacatcatcaggaagaggcccaacagcgaggagaagtgccacaagtgtgaggagtgtgggaaaggatttgtgaggaaggcccacttcatccagcaccagagggtgcacactggagagaagcccttccagtgcaatgaatgtgggaagagcttcagccgcagcagctttgtgattgagcaccagaggatccacactggagagcggccctatgagtgcaactactgcggcaagaccttctctgtgagcagcaccctcatccgccaccagaggatccacactggagagcggccctaccagtgcaaccagtgcaagcagagcttcagccagaggaggagcctggtgaagcaccagaggatccacactggagagaagccccacaagtgcagcgactgtgggaaggccttctcctggaagagccacctgattgagcaccagaggacccacactggagagaagccctaccactgcaccaagtgcaagaagagcttcagcaggaacagcctgctggtggagcaccagaggatccacactggagagcggccccacaagtgtggggagtgtgggaaggccttccggctgagcacctacctgatccagcaccagaagatccacactggagagaagcccttcctgtgcattgaatgtgggaagagcttcagccgcagcagcttcctgattgagcaccagaggatccacactggagagcggccctaccagtgcaaggaatgtgggaagagcttcagccagctgtgcaacctgaccaggcaccagaggatccacactggagacaagccccacaagtgtgaggagtgtgggaaggccttcagccgcagcagcggcctcatccagcaccagaggatccacacccgggagaagacctacccctacaatgagaccaaggagagctttgaccccaactgcagcctggtgatccagcaggaggtgtaccccaaggagaagagctacaagtgtgatgaatgtgggaagaccttctctgtgtctgcccacctggtgcagcaccagaggatccacactggagagaagccctacctgtgcaccgtgtgtgggaagagcttcagccgcagcagcttcctgattgagcaccagaggatccacactggagagcggccctacctgtgccggcagtgtgggaagagcttcagccagctgtgcaacctgatccgccaccagggcgtgcacactggaaacaagccccacaagtgtgatgaatgtgggaaggccttcagcagaaattctggcctcatccagcaccagaggatccacactggagagaagccctacaagtgtgagaagtgtgacaagagcttcagccagcagaggagcctggtgaaccaccagaagatccatgctgaggtgaagacccaggagacccatgaatgtgatgcctgtggggaggccttcaactgccgcatcagcctcatccagcaccagaagctgcacacagcctggatgcagtag

SEQ ID NO: 97879 - DNA, 1839 bp, Artificial Sequence
  derived and/or modified sequence
atggccagccccagccccccacctgagagcaaggaggagtgggactacctggaccctgcccagaggagcctgtacaaggatgtgatgatggagaactacggcaacctggtgtccctggatgtgctgaacagagacaaggatgaggagcccaccgtgaagcaggagattgaggagattgaggaggaggtggagccccagggcgtgattgtgacccgcatcaagtcagaaattgaccaggaccccatgggccgggagacctttgagctggtgggccgcctggacaagcagaggggcatcttcctgtgggagatcccccgggagagcctgacccaggagcagaggatgttccgggagaacaccaacatcatcaggaagaggcccaacagcgaggagaagtgccacaagtgtgaggagtgtgggaaaggatttgtgaggaaggcccacttcatccagcaccagagggtgcacactggagagaagcccttccagtgcaatgaatgtgggaagagcttcagccgcagcagctttgtgattgagcaccagaggatccacactggagagcggccctatgagtgcaactactgcggcaagaccttctctgtgagcagcaccctcatccgccaccagaggatccacactggagagcggccctaccagtgcaaccagtgcaagcagagcttcagccagaggaggagcctggtgaagcaccagaggatccacactggagagaagccccacaagtgcagcgactgtgggaaggccttctcctggaagagccacctgattgagcaccagaggacccacactggagagaagccctaccactgcaccaagtgcaagaagagcttcagcaggaacagcctgctggtggagcaccagaggatccacactggagagcggccccacaagtgtggggagtgtgggaaggccttccggctgagcacctacctgatccagcaccagaagatccacactggagagaagcccttcctgtgcattgaatgtgggaagagcttcagccgcagcagcttcctgattgagcaccagaggatccacactggagagcggccctaccagtgcaaggaatgtgggaagagcttcagccagctgtgcaacctgaccaggcaccagaggatccacactggagacaagccccacaagtgtgaggagtgtgggaaggccttcagccgcagcagcggcctcatccagcaccagaggatccacacccgggagaagacctacccctacaatgagaccaaggagagctttgaccccaactgcagcctggtgatccagcaggaggtgtaccccaaggagaagagctacaagtgtgatgaatgtgggaagaccttctctgtgtctgcccacctggtgcagcaccagaggatccacactggagagaagccctacctgtgcaccgtgtgtgggaagagcttcagccgcagcagcttcctgattgagcaccagaggatccacactggagagcggccctacctgtgccggcagtgtgggaagagcttcagccagctgtgcaacctgatccgccaccagggcgtgcacactggaaacaagccccacaagtgtgatgaatgtgggaaggccttcagcagaaattctggcctcatccagcaccagaggatccacactggagagaagccctacaagtgtgagaagtgtgacaagagcttcagccagcagaggagcctggtgaaccaccagaagatccatgctgaggtgaagacccaggagacccatgaatgtgatgcctgtggggaggccttcaactgccgcatcagcctcatccagcaccagaagctgcacacagcctggatgcagtag

SEQ ID NO: 97880 - DNA, 1755 bp, Artificial Sequence
  derived and/or modified sequence
atgatggagaactacggcaacctggtgagcctggacgtgctgaacagggataaggacgaggagcccaccgtcaagcaggaaatcgaggagatcgaagaggaggtggagcctcagggagtcatcgtgactcgaattaaaagcgagattgatcaggaccccatggggcgcgaaacttttgagctggtgggccggttagataagcagagaggcattttcctctgggagatccctagagaatccctaacacaagagcagaggatgtttcgtgagaacactaacatcattcgtaagagacccaactccgaggagaagtgtcacaagtgcgaggagtgtggaaagggatttgtgaggaaggcccacttcatccagcaccagcgagtgcacacaggggagaagccctttcagtgcaatgaatgtggaaagagcttctccaggtcaagctttgtgatcgaacaccagcggattcacactggcgagcggccgtacgaatgcaactattgcgggaagacgttctctgtctcttcaactttgattcggcatcagcggatccacacaggcgagaggccctaccagtgcaatcagtgcaagcaatcatttagccagcgtagatcccttgttaagcaccaacgaatccacaccggcgaaaaacctcacaagtgctcagactgcggcaaagccttctcctggaagagccacctcattgaacaccagagaactcacactggagagaagccctaccattgcacaaagtgtaagaagtcctttagccggaacagcctactggtggaacatcagaggatccacacaggggaacgtccacacaagtgtggagagtgcgggaaggcattccgcttgtcgacctatttaatacagcatcagaaaattcatactggggaaaagcccttcctatgtattgagtgcggcaaaagttttagccggagttcctttctgatcgagcaccagcggattcataccggtgagaggccctaccagtgcaaagagtgtggtaaaagcttcagccagctttgtaacttgaccagacaccagcgtattcataccggagacaagcctcacaaatgcgaggagtgcggaaaagcattttccagatcttccggcctcatccagcatcaacgaatccacacccgagagaagacttacccctacaacgaaaccaaagaatcttttgacccgaattgttcccttgttatccagcaagaggtgtacccaaaagagaaatcatataaatgcgatgaatgcggtaagaccttctcagtaagcgcacatctcgtgcagcaccagcggatccacacaggggaaaagccctacctgtgtaccgtttgtggaaaaagtttctcccgtagttcattcctgatcgagcaccagagaatacacacaggtgaacggccctatctgtgcagacagtgtggtaaatccttcagccagttgtgcaatctgattcgacatcagggcgttcacactgggaataagccccacaagtgcgatgaatgtgggaaggcattctcaaggaattccgggctgatccagcaccagcgcatccacactggggagaagccctacaagtgtgagaagtgcgacaagagcttctcacagcaacggtctctggtcaaccatcagaagatccatgccgaggttaagacgcaggaaactcacgagtgtgatgcctgtggcgaggcgtttaattgccgaatttcacttatccagcaccagaagctgcacactgcttggatgcaatag

SEQ ID NO: 97881 - DNA, 1839 bp, Artificial Sequence
  derived and/or modified sequence
atggccagccccagccccccccccgagagcaaggaggagtgggactacttggatccggcccagcgctctctttacaaagacgtcatgatggagaactacgggaacctggtgtcactcgacgtgctgaacagggacaaggacgaagagcctaccgttaaacaggagatcgaggaaatcgaagaggaggttgaaccgcagggagttatcgtgactcgcataaaaagcgagatcgatcaggaccctatgggtcgtgaaacattcgaactcgttgggagacttgataagcagcggggcattttcctgtgggaaattcctagagaatccctcactcaggaacaaagaatgtttagggaaaatactaatatcattcgtaaacgacccaattcagaggagaagtgtcataaatgcgaggagtgtggcaagggcttcgtgagaaaggcccatttcattcagcatcagagagtgcacacaggcgagaagccttttcagtgcaacgagtgcggcaagagcttcagcaggagctccttcgtcattgagcaccagcggatccacaccggcgagcggccgtatgagtgcaattattgcggaaaaacattttcagttagctctacgctgatccggcaccaaaggattcacacaggagagaggccctaccaatgcaatcagtgtaagcagagcttcagccagagacgttccctggtgaaacaccagcgaatccataccggggagaagcctcataagtgcagcgattgtggcaaggccttcagctggaagtcgcacttaatagaacatcagcggactcacactggcgagaagccttaccactgtaccaaatgtaagaaaagctttagcaggaattcactgcttgtggagcaccaacggatacacactggcgaaagacctcacaagtgcggggagtgcggcaaagctttcaggctgtcaacgtatctgattcagcatcagaaaatacacacaggagaaaaacccttcctatgcatcgagtgtggcaaaagcttctcccgctcctcattccttatcgagcaccaaaggatccacactggagaacggccgtatcagtgtaaagaatgcggtaaaagtttctcccagctgtgtaacctgacccgacatcagcggatccacacaggggacaaaccacacaagtgcgaagaatgcggaaaggcatttagccggagtagtggactgatacagcatcagagaatccatacaagggagaagacatatccgtacaacgagactaaagagagtttcgaccctaattgttctttggtcattcagcaggaggtgtatccgaaagagaagagctacaaatgcgacgagtgtggaaaaaccttctctgtgtcggcacatctagtgcaacatcagagaatccatacaggtgaaaagccttacctttgtacagtctgtggcaagagctttagtagatctagcttcctgatcgaacaccaacgcatccacacaggcgagcgcccttacctctgcagacagtgtggcaaatccttcagtcagctgtgcaacttgatcaggcaccagggcgtacatactggcaacaaaccacataagtgcgacgaatgcggtaaagctttctcacgaaattcaggtcttattcagcatcagcgcatccacactggcgagaagccttataagtgcgaaaagtgcgataaatcattttctcagcagcgatcactcgtgaaccaccagaaaatccatgccgaagtgaaaacccaggagactcatgaatgtgacgcctgcggtgaggctttcaactgtcggatcagtcttattcaacatcagaaactgcacactgcttggatgcaatag

SEQ ID NO: 97882 - DNA, 1755 bp, Artificial Sequence
  derived and/or modified sequence
atgatggagaactacggcaacctagtgagtctggacgtactcaacagggacaaggacgaagaaccgaccgtgaagcaggaaatcgaggagattgaggaggaggtggagccacaaggcgttatcgtcacacgaatcaaatccgagatcgaccaggaccctatgggtagagagacgtttgagctggtgggtcgcctagacaaacagcgaggaatcttcctgtgggaaataccaagagaatccctgacgcaggagcagcggatgtttagggaaaatactaatatcatccgcaaaagacccaatagcgaggagaagtgtcacaagtgtgaggaatgtggaaagggatttgtaagaaaggctcatttcatacagcaccagagagtgcatacgggcgaaaaaccttttcagtgcaatgagtgtggcaagtccttctcgagatccagctttgtgattgaacatcagagaatccacacgggcgagaggccatatgagtgtaactattgtggaaagacattctcagtgagtagtaccctgatccgtcatcagcggatccatacaggggagagaccttatcagtgtaatcagtgcaaacagtccttctcccagaggaggagcctggtgaagcaccagagaattcacactggagagaaaccccataagtgctctgattgtggaaaggccttttcctggaagagccacttaattgagcatcagcgtacacacactggggaaaagccttatcattgcactaagtgtaaaaaatctttcagcagaaactctctcctcgtagagcatcagaggatacataccggcgagcgccctcacaaatgcggtgagtgtggcaaggcgttccgcttatctacatacctaattcagcaccagaaaatccacacaggggagaaacccttcctgtgcatcgagtgcggaaagtcctttagtcggtcctcatttctgatcgaacatcagcgaatacatacaggtgagcggccttaccaatgcaaagagtgcggtaagtcgttcagccagctttgcaatctgactaggcatcagcgcatccacacaggagataaaccacataagtgtgaggagtgtggcaaagccttctcccggagtagcggtctgattcagcatcagcgcatccatacccgggaaaagacatatccatacaatgaaaccaaagagtcttttgacccgaactgctcgctcgtgatccaacaggaggtatatccaaaagagaaaagctacaagtgtgatgaatgtggtaagacgttctcggttagcgctcaccttgttcagcatcagagaatacatactggtgagaagccttatctgtgcaccgtatgcgggaagtcgttctctcggagcagcttcttgattgaacaccagcgcatacacaccggcgagcgcccttacctgtgcagacagtgtggaaagtccttctcccagctgtgcaatttaatcagacaccagggagtccacacaggcaacaagccccacaagtgtgacgaatgcggaaaagcattctctaggaattccggcctcatacaacatcagcggatccacactggtgaaaagccctataagtgtgaaaagtgtgacaagtccttctcccagcaaaggagcctcgtcaatcaccagaagatccacgcagaggtgaagacacaggagacacacgagtgcgacgcatgtggtgaagccttcaattgtaggatctccttgatccaacatcagaaattgcacactgcttggatgcagtag

SEQ ID NO: 97883 - DNA, 1839 bp, Artificial Sequence
  derived and/or modified sequence
atggcgtctcccagccccccaccggagtccaaggaggaatgggactacctggaccccgctcagcgcagtctctacaaggatgtgatgatggagaactacggaaacctggtgagtttagatgttcttaatagagacaaagatgaggagcctactgttaaacaggagatcgaggagattgaagaagaggtggagcctcagggggtgatcgttactcggataaaatcagagatcgaccaagaccccatgggtagagagactttcgaactagtgggtcgtcttgacaaacagcggggaattttcctctgggaaattccacgggagtcgctcacccaagaacagcggatgttcagagaaaacaccaatatcatccggaagaggccgaattccgaagaaaagtgccacaaatgtgaggagtgcgggaagggctttgtgcgtaaagcccacttcatccagcaccagcgcgtccacacaggcgagaaacctttccagtgtaatgagtgtggaaaaagcttctctaggagttccttcgtcatcgaacatcaaagaattcacaccggcgagcggccttatgaatgcaactactgtggaaagaccttttccgttagtagcacattaattcggcatcaacggattcatacaggcgagaggccctaccaatgtaaccagtgtaagcagagtttcagccaacgcagatcactcgttaagcatcagcgaatccacacaggtgagaaaccccacaaatgtagcgattgcggtaaagctttttcatggaaaagccaccttatcgagcaccaacggacccacaccggtgagaaaccatatcactgtaccaaatgtaagaagagcttctcccgaaactctctgctagtggagcaccaacgaatccacactggcgaaagaccgcacaagtgcggcgagtgcggtaaggcattcaggttaagcacgtacctgattcagcaccaaaaaatccacactggtgagaaaccatttctgtgtattgagtgcggtaagtctttcagccgctcatcatttttgatcgaacatcagagaattcataccggcgagagaccctaccaatgcaaagaatgcgggaaatcgttcagccagctgtgcaatctgactcgtcaccagaggatccataccggcgataaaccacataaatgtgaggagtgtggcaaagcattctcgcgatctagtgggctgatccagcatcagcgtatccatacccgcgaaaaaacatacccttacaacgagaccaaagaaagtttcgacccaaactgttcacttgtaattcaacaggaggtttacccaaaggaaaagtcctacaagtgcgatgaatgcgggaagactttttctgtttccgcccatttagtccaacaccagcgtatccacacgggcgaaaagccgtatctttgcacagtttgcggtaaatccttcagcagatctagtttcttaatcgagcatcaaagaatccatactggtgagagaccctatctgtgcagacagtgcggcaagtcattcagccagctatgcaatctcatacggcatcaaggcgtgcacacagggaacaaaccccacaaatgtgacgaatgcggtaaagcttttagtcgcaacagtggccttatccagcatcaaagaatacacacaggagagaagccttacaagtgcgagaagtgcgacaagtccttttcccagcaaagatctctggtcaaccatcagaaaatccatgccgaggtgaaaacccaggaaacccatgagtgtgacgcttgcggcgaggctttcaattgtagaatatctctgatacagcatcaaaagcttcacactgcatggatgcagtag

SEQ ID NO: 97884 - DNA, 3115 bp, Artificial Sequence
  derived and/or modified sequence
gcactggccagacccagccagggatcctcgtattcgtcgagcctaatttccagcagccgggtaggcctcaccagaggctcctttccgtgaggccgcccccaattcctgcccctattctctgcctgggagatggcttccccgagccccccgccggagtcgaagagagacttgataaatcggcctgagaaaataagtaatgctccagactagctctctcatttgtgagttctccaggtgaagcaccatttttgaccttcccttgtgtcttctgttcctggcacagtgcctggaccccaaggaggagtgggattatctggacccagctcagagaagcctgtataaagatgtcatgatggagaattatggaaacctggtctcactggatgttttgaacagagataaggatgaggagccaactgtaaaacaagagattgaagaaattgaggaagaagtggaaccacagggtgtaatagttacaagaatcaaaagtgaaattgaccaggatcctatgggtagagaaacatttgaacttgttggtaggttagataaacaaagagggatcttcctatgggaaataccaagggaatctttgacccaggaacagagaatgttcagagaaaacactaacattatccgtaaaagaccaaactcagaagagaaatgccataaatgtgaagaatgtggaaagggttttgtccgcaaggcccatttcattcaacatcaaagggtccatactggtgagaaaccttttcagtgcaatgaatgtgggaaaagttttagtcgcagttcatttgttattgaacatcagagaattcacactggggaaaggccctatgagtgtaattactgtggaaaaacctttagtgtgagctcaacccttattagacatcagagaatccacactggagaaagaccctatcagtgtaatcagtgtaaacagagcttcagccagagaaggagccttgttaaacatcaaaggattcatacaggtgagaaaccccataaatgtagtgactgtgggaaagccttcagttggaaatcacaccttattgagcatcaaagaactcacactggtgagaaaccttatcactgtaccaaatgtaagaagagctttagtcgaaattcattgcttgttgagcatcaaagaattcacactggggaaagaccccataaatgtggtgaatgtgggaaagcctttcgattaagcacataccttatacaacaccaaaaaattcacactggcgagaagccttttctttgtattgagtgtggaaaaagtttcagtcggagctcattccttattgaacatcagaggatccatactggtgaaagaccttatcagtgcaaagagtgtgggaaaagtttcagtcagctttgcaaccttactcgtcatcagagaattcacacaggagacaagccccataaatgtgaggaatgtggaaaagcctttagtagaagctcaggtcttattcagcatcagagaattcacaccagggagaagacttatccatacaatgaaactaaggaaagttttgatccaaattgcagtcttgttatacagcaggaagtctaccctaaggagaaatcttataaatgtgatgaatgtgggaaaacttttagtgttagtgctcatcttgtacaacatcaaagaatccacactggtgaaaagccctatctatgtactgtctgtgggaaaagcttcagccggagctcatttcttattgaacatcagagaatccacactggtgagagaccctatctgtgcagacagtgtggaaaaagctttagtcagctttgtaatcttattcgacatcagggtgttcacacaggtaataaaccccataaatgtgatgaatgtggaaaggcctttagccggaactcgggtcttattcagcatcagagaatacacacaggagagaaaccttataagtgtgagaagtgcgacaaaagtttcagtcaacagcgcagtcttgtcaaccatcagaagatccatgcagaggtgaaaacccaagaaacccatgaatgtgacgcttgtggtgaagcctttaattgccgtatttctcttattcagcatcagaaattgcacacagcatggatgcaataaatgtagagcaatacataagctcaatttgatttgagactagtacccaagtgcagttttagtatggctcaacatgggtcagatttagtgataaagcaaattctccttggcctcaggcaaatagtttctaaagattctgtgaatagtggacaactgcccatgagcatttgacttcccttactctttgatgatcgtagagaaagacttggtaatttatctaagtatctttaataaatctttcagcagagagattaaacctaggttcagagcatgggtgctctgagggacaaagttggattagtataagggagctggagcagctgatagtggaaaacagaataatgattcaaagagtcttctgtcaccatgtcatattgtggttctttcagttccatgatatgtttggctctgcatgccaaagtccagtgattaagcatatataagttgtcaaggaaacaaagcccaaatgtttttaaaacaagtatacagtttttgtcattgtttaagaaagccagttgtttggcatgtgagttaaaggcagttccaatgcctgatggttcccagatctatgaaatgagtggaccattaaccttacatgtaaagattatgttagtaattaagaaacctaacaaaggtgttaccaaggaacctttgggagtgccttttttgtttttcaagatggacccaaaaaagtggaggaagatattgttcttttgtgccctcctacctgtgagagatatttgtagtcctatgtgaatgagcttatccctccacaaccaggtgcatatgaaagtgtacatattatgactgccaagtattggaaatgaaaagacctggagtctatgctaggaagctgagatattttggtattgcattggtttttatggtaactaggttttgcatgcaattaaaaatccttatttcttgttctagggcttcccttagttaatggttattataaacctattaattcatctgttttaaccattaaaacctgttttgtttttagctttg

SEQ ID NO: 97885 - DNA, 3134 bp, Artificial Sequence
  derived and/or modified sequence
aaggaggaggaactggcagcggggaggaggctctagcgaggcctgaaaggctgcgtaaccaggcaggagtaggggttggggttcggggttgggggacagccagggatcgcgtctgatatgctgttggggtcgtgaccgtctgggggccgaggcaggcactggccagacccagccagggatcctcgtattcgtcgagcctaatttccagcagccgggtaggcctcaccagaggctcctttccgtgaggccgcccccaattcctgcccctattctctgcctgggagatggcttccccgagccccccgccggagtcgaaggaggagtgggattatctggacccagctcagagaagcctgtataaagatgtcatgatggagaattatggaaacctggtctcactggatgttttgaacagagataaggatgaggagccaactgtaaaacaagagattgaagaaattgaggaagaagtggaaccacagggtgtaatagttacaagaatcaaaagtgaaattgaccaggatcctatgggtagagaaacatttgaacttgttggtaggttagataaacaaagagggatcttcctatgggaaataccaagggaatctttgacccaggaacagagaatgttcagagaaaacactaacattatccgtaaaagaccaaactcagaagagaaatgccataaatgtgaagaatgtggaaagggttttgtccgcaaggcccatttcattcaacatcaaagggtccatactggtgagaaaccttttcagtgcaatgaatgtgggaaaagttttagtcgcagttcatttgttattgaacatcagagaattcacactggggaaaggccctatgagtgtaattactgtggaaaaacctttagtgtgagctcaacccttattagacatcagagaatccacactggagaaagaccctatcagtgtaatcagtgtaaacagagcttcagccagagaaggagccttgttaaacatcaaaggattcatacaggtgagaaaccccataaatgtagtgactgtgggaaagccttcagttggaaatcacaccttattgagcatcaaagaactcacactggtgagaaaccttatcactgtaccaaatgtaagaagagctttagtcgaaattcattgcttgttgagcatcaaagaattcacactggggaaagaccccataaatgtggtgaatgtgggaaagcctttcgattaagcacataccttatacaacaccaaaaaattcacactggcgagaagccttttctttgtattgagtgtggaaaaagtttcagtcggagctcattccttattgaacatcagaggatccatactggtgaaagaccttatcagtgcaaagagtgtgggaaaagtttcagtcagctttgcaaccttactcgtcatcagagaattcacacaggagacaagccccataaatgtgaggaatgtggaaaagcctttagtagaagctcaggtcttattcagcatcagagaattcacaccagggagaagacttatccatacaatgaaactaaggaaagttttgatccaaattgcagtcttgttatacagcaggaagtctaccctaaggagaaatcttataaatgtgatgaatgtgggaaaacttttagtgttagtgctcatcttgtacaacatcaaagaatccacactggtgaaaagccctatctatgtactgtctgtgggaaaagcttcagccggagctcatttcttattgaacatcagagaatccacactggtgagagaccctatctgtgcagacagtgtggaaaaagctttagtcagctttgtaatcttattcgacatcagggtgttcacacaggtaataaaccccataaatgtgatgaatgtggaaaggcctttagccggaactcgggtcttattcagcatcagagaatacacacaggagagaaaccttataagtgtgagaagtgcgacaaaagtttcagtcaacagcgcagtcttgtcaaccatcagaagatccatgcagaggtgaaaacccaagaaacccatgaatgtgacgcttgtggtgaagcctttaattgccgtatttctcttattcagcatcagaaattgcacacagcatggatgcaataaatgtagagcaatacataagctcaatttgatttgagactagtacccaagtgcagttttagtatggctcaacatgggtcagatttagtgataaagcaaattctccttggcctcaggcaaatagtttctaaagattctgtgaatagtggacaactgcccatgagcatttgacttcccttactctttgatgatcgtagagaaagacttggtaatttatctaagtatctttaataaatctttcagcagagagattaaacctaggttcagagcatgggtgctctgagggacaaagttggattagtataagggagctggagcagctgatagtggaaaacagaataatgattcaaagagtcttctgtcaccatgtcatattgtggttctttcagttccatgatatgtttggctctgcatgccaaagtccagtgattaagcatatataagttgtcaaggaaacaaagcccaaatgtttttaaaacaagtatacagtttttgtcattgtttaagaaagccagttgtttggcatgtgagttaaaggcagttccaatgcctgatggttcccagatctatgaaatgagtggaccattaaccttacatgtaaagattatgttagtaattaagaaacctaacaaaggtgttaccaaggaacctttgggagtgccttttttgtttttcaagatggacccaaaaaagtggaggaagatattgttcttttgtgccctcctacctgtgagagatatttgtagtcctatgtgaatgagcttatccctccacaaccaggtgcatatgaaagtgtacatattatgactgccaagtattggaaatgaaaagacctggagtctatgctaggaagctgagatattttggtattgcattggtttttatggtaactaggttttgcatgcaattaaaaatccttatttcttgttctagggcttcccttagttaatggttattataaacctattaattcatctgttttaaccattaaaacctgttttgtttttagctttg

SEQ ID NO: 97886 - DNA, 879 bp, Artificial Sequence
  derived and/or modified sequence
atggattctaagtacagcaccctgaccgctcgcgtcaagggaggggacggaataagaatctacaagcgaaatcggatgatcatgaccaatcctatcgccacaggaaaagatcctaccttcgacacaatcacctacgagtgggcacctccgggggtgacacagaaactggggctgcaatacatggagttaatccccaaggagaaacagcctgtgacaggtacggagggtgccttttacaggcggagacaactgatgcaccagcttcctatttacgatcaggacccaagtagatgtagagggctcctggaaaacgagttaaagctcatggaagagttcgttaagcagtacaaatctgaggctctgggcgtgggcgaggtggccctgccagggcaagggggtcttccaaaggaggaaggaaagcagcaggaaaagcctgaaggtgctgaaaccaccgccgccacaacgaacgggtccctctctgatccctcaaaagaggtggagtacgtgtgtgagctgtgcaagggtgcggctccccctgacagcccagtagtatactcagacagggccggatataacaaacaatggcatcccacttgcttcgtgtgcgccaaatgttccgaacccctggtagatctgatctacttctggaaggacggcgctccctggtgcggtcgccactactgtgaatccctgagacctcgatgctcagggtgcgacgaaattatcttcgccgaagactaccagcgcgtggaagatctggcgtggcacaggaagcattttgtctgtgaaggctgcgaacagctgctctctggtagggcgtatatagttaccaaggggcagctgctgtgtccgacatgcagcaaaagcaaacgaagctag

SEQ ID NO: 97887 - DNA, 879 bp, Artificial Sequence
  derived and/or modified sequence
atggacagcaagtacagcaccctgacagcccgggtgaagggaggagatggcatccgcatctacaagaggaacaggatgatcatgaccaaccccatcgccaccgggaaggaccccacctttgacaccatcacctatgagtgggcccctcctggggtgacccagaagctgggcctgcagtacatggagctgatccccaaggagaagcagcctgtgactggaacagagggcgccttctacagaagacggcagctgatgcaccagctgcccatctatgaccaggaccccagccgctgccggggcctgctggagaatgagctgaagctgatggaggagtttgtgaagcagtacaagtctgaggccctgggcgtgggggaggtggccctgcccggccagggcggcctgcccaaggaggagggcaagcagcaggagaagccagagggcgctgagaccacagctgccaccaccaacggcagcctgagtgaccccagcaaggaggtggagtatgtgtgtgagctgtgcaagggggccgcccccccagacagccctgtggtgtacagcgacagagctggctacaacaagcagtggcaccccacctgctttgtgtgtgccaagtgcagcgagcccctggtggacctgatctacttctggaaggatggagccccctggtgtggccgccactactgtgagagcctgcggccccgctgcagcggctgtgatgagatcatctttgctgaggactaccagagggtggaggacctggcctggcacaggaagcactttgtgtgtgagggctgtgagcagctgctgagcggccgggcctacatcgtgaccaagggccagctgctgtgccccacctgcagcaagagcaagaggagctag

SEQ ID NO: 97888 - DNA, 879 bp, Artificial Sequence
  derived and/or modified sequence
atggacagcaagtacagcaccctgaccgcccgggtgaagggcggcgatggtatcaggatttacaagagaaacaggatgattatgactaaccccattgccaccggaaaagatcccactttcgacaccataacctatgaatgggcaccccctggagtcacacagaagttagggctacagtacatggagttgatacccaaagagaagcagcccgtgaccggaactgagggagctttttacagaaggcgacaacttatgcaccagttgcccatatacgatcaagatccaagtagatgtcgaggcttgctagagaatgaactgaagctaatggaagaattcgtgaaacagtacaaaagtgaggctttgggcgtcggcgaagtggcccttccaggtcaaggtggcctccccaaggaagagggaaaacaacaggagaaaccagagggggccgagacaacagccgccacaacaaacgggtccttgagtgacccgagtaaagaagtagaatacgtgtgcgaattatgtaagggagctgctccaccagactcacctgtcgtgtacagcgatagggccggttacaataagcaatggcaccccacctgttttgtctgtgcaaagtgcagtgaacccctcgtggacctaatctacttctggaaggacggggcgccatggtgcggccggcattattgtgaatcgctgaggcctcgctgctcaggctgtgacgaaattatcttcgccgaggattaccagagagtggaggacctggcctggcatcggaagcacttcgtctgtgaagggtgcgagcagctcctgtctggcagagcgtacatcgttacgaaaggacagctattatgccctacctgcagcaaatcaaagcggagctag

SEQ ID NO: 97889 - DNA, 879 bp, Artificial Sequence
  derived and/or modified sequence
atggatagtaaatacagtacactgactgcaagggtcaaggggggagatggtattcggatatacaagcgcaataggatgatcatgactaatccaatagcaacgggcaaggatcccacctttgacacaataacttacgagtgggctcctcctggcgtgactcagaagctgggcctccagtacatggagctgattccaaaggagaaacagcctgtgaccgggacagaaggcgcattctatcggagaagacagctgatgcaccagctgcccatctacgatcaagacccttcaaggtgcaggggcttgctagaaaatgaattaaagctgatggaggagttcgtcaaacaatacaagtctgaagcccttggagtcggtgaagtggctctcccagggcaggggggtctgcccaaggaagaaggcaagcagcaggagaagccagagggagccgaaaccaccgctgctactacaaacggcagtctgagcgatccttccaaggaggtggaatatgtttgcgaactgtgtaaaggtgcagcccctcctgactccccggtggtctacagcgatagggccggttataacaagcagtggcaccccacatgcttcgtgtgcgctaaatgcagtgagccgctggtggacctgatatacttttggaaagatggcgcaccttggtgcggacgtcattattgcgagtctcttagaccacgatgctctgggtgtgacgagattatctttgcagaggattatcagagagtcgaggacttggcgtggcatagaaaacacttcgtttgcgaagggtgtgagcagctgctctctgggagggcttatatcgtcacaaaagggcaactcctgtgtccgacttgttctaaaagtaagcgatcgtag

SEQ ID NO: 97890 - DNA, 879 bp, Artificial Sequence
  derived and/or modified sequence
atggacagcaagtacagcaccctgaccgccagagtgaagggcggcgacggcatcagaatctacaagagaaacagaatgatcatgaccaaccccatcgccaccggcaaggaccccaccttcgacaccatcacctacgagtgggccccccccggcgtgacccagaagctgggcctgcagtacatggagctgatccccaaggagaagcagcccgtgaccggcaccgagggcgccttctacagaagaagacagctgatgcaccagctgcccatctacgaccaggaccccagcagatgcagaggcctgctggagaacgagctgaagctgatggaggagttcgtgaagcagtacaagagcgaggccctgggcgtgggcgaggtggccctgcccggccagggcggcctgcccaaggaggagggcaagcagcaggagaagcccgagggcgccgagaccaccgccgccaccaccaacggcagcctgagcgaccccagcaaggaggtggagtacgtgtgcgagctgtgcaagggcgccgccccccccgacagccccgtggtgtacagcgacagagccggctacaacaagcagtggcaccccacctgcttcgtgtgcgccaagtgcagcgagcccctggtggacctgatctacttctggaaggacggcgccccctggtgcggcagacactactgcgagagcctgagacccagatgcagcggctgcgacgagatcatcttcgccgaggactaccagagagtggaggacctggcctggcacagaaagcacttcgtgtgcgagggctgcgagcagctgctgagcggcagagcctacatcgtgaccaagggccagctgctgtgccccacctgcagcaagagcaagagaagctag

SEQ ID NO: 97891 - protein, 253 aa, Artificial Sequence
  derived and/or modified sequence
MFGMQGDVFGLRATFMEGLQYMELIPKEKQPVTGTEGAFYRRRQLMHQLPIYDQDPSRCRGLLENELKLMEEFVKQYKSEALGVGEVALPGQGGLPKEEGKQQEKPEGAETTAATTNGSLSDPSKEVEYVCELCKGAAPPDSPVVYSDRAGYNKQWHPTCFVCAKCSEPLVDLIYFWKDGAPWCGRHYCESLRPRCSGCDEIIFAEDYQRVEDLAWHRKHFVCEGCEQLLSGRAYIVTKGQLLCPTCSKSKRS

SEQ ID NO: 97892 - DNA, 762 bp, Artificial Sequence
  derived and/or modified sequence
atgttcggtatgcagggagatgtgtttggtctgcgagccacttttatggaaggcctgcagtacatggagttaattccgaaggaaaagcaaccggtgaccggaaccgagggggcgttttaccggcggcggcagctgatgcaccagctgcctatttacgaccaggacccttcaagatgtaggggcctactagaaaatgagctgaaattgatggaagaatttgttaaacagtataagagcgaagctctgggggtgggcgaagtcgctctgccggggcagggcggcctcccaaaggaagagggaaagcaacaagaaaagcccgaaggggctgaaaccacagccgcaacaaccaatgggtccctgtctgatccaagcaaggaggtcgagtacgtttgcgaactttgtaaaggcgcagctccaccggacagtccagtagtgtacagcgatagggccggatacaacaagcaatggcatccgacatgttttgtttgcgcaaaatgtagcgaaccgcttgtggacctcatttacttctggaaggacggtgctccctggtgtgggcgccactactgtgaaagtctccgcccaaggtgtagtggatgcgatgagattatctttgcagaggactatcagagagtcgaggacctcgcttggcacagaaaacacttcgtgtgcgaaggttgcgaacagcttctgagcggtcgcgcgtatattgttactaagggacagctcctctgccccacatgttcaaagagcaagagaagttag

SEQ ID NO: 97893 - DNA, 762 bp, Artificial Sequence
  derived and/or modified sequence
atgtttggcatgcagggagatgtgtttggcctgcgggccaccttcatggagggcctgcagtacatggagctgatccccaaggagaagcagcctgtgactggaacagaaggagccttctacagaagacggcagctgatgcaccagctgcccatctatgaccaggaccccagccgctgccggggcctgctggagaatgagctgaagctgatggaggagtttgtgaagcagtacaagtctgaggccctgggcgtgggggaggtggccctgcccggccagggcggcctgcccaaggaggagggcaagcagcaggagaagccagagggcgctgagaccacagctgccaccaccaacggcagcctgagtgaccccagcaaggaggtggagtatgtgtgtgagctgtgcaagggagctgcccccccagacagccctgtggtgtacagcgaccgggccggctacaacaagcagtggcaccccacctgctttgtgtgtgccaagtgcagcgagcccctggtggacctgatctacttctggaaggatggagccccctggtgtggccgccactactgtgagagcctgcggccccgctgcagcggctgtgatgagatcatctttgctgaggactaccagagggtggaggacctggcctggcacaggaagcactttgtgtgtgagggctgtgagcagctgctgagcggccgggcctacatcgtgaccaagggccagctgctgtgccccacctgcagcaagagcaagaggagctag

SEQ ID NO: 97894 - DNA, 1061 bp, Artificial Sequence
  derived and/or modified sequence
ccctcgcgcctctgcctgagaagccaggcgctgttcccccaccccagaagaggatggcaaaggtggctaaggacctcaacccaggagttaaaaagatgtccctgggccagctgcagtcagcaagaggtgtggcatgtttgggatgcaaggggacgtgttcgggcttcgagccacattcatggagggactgcagtacatggagctcatccccaaggagaagcagccagtgacaggcacagagggtgccttttaccgccgccgccagctcatgcaccagctccccatctatgaccaggatccctcgcgctgccgtggacttttggagaatgagttgaaactgatggaagaatttgtcaagcaatataagagcgaggccctcggcgtgggagaagtggccctcccggggcagggtggcttgcccaaggaggaggggaagcagcaggaaaagccagagggggcagagaccactgctgctaccaccaacggcagtctcagtgacccgtccaaagaagtggaatacgtctgcgagctctgcaagggagcggcccctcctgacagccccgtggtctactcggacagggcaggctacaacaagcagtggcaccccacctgctttgtgtgtgccaagtgctccgagccgctggtggacctcatctacttctggaaggatggtgcaccctggtgcggccgccattactgcgagagtctgcggccccggtgctccggctgcgatgagataatattcgctgaggactaccagcgtgtggaagatctggcctggcaccgaaagcactttgtctgtgagggttgtgagcagctgctgagcggccgggcgtacatcgtcaccaagggtcagcttctgtgcccaacttgcagcaagtccaaacgctcctgaagggctgcccacccacagccagaatccacaggatcccaccgagaaggagagccaggtgtgccgagaccatcctaagggtccgatgtgacagcaagcaagtgaaataaacaatgatttgcttttcagtgagaatatatatatgagatatatatagatatatattcta

SEQ ID NO: 97895 - DNA, 762 bp, Artificial Sequence
  derived and/or modified sequence
atgttcggcatgcagggcgacgtgttcggcctgcgggccaccttcatggaggggcttcagtacatggagctcattcctaaggagaagcaacctgtaaccggaaccgaaggagccttctatcgtagacggcaattgatgcatcagctgccaatttacgaccaggatccctccaggtgccgtgggctgctggaaaacgaactgaaattaatggaggaatttgtgaagcaatataaaagtgaagccttgggcgtgggtgaggttgcactgcccggacaggggggtctgcccaaggaggaaggcaaacaacaggagaagcccgaaggggcagaaaccaccgccgcgacaactaatgggtcactgtctgacccttcgaaggaggtagagtacgtgtgcgagctctgcaagggtgccgccccccccgattcgccggtcgtgtactccgatcgtgctggttacaataaacagtggcaccccacctgttttgtctgtgcaaagtgcagcgaacccttggtagatctgatctatttttggaaagacggcgccccttggtgtggacggcactactgcgagagcctccgcccacggtgcagcggatgtgacgagattattttcgccgaggattaccagcgtgtggaagatctggcgtggcaccggaagcacttcgtgtgcgaagggtgtgagcagctgctatctggacgggcatatattgtcactaaggggcagctgctttgcccaacatgtagcaaatctaaacgtagctag

SEQ ID NO: 97896 - DNA, 762 bp, Artificial Sequence
  derived and/or modified sequence
atgttcggcatgcagggcgacgtgttcggattgcgtgcaaccttcatggagggcctgcagtatatggagttgatccccaaagagaagcaacccgtcaccggtaccgagggggcattctacagacgacgccagctgatgcatcagctacccatttacgatcaagatcctagcagatgtaggggcctgttagaaaacgaactgaaactcatggaggagtttgttaagcagtataagtctgaggctttgggcgtcggagaggttgccttgccgggacaaggaggtttaccaaaggaggaggggaaacagcaagaaaagccagagggcgcagaaacaaccgccgctactaccaacgggtctctaagtgacccatccaaggaggttgagtacgtttgcgaactgtgcaagggcgctgctcccccagatagccctgtcgtatactctgaccgagccggatataacaaacagtggcatcctacatgcttcgtctgtgctaagtgctccgagccgctggtggatctgatatacttctggaaggacggtgcaccatggtgtggaaggcattactgcgagagtcttaggcccaggtgctccggctgcgacgaaataattttcgcagaggactatcaaagggtcgaagatctggcctggcataggaaacacttcgtgtgtgagggttgcgagcagttgctatctggtagagcttacatcgtcaccaaaggccagttattgtgtccaacctgttccaaatccaagcgctcctag

SEQ ID NO: 97897 - DNA, 762 bp, Artificial Sequence
  derived and/or modified sequence
atgttcggcatgcagggcgacgtgttcggcctgagagccaccttcatggagggcctgcagtacatggagctgatccccaaggagaagcagcccgtgaccggcaccgagggcgccttctacagaagaagacagctgatgcaccagctgcccatctacgaccaggaccccagcagatgcagaggcctgctggagaacgagctgaagctgatggaggagttcgtgaagcagtacaagagcgaggccctgggcgtgggcgaggtggccctgcccggccagggcggcctgcccaaggaggagggcaagcagcaggagaagcccgagggcgccgagaccaccgccgccaccaccaacggcagcctgagcgaccccagcaaggaggtggagtacgtgtgcgagctgtgcaagggcgccgccccccccgacagccccgtggtgtacagcgacagagccggctacaacaagcagtggcaccccacctgcttcgtgtgcgccaagtgcagcgagcccctggtggacctgatctacttctggaaggacggcgccccctggtgcggcagacactactgcgagagcctgagacccagatgcagcggctgcgacgagatcatcttcgccgaggactaccagagagtggaggacctggcctggcacagaaagcacttcgtgtgcgagggctgcgagcagctgctgagcggcagagcctacatcgtgaccaagggccagctgctgtgccccacctgcagcaagagcaagagaagctag

SEQ ID NO: 97898 - protein, 247 aa, Artificial Sequence
  derived and/or modified sequence
MAKVAKDLNPGVKKMSLGQLQSARGVACLGCKGTCSGFEPHSWRKICKSCKCSQEDHCLTSDLEDDRKIGRLLMDSKYSTLTARVKGGDGIRIYKRNRMIMTNPIATGKDPTFDTITYEWAPPGVTQKLGLQYMELIPKEKQPVTGTEGAFYRRRQLMHQLPIYDQDPSRCRGLLENELKLMEEFVKQYKSEALGVGEVALPGQGGLPKEEGKQQEKPEGAETTAATTNGSLSDPSKEVEYKPVPLV

SEQ ID NO: 97899 - DNA, 744 bp, Artificial Sequence
  derived and/or modified sequence
atggccaaggtagctaaggacctcaaccctggcgtcaaaaagatgagtctcggccaactgcaatccgcaagaggagtagcatgtctgggctgcaaaggaacatgcagcgggtttgagccccatagctggcgtaagatctgtaagtcttgcaagtgctcccaagaggatcactgcctgacctcagacctcgaggatgatcgcaagatcggccggcttctgatggattctaagtacagtacactgactgctagggtgaaaggtggagacgggattcggatatataagagaaataggatgatcatgactaatcctattgctacaggtaaggatcctacattcgatacaataacgtacgagtgggctcccccaggggtcacacagaaactaggtctacagtacatggagctgatacccaaagagaagcagccagtgactggcaccgagggagcattttacagacggcgccaactgatgcaccagttgcctatttacgatcaggaccccagccgttgtagaggactccttgagaacgagttgaagcttatggaggaattcgtgaagcagtacaagtccgaagctctgggcgtaggggaggttgcccttcctgggcagggcgggttgccaaaggaagaaggaaagcagcaagagaagccagagggtgctgaaaccactgcagccaccactaatggaagtttgtccgatccctctaaagaggtggaatataagcctgttcccctcgtttag

SEQ ID NO: 97900 - DNA, 744 bp, Artificial Sequence
  derived and/or modified sequence
atggccaaggtggccaaggacctgaaccctggggtgaagaagatgagcctgggccagctgcagagcgcccggggcgtggcctgcctgggctgcaagggcacctgcagcggctttgagccccacagctggaggaagatctgcaagagctgcaagtgcagccaggaggaccactgcctgaccagtgacctggaggatgacaggaagattggccgcctgctgatggacagcaagtacagcaccctgacagcccgggtgaagggaggagatggcatccgcatctacaagaggaacaggatgatcatgaccaaccccatcgccaccgggaaggaccccacctttgacaccatcacctatgagtgggcccctcctggggtgacccagaagctgggcctgcagtacatggagctgatccccaaggagaagcagcctgtgactggaacagaaggagccttctacagaagacggcagctgatgcaccagctgcccatctatgaccaggaccccagccgctgccggggcctgctggagaatgagctgaagctgatggaggagtttgtgaagcagtacaagtctgaggccctgggcgtgggggaggtggccctgcccggccagggcggcctgcccaaggaggagggcaagcagcaggagaagccagagggcgctgagaccacagctgccaccaccaacggcagcctgagtgaccccagcaaggaggtggagtacaagcctgtgcccctggtgtag

SEQ ID NO: 97901 - DNA, 858 bp, Artificial Sequence
  derived and/or modified sequence
acagagctccctcccaggcccgcgaacttggccattcagccgccgctgtccccgctgcgcgccctcgcgcctctgcctgagaagccaggcgctgttcccccaccccagaagaggatggcaaaggtggctaaggacctcaacccaggagttaaaaagatgtccctgggccagctgcagtcagcaagaggtgtggcatgtttgggatgcaaggggacgtgttcgggcttcgagccacattcatggaggaaaatatgcaagtcttgcaaatgcagccaagaggaccactgcctaacatctgacctagaagacgatcggaaaattggccgcttgctgatggactccaagtattccaccctcactgctcgggtgaaaggcggggacggcatccggatttacaagaggaaccggatgatcatgaccaaccctattgctactgggaaagatcccacttttgacaccatcacctacgagtgggctccccctggagtcacccagaaactgggactgcagtacatggagctcatccccaaggagaagcagccagtgacaggcacagagggtgccttttaccgccgccgccagctcatgcaccagctccccatctatgaccaggatccctcgcgctgccgtggacttttggagaatgagttgaaactgatggaagaatttgtcaagcaatataagagcgaggccctcggcgtgggagaagtggccctcccggggcagggtggcttgcccaaggaggaggggaagcagcaggaaaagccagagggggcagagaccactgctgctaccaccaacggcagtctcagtgacccgtccaaagaagtggaatacaagccagtcccactcgtgtga

SEQ ID NO: 97902 - DNA, 744 bp, Artificial Sequence
  derived and/or modified sequence
atggccaaggtggccaaggacctgaaccccggcgtgaagaagatgagtctagggcagctacagtcagcacgaggcgtcgcatgtctggggtgcaagggcacttgttccggttttgagcctcactcatggcggaagatttgtaaaagttgtaaatgctcacaagaagaccactgccttactagcgatctcgaagatgatagaaagattggacggctcctgatggacagcaagtattctacgctaaccgccagagttaagggcggtgatggaatcagaatttacaaaaggaacaggatgataatgactaatcccatagcaacaggaaaggaccctaccttcgacacgattacctacgagtgggcccccccaggagtgacccagaagctgggacttcaatacatggagctgattccaaaggaaaaacagccagtgacgggcacggaaggcgccttctaccggcgtcgacagctgatgcaccagctccctatttatgaccaggacccctcccgatgcagaggactgttggagaatgagctcaagctgatggaagaattcgttaaacagtacaaatccgaagcgctcggtgtgggtgaagtcgccctcccaggccaaggcggactgcctaaggaggagggaaaacagcaggagaagcccgagggcgcggaaactaccgctgctaccacaaatggaagcctcagcgatccctccaaggaggttgagtacaagcccgttccactagtatag

SEQ ID NO: 97903 - DNA, 744 bp, Artificial Sequence
  derived and/or modified sequence
atggctaaggtagcgaaggacctaaaccctggtgtcaaaaaaatgtcgctcgggcagcttcagtctgccagaggagtagcctgccttggttgcaagggcacctgtagcggattcgagccacatagttggcggaagatttgcaagtcctgcaagtgttcccaggaagaccattgcctcacctcggatctcgaggacgatagaaagattggtagactgctgatggactccaagtatagcaccttgactgccagggtgaaagggggagatggaatcaggatctacaaacggaaccgcatgatcatgacaaaccctatcgcaacaggcaaggatcccacattcgataccataacttacgaatgggctcccccaggtgtgactcagaagctgggtctccagtacatggaattaatacccaaggagaaacagcccgtgaccggcacagaaggcgctttttatcggcgaagacagctgatgcaccaacttcccatttatgatcaggatcccagtcggtgcaggggattgctggagaacgagctgaaactgatggaagagttcgtgaaacagtacaaatctgaggccttgggagtgggggaggtcgcactgcccggacaggggggactccccaaggaggaagggaaacagcaggaaaaaccggaaggtgctgagacgacggctgccactacaaatggatccctgtcggaccctagtaaggaagtcgaatataaacctgttccactagtttag

SEQ ID NO: 97904 - DNA, 744 bp, Artificial Sequence
  derived and/or modified sequence
atggccaaggtggccaaggacctgaaccccggcgtgaagaagatgagcctgggccagctgcagagcgccagaggcgtggcctgcctgggctgcaagggcacctgcagcggcttcgagccccacagctggagaaagatctgcaagagctgcaagtgcagccaggaggaccactgcctgaccagcgacctggaggacgacagaaagatcggcagactgctgatggacagcaagtacagcaccctgaccgccagagtgaagggcggcgacggcatcagaatctacaagagaaacagaatgatcatgaccaaccccatcgccaccggcaaggaccccaccttcgacaccatcacctacgagtgggccccccccggcgtgacccagaagctgggcctgcagtacatggagctgatccccaaggagaagcagcccgtgaccggcaccgagggcgccttctacagaagaagacagctgatgcaccagctgcccatctacgaccaggaccccagcagatgcagaggcctgctggagaacgagctgaagctgatggaggagttcgtgaagcagtacaagagcgaggccctgggcgtgggcgaggtggccctgcccggccagggcggcctgcccaaggaggagggcaagcagcaggagaagcccgagggcgccgagaccaccgccgccaccaccaacggcagcctgagcgaccccagcaaggaggtggagtacaagcccgtgcccctggtgtag

SEQ ID NO: 97905 - protein, 533 aa, Artificial Sequence
  derived and/or modified sequence
MNYEGARSERENHAADDSEGGALDMCCSERLPGLPQPIVMEALDEAEGLQDSQREMPPPPPPSPPSDPAQKPPPRGAGSHSLTVRSSLCLFAASQFLLEPTAWLDSGTWGVPSLLLVFLSVGLVLVTTLVWHLLRTPPEPPTPLPPEDRRQSVSRQPSFTYSEWMEEKIEDDFLDLDPVPETPVFDCVMDIKPEADPTSLTVKSMGLQERRGSNVSLTLDMCTPGCNEEGFGYLMSPREESAREYLLSASRVLQAEELHEKALDPFLLQAEFFEIPMNFVDPKEYDIPGLVRKNRYKTILPNPHSRVCLTSPDPDDPLSSYINANYIRGYGGEEKVYIATQGPIVSTVADFWRMVWQEHTPIIVMITNIEEMNEKCTEYWPEEQVAYDGVEITVQKVIHTEDYRLRLISLKSGTEERGLKHYWFTSWPDQKTPDRAPPLLHLVREVEEAAQQEGPHCAPIIVHCSAGIGRTGCFIATSICCQQLRQEGVVDILKTTCQLRQDRGGMIQTCEQYQFVHHVMSLYEKQLSHQSPE

SEQ ID NO: 97906 - DNA, 1602 bp, Artificial Sequence
  derived and/or modified sequence
atgaactacgaaggggccagaagcgagcgcgagaatcacgcggcggacgactctgagggaggtgcccttgatatgtgttgtagtgaacgcctgcccggcttgccacagcccatcgtcatggaagccctagacgaagcggagggtctgcaagactcacagagagagatgcctcccccgccgccaccctcaccaccctctgatccggcccagaagccccccccccgaggcgcgggcagccacagcctcacggttcggtctagcctctgcttgtttgccgcatcccaatttctcttggaaccaacggcttggctcgattctgggacctggggagtgccatccctcctcctcgtctttctctcagtcggtctggtactagtgacaaccctagtctggcatcttctcaggaccccccccgaacctcccacaccattacctcctgaagatcggcgacaatctgtctcccgacaaccgtccttcacttactctgagtggatggaggaaaaaatcgaagacgacttcctggatttggatcccgttcccgagactcctgtatttgattgcgtcatggacattaagccagaagccgaccccacaagcttaacggttaaaagtatgggtttacaggagaggcgggggagtaacgtgtcccttacactcgacatgtgtacacccggatgtaatgaggagggcttcggctacctcatgagcccacgggaggaaagcgcccgcgaatatctgctttccgccagccgggttctgcaggcagaagagttgcatgagaaagctcttgatccgtttcttctccaggcagagttctttgagatcccaatgaactttgtggatccaaaagaatatgatattcctggcctggtgaggaagaataggtataagacgatattgcctaacccgcactctcgtgtctgcctgacaagccctgatcccgacgatcctctgagtagttatataaacgcaaattatattcgtgggtatggcggtgaagaaaaggtgtatatcgccactcagggcccaatcgttagcaccgtggctgatttctggcggatggtgtggcaagaacacactcctatcattgtcatgattacaaatatcgaggaaatgaatgagaagtgtacagaatattggcccgaagagcaagtggcctacgacggggttgagattaccgtgcagaaggtgatccacactgaggactaccgcctgcgtctgattagcctgaaaagtgggaccgaggagcggggcttgaagcattactggttcacctcatggcctgatcagaagacacccgacagggctcctcctctgctacatctagtgcgggaggtcgaagaggccgcacagcaagagggacctcattgtgctcctattatcgtgcactgcagtgctggaatcggacgtaccgggtgtttcatagccacatctatttgctgccaacaattgcgtcaagagggagtggtggacatcttaaaaactacctgccagctgcgtcaggatagaggtggaatgatacagacatgcgagcagtatcagttcgtgcaccatgtgatgagcctctatgagaagcagctcagccaccagtcccccgaatag

SEQ ID NO: 97907 - DNA, 1602 bp, Artificial Sequence
  derived and/or modified sequence
atgaactatgaaggagcccggagtgaaagagaaaatcatgctgctgatgacagcgagggcggggccctggacatgtgctgcagcgagcggctgcccggcctgccccagcccatcgtgatggaggccctggatgaggccgagggcctgcaggacagccagcgggagatgcctcctcctcctccacccagcccccccagcgaccctgcccagaagcccccaccaagaggagctggcagccacagcctgactgtgcgcagcagcctgtgcctgtttgctgccagccagttcctgctggagcccacagcctggctggacagcggcacctggggcgtgcccagcctgctgctggtgttcctgtctgtgggcctggtgctggtgaccaccctggtgtggcacctgctgcggaccccacctgagccccccacccccctgcccccagaagatcggcggcagagcgtgtcccggcagcccagcttcacctacagcgagtggatggaggagaagattgaagatgacttcctggacctggaccctgtgcctgagacccctgtgtttgactgtgtgatggacatcaagccagaggccgaccccaccagcctgactgtgaagtccatgggcctgcaggagcggcggggcagcaatgtgtccctgaccctggacatgtgcaccccaggctgcaatgaggagggcttcggctacctgatgagcccccgggaggagagcgcccgggagtacctgctgagcgccagccgggtgctgcaggccgaggagctgcacgagaaggccctggaccccttcctgctgcaggccgagttctttgagatccccatgaactttgtggaccccaaggagtatgacatccctggcctggtgaggaagaaccgctacaagaccatcctgcccaacccccacagccgggtgtgcctgaccagcccagaccctgatgaccccctgagcagctacatcaatgccaactacatccggggctacggcggggaggagaaggtgtacatcgccacccagggccccatcgtgtccacagtggccgacttctggaggatggtgtggcaggagcacacccccatcatcgtgatgatcaccaacatcgaggagatgaatgaaaaatgtacagagtactggccagaggagcaggtggcctatgatggagtggagatcaccgtgcagaaggtgatccacacagaggactaccgcctgcggctcatcagcctgaagagcggcacagaggagcggggcctgaagcactactggttcacctcctggccagaccagaagaccccagaccgggccccacccctgctgcacctggtgcgggaggtggaggaggccgcccagcaggagggcccccactgtgcccccatcatcgtgcactgcagcgctggcatcggccgcacaggctgcttcatcgccaccagcatctgctgccagcagctgcggcaggagggcgtggtggacatcctgaagaccacctgccagctgcggcaggaccggggcggcatgatccagacctgtgagcagtaccagtttgtgcaccacgtgatgagcctgtatgagaagcagctgagccaccagagccctgagtag

SEQ ID NO: 97908 - DNA, 1602 bp, Artificial Sequence
  derived and/or modified sequence
atgaactacgagggcgcccggagcgagcgggagaaccacgccgccgatgattcagaaggaggggctctcgacatgtgctgttccgagcggctgccagggctcccacagcccattgtcatggaagcactcgatgaagcggagggtctacaggattcccagcgggagatgcctccacctccccccccgtctcctccaagcgatcctgcacagaaaccaccaccacgtggcgccggctcccacagcctcactgtccgctcttcattatgtctgttcgccgcgtcccagttccttttggagcccaccgcatggctggattctggcacttggggagtgccctccttacttttggtttttctgagcgtcggactggttctcgtaactaccctggtttggcatctgctcagaactccacccgaaccaccaacacctctgcctcccgaagataggaggcaatctgtatcccggcagcctagcttcacttatagtgagtggatggaggagaagatcgaagatgatttcctggatttagatcccgtgcccgagacacccgttttcgactgtgtgatggatatcaagcctgaggctgaccccaccagcctgaccgtgaagtctatgggcttgcaggaacgtaggggctcaaacgtctcactgaccctggatatgtgtaccccaggctgcaacgaggagggttttggatatctcatgagtccacgcgaggagtctgcccgcgagtatcttctgtcggcaagccgtgtcctgcaggctgaggaattgcacgagaaggctctggatccttttttgctccaggcagagttttttgagatccccatgaattttgtcgatcctaaagagtacgatatcccaggattagtcagaaagaatcgatacaagacgatcttgccaaacccccacagtcgcgtctgtctgacctccccagaccccgacgaccccctctcaagctacataaacgccaactacataagaggttacggcggtgaggagaaggtgtacattgctactcaggggccaattgtctctaccgttgcagacttctggaggatggtctggcaagagcacacccccattatcgtcatgattactaacatagaggagatgaatgaaaagtgcaccgaatactggcccgaagaacaggtcgcttatgatggcgtggaaatcactgtgcagaaggtgattcacactgaggattatagactgcggctcattagcttgaaatccggcactgaagagcgcggcctaaagcattactggtttacaagctggcctgatcagaagactccggatcgcgcaccccctcttctccatcttgttcgggaagtggaggaagcagcccagcaggagggacctcactgcgccccaattatcgttcattgttcggcaggaatcgggagaaccgggtgctttatagccaccagcatttgttgtcagcagctgcggcaggaaggcgtggtagatatcctgaaaaccacatgccagctgcggcaggaccggggcggcatgatacaaacttgtgagcagtatcagttcgtccatcacgtgatgagcttgtatgagaagcagctctcccaccagtcacccgagtag

SEQ ID NO: 97909 - DNA, 1602 bp, Artificial Sequence
  derived and/or modified sequence
atgaactacgaaggcgctcgatcagagcgggagaatcatgccgcagacgacagcgaaggcggagccctagatatgtgttgtagtgagagactgcctggtctgcctcagcccatcgtgatggaggccctggacgaagctgagggattgcaggactcccagagagaaatgccgcctcctcccccacccagtccaccgagcgacccagcccagaaacctccgccaaggggcgctggcagccattctctcacggtccgcagttcactgtgcctgtttgcggcttcgcagtttctgctggaaccaacggcctggctggactcaggaacttggggcgtgccttccttattgcttgtgttcctgtcggtgggtttggttctggtaactactcttgtgtggcatctgctcaggactccgcctgagccccctactcctttgccgccagaagatcgacggcaatctgttagccgacaaccatcctttacatactccgaatggatggaagaaaaaattgaggacgattttctggacctggatcccgtacctgaaacacctgtgttcgattgcgtgatggatatcaaaccagaagccgaccccaccagcctaacagtcaaatccatgggactccaggagcgccgaggttccaacgtgtcactgactctggacatgtgcacccccggttgcaatgaggagggcttcggatacctcatgtccccaagggaggaatctgctcgggaatacctcctgtccgcctcgcgtgtcctgcaggcagaggagctccatgaaaaggcactggaccctttccttctacaggctgaattttttgagattcccatgaattttgtggaccctaaggagtatgatatccccggactcgtccgcaagaatcgatacaaaacaattctgcccaatccacactctcgggtgtgcttaaccagtcccgaccccgacgatccattatctagctacatcaacgctaattatatccgcggatacggcggagaggaaaaagtctatatcgctactcagggtcccatcgtcagtaccgttgcagatttctggaggatggtatggcaggagcatacacctattatcgtgatgatcacaaacatagaggagatgaatgagaaatgtaccgagtattggcccgaagagcaagtcgcctatgatggtgtggaaattaccgttcaaaaggtgattcacaccgaggactataggcttagactaatttccctcaagtcagggactgaagagcgtggactcaagcattattggtttacctcatggcccgaccagaagacaccggatagggcaccaccgttactacatctggtgcgagaggtggaggaggccgcacagcaggaaggccctcattgtgcacccatcatcgtgcactgctctgcaggtattgggagaaccggatgtttcattgccacctccatttgttgtcaacagctccggcaggaaggcgtggtggacattttgaaaacaacgtgccaacttaggcaagatcgtggcggaatgatccagacctgtgaacagtatcaatttgtgcatcatgtcatgagtctgtatgagaagcagctaagtcaccagtccccggaatag

SEQ ID NO: 97910 - DNA, 3037 bp, Artificial Sequence
  derived and/or modified sequence
gccggggctggggggtgccaaacccacccggcggctgcgccagcgactctgcagctgaagcgcatttggtgaggcggtcgggcgagggagcgcgcacggagcgcgggacggagcgccaggcggacggaccgaaggacggaggcaccgaaggacggacgcccccgcacacgcagacgcacagagctcggcgcggcccccgtcgcatacacactggcacagacacaagcagggacacacgcagacacacgcacactcgcgcgcgcatcctcccgccagcctgcccgcctgctcgccggcgcccggagcccgctctggccgctggatgatctgaagctgccctctctccttcatttatatcaccagcttgctttttgctgagaaagcttcctgccctggaagatggcacccttccccatccagacaccttgggaatgaattatgagggagccaggagtgagagagagaaccacgctgctgatgactccgagggaggggccctggacatgtgctgcagtgagaggctaccgggtctcccccagccgatagtgatggaggcactggacgaggctgaagggctccaggactcacagagagagatgccgccaccccctcctccctcgccgccctcagatccagctcagaagccaccacctcgaggcgctgggagccactccctcactgtcaggagcagcctgtgcctgttcgctgcctcacagttcctgctggaacccacggcctggcttgactctgggacgtggggagtccccagtctgctgctggtctttctgtccgtgggcctggtcctcgttaccaccctggtgtggcacctcctgaggacacccccagagccacccaccccactgccccctgaggacaggcgccagtcagtgagccgccagccctccttcacctactcagagtggatggaggagaagatcgaggatgacttcctggacctcgacccggtgcccgagactcctgtgtttgattgtgtgatggacatcaagcctgaggctgaccccacctcactcaccgtcaagtccatgggtctgcaggagaggaggggttccaatgtctccctgaccctggacatgtgcactccgggctgcaacgaggagggctttggctatctcatgtccccacgtgaggagtccgcccgcgagtacctgctcagcgcctcccgtgtcctccaagcagaagagcttcatgaaaaggccctggaccctttcctgctgcaggcggaattctttgaaatccccatgaactttgtggatccgaaagagtacgacatccctgggctggtgcggaagaaccggtacaaaaccatacttcccaaccctcacagcagagtgtgtctgacctcaccagaccctgacgaccctctgagttcctacatcaatgccaactacatccggggctatggtggggaggagaaggtgtacatcgccactcagggacccatcgtcagcacggtcgccgacttctggcgcatggtgtggcaggagcacacgcccatcattgtcatgatcaccaacatcgaggagatgaacgagaaatgcaccgagtattggccggaggagcaggtggcgtacgacggtgttgagatcactgtgcagaaagtcattcacacggaggattaccggctgcgactcatctccctcaagagtgggactgaggagcgaggcctgaagcattactggttcacatcctggcccgaccagaagaccccagaccgggcccccccactcctgcacctggtgcgggaggtggaggaggcagcccagcaggaggggccccactgtgcccccatcatcgtccactgcagtgcagggattgggaggaccggctgcttcattgccaccagcatctgctgccagcagctgcggcaggagggtgtggtggacatcctgaagaccacgtgccagctccgtcaggacaggggcggcatgatccagacatgcgagcagtaccagtttgtgcaccacgtcatgagcctctacgaaaagcagctgtcccaccagtccccagaatgactgcgcttctcctacaaggttctctgggcactgcccagcctgagtctcggccctcacccagggccctgcctcgggtcctgggcctgctccccgcttcctccccttcagtcagctccctctgtcctctgtcagcctggcctgacccctaccctccagcattgctcttcctactgtacatattggggagtggggggcagggtcgggaagggacatgccaggccaggcctggggccccggggcctgacccacaccacgcagaccccgggctccagtttttaacgatggttccatcaatacctgatccagaatgtttccgtgctacactttgtgtcctgctgcaatgtgttctgtctgtccatccatctctgccctctgtaccggacactgtgtctcctcagccaggaaggggtaatgagctccagcccctaagcaaccggacttgcctgcctcggcctcacccgcacttctcccaaaaggcagatgacggggagttaggcatggggagctccagaaggtcaccagagagctttcagctgagggagagttctctaggttggagtgggcatcacagccagggtggcctctgggtgtcagatgctctcaggagggtgcccagcctgtgaggcactggcaaggtagggggcagatggggcatggagaacccagaggatctaggccctgttggggaggggaggggagctcaaggtttgggtggggactcagcccagatctacgtgagacatttttctgtgtcactgtgggaaagccttcccagaagtctcactgcgtgttgctctgcgtgtgttcccatgtccatgcgtgtgttgagagcccatcaggagggcatgcatgactctttggcaacatgtattatcttggagccacgtgtttttattgctgactttaaatatttatcccacggcagacagagacatttggtgtctttttataattcgctcgtggtcattgaatagagcaataaacggagcattttgagcaaaact

SEQ ID NO: 97911 - DNA, 1602 bp, Artificial Sequence
  derived and/or modified sequence
atgaactacgagggcgccagaagcgagagagagaaccacgccgccgacgacagcgagggcggcgccctggacatgtgctgcagcgagagactgcccggcctgccccagcccatcgtgatggaggccctggacgaggccgagggcctgcaggacagccagagagagatgccccccccccccccccccagcccccccagcgaccccgcccagaagcccccccccagaggcgccggcagccacagcctgaccgtgagaagcagcctgtgcctgttcgccgccagccagttcctgctggagcccaccgcctggctggacagcggcacctggggcgtgcccagcctgctgctggtgttcctgagcgtgggcctggtgctggtgaccaccctggtgtggcacctgctgagaaccccccccgagccccccacccccctgccccccgaggacagaagacagagcgtgagcagacagcccagcttcacctacagcgagtggatggaggagaagatcgaggacgacttcctggacctggaccccgtgcccgagacccccgtgttcgactgcgtgatggacatcaagcccgaggccgaccccaccagcctgaccgtgaagagcatgggcctgcaggagagaagaggcagcaacgtgagcctgaccctggacatgtgcacccccggctgcaacgaggagggcttcggctacctgatgagccccagagaggagagcgccagagagtacctgctgagcgccagcagagtgctgcaggccgaggagctgcacgagaaggccctggaccccttcctgctgcaggccgagttcttcgagatccccatgaacttcgtggaccccaaggagtacgacatccccggcctggtgagaaagaacagatacaagaccatcctgcccaacccccacagcagagtgtgcctgaccagccccgaccccgacgaccccctgagcagctacatcaacgccaactacatcagaggctacggcggcgaggagaaggtgtacatcgccacccagggccccatcgtgagcaccgtggccgacttctggagaatggtgtggcaggagcacacccccatcatcgtgatgatcaccaacatcgaggagatgaacgagaagtgcaccgagtactggcccgaggagcaggtggcctacgacggcgtggagatcaccgtgcagaaggtgatccacaccgaggactacagactgagactgatcagcctgaagagcggcaccgaggagagaggcctgaagcactactggttcaccagctggcccgaccagaagacccccgacagagccccccccctgctgcacctggtgagagaggtggaggaggccgcccagcaggagggcccccactgcgcccccatcatcgtgcactgcagcgccggcatcggcagaaccggctgcttcatcgccaccagcatctgctgccagcagctgagacaggagggcgtggtggacatcctgaagaccacctgccagctgagacaggacagaggcggcatgatccagacctgcgagcagtaccagttcgtgcaccacgtgatgagcctgtacgagaagcagctgagccaccagagccccgagtag

SEQ ID NO: 97912 - protein, 1274 aa, Artificial Sequence
  derived and/or modified sequence
MAAAVLSGPSAGSAAGVPGGTGGLSAVSSGPRLRLLLLESVSGLLQPRTGSAVAPVHPPNRSAPHLPGLMCLLRLHGSVGGAQNLSALGALVSLSNARLSSIKTRFEGLCLLSLLVGESPTELFQQHCVSWLRSIQQVLQTQDPPATMELAVAVLRDLLRYAAQLPALFRDISMNHLPGLLTSLLGLRPECEQSALEGMKACMTYFPRACGSLKGKLASFFLSRVDALSPQLQQLACECYSRLPSLGAGFSQGLKHTESWEQELHSLLASLHTLLGALYEGAETAPVQNEGPGVEMLLSSEDGDAHVLLQLRQRFSGLARCLGLMLSSEFGAPVSVPVQEILDFICRTLSVSSKNIVSGICHLFRALAQDTRQPGKYWGPESPQTVSSWSRPRELPTFVQITSLPMCRDTGAQCQSVANASLGEGEFGDAESLLRGPAILLTFHPGSILEDRGLILLGELRSGVGFLTYVYICKWSFPVSVSLWLSLSSSTLYLCPFFLQSLHGDGPLRLLLLPSIHLEALDLLSALILACGSRLLRFGILIGRLLPQVLNSWSIGRDSLSPGQERPYSTVRTKVYAILELWVQVCGASAGMLQGGASGEALLTHLLSDISPPADALKLRSPRGSPDGSLQTGKPSAPKKLKLDVGEAMAPPSHRKGDSNANSDVCAAALRGLSRTILMCGPLIKEETHRRLHDLVLPLVMGVQQGEVLGSSPYTSSRCRRELYCLLLALLLAPSPRCPPPLACALQAFSLGQREDSLEVSSFCSEALVTCAALTHPRVPPLQPMGPTCPTPAPVPPPEAPSPFRAPPFHPPGPMPSVGSMPSAGPMPSAGPMPSAGPVPSARPGPPTTANHLGLSVPGLVSVPPRLLPGPENHRAGSNEDPILAPSGTPPPTIPPDETFGGRVPRPAFVHYDKEEASDVEISLESDSDDSVVIVPEGLPPLPPPPPSGATPPPIAPTGPPTASPPVPAKEEPEELPAAPGPLPPPPPPPPPVPGPVTLPPPQLVPEGTPGGGGPPALEEDLTVININSSDEEEEEEEEEEEEEEEEEEEEEDFEEEEEDEEEYFEEEEEEEEEFEEEFEEEEGELEEEEEEEDEEEEEELEEVEDLEFGTAGGEVEEGAPPPPTLPPALPPPESPPKVQPEPEPEPGLLLEVEEPGTEEERGADTAPTLAPEALPSQGEVEREGESPAAGPPPQELVEEEPSAPPTLLEEETEDGSDKVQPPPETPAEEEMETETEAEALQEKEQDDTAAMLADFIDCPPDDEKPPPPTEPDS

SEQ ID NO: 97913 - protein, 906 aa, Artificial Sequence
  derived and/or modified sequence
MELAVAVLRDLLRYAAQLPALFRDISMNHLPGLLTSLLGLRPECEQSALEGMKACMTYFPRACGSLKGKLASFFLSRVDALSPQLQQLACECYSRLPSLGAGFSQGLKHTESWEQELHSLLASLHTLLGALYEGAETAPVQNEGPGVEMLLSSEDGDAHVLLQLRQRFSGLARCLGLMLSSEFGAPVSVPVQEILDFICRTLSVSSKNISLHGDGPLRLLLLPSIHLEALDLLSALILACGSRLLRFGILIGRLLPQVLNSWSIGRDSLSPGQERPYSTVRTKVYAILELWVQVCGASAGMLQGGASGEALLTHLLSDISPPADALKLRSPRGSPDGSLQTGKPSAPKKLKLDVGEAMAPPSHRKGDSNANSDVCAAALRGLSRTILMCGPLIKEETHRRLHDLVLPLVMGVQQGEVLGSSPYTSSRCRRELYCLLLALLLAPSPRCPPPLACALQAFSLGQREDSLEVSSFCSEALVTCAALTHPRVPPLQPMGPTCPTPAPVPPPEAPSPFRAPPFHPPGPMPSVGSMPSAGPMPSAGPMPSAGPVPSARPGPPTTANHLGLSVPGLVSVPPRLLPGPENHRAGSNEDPILAPSGTPPPTIPPDETFGGRVPRPAFVHYDKEEASDVEISLESDSDDSVVIVPEGLPPLPPPPPSGATPPPIAPTGPPTASPPVPAKEEPEELPAAPGPLPPPPPPPPPVPGPVTLPPPQLVPEGTPGGGGPPALEEDLTVININSSDEEEEEEEEEEEEEEEEEEEEEDFEEEEEDEEEYFEEEEEEEEEFEEEFEEEEGELEEEEEEEDEEEEEELEEVEREGESPAAGPPPQELVEEEPSAPPTLLEEETEDGSDKVQPPPETPAEEEMETETEAEALQEKEQDDTAAMLADFIDCPPDDEKPPPPTEPDS

SEQ ID NO: 97914 - DNA, 2721 bp, Artificial Sequence
  derived and/or modified sequence
atggagctggccgtggccgtgctgagagacctgctgagatacgccgcccagctgcccgccctgttcagagacatcagcatgaaccacctgcccggcctgctgaccagcctgctgggcctgagacccgagtgcgagcagagcgccctggagggcatgaaggcctgcatgacctacttccccagagcctgcggcagcctgaagggcaagctggccagcttcttcctgagcagagtggacgccctgagcccccagctgcagcagctggcctgcgagtgctacagcagactgcccagcctgggcgccggcttcagccagggcctgaagcacaccgagagctgggagcaggagctgcacagcctgctggccagcctgcacaccctgctgggcgccctgtacgagggcgccgagaccgcccccgtgcagaacgagggccccggcgtggagatgctgctgagcagcgaggacggcgacgcccacgtgctgctgcagctgagacagagattcagcggcctggccagatgcctgggcctgatgctgagcagcgagttcggcgcccccgtgagcgtgcccgtgcaggagatcctggacttcatctgcagaaccctgagcgtgagcagcaagaacatcagcctgcacggcgacggccccctgagactgctgctgctgcccagcatccacctggaggccctggacctgctgagcgccctgatcctggcctgcggcagcagactgctgagattcggcatcctgatcggcagactgctgccccaggtgctgaacagctggagcatcggcagagacagcctgagccccggccaggagagaccctacagcaccgtgagaaccaaggtgtacgccatcctggagctgtgggtgcaggtgtgcggcgccagcgccggcatgctgcagggcggcgccagcggcgaggccctgctgacccacctgctgagcgacatcagcccccccgccgacgccctgaagctgagaagccccagaggcagccccgacggcagcctgcagaccggcaagcccagcgcccccaagaagctgaagctggacgtgggcgaggccatggccccccccagccacagaaagggcgacagcaacgccaacagcgacgtgtgcgccgccgccctgagaggcctgagcagaaccatcctgatgtgcggccccctgatcaaggaggagacccacagaagactgcacgacctggtgctgcccctggtgatgggcgtgcagcagggcgaggtgctgggcagcagcccctacaccagcagcagatgcagaagagagctgtactgcctgctgctggccctgctgctggcccccagccccagatgccccccccccctggcctgcgccctgcaggccttcagcctgggccagagagaggacagcctggaggtgagcagcttctgcagcgaggccctggtgacctgcgccgccctgacccaccccagagtgccccccctgcagcccatgggccccacctgccccacccccgcccccgtgcccccccccgaggcccccagccccttcagagccccccccttccacccccccggccccatgcccagcgtgggcagcatgcccagcgccggccccatgcccagcgccggccccatgcccagcgccggccccgtgcccagcgccagacccggcccccccaccaccgccaaccacctgggcctgagcgtgcccggcctggtgagcgtgccccccagactgctgcccggccccgagaaccacagagccggcagcaacgaggaccccatcctggcccccagcggcacccccccccccaccatcccccccgacgagaccttcggcggcagagtgcccagacccgccttcgtgcactacgacaaggaggaggccagcgacgtggagatcagcctggagagcgacagcgacgacagcgtggtgatcgtgcccgagggcctgccccccctgcccccccccccccccagcggcgccacccccccccccatcgcccccaccggcccccccaccgccagcccccccgtgcccgccaaggaggagcccgaggagctgcccgccgcccccggccccctgcccccccccccccccccccccccccccgtgcccggccccgtgaccctgccccccccccagctggtgcccgagggcacccccggcggcggcggcccccccgccctggaggaggacctgaccgtgatcaacatcaacagcagcgacgaggaggaggaggaggaggaggaggaggaggaggaggaggaggaggaggaggaggaggaggaggacttcgaggaggaggaggaggacgaggaggagtacttcgaggaggaggaggaggaggaggaggagttcgaggaggagttcgaggaggaggagggcgagctggaggaggaggaggaggaggaggacgaggaggaggaggaggagctggaggaggtggagagagagggcgagagccccgccgccggcccccccccccaggagctggtggaggaggagcccagcgccccccccaccctgctggaggaggagaccgaggacggcagcgacaaggtgcagcccccccccgagacccccgccgaggaggagatggagaccgagaccgaggccgaggccctgcaggagaaggagcaggacgacaccgccgccatgctggccgacttcatcgactgcccccccgacgacgagaagccccccccccccaccgagcccgacagctag

SEQ ID NO: 97915 - DNA, 2721 bp, Artificial Sequence
  derived and/or modified sequence
atggagctggcagtggcggtgcttcgggatctcctcaggtatgccgcacagctaccagccctctttagggatatttccatgaaccacctgcccgggttgctgacttccttgttgggtttgagacctgaatgcgaacagagcgcactcgaggggatgaaggcctgtatgacttatttccccagagcatgcggtagccttaagggcaagctcgcgtctttttttctgagcagggtagacgccctctctccccagctccagcagctcgcatgtgagtgctactctagactgccctcccttggtgctgggtttagtcaggggctgaaacacactgagtcctgggagcaggaacttcacagtctgctggcctctcttcacacactgctgggagctctgtacgagggggccgaaacagctccagtgcagaacgaaggcccaggagtggagatgctgctgagtagcgaagatggagacgcccacgtcctgctgcagctccgccagagatttagtggactcgcccggtgccttggtcttatgctgtctagtgaattcggggccccagtgtccgtccccgtgcaggaaatccttgactttatttgtcgcaccctctctgtgtcttcaaagaatatcagtctacacggggacggccctttaagactacttctcctcccctcaatccatctggaagctctggacctgttaagcgctctgatcttggcttgcggtagccgcctgttaaggttcggaatcctcatcgggagactattgccccaagtcttgaattcatggtctatcggtcgggactccctgagccccggccaggagagaccgtactcaacggtcagaacaaaagtatacgccatcctggagctgtgggtccaggtgtgtggagcttccgccggtatgctccaaggcggggcgagtggcgaggccctgctgactcatctgctgtcagacatctctcccccggccgatgcactcaagctgcgttccccgcgcggatccccagacggctctcttcagaccgggaaaccctccgcccccaaaaaactgaagttagacgtgggtgaagctatggcccccccgtctcataggaaaggggatagcaacgccaattccgacgtctgcgctgccgcgttgcggggactcagcaggaccatcctgatgtgcggtcccttaatcaaagaggagacacatcgcagattacacgatcttgtgctgcccctcgtgatgggggtgcagcagggggaagtgctcgggagttccccatacacctcatctcggtgcagacgggaactgtactgcctcctcttggcccttctgctggctcccagtccaaggtgcccaccgccgctggcatgcgcccttcaggccttcagcctcgggcagcgtgaggattccttggaggtcagctctttctgctcggaagccttggttacctgcgccgccctgacacaccctcgggtgcctcctcttcagcccatgggccctacctgtcctacacccgctccagttcctccccccgaagcaccatccccttttcgggcaccgccttttcacccaccaggtcctatgccttcagtcggatccatgccatccgcgggccccatgcctagcgccggaccaatgccaagcgccggacctgtcccgtcagccagacctgggccgccaacgaccgccaatcaccttggcctgtctgtgcccggcttggtgagtgtgccacctcggttgttaccaggacctgagaaccacagagccggttcaaatgaagaccccatcctggcaccaagcgggacacctccaccaactatcccccctgacgaaacctttggcggcagagtccccagacccgcgtttgttcattatgataaagaggaggcatctgatgtcgagatcagtctggagagcgactctgacgacagtgtggtcatcgtcccagagggcttgccgccacttccacccccaccgccgagcggagcaactcctcccccaatagcccccacaggtcctcccaccgcaagccccccggtgcccgccaaggaggaacccgaggagttgccagccgctcccgggccgctcccccccccacccccacccccgccgccagtgccgggccctgtgacgctcccaccgccccaattggtgcccgaagggacaccaggaggtggcggaccccctgccctcgaagaggacctcacggtgataaatatcaactcttccgatgaggaggaggaagaagaggaggaggaagaagaagaagaggaagaagaggaggaggaagaagaagactttgaggaggaggaagaggatgaagaggaatatttcgaggaggaagaagaggaggaggaggagttcgaagaggaattcgaggaagaggagggagagctcgaggaggaggaagaagaggaggatgaggaggaagaggaggagctggaggaggttgaacgggagggcgaaagcccggctgccggtcccccccctcaggaacttgtcgaagaagagccttcggcgccgccgactctcctcgaggaggagaccgaagatggttcggacaaggtgcaacccccccctgaaacacctgctgaagaggaaatggaaacggaaactgaggctgaggcgctgcaggagaaagaacaggatgatactgcagcaatgctggccgactttatcgattgcccccctgacgatgagaagccgcctccgcctaccgaacctgattcttag

SEQ ID NO: 97916 - DNA, 2721 bp, Artificial Sequence
  derived and/or modified sequence
atggagctggccgtggccgtgctgcgggacctgctgcgctatgctgcccagctgcctgccctcttccgggacatctccatgaaccacctgcccggcctgctgaccagcctgctgggcctgcggccagaatgtgagcagagcgccctggagggcatgaaggcctgcatgacctacttcccccgggcctgtggcagcctgaagggcaagctggccagcttcttcctgagccgggtggatgccctgagcccccagctgcagcagctggcctgtgagtgctacagccggctgcccagcctgggcgccggcttcagccagggcctgaagcacacagagagctgggagcaggagctgcacagcctgctggccagcctgcacaccctgctgggcgccctgtatgagggcgctgagacagcccctgtgcagaatgaaggacctggggtggagatgctgctgagcagtgaagatggagatgcccacgtgctgctgcagctgcggcagcgcttcagcggcctggcccgctgcctgggcctgatgctgagcagcgagtttggagcccctgtgtctgtgcctgtgcaggagatcctggacttcatctgcaggaccctgtctgtgagcagcaagaacatcagcctgcatggagatggccccctgcggctgctgctgctgcccagcatccacctggaggccctggacctgctgagcgccctgatcctggcctgtggcagccggctgctgcgcttcggcatcctgattggccgcctgctgccccaggtgctgaacagctggagcatcggccgggacagcctgagccctggccaggagcggccctacagcacagtgaggaccaaggtgtatgccatcctggagctgtgggtgcaggtgtgtggggccagcgctggcatgctgcagggcggggccagcggggaggccctgctgacccacctgctgagtgacatcagccccccagcagatgccctgaagctgcggagcccccggggcagcccagatggcagcctgcagacaggcaagcccagcgcccccaagaagctgaagctggatgtgggggaggccatggccccacccagccacaggaaaggagacagcaatgccaacagtgatgtgtgtgccgccgccctgcggggcctgagcaggaccatcctgatgtgtggccccctcatcaaggaggagacccaccggcggctgcatgacctggtgctgcccctggtgatgggcgtgcagcagggcgaggtgctgggcagcagcccctacaccagcagccgctgcagaagagagctgtactgcctgctgctggccctgctgctggcccccagcccccgctgccccccacccctggcctgtgccctgcaggccttcagcctgggccagcgggaggacagcctggaggtgtcctccttctgcagcgaggccctggtgacctgtgccgccctgacccacccccgggtgccccccctgcagcccatgggccccacctgccccaccccagcccctgtgcccccacctgaggcccccagccccttccgggccccacccttccaccccccaggccccatgcccagcgtgggctccatgcccagcgctggccccatgcccagcgctggccccatgcccagcgctggccctgtgcccagcgcccggcccggcccccccaccacagccaaccacctgggcctgtctgtgcccggcctggtgtctgtgcccccccggctgctgcccggccctgagaaccacagagctggcagcaatgaagaccccatcctggcccccagcggcaccccaccacccaccatccccccagatgagacctttggaggccgggtgcccaggcctgcctttgtgcactatgacaaggaggaggccagtgatgtggagatcagcctggagagtgacagtgatgacagcgtggtgattgtgcctgagggcctgccccccctgcccccacctcctccttctggggccaccccaccacccatcgcccccactggaccacccacagccagcccccctgtgcctgccaaggaggagcctgaggagctgcctgctgcccctggccccctgcccccacctcctcctcctcctcctcctgtgcccggccctgtgaccctgcccccaccccagctggtgcctgagggcaccccaggcggcggcggccccccagccctggaggaggacctgaccgtcatcaacatcaacagcagtgatgaggaggaggaggaggaggaggaggaggaggaggaggaggaggaggaggaggaggaggaggaggactttgaggaggaggaggaggatgaggaggagtactttgaggaggaggaggaggaggaggaggagtttgaggaggagtttgaggaggaggagggggagctggaggaggaggaggaggaggaggatgaggaggaggaggaggagctggaggaggtggagcgggagggggagagccctgctgctggccccccaccccaggagctggtggaggaggagcccagcgccccacccaccctgctggaggaggagacagaagatggcagtgacaaggtgcagcccccacctgagaccccagctgaggaggagatggagacagaaacagaggccgaggccctgcaggagaaggagcaggatgacacagctgccatgctggccgacttcatcgactgccccccagatgatgagaagcccccaccacccacagagccagacagctag

SEQ ID NO: 97917 - DNA, 879 bp, Artificial Sequence
  derived and/or modified sequence
atgcagcccagccgggaggccctggagctgcggggcctgcccaagtctgtgtccacagtgagcagcaccaagccacccctgaccacccccagcagcaccaaccccagccggcagctggccctggaggactgtgtgcagctgcgggccgccctggacctgggctacggccctgagtgctgctgccaccacctgcctgaggtggcccacaagagcagcgccagcgctggggcccccagcgcccggctgcccctgcagccccacagcctgggcaccaggaccaagctgccccccagcctgtgcctgcccggccctggccgcacccggctgaccacagagcccttccctggggcccccttctgcagcgacagctgcagccctgccctgtgctgcgtgctgctgaccccaggccggggccggggctctgtggcccccctgggcagcagccaggacggccggggcggctgctgccccacagacacagtgcctgctgcccagggcatggatgcctcctggacagtggccccagcccaggagtggctgggccaccccctgcagagctgcccccagagcgccagccggggccacctgcccctgcccctgcccacccccaccaccccctgcatcagccagcccccaggccgccgctgccggccccactgtgggaaggagctgttccgggcccctggggccctgcacttcctgccccggcggcaccctgctgctgtgcgccaccgctggacccgggcctgcccagagggccccaggatgcacatcccccagggctggctgctgagcagccccagcctgctgacagactggttctccatggacagcttcaagccacccagcctggccagcggccagatcagcaagacctag

SEQ ID NO: 97918 - DNA, 2721 bp, Artificial Sequence
  derived and/or modified sequence
atggagctggccgtggccgtgctgcgggacctgctgcggtacgccgctcagctccctgccctctttcgcgatatatcgatgaaccacttgccaggactgctgactagcttactcggattgcgacccgaatgcgaacagagcgcgctggaggggatgaaggcctgtatgacctacttccccagagcctgcgggagcctgaagggtaagctggcatcattttttcttagtcgggtcgatgctctcagcccgcaactccaacagctggcctgcgagtgttactctcgcctaccctctctcggagcaggatttagccagggcctaaagcacacagagagctgggaacaagaactgcattccctgctggcaagtttacacacgctccttggcgcactgtacgagggagccgaaacagcgccagtgcagaacgaaggccctggggtggagatgttgttatcttccgaggatggcgatgcccacgttctgcttcaactgcgtcaaagattctccggcctcgccaggtgtctgggactgatgctgtcctcggagttcggagccccggtgtccgtgccagtgcaagagatcctggatttcatctgcagaacattgagcgtgtccagtaagaacatcagtttgcacggggacggaccactccggttgttactgttgccatcaattcatctggaagctctggacctattatctgctctcattttggcatgcggctccaggttgttgcggtttggaatcctgatcggacgcctgctgccacaggtcctgaacagttggtctataggacgggattcactatcaccgggccaggagaggccatactctaccgttagaacgaaggtgtacgcaattctcgaactttgggtgcaggtttgcggggctagcgctggaatgcttcaaggaggcgccagtggcgaagctctcctgacccacctgctgagcgacatttccccccccgcggatgctcttaagctccgtagtccacgggggagccccgacggttccctgcagacaggtaaaccaagtgctcctaaaaagctgaaactagacgtcggtgaagccatggcccctccctcgcaccgcaagggagattcaaacgctaactccgatgtttgcgcagcagcccttcgcgggttgagccgaactatcctgatgtgtgggcccctcatcaaggaagagacgcaccggagactgcatgacctagtgttgcctctggttatgggcgttcagcagggagaggtacttgggtcctccccatataccagctctcggtgccggcgggagttatactgcctgttgttggccttacttctcgctccctcaccaagatgcccacctcctttagcctgcgctctccaggccttttcgttgggccaaagggaggactccctcgaggtctcgtccttttgctcagaggctctggtgacgtgcgctgcactgacacaccccagggtgcccccactccaacctatgggccctacctgtccgacaccagcaccagtgcctccccctgaggctccatctccctttcgagcaccaccattccacccccccggcccaatgccatctgtggggagtatgccatcagccggccccatgccgagcgcaggtccgatgccctctgctggccctgttccatcggcacgcccaggcccacctacaaccgccaatcatttagggctgtcagtgcccggcctggtgtcagtgcctccaagactcctgcccggccctgagaatcaccgggcgggcagcaacgaggatcccattttagcacctagtggcactccaccgccaaccatcccccccgatgagactttcgggggacgggtgccccgcccagcctttgtccactacgacaaagaggaagctagcgacgtagaaattagtctagaaagtgacagcgacgattccgtcgtgatcgtgcccgagggtctgcctccactgcctcctccccctccctccggggccacgccccctccgattgcacctacaggcccacccaccgcaagtccgcccgtgccggccaaagaggagcccgaagaattacccgccgcgcctggtccactgcctccccccccgcccccccctccacccgtcccgggcccagttacgctcccacccccccagctggtgcccgagggaacccctgggggcggcggcccccccgctctggaggaggacttgacagtgattaatattaatagctcagatgaggaagaggaggaagaagaagaggaggaggaggaagaggaggaagaggaggaggaggaagaggacttcgaggaagaggaggaggatgaggaggagtacttcgaggaagaagaggaagaagaggaggaatttgaagaagagttcgaggaggaagagggcgagctggaggaagaagaagaagaggaggacgaggaagaggaggaggaactggaagaagtggagcgggagggggaaagccctgctgcggggccccctccccaagagctggtggaggaggagccctcagctccacctacactacttgaggaggaaacagaggacggaagcgataaggtccagcccccacccgagactcccgcagaggaagagatggagaccgaaaccgaggctgaagctttgcaggaaaaggaacaggacgatactgctgctatgttggccgacttcatcgactgtccgccggatgacgagaaaccaccacctcctacagagccagactcctag

SEQ ID NO: 97919 - DNA, 2721 bp, Artificial Sequence
  derived and/or modified sequence
atggagttggccgtagcagttctcagagacctgttgaggtacgccgctcagctgcctgcactttttcgggacattagcatgaaccacttgccaggtctgctcacaagtctcctgggccttcggcctgagtgtgagcaatcagctttggagggcatgaaggcatgtatgacatatttcccccgtgcatgtggaagcctgaaagggaagctagcaagtttttttctgagtcgtgtggatgccctttcaccccagctccagcaactggcctgtgagtgttattcacggttacccagcctgggggctggattcagtcagggactgaagcacacggagtcgtgggagcaggagctgcactctcttctggctagccttcacacgttgttaggagcactgtatgagggggctgagaccgctcccgtgcaaaacgaagggcctggagtggaaatgctactgagctccgaagatggggacgcacatgtcctattgcagctcaggcaaagattttcgggcctcgcgaggtgcctgggattgatgctcagttccgagtttggcgctccagtcagcgtacctgtccaagaaatattggactttatttgtagaaccctgtcggtgtcttccaagaatatctccttgcatggcgacggacccctcagactgcttttgctcccaagcattcacctggaagcactcgaccttctctccgccttaatcttggcctgcggatcacgactcctgaggtttggaatattaattggacgattactgcctcaggtcctcaactcctggagcattgggagggactccctgtcccccggacaggagagaccttattcgacagtgaggacaaaagtatacgcaattttggaattgtgggtgcaggtatgcggcgcaagtgctggcatgcttcaggggggagcttccggggaggcgcttctgacccacctactgtctgatatttccccacccgctgatgccctcaagctcaggagccctagaggaagtcccgatggctcacttcagaccggaaagccctctgctcccaaaaaacttaagctggacgttggtgaggcaatggcccctccaagccaccggaaaggtgacagcaatgctaatagtgacgtctgtgcagctgccctgagaggcctgtctcgtaccatattgatgtgtgggccactcatcaaggaagagacccacagaaggctgcatgacctcgtgttacccctggtgatgggcgtgcaacagggggaggtcttaggaagcagtccatatacgtcttccagatgccggcgtgagctgtattgtcttttgttggcactgctgttggctccatcccccaggtgccccccacctctcgcctgcgccctgcaggcctttagtctgggtcagcgcgaggatagcctagaagtgtcctccttctgctctgaggctctggtgacctgcgcagctctgactcaccccagagtgcctccgctgcagccaatgggcccaacgtgcccgacgccagccccagttccgccaccagaagcaccctctccatttcgcgcacccccatttcacccccctggtcccatgcctagcgtgggcagtatgccatctgctggacctatgcctagcgcgggacccatgccctctgccggtcccgtaccatcagcccgaccagggcctcctactaccgctaaccacctcgggctatctgtgcccggtctggtgagtgtgcctcccagactccttccaggaccagagaaccatagagccggatcgaatgaggaccccatcctcgcaccctcaggcactcctccacccacaattccacccgacgagacctttggaggtcgtgttccacgcccagcgtttgtacactacgataaggaggaggcaagcgacgtggagatttctcttgagtcggactcggacgatagcgtggtgatcgtgcccgaaggtttaccccctctgcccccaccgccacccagcggggcaactccaccaccgattgctccaacgggtccgccaacagcctcaccacctgttcctgcaaaagaggagcctgaggagttaccagctgcaccaggccctttgcctccgcctcctccaccacctcccccagtcccaggtcccgtgactttacccccacctcagctcgttccggagggtactcccggaggcggaggacctccagctctcgaagaggatcttactgtgataaatataaacagttccgacgaggaagaagaggaggaggaggaggaagaggaggaggaagaggaggaggaagaggaggaagaagacttcgaggaggaagaggaggatgaagaggaatatttcgaagaagaagaagaagaggaggaagaattcgaggaggagttcgaggaggaggaaggagaactggaggaagaggaggaagaagaggacgaggaagaggaggaagaattagaagaggttgagcgagagggcgagtcaccagcagccggaccgcctcctcaggaactggtggaagaggagccatctgcccctcctactttattagaggaggaaacagaagatggtagtgataaggtgcagcctccccctgagacccccgctgaggaagagatggagaccgagacggaagcggaggctctgcaggagaaggagcaggatgatacagcggctatgcttgcagacttcatcgattgtccccctgacgacgagaaaccacctccacccaccgaaccagactcctag

SEQ ID NO: 97920 - protein, 264 aa, Artificial Sequence
  derived and/or modified sequence
MPVEEFVAGWISGALGLVLGHPFDTVKLLGFFKGMSFPIASIAVVNSVLFGVYSNTLLVLTATSHQERRAQPPSYMHIFLAGCTGGFLQAYCLAPFDLIKVRLQNQTEPRAQPGSPPPRYQGPVHCAASIFREEGPRGLFRGAWALTLRDTPTVGIYFITYEGLCRQYTPEGQNPSSATVLVAGGFAGIASWVAATPLDMIKSRMQMDGLRRRVYQGMLDCMVSSIRQEGLGVFFRGVTINSARAFPVNAVTFLSYEYLLRWWG

SEQ ID NO: 97921 - DNA, 795 bp, Artificial Sequence
  derived and/or modified sequence
atgcctgtggaggagtttgttgcaggatggatctccggagccctggggcttgtcctggggcacccttttgacaccgtgaagctgcttggatttttcaaaggaatgagttttcccatagcttccatcgccgtcgtgaatagcgttctgtttggggtctatagtaatacgttgttggttctgaccgccacctcacaccaggaaaggcgtgcccagcccccatcttatatgcatattttcctggcagggtgcaccggaggcttcctgcaagcctactgcttggccccctttgacctgatcaaagtgcgcctccaaaaccaaacggagcctagggcccagcccggttcccctccacctcgataccaaggccccgtgcattgtgccgcctccatcttcagggaggaagggccacggggtctgttccggggtgcatgggccttgacccttcgtgacacaccaacagttggaatctactttatcacctatgagggcctttgtcgacagtatacacctgagggacagaatccctcctcagctacagtcctagtcgcagggggattcgctggcattgccagttgggtggccgcaactcccttggacatgatcaaatccaggatgcagatggacggcctgcggcggagggtctatcaaggcatgcttgactgtatggtgtcctccattcggcaagaggggcttggggttttttttcggggggtaacaatcaacagcgcacgggcctttccagtcaatgcggtcaccttcctgtcctacgagtatctattgagatggtggggctag

SEQ ID NO: 97922 - DNA, 795 bp, Artificial Sequence
  derived and/or modified sequence
atgcctgtggaggagtttgtggccggctggatcagcggggccctgggcctggtgctgggccacccctttgacacagtgaagctgctgggcttcttcaagggcatgtccttccccatcgccagcattgctgtggtgaacagcgtgctgtttggagtgtacagcaacaccctgctggtgctgacagccaccagccaccaggagcggcgggcccagccccccagctacatgcacatcttcctggccggctgcaccggcggcttcctgcaggcctactgcctggccccctttgacctgatcaaggtgcggctgcagaaccagacagagccccgggcccagcccggcagccccccaccccgctaccagggccctgtgcactgtgccgccagcatcttccgggaggagggcccccggggcctcttccggggggcctgggccctgaccctgcgggacacccccaccgtgggcatctacttcatcacctatgagggcctgtgccggcagtacaccccagagggccagaaccccagcagcgccaccgtgctggtggccggcggctttgctggcatcgcctcctgggtggccgccacccccctggacatgatcaagagcaggatgcagatggatggcctgcggcggcgggtgtaccagggcatgctggactgcatggtgagcagcatccggcaggagggcctgggcgtcttcttccggggcgtgaccatcaacagcgcccgggccttccctgtgaatgctgtgaccttcctgtcctatgagtacctgctgcgctggtggggctag

SEQ ID NO: 97923 - DNA, 795 bp, Artificial Sequence
  derived and/or modified sequence
atgcccgtggaggagttcgtggccggctggatcagcggcgccctggggctcgtcctgggacatccctttgatactgtgaagctgttaggtttcttcaaaggaatgtcctttcccatagcaagtattgccgttgtaaacagtgtgctgttcggagtctattcaaatacccttttggtacttacagcaacaagccatcaggaacgtagggctcaaccacctagctatatgcacatctttctcgccggctgtaccggagggttcctgcaggcctactgcttggctccatttgacctgatcaaggtgagactgcagaaccagactgagccgcgcgcccagcctggtagtccccccccgagatatcagggtccggtgcattgtgcagcatccatattccgggaagagggcccgagagggttgtttcgtggcgcatgggcactcaccctgcgtgacacccctaccgtcgggatctattttattacctacgaggggttatgcagacaatacacccccgagggccagaatccgtcatctgctacagtgctcgttgcaggcggcttcgctggcatcgctagctgggtggcagccactccactcgacatgatcaaatcccgcatgcagatggacggtctgaggcggagggtgtaccagggaatgctggattgtatggtatctagcatccgacaggagggattgggtgtcttcttcaggggagttacaataaacagtgcgagggcgttccccgttaatgccgttacctttctgtcttacgagtacttgctgcgctggtgggggtag

SEQ ID NO: 97924 - DNA, 795 bp, Artificial Sequence
  derived and/or modified sequence
atgcccgtcgaggagttcgtcgctggctggataagtggggctcttggtctggtgctggggcatccttttgatactgtgaagctactcggtttctttaagggcatgtcatttcctattgcgtcaattgcagtggtcaattccgttttgttcggtgtttacagtaatacactgctcgtgcttacagctacttcacaccaagaaagacgggcacagcctcctagctacatgcatatctttcttgccggttgtacgggcggattccttcaagcctactgcctcgcaccgttcgacctgataaaggttcggctacagaatcagaccgaacctagggcacagccaggctctccgcctccacgatatcagggtcccgtgcactgtgctgcttccattttcagagaggaaggaccccgtggcttgtttaggggagcatgggcactcacactcagggacacccctacggttggcatctactttattacgtacgagggtctctgcaggcagtacactcctgagggacagaatcctagcagtgcgactgtgcttgtagccggaggcttcgctggtattgcctcctgggtggctgcaacaccactggatatgatcaagtcaaggatgcagatggatggactcagaagaagagtataccaggggatgctggactgcatggtgtctagtattcgtcaggaagggcttggagtcttttttaggggcgtaaccataaattccgccagggctttccctgtgaatgccgtgacattcctaagttacgaatacctgttgagatggtggggctag

SEQ ID NO: 97925 - DNA, 2214 bp, Artificial Sequence
  derived and/or modified sequence
agatccttgaaagggttttggttttgactgagcagaatggtgccattgcagatcaacacgcactttaaataatcaaaacccctatctttcccctgggaaggaggaagccgaggaaggctgtgtttctgactcacacgggggagtcgggggagtcgtaaacaaccctgaagagaacagccaggcctgttcccgcaagcccagacaatgccggtggaggaatttgtggctggctggatctctggcgctctgggcttggtcctgggacacccgtttgacactgtaaagctcctgggcttcttcaagggaatgagcttccccattgccagcatagctgtggtcaactctgtcctgtttggggtctatagcaacaccctgctggtgctcacggccacctcccaccaggagcggcgggcccagccgcccagctacatgcacatcttcctagcgggctgcaccggggggttcctgcaggcctactgtctggctccttttgacctcatcaaagtccggctacaaaaccagacagagccaagggcccagccagggagccccccaccccggtaccaggggcccgtgcactgtgcagcctccatcttccgggaggaggggccccgggggctgttccgaggagcctgggccctgacgctgagggacacccccacggtggggatctacttcatcacctatgaagggctctgtcgccagtacacaccagaaggccagaatcccagctcagccacggtgctggtggcagggggctttgcaggcattgcttcctgggtggcagccacgcccttagacatgatcaagtcccggatgcagatggatggactgagacgcagagtgtaccaggggatgctggactgcatggtgagcagcatccggcaggaaggactgggagtcttcttccggggggtcaccatcaacagtgcccgcgcctttcccgtcaatgctgtcaccttcctcagctacgaatatctcctccgctggtggggatgagccctgcggcaatgccagcagctccccatcaggcccacggcctggaggccagtttgagattggaggccaggttgaaagcttgcaaatcagtgcaagaggctcagcccttcctaaccaaggtgcctcccacccgcgcagatctgggctgggcagacacctgtgggagccggaagccagggggcctgtgcagcctccctgtgtagctggccttgactcctttgcctcccacatctgtgaaacagggagcatgaggcacaagtgagctggcaagtggtgctggtgacatcccagctcctgtcctgtgccttcacctctttttttttttttttttttttttgagatggagtctttctctgtcacccaggctggaatgcagtggcgtgatctcggctcactgcaacctccgcctttccaccttccgggttcaagcaactctcctgcctcagcctcccaagtagctgggactataggcgcccgccaccacacccagctaaatttttgtatttttagtagagacagggtttcaccatgtcagccaggatggtcttgatctcctgactttgtgatccgcccgcgtcggcctctcaaagtgctgggattacaggcgtgagccaccgcgcccggctgccttcacctcttaaggagctctgagactccacttctgagagtccctgcggcctcccacctccctgcctttcaaagctctctcccccatgacccaggataaccctatgtctcctcccccagaatccttcagtggctctcatcaccttcaggaaaagcccaaactccttccaccctccaggttcctccctccccacgaggctttgttctcctggggttgcttcctggaccctgaacaagttgtgctctcattggccgggcctggccagcagtgcacagtgcctggcaggttgactctaccatccccggggctggccccgctctcctccgagacccaggctgagcccagtcccctcacccttccttgacttacctccccacctgaggctgactttggggttcccagacaccctacccacacacatgccttgatcatagcacttgcctgcgcttcttcagagtcattaatttgcttctcggcttccccactggactgtgagctgcctgaggtcagggattgcgctttggatggtttccagcctgagcctggtgcttgaacagacgtgtgcaataaatgctcgttaaatgatg

SEQ ID NO: 97926 - DNA, 795 bp, Artificial Sequence
  derived and/or modified sequence
atgcccgtggaggagttcgtggccggctggatcagcggcgccctgggcctggtgctgggccaccccttcgacaccgtgaagctgctgggcttcttcaagggcatgagcttccccatcgccagcatcgccgtggtgaacagcgtgctgttcggcgtgtacagcaacaccctgctggtgctgaccgccaccagccaccaggagagaagagcccagccccccagctacatgcacatcttcctggccggctgcaccggcggcttcctgcaggcctactgcctggcccccttcgacctgatcaaggtgagactgcagaaccagaccgagcccagagcccagcccggcagccccccccccagataccagggccccgtgcactgcgccgccagcatcttcagagaggagggccccagaggcctgttcagaggcgcctgggccctgaccctgagagacacccccaccgtgggcatctacttcatcacctacgagggcctgtgcagacagtacacccccgagggccagaaccccagcagcgccaccgtgctggtggccggcggcttcgccggcatcgccagctgggtggccgccacccccctggacatgatcaagagcagaatgcagatggacggcctgagaagaagagtgtaccagggcatgctggactgcatggtgagcagcatcagacaggagggcctgggcgtgttcttcagaggcgtgaccatcaacagcgccagagccttccccgtgaacgccgtgaccttcctgagctacgagtacctgctgagatggtggggctag

SEQ ID NO: 97927 - DNA, 1338 bp, Artificial Sequence
  derived and/or modified sequence
atgaacaagggcatcagcagcatccccatcaacctgagagtgtacagcccccacgtgctgaacctgaccctgatcgacctgcccggcatcaccaaggtgcccgtgggcgaccagccccccgacatcgagtaccagatcagagagatgatcatgcagttcatcaccagagagaactgcctgatcctggccgtgacccccgccaacaccgacctggccaacagcgacgccctgaagctggccaaggaggtggacccccagggcctgagaaccatcggcgtgatcaccaagctggacctgatggacgagggcaccgacgccagagacgtgctggagaacaagctgctgcccctgagaagaggctacgtgggcgtggtgaacagaagccagaaggacatcgacggcaagaaggacatcaaggccgccatgctggccgagagaaagttcttcctgagccaccccgcctacagacacatcgccgacagaatgggcaccccccacctgcagaaggtgctgaaccagcagctgaccaaccacatcagagacaccctgcccaacttcagaaacaagctgcagggccagctgctgagcatcgagcacgaggtggaggcctacaagaacttcaagcccgaggaccccaccagaaagaccaaggccctgctgcagatggtgcagcagttcgccgtggacttcgagaagagaatcgagggcagcggcgaccaggtggacaccctggagctgagcggcggcgccaagatcaacagaatcttccacgagagattccccttcgagatcgtgaagatggagttcaacgagaaggagctgagaagagagatcagctacgccatcaagaacatccacggcatcagaaccggcctgttcacccccgacatggccttcgaggccatcgtgaagaagcagatcgtgaagctgaagggccccagcctgaagagcgtggacctggtgatccaggagctgatcaacaccgtgaagaagtgcaccaagaagctggccaacttccccagactgtgcgaggagaccgagagaatcgtggccaaccacatcagagagagagagggcaagaccaaggaccaggtgctgctgctgatcgacatccaggtgagctacatcaacaccaaccacgaggacttcatcggcttcgccaacgcccagcagagaagcagccaggtgcacaagaagaccaccgtgggcaaccaggtgatcagaaagggctggctgaccatcagcaacatcggcatcatgaagggcggcagcaagggctactggttcgtgctgaccgccgagagcctgagctggtacaaggacgacgaggagaagtag

SEQ ID NO: 97928 - DNA, 1338 bp, Artificial Sequence
  derived and/or modified sequence
atgaacaagggcattagcagtattcccattaacctacgagtgtacagtccacacgtgctgaatctcactctgattgacttacccggaataacaaaggtccccgttggggaccagcctccagatattgagtatcaaattcgtgagatgatcatgcagttcatcactcgggagaattgcctgatcctggccgtaactcccgcgaataccgatctggcaaattctgatgcacttaaattggccaaagaggtggatccacaggggctacggacaatcggggtgatcacaaagctggacctcatggatgagggtactgacgctcgggatgtgttggagaataagttgttgcctctgcgcagagggtatgtgggtgtagtgaaccggtcccagaaggatattgatggcaagaaggacatcaaagcggccatgctggccgaacgcaagttcttcttatcgcacccagcctatcgccacatagcagatcgcatgggaactcctcatttacaaaaggtgcttaaccaacagctgacaaaccacatccgggatacactgcctaatttcagaaacaaattacaaggacaactcctatccatcgaacacgaggtggaagcctataaaaatttcaagcccgaggacccgaccaggaagacgaaagccttactccaaatggtgcaacagtttgccgtggacttcgagaaacgcattgaaggctctggcgatcaagtggacacgctggaactgtccggtggggctaagatcaatagaatcttccacgagcgatttccatttgagattgtcaagatggaattcaacgagaaagaactcagacgcgaaatttcttatgcaataaaaaacatccacggaatccgaacaggattgttcacccctgatatggctttcgaagcaattgtaaagaaacagatcgtcaaactgaagggtccatccctgaaatcagtggacctggtcatccaggagcttatcaacacggtaaagaagtgtaccaagaagttagccaacttccctcggttgtgcgaggagacagagaggattgtcgcaaaccatattcgggagagagaagggaagactaaggatcaagtgcttcttttgattgacattcaggttagctacatcaacacaaaccatgaggactttattggattcgccaatgcccagcagaggagtagccaggtgcataagaagactaccgtcggcaaccaggtcatccgcaaaggctggctgacgatttcgaacatcgggatcatgaaaggtggatctaagggctactggttcgtattgaccgctgaaagcctctcttggtacaaggatgatgaggagaaatag

SEQ ID NO: 97929 - DNA, 1338 bp, Artificial Sequence
  derived and/or modified sequence
atgaacaagggcatcagcagcatccccatcaacctgcgggtgtacagcccccacgtgctgaacctgaccctgattgacctgcccggcatcaccaaggtgcctgtgggggaccagcccccagacatcgagtaccagatccgggagatgatcatgcagttcatcacccgggagaactgcctgatcctggccgtgaccccagccaacacagacctggccaacagtgatgccctgaagctggccaaggaggtggacccccagggcctgcggaccatcggggtcatcaccaagctggacctgatggatgagggcacagatgccagagatgtgctggagaacaagctgctgcccctgcggcggggctacgtgggcgtggtgaacagaagccagaaggacattgatggcaagaaggacatcaaggccgccatgctggccgagaggaagttcttcctgagccacccagcctaccgccacatcgctgacaggatgggcaccccccacctgcagaaggtgctgaaccagcagctgaccaaccacatccgggacaccctgcccaacttcaggaacaagctgcagggccagctgctgagcattgaacatgaggtggaggcctacaagaacttcaagccagaggaccccaccaggaagaccaaggccctgctgcagatggtgcagcagtttgctgtggactttgagaagagaattgagggcagcggggaccaggtggacaccctggagctgtctggaggagccaagatcaaccgcatcttccacgagcgcttcccctttgagatcgtgaagatggagttcaatgagaaggagctgcggcgggagatctcctatgccatcaagaacatccacggcatcagaacaggcctcttcaccccagacatggcctttgaggccatcgtgaagaagcagatcgtgaagctgaagggccccagcctgaagtctgtggacctggtgatccaggagctgatcaacacagtgaagaagtgcaccaagaagctggccaacttcccccggctgtgtgaggagacagaaagaattgtggccaaccacatccgggagcgggagggcaagaccaaggaccaggtgctgctgctgattgacatccaggtgtcctacatcaacaccaaccacgaggacttcatcggctttgccaatgcccagcagaggagcagccaggtgcacaagaagaccaccgtgggcaaccaggtgatcaggaagggctggctgaccatcagcaacatcggcatcatgaagggcggcagcaagggctactggtttgtgctgacagctgagagcctgtcctggtacaaggatgatgaggagaagtag

SEQ ID NO: 97930 - DNA, 1338 bp, Artificial Sequence
  derived and/or modified sequence
atgaacaagggcatcagcagcatccccatcaacctgcgggtgtactccccccacgtgctcaacctcactctcattgatctccccgggattactaaagtgccagttggtgatcagccaccggatattgaataccagataagggaaatgatcatgcagtttattactagggaaaactgccttatcctagcggtgactcccgcaaatactgacttggctaacagtgacgccctgaagctcgccaaggaggtcgacccacagggcctgcgcactattggggtaatcaccaagttagatcttatggatgaggggactgatgctcgggatgtgctcgaaaacaagttgctgcccctccgacgcggctacgtgggggtggtaaacagaagccagaaagacatcgacggcaagaaagacattaaggccgcgatgcttgcagagcgtaagttctttctatctcaccccgcttaccgtcacatcgccgacagaatggggacacctcatttgcaaaaagtgctgaatcagcagctcacaaatcacattagagacactcttcccaacttccggaataagttacagggacagctcttgagtatagagcacgaagtcgaggcttacaaaaatttcaaaccagaggacccaactcgcaagactaaagctttactgcagatggttcagcagttcgcggttgatttcgagaagagaatcgaagggtcaggagaccaggtggacaccctggagctatcgggcggagcgaagattaaccgaatcttccatgaacgcttcccattcgagatcgtcaagatggagttcaatgagaaggaactgcggcgggaaatcagttacgcaatcaaaaacattcacggtatccgaaccggcctgttcactccagatatggctttcgaagcaattgtgaagaagcaaatcgttaagctgaagggcccctctctgaagagtgtagatctagtgatacaggaactcattaacaccgtgaagaagtgcacaaagaaacttgcaaattttcccaggctctgcgaagaaactgaaaggattgtcgccaatcacatccgggaacgcgagggaaaaaccaaagaccaggtgcttctactgatcgacattcaggtgtcttacattaacacaaaccacgaagatttcattggctttgccaatgcccagcaacgttcttcccaagtccacaagaaaaccacagtgggaaatcaggtgatccgtaaggggtggttgacaatatcaaatatcggcatcatgaaagggggctctaaaggatactggtttgtgctcacggccgagtccctcagttggtacaaagatgatgaggagaagtag

SEQ ID NO: 97931 - DNA, 1338 bp, Artificial Sequence
  derived and/or modified sequence
atgaacaaaggtattagtagtatcccgatcaacctgagggtgtacagtccacacgtgttgaacctgacccttatagaccttcccggtattacaaaagtcccggtaggcgaccagccccctgatattgagtatcagatccgggaaatgataatgcaatttatcacaagagagaactgcctaattctggcagtgaccccagcaaatacggacctggccaatagcgatgccttaaagctggccaaggaggtcgatccacagggactgagaacgatcggtgtgatcaccaagctggatctaatggacgaaggtaccgatgccagagacgtgctagaaaataagctcctccctcttcgcagaggttatgtcggcgttgtcaatcgcagccaaaaagacatagatggtaagaaagatattaaggccgctatgctggcagaaagaaagttttttctgtcacatccagcttaccggcacatagccgatcgaatgggcacacctcatcttcagaaggtactgaatcaacaactcacaaatcatatacgagatacacttcctaactttagaaacaagctccagggtcaactgctgtctattgagcatgaggtggaggcatacaagaattttaagccagaggatccaacacgcaaaactaaggcgcttcttcagatggtccagcagttcgctgttgactttgaaaaacgaatcgagggctctggagaccaggtggacacactggagctgagcggaggagcaaagatcaaccggatttttcatgagcggtttccattcgaaatcgtgaagatggagtttaatgagaaagagctccggcgagagatttcctatgccatcaagaatatccacggtattaggaccggactgttcacgcccgatatggctttcgaggccatcgtcaaaaaacagattgtgaaactcaaaggcccaagtctcaagtcagtggacttggtaatccaggagctgataaacactgtcaagaaatgcacaaaaaaactcgccaacttcccccgactctgtgaggaaacagagaggatcgtggctaatcacatcagagagcgtgaagggaagaccaaggaccaggtgctccttctgatcgatattcaggtatcctacattaacactaatcatgaggacttcatcggatttgccaatgcacagcagagatcatctcaagtgcacaaaaaaaccacagttggtaatcaggtgatccgaaaaggctggctgacgatctctaacattggcatcatgaagggagggtcaaaaggttactggtttgtgctcaccgccgagtctctgtcttggtacaaagatgacgaagagaaatag

SEQ ID NO: 97932 - protein, 249 aa, Artificial Sequence
  derived and/or modified sequence
MNPSPSKIRINLEDNVQYVSMRKALKVKRPRFDVSLVYLTRKFMDLVRSAPGGILDLNKVATKLGVRKRRVYDITNVLDGIDLVEKKSKNHIRWIGSDLSNFGAVPQQKKLQEELSDLSAMEDALDELIKDCAQQLFELTDDKENERLAYVTYQDIHSIQAFHEQIVIAVKAPAETRLDVPAPREDSITVHIRSTNGPIDVYLCEVEQGQTSNKRSEGVGTSSSESTHPEGPEEEENPQQSEELLEVSN

SEQ ID NO: 97933 - protein, 206 aa, Artificial Sequence
  derived and/or modified sequence
MDLVRSAPGGILDLNKVATKLGVRKRRVYDITNVLDGIDLVEKKSKNHIRWIGSDLSNFGAVPQQKKLQEELSDLSAMEDALDELIKDCAQQLFELTDDKENERLAYVTYQDIHSIQAFHEQIVIAVKAPAETRLDVPAPREDSITVHIRSTNGPIDVYLCEVEQGQTSNKRSEGVGTSSSESTHPEGPEEEENPQQSEELLEVSN

SEQ ID NO: 97934 - DNA, 750 bp, Artificial Sequence
  derived and/or modified sequence
atgaacccaagtcctagcaagatccgaattaatctggaggacaacgtccagtacgtatctatgagaaaagctctaaaggtaaaacgacctaggttcgacgtctccctggtgtatttaacacggaagttcatggatctggtgcgatcggccccaggcggcattctggacctgaataaggtcgccaccaagctcggtgttcggaagcgacgagtgtacgacattaccaatgtgctggacggcatagacttggtggaaaagaagagcaagaaccatattagatggatcggttctgatttaagtaatttcggagctgtgcctcaacagaaaaaactccaggaagagttgagcgatctctcagcgatggaggacgctctggatgaactcatcaaagattgtgctcaacagctgtttgagctcaccgacgataaagagaacgaacggctggcctatgtaacttatcaagacattcatagtatacaggcctttcatgaacagatcgttattgcagtgaaagcccccgctgaaactcggctcgatgtcccagcaccaagggaggacagcattacagtgcacatcaggtcaacaaatggtcccattgacgtgtatctatgcgaagtagagcagggccagacaagcaacaagcgatctgagggcgtgggaacatcctccagcgaatctacacacccagaggggccagaagaagaggagaacccacaacagagcgaagagctcttggaagtctctaattag

SEQ ID NO: 97935 - DNA, 750 bp, Artificial Sequence
  derived and/or modified sequence
atgaaccccagccccagcaagatccgcatcaacctggaggacaacgtgcagtatgtgtccatgaggaaggccctgaaggtgaagaggcccaggtttgatgtgtccctggtgtacctgaccaggaagttcatggacctggtgcgcagcgcccctgggggcatcctggacctgaacaaggtggccaccaagctgggcgtgaggaagagaagagtgtatgacatcaccaacgtgctggatggcatcgacctggtggagaagaagagcaagaaccacatccgctggattggaagtgacctgagcaactttggagctgtgccccagcagaagaagctgcaggaggagctgagtgacctgagcgccatggaggatgccctggatgagctgatcaaggactgtgcccagcagctgtttgagctgacagatgacaaggaaaatgaaaggctggcctacgtgacctaccaggacatccacagcatccaggccttccacgagcagatcgtgattgctgtgaaggccccagctgagacccggctggatgtgcctgcccccagagaagattccatcaccgtgcacatccgcagcaccaacggccccattgatgtgtacctgtgtgaggtggagcagggccagaccagcaacaagaggtctgagggcgtgggcaccagcagcagcgagagcacccaccctgagggccctgaggaggaggagaacccccagcagagcgaggagctgctggaggtgagcaactag

SEQ ID NO: 97936 - DNA, 750 bp, Artificial Sequence
  derived and/or modified sequence
atgaaccccagccccagcaagatccggatcaacctggaggacaacgtacagtatgtcagtatgaggaaggctctcaaggttaagagaccacgctttgacgtgtctctcgtctacttgacacgcaagtttatggatctggtacgctccgctcctggaggcatcctggatttgaataaagtcgccaccaaactcggtgtcaggaaacgccgggtgtacgatatcaccaacgtgctcgacggcatcgatttggtggagaaaaagtcgaagaaccatatcaggtggatcggcagtgacttgagcaacttcggcgccgtcccccagcagaagaagctccaggaagagctatcagacctgtcagcaatggaggacgctttggatgaactaatcaaagattgtgcgcaacaacttttcgagctgactgatgataaggaaaacgaacgtctagcatacgtcacttaccaagatattcacagtatccaggcgttccacgaacaaatcgtgatcgcagtaaaagctcccgctgagacacggctcgatgtgcccgccccgcgggaggactctatcactgttcacatcaggtcgacaaacggccctattgatgtatacctgtgcgaagtggagcagggacagacctctaataagaggtccgaaggggtgggaaccagcagcagcgagtctacacaccctgaggggcctgaggaggaagaaaacccgcaacagagtgaggaactgttggaggtctcaaattag

SEQ ID NO: 97937 - DNA, 750 bp, Artificial Sequence
  derived and/or modified sequence
atgaatcccagccctagcaagattcgaataaacctcgaggacaatgttcagtatgtctcaatgcggaaagctttgaaagtgaagaggccacgttttgatgttagcctggtttatctgacgcggaaatttatggacttagtgcgtagtgcaccaggaggtattctggacctgaacaaagtggcgacaaaacttggagtacgaaaaaggcgggtgtacgatatcaccaacgtcctggacggaattgatctcgtggaaaagaaatctaagaaccacatacgatggatcggctctgatctgagcaactttggagccgttccacaacagaaaaagctccaggaggaattgtctgacctctccgccatggaggatgcactggatgagctgatcaaggactgcgctcagcagttgttcgagcttacagatgataaagaaaacgagcggctggcttacgtcacgtatcaggatatccactcaatccaggcctttcacgaacaaatcgtgatcgccgtgaaagcgccagcagagacgcggcttgacgttcctgccccaagagaagatagtatcactgtccacatccgctccactaacggtccaatagatgtctacctttgcgaagtagaacaggggcagacctccaacaaacggagcgagggcgtgggtacatctagctccgaaagcacacatccggaaggtccagaagaagaagagaaccctcagcaatcagaagagttgctggaggtgtcaaattag

SEQ ID NO: 97938 - DNA, 917 bp, Artificial Sequence
  derived and/or modified sequence
atgagtcagcagcggccggcgaggaagttacccagtctcctcctggacccgacggaggagacggttcgccgtcggtgccgagaccccatcaacgtggagggcctgctgttgtttattcaggcaaatctggcttgctgggctaggctcagctgagggctgccttcgccatgaatccttctccatcaaaaataaggattaatttagaagataatgtacaatatgtgtccatgagaaaagctctaaaagtgaagagacctcgttttgatgtatcgctggtttatttaactcgaaaatttatggatcttgtcagatctgctcccgggggtattcttgacttaaacaaggttgcaacgaaactgggagtccgaaagcggagagtgtatgacatcaccaatgtcttagatggaatcgacctcgttgaaaagaaatccaagaaccatattagatggataggatctgatcttagcaattttggagcagttccccaacaaaagaagctacaggaggaactttctgacttatcagcaatggaagatgctttggatgagttaattaaggattgtgctcagcagctgtttgagttaacagatgacaaagaaaatgaaagactagcatatgtgacctatcaagacattcatagcattcaggccttccatgaacagatcgtcattgcagttaaagctccagcagaaaccagattggatgttccagctcccagagaagactctatcacagtgcacataaggagcaccaacggacctatcgatgtctatttgtgtgaagtggagcagggtcagaccagtaacaaaaggtctgaaggtgtcgggacctcttcatctgagagcactcatccagaaggccctgaggaagaagaaaatcctcagcaaagtgaagaattgcttgaagtaagcaactga

SEQ ID NO: 97939 - DNA, 1050 bp, Artificial Sequence
  derived and/or modified sequence
atgagtcagcagcggccggcgaggaagttacccagtctcctcctggacccgacggaggagacggttcgccgtcggtgccgagaccccatcaacgtggagggcctgctgttgtttattcaggcaaatctggcttgctgggctaggctcagctgagggctgccttcgccatgaatccttctccatcaaaaataaggattaatttagaagataatgtacaatatgtgtccatgagaatgtaggaatgggctccagagagaagacatttatattatgaaatatgtacctttgttcctgaagtaaccgccagtggtctttaaactaaatgtgacattgtggaggttctgagtaaggacatttctgactgaagaagctctaaaagtgaagagacctcgttttgatgtatcgctggtttatttaactcgaaaatttatggatcttgtcagatctgctcccgggggtattcttgacttaaacaaggttgcaacgaaactgggagtccgaaagcggagagtgtatgacatcaccaatgtcttagatggaatcgacctcgttgaaaagaaatccaagaaccatattagatggataggatctgatcttagcaattttggagcagttccccaacaaaagaagctacaggaggaactttctgacttatcagcaatggaagatgctttggatgagttaattaaggattgtgctcagcagctgtttgagttaacagatgacaaagaaaatgaaagactagcatatgtgacctatcaagacattcatagcattcaggccttccatgaacagatcgtcattgcagttaaagctccagcagaaaccagattggatgttccagctcccagagaagactctatcacagtgcacataaggagcaccaacggacctatcgatgtctatttgtgtgaagtggagcagggtcagaccagtaacaaaaggtctgaaggtgtcgggacctcttcatctgagagcactcatccagaaggccctgaggaagaagaaaatcctcagcaaagtgaagaattgcttgaagtaagcaactga

SEQ ID NO: 97940 - DNA, 791 bp, Artificial Sequence
  derived and/or modified sequence
atgagtcagcagcggccggcgaggaagttacccagtctcctcctggacccgacggaggagacggttcgccgtcggtgccgagaccccatcaacgtggagggcctgctgaagctctaaaagtgaagagacctcgttttgatgtatcgctggtttatttaactcgaaaatttatggatcttgtcagatctgctcccgggggtattcttgacttaaacaaggttgcaacgaaactgggagtccgaaagcggagagtgtatgacatcaccaatgtcttagatggaatcgacctcgttgaaaagaaatccaagaaccatattagatggataggatctgatcttagcaattttggagcagttccccaacaaaagaagctacaggaggaactttctgacttatcagcaatggaagatgctttggatgagttaattaaggattgtgctcagcagctgtttgagttaacagatgacaaagaaaatgaaagactagcatatgtgacctatcaagacattcatagcattcaggccttccatgaacagatcgtcattgcagttaaagctccagcagaaaccagattggatgttccagctcccagagaagactctatcacagtgcacataaggagcaccaacggacctatcgatgtctatttgtgtgaagtggagcagggtcagaccagtaacaaaaggtctgaaggtgtcgggacctcttcatctgagagcactcatccagaaggccctgaggaagaagaaaatcctcagcaaagtgaagaattgcttgaagtaagcaactga

SEQ ID NO: 97941 - DNA, 750 bp, Artificial Sequence
  derived and/or modified sequence
atgaaccccagccccagcaagatcagaatcaacctggaggacaacgtgcagtacgtgagcatgagaaaggccctgaaggtgaagagacccagattcgacgtgagcctggtgtacctgaccagaaagttcatggacctggtgagaagcgcccccggcggcatcctggacctgaacaaggtggccaccaagctgggcgtgagaaagagaagagtgtacgacatcaccaacgtgctggacggcatcgacctggtggagaagaagagcaagaaccacatcagatggatcggcagcgacctgagcaacttcggcgccgtgccccagcagaagaagctgcaggaggagctgagcgacctgagcgccatggaggacgccctggacgagctgatcaaggactgcgcccagcagctgttcgagctgaccgacgacaaggagaacgagagactggcctacgtgacctaccaggacatccacagcatccaggccttccacgagcagatcgtgatcgccgtgaaggcccccgccgagaccagactggacgtgcccgcccccagagaggacagcatcaccgtgcacatcagaagcaccaacggccccatcgacgtgtacctgtgcgaggtggagcagggccagaccagcaacaagagaagcgagggcgtgggcaccagcagcagcgagagcacccaccccgagggccccgaggaggaggagaacccccagcagagcgaggagctgctggaggtgagcaactag

SEQ ID NO: 97942 - DNA, 621 bp, Artificial Sequence
  derived and/or modified sequence
atggatctggtgcgcagcgccccaggcgggatcctggaccttaataaagtggctaccaaactgggagtgcgcaagagacgagtatacgatatcacaaacgtacttgacggtattgatcttgtagagaaaaaatcaaaaaatcacattagatggatcgggagcgatttgtctaactttggagcggtgcctcagcagaaaaagcttcaagaagagctttcagacctgagcgctatggaagacgcactggacgaactcataaaggattgtgctcaacagctgttcgagctgaccgatgacaaggaaaatgaacggctagcatatgtgacctatcaggatattcactcaattcaggcattccatgagcagattgtgattgctgtgaaggcaccggcagagacccggcttgatgtgcctgcgcccagggaggactctatcactgtacacattcggtccacaaacggtccaatagacgtttatctttgcgaagtagaacaggggcagaccagcaacaaaagatccgaaggtgtcgggacaagttcctccgagagcactcacccagagggaccagaggaagaggagaatcctcagcaatctgaggagcttcttgaggtctccaactag

SEQ ID NO: 97943 - DNA, 621 bp, Artificial Sequence
  derived and/or modified sequence
atggatctggtgagaagcgctccgggtggtattctggacttaaacaaagtcgcgactaagctgggagtgaggaaaaggagagtctatgacatcacgaacgtgctggacggtatcgacctcgttgaaaaaaagtcaaaaaaccacatcagatggattggctccgatctctccaatttcggggccgtcccccaacaaaaaaagcttcaggaagagctgtcagacttgagtgcaatggaagatgcgctggatgagctgataaaggactgcgctcagcagctgtttgaactcactgacgacaaggagaacgagcgtctggcttacgttacctaccaggatattcacagcattcaggcctttcatgagcagatcgtgattgcggtgaaagcccctgccgagactcggctggacgtgcctgctcccagggaagacagcatcaccgtgcacatccgctctaccaatggcccaattgatgtctatctctgcgaggtggagcaggggcagactagtaacaaaaggagcgaaggcgtaggaacatcttcttccgaaagtacacaccccgagggccccgaagaggaggagaacccccagcagtcagaggaattgctggaggtgtctaactag

SEQ ID NO: 97944 - DNA, 621 bp, Artificial Sequence
  derived and/or modified sequence
atggacctggtgcgcagcgcccctgggggcatcctggacctgaacaaggtggccaccaagctgggcgtgaggaagagaagagtgtatgacatcaccaacgtgctggatggcatcgacctggtggagaagaagagcaagaaccacatccgctggattggaagtgacctgagcaactttggagctgtgccccagcagaagaagctgcaggaggagctgagtgacctgagcgccatggaggatgccctggatgagctgatcaaggactgtgcccagcagctgtttgagctgacagatgacaaggaaaatgaaaggctggcctacgtgacctaccaggacatccacagcatccaggccttccacgagcagatcgtgattgctgtgaaggccccagctgagacccggctggatgtgcctgccccccgggaggacagcatcaccgtgcacatccgcagcaccaacggccccattgatgtgtacctgtgtgaggtggagcagggccagaccagcaacaagagaagtgaaggagtgggcaccagcagcagcgagagcacccaccctgagggccctgaggaggaggagaacccccagcagagcgaggagctgctggaggtgagcaactag

SEQ ID NO: 97945 - DNA, 621 bp, Artificial Sequence
  derived and/or modified sequence
atggacctggtgcggagcgcccccggcggcatcctggacctgaacaaggttgctactaagctcggcgtccgtaaacggcgtgtgtatgacattactaatgtattagatgggatcgacctggttgagaagaagtcaaagaatcatatccgctggatcggcagcgatctgagtaacttcggcgccgtgcctcagcagaagaagctgcaggaggaactttcagatcttagcgccatggaggatgctcttgatgaattgattaaagactgcgcacagcagctgtttgagcttactgatgacaaggaaaacgaaagacttgcctatgtgacttatcaggacattcactcaatacaggcgttccacgagcagattgtgattgctgtcaaggccccggctgagacacgcttggacgtcccggcccccagagaggactccatcacagttcacatcagatctactaacggtccaattgacgtgtacttatgtgaggtcgagcagggacagacaagtaacaagcgaagcgagggtgtggggactagtagctctgagagtacacaccccgaaggacccgaggaagaagagaatccacagcagtctgaggagctcttggaggtctccaactag

SEQ ID NO: 97946 - DNA, 621 bp, Artificial Sequence
  derived and/or modified sequence
atggacctggtgcggagcgcccccggcggcatcctggacctgaacaaggttgctacgaagctgggagtcaggaagaggagagtgtacgacatcactaacgtcctggacggcattgacttagtggagaagaagtcgaagaatcatattaggtggattggatctgatctgagtaatttcggcgctgtgcctcaacagaagaagctacaagaagagttgagcgatctgtccgccatggaagatgctctggacgaattaattaaggattgtgcacaacaattgtttgagctcaccgatgacaaggaaaacgagaggctcgcctatgtcacatatcaggacattcattctatccaggctttccacgagcagattgtcatcgcggtcaaagcgccagctgagacgaggctggatgtaccagccccacgcgaggatagcataacagtgcatatacggtccacaaacggcccaatagatgtctatctttgcgaggtggagcaggggcagacctctaacaaacggagcgagggagttggtacctcatcgagcgagtccacccaccccgaagggcccgaagaagaagagaatcctcagcaatccgaagagcttctcgaggtgagcaactag

SEQ ID NO: 97947 - DNA, 621 bp, Artificial Sequence
  derived and/or modified sequence
atggatctcgtgcggtccgcacctggcggtatactagatttgaataaagtggccaccaaactgggtgttaggaagagacgggtgtacgacattaccaacgtattggatggcattgacttagtggagaaaaagagtaaaaatcatataagatggattggcagcgatctaagcaatttcggcgcagtgccacaacagaagaaactgcaggaggagctttccgatctcagtgccatggaagatgccctggatgagctcatcaaggactgtgcccaacaactgtttgaattgacggatgacaaggagaatgagcgcctcgcctatgttacctaccaagatattcacagcattcaagctttccacgagcaaattgtgattgcagtcaaggctcctgccgaaacgcggctagacgtgcccgcaccacgcgaagattccattaccgtgcatatcagaagcaccaatggcccaatcgatgtgtatttgtgtgaggttgagcagggtcagacatccaataagcgatccgagggagtaggtactagttcttctgaaagcacgcaccccgaaggaccagaagaggaggagaatccccagcaaagtgaggaactcctcgaggtgtccaattag

SEQ ID NO: 97948 - DNA, 621 bp, Artificial Sequence
  derived and/or modified sequence
atggacctggttcggtctgccccaggcggaatactcgatcttaacaaggtggctaccaagctgggagtcaggaagagacgagtatatgatatcactaacgttcttgacggtatcgacctggtggagaagaagtccaagaatcatattagatggattggatccgatctttcgaatttcggcgcagtccctcaacagaagaaactccaggaggagctgagcgacctatctgcaatggaagatgcactggatgaactaattaaggactgcgcacagcaactgtttgaactgacagatgacaaggagaatgaaaggcttgcatacgtaacgtaccaggacattcactctatccaagcttttcatgagcagatagtgatcgccgtgaaagcccctgcagaaactaggctggacgtgcctgctcccagggaggacagcattacagtgcacatccgcagcactaacggacccatagatgtctacttgtgcgaggtagagcaggggcagacctccaataagcgctcagaaggcgtgggtacatcttcaagtgaatccacacacccggaagggcctgaagaggaggagaatccacagcaatcagaggaactactggaggtgtctaactag

SEQ ID NO: 97949 - DNA, 621 bp, Artificial Sequence
  derived and/or modified sequence
atggacctggtgagaagcgcccccggcggcatcctggacctgaacaaggtggccaccaagctgggcgtgagaaagagaagagtgtacgacatcaccaacgtgctggacggcatcgacctggtggagaagaagagcaagaaccacatcagatggatcggcagcgacctgagcaacttcggcgccgtgccccagcagaagaagctgcaggaggagctgagcgacctgagcgccatggaggacgccctggacgagctgatcaaggactgcgcccagcagctgttcgagctgaccgacgacaaggagaacgagagactggcctacgtgacctaccaggacatccacagcatccaggccttccacgagcagatcgtgatcgccgtgaaggcccccgccgagaccagactggacgtgcccgcccccagagaggacagcatcaccgtgcacatcagaagcaccaacggccccatcgacgtgtacctgtgcgaggtggagcagggccagaccagcaacaagagaagcgagggcgtgggcaccagcagcagcgagagcacccaccccgagggccccgaggaggaggagaacccccagcagagcgaggagctgctggaggtgagcaactag

SEQ ID NO: 97950 - protein, 199 aa, Artificial Sequence
  derived and/or modified sequence
MASGCKIGPSILNSDLANLGAECLRMLDSGADYLHLDVMDGHFVPNITFGHPVVESLRKQLGQDPFFDMHMMVSKPEQWVKPMAVAGANQYTFHLEATENPGALIKDIRENGMKVGLAIKPGTSVEYLAPWANQIDMALVMTVEPGFGGQKFMEDMMPKAGANMIVSGSAIMRSEDPRSVINLLRNVCSEAAQKRSLDR

SEQ ID NO: 97951 - DNA, 600 bp, Artificial Sequence
  derived and/or modified sequence
atggcttctggatgcaaaattggaccgtctatactcaacagtgacttggctaatctaggagccgagtgccttcgaatgcttgattcaggcgccgactatcttcatctcgatgtgatggacggccactttgtgcccaacatcactttcggacacccagtggttgaatccctgaggaagcaactgggccaagatccatttttcgatatgcatatgatggtgagtaaaccggagcagtgggtgaagccgatggccgtggccggagccaaccagtacaccttccatctggaagcaactgagaacccaggggctctcataaaagatattagggaaaacgggatgaaggtgggactggcaatcaaacctgggacctcagtagaatatctggccccctgggcaaatcagatcgatatggcgctcgtaatgaccgtggagccaggctttgggggacaaaaattcatggaggatatgatgcctaaggcaggcgcaaatatgattgtgagcggtagcgccatcatgaggtctgaagatcccaggtcagttataaatctactgaggaatgtctgctcagaggccgcccagaaacgatctttggaccgttag

SEQ ID NO: 97952 - DNA, 600 bp, Artificial Sequence
  derived and/or modified sequence
atggccagcggctgcaagattggccccagcatcctgaacagcgacctggccaacctgggcgctgagtgcctgaggatgctggacagcggggctgactacctgcacctggatgtgatggatggccactttgtgcccaacatcaccttcggccaccctgtggtggagagcctgaggaagcagctgggccaggaccccttctttgacatgcacatgatggtgtccaagccagagcagtgggtgaagcccatggctgtggccggggccaaccagtacaccttccacctggaggccacagaaaatcctggggccctgatcaaggacatccgggagaatggcatgaaggtgggcctggccatcaagccaggcacctctgtggagtacctggccccctgggccaaccagattgacatggccctggtgatgacagtggagcccggctttggaggccagaagttcatggaggacatgatgcccaaggccggggccaacatgattgtgtctggcagcgccatcatgagaagtgaggaccccaggagcgtcatcaacctgctgagaaatgtgtgcagcgaggccgcccagaagaggagcctggacagatag

SEQ ID NO: 97953 - DNA, 600 bp, Artificial Sequence
  derived and/or modified sequence
atggccagcggctgcaagatcggccccagcatcctgaacagcgacctggccaacctgggggccgaatgcttaaggatgctcgactcaggagccgactacctccatctggatgtgatggatggtcactttgtccctaatatcactttcggtcatcccgtagttgagtctctgcgcaagcagttgggacaggacccctttttcgacatgcacatgatggtttctaagccagagcaatgggtaaaaccgatggccgtagcaggtgcaaatcagtataccttccacctggaggcaaccgagaaccccggtgcccttattaaagatattagagagaacggcatgaaagtggggctcgccatcaagcctggtaccagcgtggaatacctggctccatgggcaaaccagattgacatggctctggtgatgactgtcgaacctggatttggcggccagaagtttatggaagatatgatgcctaaggctggggctaatatgatagtctccggatcagcgatcatgcggtctgaagaccctagaagtgtgatcaatcttctgcgaaacgtctgttcggaggctgcccaaaagagatccctggatcgttag

SEQ ID NO: 97954 - DNA, 600 bp, Artificial Sequence
  derived and/or modified sequence
atggcttccggatgtaaaatcggaccttctatcctgaacagtgacctggccaacttaggagccgaatgtctgagaatgctggactcgggagccgattacctgcatctagacgtgatggatggtcactttgttcctaatatcactttcggtcaccccgtcgtggaatccctacggaagcagctgggacaggacccttttttcgacatgcacatgatggtcagtaaacccgagcagtgggtgaaaccaatggccgtggccggagcgaatcagtacacattccatctcgaggctactgagaaccctggggcacttatcaaggacattcgggaaaatggtatgaaggtcgggttagctatcaaacctggaacgtcggtcgaatatctggctccttgggcgaatcaaatcgatatggcactggtcatgaccgtcgaacccggtttcggcggacagaagttcatggaggacatgatgcctaaggcaggggctaatatgatcgtttctggatctgccatcatgcggtcggaggacccccgttccgtgattaatctgctgcggaatgtatgtagcgaagccgcacagaaaaggtccctggacagatag

SEQ ID NO: 97955 - DNA, 1343 bp, Artificial Sequence
  derived and/or modified sequence
aacttgcttttgggagccagcggtatggcgtcgggctgcaagattggcccgtccatcctcaacagcgacctggccaatttaggggccgagtgcctccggatgctagactctggggccgattatctgcacctggacgtaatggacgggcattttgttcccaacatcacctttggtcaccctgtggtagaaagccttcgaaagcagctaggccaggaccctttctttgacatgcacatgatggtgtccaagccagaacagtgggtaaagccaatggctgtagcaggagccaatcagtacacctttcatctcgaggctactgagaacccaggggctttgattaaagacattcgggagaatgggatgaaggttggccttgccatcaaaccaggaacctcagttgagtatttggcaccatgggctaatcagatagatatggccttggttatgacagtggaaccggggtttggagggcagaaattcatggaagatatgatgccaaaggcaggagctaacatgattgtgtctggcagtgctattatgaggagtgaagaccccagatctgtgatcaatctattaagaaatgtttgctcagaagctgctcagaaacgttctcttgatcggtgaaaccataaggagcccagtgttcctgttcatgaaatctcccttttactggaaaacaggaatattgactaccaaatcacaatgcaattgaagccgtactgcttttttgagcagttattcattccagtgattaaaactgattgtgcagaatattctaagaggtcagaaattggtgtgtataactacatttttagtgatgcaatttattgattagtgagtaagatactgtttttattgagagatttgatttttataaagtaaaaatacggctgcattagggttacaaacagaaaagtgtcttaatgtctaaggagggcatattagctacactacaaaaacaaattttgtctgtacttctgaaaagaattttgttgtttctcagctgttttccaaaagcaaaggaagtctttatggtttttttctatttcatgttattgtgatttgtttataagtttgggtggggtgcataccatattcttggttcttaaaatctatcacttttcaccttacacttgatgtgtgaaaactataaaaacaatgtgtgaaacccaggggttctaaaatacaagcatagattttatcagggtgttttgtcaaagcaggttattcagtgattcctccccaccattcttaagaacgttaaataatgctgttgtgttagctctgagtagaaaggaaaaagtaaaacctctgtttggaggtaatattgggttgaattctga

SEQ ID NO: 97956 - DNA, 600 bp, Artificial Sequence
  derived and/or modified sequence
atggccagcggctgcaagatcggccccagcatcctgaacagcgacctggccaacctgggcgccgagtgcctgagaatgctggacagcggcgccgactacctgcacctggacgtgatggacggccacttcgtgcccaacatcaccttcggccaccccgtggtggagagcctgagaaagcagctgggccaggaccccttcttcgacatgcacatgatggtgagcaagcccgagcagtgggtgaagcccatggccgtggccggcgccaaccagtacaccttccacctggaggccaccgagaaccccggcgccctgatcaaggacatcagagagaacggcatgaaggtgggcctggccatcaagcccggcaccagcgtggagtacctggccccctgggccaaccagatcgacatggccctggtgatgaccgtggagcccggcttcggcggccagaagttcatggaggacatgatgcccaaggccggcgccaacatgatcgtgagcggcagcgccatcatgagaagcgaggaccccagaagcgtgatcaacctgctgagaaacgtgtgcagcgaggccgcccagaagagaagcctggacagatag

SEQ ID NO: 97957 - protein, 729 aa, Artificial Sequence
  derived and/or modified sequence
MLTQAPSSVVRSRNSRNHTVNSGGSCLSASTVAIPAINDSSAAMSACSTISAQPASSMDTQMHSPKKQERVNKRVIWGIEVAEELHWKGWELGKETTRNLVLKNRSLKLQKMKYRPPKTKFFFTVIPQPIFLSPGITLTLPIVFRPLEAKEYMDQLWFEKAEGMFCVGLRATLPCHRLICRPPSLQLPMCAVGDTTEAFFCLDNVGDLPTFFTWEFSSPFQMLPATGLLEPGQASQIKVTFQPLTAVIYEVQATCWYGAGSRQRSSIQLQAVAKCAQLLVSIKHKCPEDQDAEGFQKLLYFGSVAVGCTSERQIRLHNPSAVNAPFRIEISPDELAEDQAFSCPTAHGIVLPGEKKCVSVFFHPKTLDTRTVDYCSIMPSGCASKTLLKVVGFCRGPAVSLQHYCVNFSWVNLGERSEQPLWIENQSDCTAHFQFAIDCLESVFTIRPAFGTLVGKARMTLHCAFQPTHPIICFRRVACLIHHQDPLFLDLMGTCHSDSTKPAILKPQHLTWYRTHLARGLTLYPPDILDAMLKEKKLAQDQNGALMIPIQDLEDMPAPQYPYIPPMTEFFFDGTSDITIFPPPISVEPVEVDFGACPGPEAPNPVPLCLMNHTKGKIMVVWTRRSDCPFWVTPESCDVPPLKSMAMRLHFQPPHPNCLYTVELEAFAIYKVCARNEREECGVSARSLSGLVGWQEVTEGSFRLHPLRARLSLGWTVTPMSLSPPKLLA

SEQ ID NO: 97958 - protein, 271 aa, Artificial Sequence
  derived and/or modified sequence
MTLHCAFQPTHPIICFRRVACLIHHQDPLFLDLMGTCHSDSTKPAILKPQHLTWYRTHLARGLTLYPPDILDAMLKEKKLAQDQNGALMIPIQDLEDMPAPQYPYIPPMTEFFFDGTSDITIFPPPISVEPVEVDFGACPGPEAPNPVPLCLMNHTKGKIMVVWTRRSDCPFWVTPESCDVPPLKSMAMRLHFQPPHPNCLYTVELEAFAIYKVCARNEREECGVSARSLSGLVGWQEVTEGSFRLHPLRARLSLGWTVTPMSLSPPKLLA

SEQ ID NO: 97959 - DNA, 2190 bp, Artificial Sequence
  derived and/or modified sequence
atgctaacccaggcacccagctctgtggttcgttctaggaattcccggaatcacacagtcaacagcggtggcagctgcctgtcagcgtccacggtggccatacctgccattaacgactccagcgcagccatgtccgcctgttcaacaatcagtgctcaacctgcctcttctatggatactcaaatgcattctcctaagaagcaggaaagagtgaacaagcgcgttatctgggggatcgaggtggcagaagagctccattggaagggttgggaactcgggaaggagacaacacggaaccttgtattaaaaaacaggtcactgaagcttcagaagatgaaataccgccctcctaaaaccaagtttttctttacagtcattcctcaaccaattttcttgtctccaggtattacccttactctaccgattgtctttcgccctctggaggccaaagagtatatggaccaactgtggttcgaaaaggccgaaggtatgttctgcgtcggtcttagggccacactcccgtgtcaccgcttgatttgccggccaccatccctgcagctccccatgtgcgccgtaggtgacaccacggaggcatttttctgcctcgacaatgtgggagacctgcctactttctttacctgggagttctcatctcctttccagatgctgcctgcaacaggcctcctggagcccggacaagcaagtcaaattaaagtgacgttccaaccgttaacagcggtgatatacgaagtgcaagcaacatgttggtacggggccggcagccggcaacggtcctctatccagctgcaggctgttgctaaatgtgcccaacttttggttagcatcaagcacaagtgccccgaagaccaagacgccgaaggcttccaaaagctgctgtacttcgggagtgttgctgtcggttgtacatcagagagacagattaggttacacaaccccagtgctgtaaatgccccttttcggatcgaaatcagcccagacgagctcgcagaggatcaagcgttttcctgcccaaccgctcatgggatcgtcttgccaggggagaaaaagtgtgtctccgtgtttttccaccccaaaacactggatacaagaacagtggactattgttccataatgccgtcagggtgcgccagtaaaaccttacttaaggtcgtgggcttctgccgggggccggctgtaagcctacagcactattgcgttaattttagctgggtgaacctcggagagcgctcagagcaaccattatggatcgaaaaccagagcgactgtaccgctcactttcagttcgcaatagactgtctggagagcgtcttcactatccggcctgctttcgggaccttggttggcaaggctaggatgacactccactgcgcttttcagccaacacatcccatcatctgtttccgcagagtggcatgtctgatacatcaccaggacccattgttcctcgacctgatgggcacctgccattccgattcaactaagcccgccattctgaagcctcaacacctgacctggtaccgcacccacctggctcggggtctaacgctatatccacctgacatcctggacgcgatgcttaaagagaaaaagcttgctcaagaccagaacggcgctctaatgattccaatccaagacctagaggacatgcccgcccctcagtacccatacattccccccatgaccgagttctttttcgatggaaccagcgatattacaatctttccccctccgatcagtgttgaaccggtggaagtcgacttcggggcttgccctgggcccgaggctccaaatccagttccattgtgtttgatgaatcatacaaaggggaaaattatggttgtttggacaaggcgcagtgactgtcctttttgggtcacccctgagtcctgtgatgtcccccccttgaaaagtatggccatgcggctgcacttccagccaccccatcctaattgcctgtatacagtagagcttgaggctttcgccatctataaggtgtgcgcaaggaacgaacgtgaagagtgtggcgtcagtgcacgctcgctctctgggctggtaggctggcaggaggtaaccgaagggagcttccgtctgcacccgctgcgcgcgaggctctccttgggctggaccgtcacacccatgagcctgtctccaccgaaactccttgcctag

SEQ ID NO: 97960 - DNA, 2190 bp, Artificial Sequence
  derived and/or modified sequence
atgctgacccaggcccccagctctgtggtgcgcagcaggaacagcaggaaccacacagtgaacagcggcggcagctgcctgagcgccagcacagtggccatcccagccatcaatgacagcagcgctgccatgtctgcctgcagcaccatcagcgcccagcctgccagctccatggacacccagatgcacagccccaagaagcaggagcgggtgaacaagagggtcatctggggcatcgaggtggccgaggagctgcactggaagggctgggagctgggcaaggagaccaccaggaacctggtgctgaagaacagaagcctgaagctgcagaagatgaagtaccggccccccaagaccaagttcttcttcaccgtcatcccccagcccatcttcctgagccctggcatcaccctgaccctgcccatcgtgttccggcccctggaggccaaggagtacatggaccagctgtggtttgagaaggccgagggcatgttctgtgtgggcctgcgggccaccctgccctgccacaggctcatctgccggccccccagcctgcagctgcccatgtgtgctgtgggggacaccacagaggccttcttctgcctggacaacgtgggggacctgcccaccttcttcacctgggagttcagcagccccttccagatgctgcctgccaccggcctgctggagcccggccaggccagccagatcaaggtgaccttccagcccctgacagctgtgatctatgaggtgcaggccacctgctggtatggagctggcagccggcagaggagcagcatccagctgcaggccgtggccaagtgtgcccagctgctggtgtccatcaagcacaagtgcccagaggaccaggatgctgagggcttccagaagctgctgtactttggatctgtggccgtgggctgcaccagcgagcggcagatccggctgcacaaccccagcgctgtgaatgcccccttccgcatcgagatcagcccagatgagctggccgaggaccaggccttcagctgccccacagcccatggaattgtgctgcccggggagaagaagtgtgtgtctgtgttcttccaccccaagaccctggacaccaggacagtggactactgcagcatcatgcccagcggctgtgccagcaagaccctgctgaaggtggtgggcttctgccggggccctgctgtgtccctgcagcactactgtgtgaacttctcctgggtgaacctgggggagaggtctgagcagcccctgtggattgagaaccagagcgactgcacagcccacttccagtttgccatcgactgcctggagagcgtcttcaccatccggcctgccttcggcaccctggtgggcaaggccaggatgaccctgcactgtgccttccagcccacccaccccatcatctgcttcagaagagtggcctgcctgatccaccaccaggaccccctcttcctggacctgatgggcacctgccacagcgacagcaccaagccagccatcctgaagccccagcacctgacctggtaccgcacccacctggcccggggcctgaccctgtaccccccagacatcctggatgccatgctgaaggagaagaagctggcccaggaccagaatggagccctgatgatccccatccaggacctggaggacatgcctgccccccagtacccctacatcccccccatgacagagttcttctttgatggcaccagtgacatcaccatcttccccccacccatctctgtggagcctgtggaggtggactttggagcctgccccggccctgaggcccccaaccctgtgcccctgtgcctgatgaaccacaccaagggcaagatcatggtggtgtggacccggcggagtgactgccccttctgggtgaccccagagagctgtgatgtgccccccctgaagtccatggccatgaggctgcacttccagcccccccaccccaactgcctgtacacagtggagctggaggcctttgccatctacaaggtgtgtgccagaaatgaaagagaggagtgtggggtgtctgcccggagcctgagcggcctggtgggctggcaggaggtgacagagggcagcttccggctgcaccccctgcgggcccggctgagcctgggctggacagtgacccccatgagcctgagcccccccaagctgctggcctag

SEQ ID NO: 97961 - DNA, 2190 bp, Artificial Sequence
  derived and/or modified sequence
atgctgacccaggcccccagcagcgtggtgcggagccggaacagcaggaaccacactgtcaactcaggagggtcttgtctctcagcatctacagtggcaatcccagcgatcaacgactccagtgccgccatgagcgcctgctccacaatctcggctcaacctgcctctagtatggacacacagatgcattctcccaagaaacaggagcgagtgaacaaacgagtgatctggggcatcgaggtggccgaggagcttcactggaagggatgggaattgggaaaagagacgacgcgcaatctcgtgttgaaaaatcgcagtctaaagctacagaagatgaaatatcgcccccctaaaactaagtttttttttactgtcattcctcagcccatcttcctcagtccaggtattacacttactctcccgattgtgtttcgcccgcttgaggctaaggaatacatggatcagttgtggttcgagaaggccgaggggatgttctgtgtgggcttacgagccacactgccttgtcatcgtctgatatgcaggcctccctctctgcagctccctatgtgcgccgtaggcgacacgaccgaggcctttttctgtctggacaacgtaggagacctgcctaccttctttacctgggagttcagctcacccttccagatgttgcctgcgacagggctgctcgaaccagggcaggcatcacagatcaaggtaaccttccagccactgacagcggtaatatatgaagttcaggctacatgttggtatggcgctgggtcaagacagcggagctcgatccagctccaggctgtcgccaagtgtgcacagttgctggtatcaattaaacataagtgccctgaagatcaggatgctgaggggtttcagaaattgctgtacttcgggtctgtagccgttggatgcacaagcgaacgtcagattcgattgcacaacccctctgctgtgaacgcacccttccgtatcgaaatctcgccagacgagctcgcagaggatcaggctttttcctgccccaccgcccacgggatcgttctcccaggggagaagaagtgtgtgtctgtgttcttccatccgaagaccctggacacacggaccgttgattactgcagtattatgccgtctggatgtgcgagcaaaacattacttaaagtggtgggattctgcaggggccctgccgtgtctcttcaacactactgcgtgaattttagttgggttaacctgggagagcgaagcgagcagccactatggatcgagaaccagtccgactgcacagcccactttcagtttgctattgactgcttagagtcggtgttcaccatcaggcccgcatttggcactttggtggggaaggctcgcatgacgttacattgtgccttccagccgacccacccaatcatctgtttccgccgtgttgcctgtctcattcatcaccaggatcccctttttttagacctcatgggtacctgccattctgactccaccaagcccgccatcctgaagccacagcatctgacttggtatcgaactcacttggctcgcggcctgacgctttacccacccgacatcctggatgctatgctcaaagagaaaaaactcgcgcaagaccagaatggcgccctcatgattcccattcaggacttggaagatatgcctgccccgcaatacccatacatcccccccatgacggagttctttttcgatgggacatccgacatcaccatttttcccccacccataagcgtggaacctgtggaggtagacttcggtgcatgccccggtcccgaagccccgaacccagtgccgttgtgtctgatgaatcacacaaaggggaagattatggttgtttggacgcgacggagtgattgccccttctgggtaacacccgaaagctgtgatgttcctcccctgaagtcaatggcaatgcgacttcattttcagcctcctcatcctaattgcctctatactgtggaactggaggcttttgctatatacaaggtctgtgctcggaatgagcgtgaagaatgtggagtcagcgcccgctcacttagcgggcttgtcggatggcaagaggtcacagaggggtctttccgtctgcatccgctgcgcgcgcgactgtcattggggtggactgttacccctatgtccctgagtcctcccaaattattagcatag

SEQ ID NO: 97962 - DNA, 2190 bp, Artificial Sequence
  derived and/or modified sequence
atgctgacacaagcccctagtagtgtggtacggagccgtaactcaaggaaccacactgttaacagtggcggatcttgtctgtccgcaagtacagtcgccatacctgccatcaacgatagcagcgctgctatgagcgcctgcagcaccatttccgcacagcccgctagttccatggacacacagatgcactcacccaaaaagcaggagcgtgttaacaagcgcgttatttgggggattgaagtggcagaagaactccactggaaggggtgggaactgggaaaagaaactacccggaacctggtgttaaagaatcggtccctcaagctgcagaagatgaaatacagacccccaaaaaccaagttcttctttacagttatcccacagcccatcttcctgagtccgggaatcactctgactctccccatcgttttccggcctctggaggctaaggaatacatggaccagctgtggtttgagaaggccgagggcatgttttgtgtgggcctgcgcgcaacactcccctgtcaccgcttaatctgtaggccacccagtctccagctgccaatgtgcgcggttggtgatacaacagaggccttcttctgtcttgacaatgtaggagacctaccgaccttcttcacctgggagtttagtagcccctttcagatgctgcccgctaccggactcctggaacccggacaggcgtcacagattaaggtcacattccagcccctgacagccgtcatctacgaagttcaagcgacgtgttggtacggcgcagggagccgacaaagatcctcaattcaattgcaagcagtggccaagtgcgcccagctgctcgtttctattaagcataaatgcccagaggatcaggatgccgaaggctttcagaaattgctgtacttcggctcagtcgccgtcggctgtacatcggagagacagatccgactgcataatcctagtgctgtgaacgcacccttcaggatcgaaatcagccctgacgaattggcagaagatcaagcctttagctgccctactgcccatgggatcgttttacctggcgagaaaaaatgtgtgagtgtttttttccatccaaaaacactagatacccgcacagttgattattgcagcatcatgccctccggctgcgccagcaagacactcctaaaagtcgttggcttttgccgcggaccagcagtgtcactccaacactattgtgtcaacttcagttgggtcaacctgggcgaaagaagcgaacagcctctgtggattgagaaccagagtgactgtaccgcccattttcagtttgcaatcgactgtctggagtcagtctttacaatccgacccgcttttggcacactggttggtaaagcaagaatgacactgcactgtgcctttcagcccacacacccaatcatatgtttccgtcgggtggcgtgtctcatccaccaccaagatcccctgtttctagatcttatgggcacatgtcatagcgactctacgaaacctgcaattctcaagccacagcaccttacatggtataggacccacctcgccagggggttgacactgtaccctcctgatatactggatgcaatgctaaaagagaaaaagctagctcaggatcagaacggggctctgatgatcccaatacaggacctcgaggacatgcctgctccccagtacccctacatccctccgatgaccgaatttttctttgatggtactagtgacatcaccatctttcctccacccatatccgtcgagcctgttgaagtggatttcggtgcttgccctggacctgaggcccctaaccccgttccactatgccttatgaatcataccaagggaaagataatggtggtgtggactcggcgttcggattgtcctttctgggtgaccccagagtcttgcgatgttccacctttgaaaagcatggctatgaggctgcactttcaaccgcctcaccctaattgcctctacacagttgaattggaggcgtttgccatttacaaagtgtgcgctaggaacgaacgagaggaatgcggggttagtgctaggagcctgagcggactcgtaggttggcaggaagtaacagagggctcttttcgcctccaccccctgcgggcacggctgtcactggggtggaccgttacaccgatgtcccttagtcctcctaaacttctggcgtag

SEQ ID NO: 97963 - DNA, 2701 bp, Artificial Sequence
  derived and/or modified sequence
atctatggagacggcaatatggaggcgatgtaagttctgagcgttagtcccaaggtcccagggtctcagggagctccatactcagagtgctccctttggactgtgtcccaaggacatgatgctcacccaggctccaagctccgtcgtgaggtccaggaacagcaggaaccacaccgtgaactctggtggatcctgcctgagtgccagcacagtggccatccctgccatcaacgacagcagtgcagccatgagtgcctgcagcaccatcagcgcccagcccgcaagctccatggacactcagatgcactccccaaagaagcaggagagagtgaacaagagggtcatctggggcattgaggtggctgaggagctgcattggaaaggctgggagctaggaaaggagaccacaaggaatctggttctgaaaaatcgatccttgaaactccagaagatgaagtacaggccccccaagaccaagttcttcttcacggtcatccctcagcccatcttcctgagcccaggcataaccctcacgctccccatcgtcttccggcctctggaggcgaaggagtacatggaccagctgtggtttgagaaagcggaggggatgttctgtgtcggcctacgggccaccctgccctgccacaggctgatctgccgcccaccatccctgcagctgcccatgtgtgctgtgggagatacgactgaggcctttttctgcctggataatgtgggggacctgcccaccttcttcacctgggagttctccagcccattccagatgctgcccgccacggggctcctggagccaggccaggcctctcagatcaaggtgacctttcagccccttacagccgtcatctacgaggtgcaggccacgtgctggtacggggcgggcagccggcagaggagcagcatccagctgcaggctgtggccaagtgcgcccagctgctggtgagcataaagcacaagtgcccggaggaccaggatgccgagggcttccagaagctgttgtactttggctctgttgctgtgggctgcacctcggagaggcagatcaggctacacaacccgtcggcggtaaatgcccccttcaggattgaaatttccccggatgaactggccgaagaccaggccttctcatgccccacggcccatggcatcgtgcttccgggagagaagaaatgtgtgtcggtgttcttccaccccaagactctggacaccagaactgtggactactgctccatcatgccttctggctgtgcctccaagaccctgcttaaagtcgttggtttctgtagaggccctgctgtgtccctgcagcactactgtgtcaacttcagctgggtcaaccttggggagcgctccgagcagcccctgtggattgagaaccaatcggactgcacggcccacttccagtttgccatcgactgcttggagagtgtctttaccatcaggcctgcctttgggacgctggtgggcaaggcccgtatgaccctgcactgtgccttccagcccactcaccccatcatctgctttcggcgtgtggcctgtctcatccaccaccaggacccactgttcctggacctgatggggacctgccactcggacagcaccaagccagccatcctgaagcctcagcacctcacctggtaccgcacacacctggcccggggcctgacgctctacccccctgacatcctggatgccatgctgaaggagaagaagctggcacaggaccagaacggggctctcatgattcccatccaggatctggaggacatgccggccccgcagtacccttatatcccccccatgaccgagttcttcttcgacggcaccagcgacataaccatcttccccccgcccatcagtgtagagcctgtcgaggtagacttcggtgcctgcccagggcctgaggcccccaaccctgtacccctgtgcctgatgaaccacaccaagggcaagatcatggtggtctggacgcgaaggtctgactgccccttctgggtgactccagagagctgcgacgtgcccccactcaagtccatggccatgcgcctgcacttccagccgcctcaccccaactgcctttacacggtggagctcgaagccttcgccatctataaggtgtgtgcacgcaatgagagggaggaatgcggggtctctgctaggagcctgagtggcttggtggggtggcaggaagtgaccgagggcagcttcaggctccatcctctgcgtgccaggctttctcttggctggacagtgacccctatgagtttgtctcctccaaagctcctggcctagctcggcccatctgattttctcattcttatgtaagtctcccctcccctccaagggagaactcagctgagatcaagctgtttgggaaaactgggtgcacagggagatactccctggggctcctggctaggaggcctcctagcttctctactagtccttgaattaagaagtggtcactctaaaggagctttgagcgggcaggaagctgggcctagagacaaagtcagcagcaccagataattgtgatggaaagggcttctgactcagcttccctgggtcgggaactccgagtgccggctgtccccagccctgctgttctggccccagatgcgtggtgccccctcctcatccgttagtcctgcccatcccttccttcttgactctgcccaccccact

SEQ ID NO: 97964 - DNA, 2190 bp, Artificial Sequence
  derived and/or modified sequence
atgctgacccaggcccccagcagcgtggtgagaagcagaaacagcagaaaccacaccgtgaacagcggcggcagctgcctgagcgccagcaccgtggccatccccgccatcaacgacagcagcgccgccatgagcgcctgcagcaccatcagcgcccagcccgccagcagcatggacacccagatgcacagccccaagaagcaggagagagtgaacaagagagtgatctggggcatcgaggtggccgaggagctgcactggaagggctgggagctgggcaaggagaccaccagaaacctggtgctgaagaacagaagcctgaagctgcagaagatgaagtacagaccccccaagaccaagttcttcttcaccgtgatcccccagcccatcttcctgagccccggcatcaccctgaccctgcccatcgtgttcagacccctggaggccaaggagtacatggaccagctgtggttcgagaaggccgagggcatgttctgcgtgggcctgagagccaccctgccctgccacagactgatctgcagaccccccagcctgcagctgcccatgtgcgccgtgggcgacaccaccgaggccttcttctgcctggacaacgtgggcgacctgcccaccttcttcacctgggagttcagcagccccttccagatgctgcccgccaccggcctgctggagcccggccaggccagccagatcaaggtgaccttccagcccctgaccgccgtgatctacgaggtgcaggccacctgctggtacggcgccggcagcagacagagaagcagcatccagctgcaggccgtggccaagtgcgcccagctgctggtgagcatcaagcacaagtgccccgaggaccaggacgccgagggcttccagaagctgctgtacttcggcagcgtggccgtgggctgcaccagcgagagacagatcagactgcacaaccccagcgccgtgaacgcccccttcagaatcgagatcagccccgacgagctggccgaggaccaggccttcagctgccccaccgcccacggcatcgtgctgcccggcgagaagaagtgcgtgagcgtgttcttccaccccaagaccctggacaccagaaccgtggactactgcagcatcatgcccagcggctgcgccagcaagaccctgctgaaggtggtgggcttctgcagaggccccgccgtgagcctgcagcactactgcgtgaacttcagctgggtgaacctgggcgagagaagcgagcagcccctgtggatcgagaaccagagcgactgcaccgcccacttccagttcgccatcgactgcctggagagcgtgttcaccatcagacccgccttcggcaccctggtgggcaaggccagaatgaccctgcactgcgccttccagcccacccaccccatcatctgcttcagaagagtggcctgcctgatccaccaccaggaccccctgttcctggacctgatgggcacctgccacagcgacagcaccaagcccgccatcctgaagccccagcacctgacctggtacagaacccacctggccagaggcctgaccctgtacccccccgacatcctggacgccatgctgaaggagaagaagctggcccaggaccagaacggcgccctgatgatccccatccaggacctggaggacatgcccgccccccagtacccctacatcccccccatgaccgagttcttcttcgacggcaccagcgacatcaccatcttccccccccccatcagcgtggagcccgtggaggtggacttcggcgcctgccccggccccgaggcccccaaccccgtgcccctgtgcctgatgaaccacaccaagggcaagatcatggtggtgtggaccagaagaagcgactgccccttctgggtgacccccgagagctgcgacgtgccccccctgaagagcatggccatgagactgcacttccagcccccccaccccaactgcctgtacaccgtggagctggaggccttcgccatctacaaggtgtgcgccagaaacgagagagaggagtgcggcgtgagcgccagaagcctgagcggcctggtgggctggcaggaggtgaccgagggcagcttcagactgcaccccctgagagccagactgagcctgggctggaccgtgacccccatgagcctgagcccccccaagctgctggcctag

SEQ ID NO: 97965 - DNA, 816 bp, Artificial Sequence
  derived and/or modified sequence
atgactctgcactgcgcctttcagcctactcaccctataatttgctttcggcgcgtggcctgtctcattcatcatcaggatcctctcttcctcgacctgatggggacttgtcatagtgactcaactaaacccgcgatcctgaagccccagcatctgacatggtaccggactcatcttgccagaggtctcactctctacccgcctgacattttggacgctatgctcaaggagaaaaaactggcccaggaccagaacggggccctaatgattcctatccaggacctggaagatatgcccgctccacaatacccctacatcccccctatgactgaattcttctttgacgggacctcagacattaccatttttccacctccgatatccgtggagcccgtggaagtggattttggcgcatgtccgggtcccgaggctccgaacccagtgcccttgtgtctgatgaaccacaccaagggcaagatcatggtagtgtggacacgccgatctgactgtcctttctgggttacccctgagtcatgcgatgtgccccccctaaagtcaatggcgatgcggctacactttcagcctccacacccaaactgcctgtatacagtggaactggaggcctttgctatatacaaagtctgcgctcggaacgagcgagaagagtgcggcgtctctgctaggtctctgtctgggcttgtaggatggcaggaagtcaccgaaggctctttccgattgcacccgctcagggcccgcctgtctttaggctggaccgtgacccccatgtccctgtccccaccaaaacttctggcatag

SEQ ID NO: 97966 - DNA, 816 bp, Artificial Sequence
  derived and/or modified sequence
atgaccctgcactgtgccttccagcccacccaccccatcatctgcttcagaagagtggcctgcctgatccaccaccaggaccccctcttcctggacctgatgggcacctgccacagcgacagcaccaagccagccatcctgaagccccagcacctgacctggtaccgcacccacctggcccggggcctgaccctgtaccccccagacatcctggatgccatgctgaaggagaagaagctggcccaggaccagaatggagccctgatgatccccatccaggacctggaggacatgcctgccccccagtacccctacatcccccccatgacagagttcttctttgatggcaccagtgacatcaccatcttccccccacccatctctgtggagcctgtggaggtggactttggagcctgccccggccctgaggcccccaaccctgtgcccctgtgcctgatgaaccacaccaagggcaagatcatggtggtgtggacccggcggagtgactgccccttctgggtgaccccagagagctgtgatgtgccccccctgaagtccatggccatgaggctgcacttccagcccccccaccccaactgcctgtacacagtggagctggaggcctttgccatctacaaggtgtgtgccagaaatgaaagagaggagtgtggggtgtctgcccggagcctgagcggcctggtgggctggcaggaggtgacagagggcagcttccggctgcaccccctgcgggcccggctgagcctgggctggacagtgacccccatgagcctgagcccccccaagctgctggcctag

SEQ ID NO: 97967 - DNA, 816 bp, Artificial Sequence
  derived and/or modified sequence
atgaccctgcactgcgccttccagcccacccaccccatcatctgcttcaggagagtggcctgcttgatccaccaccaggatcccctctttttggacctcatgggaacctgtcatagcgatagcacgaagcctgccattctgaagccgcagcacttaacgtggtaccggacccacttggctcgggggctaactctgtacccccccgatatattggatgccatgctgaaggagaagaaactagcccaggatcagaacggtgccctaatgattcccattcaggacctagaggacatgcctgcaccccaatatccatacattcccccgatgacggaattctttttcgatgggactagtgatattacaatattccccccgccaatctccgttgagcctgtcgaggtcgatttcggagcctgtccgggcccagaagccccgaatcctgtgcccctgtgcctgatgaaccacactaaggggaaaataatggtggtctggacccgtcgcagcgactgtcccttttgggtcactcctgagtcctgtgacgtcccaccgctgaagtccatggccatgagactccacttccaaccaccccatcccaactgcttatacaccgtggagcttgaagcgtttgccatctacaaggtgtgcgctaggaatgagagagaagaatgcggcgtaagtgcacgcagtctgagcggactggttggatggcaagaagtgactgaggggagtttccggctgcaccccctgcgggcacgcctctccctggggtggacggttacacccatgtcccttagccccccaaagttgctcgcctag

SEQ ID NO: 97968 - DNA, 816 bp, Artificial Sequence
  derived and/or modified sequence
atgaccctacattgcgcatttcagcccactcaccccattatctgctttcgtagagtcgcttgccttatccatcaccaagacccactcttcctggatttaatgggcacttgtcactcagactctactaaaccagccattctgaaacctcagcacctaacatggtatagaacccatctggcacgtgggctgacgttatacccccctgatatactcgacgccatgttaaaagaaaagaagctggcccaggatcagaatggggctctcatgatccccatccaagacctagaggacatgcctgccccacagtatccatatatcccacctatgaccgagtttttctttgacggaacttctgatataacaattttcccaccacctatctctgtcgagccagttgaggtggatttcggtgcttgtcctggcccagaagccccaaacccagtgcctttgtgtctgatgaaccacaccaaaggcaagattatggtcgtgtggactaggcggtcagactgtccattttgggtcacccctgaaagctgtgacgttcccccattaaagagcatggcgatgcggttacattttcagcctccccacccaaattgcctttataccgtcgagcttgaggcctttgccatttataaagtgtgcgcaagaaatgagcgcgaagaatgtggggtcagcgccaggtctttatctgggctcgtaggctggcaggaagtcaccgaggggtcgttccggttgcatcctttacgggctagactgagccttggctggacggtgacacccatgagtctaagtccaccaaaactgctggcctag

SEQ ID NO: 97969 - DNA, 3438 bp, Artificial Sequence
  derived and/or modified sequence
gcgcgtcctgtatctatggagacggcaatatggaggcgatgtaagttctgagcgttagtcccaaggtcccagggtctcagggagaggcaagagtgttcagaagaaacaagcagagagtaaaagccagataaagctccatactcagagtgctccctttggactgtgtcccaaggacatgatgctcacccaggctccaagctccgtcgtgaggtccaggaacagcaggaaccacaccgtgaactctggtggatcctgcctgagtgccagcacagtggccatccctgccatcaacgacagcagtgcagccatgagtgcctgcagcaccatcagcgcccagcccgcaagctccatggacactcagatgcactccccaaagaagcaggagagagtgaacaagagggtcatctggggcattgaggtggctgaggagctgcattggaaaggctgggagctaggaaaggagaccacaaggaatctggttctgaaaaatcgatccttgaaactccagaagatgaagtacaggccccccaagaccaagttcttcttcacggtcatccctcagcccatcttcctgagcccaggcataaccctcacgctccccatcgtcttccggcctctggaggcgggacctgcccaccttcttcacctgggagttctccagcccattccagatgctgcccgccacggggctcctggagccaggccaggcctctcagatcaaggtgacctttcagccccttacagccgtcatctacgaggtgcaggccacgtgctggtacggggcgggcagccggcagaggagcagcatccagctgcaggctgtggccaagtgcgcccagctgctggtgagcataaagcacaagtgcccggaggaccaggatgccgagggcttccagaagctgttgtactttggctctgttgctgtgggctgcacctcggagaggcagatcaggctacacaacccgtcggcggtaaatgcccccttcaggattgaaatttccccggatgaactggccgaagaccaggccttctcatgccccacggcccatggcatcgtgcttccgggagagaagaaatgtgtgtcggtgttcttccaccccaagactctggacaccagaactgtggactactgctccatcatgccttctggctgtgcctccaagaccctgcttaaagtcgttggtttctgtagaggtaccggtgaccccaggggcctcccctggggacaggagcagcccctgctgaggattctgaagagctccttccctgctcctaggaggcggggccaccttgcctcagcctgggtgtctgctgccccctggtggccctgtggggaatcatccgtgactacctggagatcccagtcccactggcatccagtgatgctggagttctgctcaggctgccagggctctgggcctgtagcctggccctgagagtaccacctcccttcagtggaactttgtctaagatatccttggggaagctgataccccatctcctgtgtccaggccctgctgtgtccctgcagcactactgtgtcaacttcagctgggtcaaccttggggagcgctccgagcagcccctgtggattgagaaccaatcggactgcacggcccacttccagtttgccatcgactgcttggagagtgtctttaccatcaggcctgcctttgggacgctggtgggcaaggcccgtatgaccctgcactgtgccttccagcccactcaccccatcatctgctttcggcgtgtggcctgtctcatccaccaccaggacccactgttcctggacctgatggggacctgccactcggacagcaccaagccagccatcctgaagcctcagcacctcacctggtaccgcacacacctggcccggggcctgacgctctacccccctgacatcctggatgccatgctgaaggagaagaagctggcacaggaccagaacggggctctcatgattcccatccaggatctggaggacatgccggccccgcagtacccttatatcccccccatgaccgagttcttcttcgacggcaccagcgacataaccatcttccccccgcccatcagtgtagagcctgtcgaggtagacttcggtgcctgcccagggcctgaggcccccaaccctgtacccctgtgcctgatgaaccacaccaagggcaagatcatggtggtctggacgcgaaggtctgactgccccttctgggtgactccagagagctgcgacgtgcccccactcaagtccatggccatgcgcctgcacttccagccgcctcaccccaactgcctttacacggtggagctcgaagccttcgccatctataaggtgtgtgcacgcaatgagagggaggaatgcggggtctctgctaggagcctgagtggcttggtggggtggcaggaagtgaccgagggcagcttcaggctccatcctctgcgtgccaggctttctcttggctggacagtgacccctatgagtttgtctcctccaaagctcctggcctagctcggcccatctgattttctcattcttatgtaagtctcccctcccctccaagggagaactcagctgagatcaagctgtttgggaaaactgggtgcacagggagatactccctggggctcctggctaggaggcctcctagcttctctactagtccttgaattaagaagtggtcactctaaaggagctttgagcgggcaggaagctgggcctagagacaaagtcagcagcaccagataattgtgatggaaagggcttctgactcagcttccctgggtcgggaactccgagtgccggctgtccccagccctgctgttctggccccagatgcgtggtgccccctcctcatccgttagtcctgcccatcccttccttcttgactctgcccaccccactgcccttgcccagaggccaaggtcttggggcccagagaaaagtagggctgtgcggtcaagatcagggtcacttaccagctatgtgaccttgggcaagttccttaatgtctctgagtcctgatcttttcatctctaaacttgggaccacgtccgatcttttgaggaggctttccaaagtggaggctttggttgcccccgtcctaatgctctggcagtggggtgatgttgaggtttgtaggaataaggttgtagatgcctggctctgctgaggttcagcctgtcagatatttaggttacaggctctagacctgcacagtccagtacagccactgacagccacacgtggctactgagcttttaatatgtggctggtcccaattgagacgtgccgtgagtgtaaaatgcaccctggatttcaagacttagtatgaaaagaatgtaaaatacctcgttactaattttatattggttatatgttaaagtgataagattttagatctgttgggttaaataaaatatactattaacatt

SEQ ID NO: 97970 - DNA, 816 bp, Artificial Sequence
  derived and/or modified sequence
atgaccctgcactgcgccttccagcccacccaccccatcatctgcttcagaagagtggcctgcctgatccaccaccaggaccccctgttcctggacctgatgggcacctgccacagcgacagcaccaagcccgccatcctgaagccccagcacctgacctggtacagaacccacctggccagaggcctgaccctgtacccccccgacatcctggacgccatgctgaaggagaagaagctggcccaggaccagaacggcgccctgatgatccccatccaggacctggaggacatgcccgccccccagtacccctacatcccccccatgaccgagttcttcttcgacggcaccagcgacatcaccatcttccccccccccatcagcgtggagcccgtggaggtggacttcggcgcctgccccggccccgaggcccccaaccccgtgcccctgtgcctgatgaaccacaccaagggcaagatcatggtggtgtggaccagaagaagcgactgccccttctgggtgacccccgagagctgcgacgtgccccccctgaagagcatggccatgagactgcacttccagcccccccaccccaactgcctgtacaccgtggagctggaggccttcgccatctacaaggtgtgcgccagaaacgagagagaggagtgcggcgtgagcgccagaagcctgagcggcctggtgggctggcaggaggtgaccgagggcagcttcagactgcaccccctgagagccagactgagcctgggctggaccgtgacccccatgagcctgagcccccccaagctgctggcctag

SEQ ID NO: 97971 - protein, 2615 aa, Artificial Sequence
  derived and/or modified sequence
MKILLIIFVLIIWTETLADQSPGPGPVYADVVFLVDSSDHLGPKSFPFVKTFINKMINSLPIEANKYRVALAQYSDEFHSEFHLSTFKGRSPMLNHLKKNFQFIGGSLQIGKALQEAHRTYFSAPINGRDRKQFPPILVVLASAESEDEVEEASKALQKDGVKIISVGVQKASEENLKAMATSHFHFNLRTIRDLSTFSQNMTQIIKDVTKYKEGAVDADMQVHFPISCQKDSLADLVFLVDESLGTGGNLRHLQTFLENITSSMDVKENCMRLGLMSYSNSAKTISFLKSSTTQSEFQQQIKNLSIQVGKSNTGAAIDQMRRDGFSESYGSRRAQGVPQIAVLVTHRPSDDEVHDAALNLRLEDVNVFALSIQGANNTQLEEIVSYPPEQTISTLKSYADLETYSTKFLKKLQNEIWSQISTYAEQRNLDKTGCVDTKEADIHFLIDGSSSIQEKQFEQIKRFMLEVTEMFSIGPDKVRVGVVQYSDDTEVEFYITDYSNDIDLRKAIFNIKQLTGGTYTGKALDYILQIIKNGMKDRMSKVPCYLIVLTDGMSTDRVVEPAKRLRAEQITVHAVGIGAANKIELQEIAGKEERVSFGQNFDALKSIKNEVVREICAEKGCEDMKADIMFLVDSSWSIGNENFRKMKIFMKNLLTKIQIGADKTQIGVVQFSDKTKEEFQLNRYFTQQEISDAIDRMSLINEGTLTGKALNFVGQYFTHSKGARLGAKKFLILITDGVAQDDVRDPARILRGKDVTIFSVGVYNANRSQLEEISGDSSLVFHVENFDHLKALERKLIFRVCALHDCKRITLLDVVFVLDHSGSIKKQYQDHMINLTIHLVKKADVGRDRVQFGALKYSDQPNILFYLNTYSNRSAIIENLRKRRDTGGNTYTAKALKHANALFTEEHGSRIKQNVKQMLIVITDGESHDHDQLNDTALELRNKGITIFAVGVGKANQKELEGMAGNKNNTIYVDNFDKLKDVFTLVQERMCTEAPEVCHLQEADVIFLCDGSDRVSNSDFVTMTTFLSDLIDNFDIQSQRMKIGMAQFGSNYQSIIELKNSLTKTQWKTQIQNVSKSGGFPRIDFALKKVSNMFNLHAGGRRNAGVPQTLVVITSGDPRYDVADAVKTLKDLGICVLVLGIGDVYKEHLLPITGNSEKIITFQDFDKLKNVDVKKRIIREICQSCGKTNCFMDIVVGFDISTHVQGQPLFQGHPQLESYLPGILEDISSIKGVSCGAGTEAQVSLAFKVNSDQGFPAKFQIYQKAVFDSLLQVNVSGPTHLNAQFLRSLWDTFKDKSASRGQVLLIFSDGLQSESNIMLENQSDRLREAGLDALLVVSLNTTAHHEFSSFEFGKRFDYRTHLTIGMRELGKKLSQYLGNIAERTCCCTFCKCPGIPGPHGTRGLQAMKGSQGLKGSRGHRGEDGNPGVRGDTGPQGDKGIAGCPGAWGQKGLKGFSGPKGGHGDDGIDGLDGEEGCHGFPGIKGEKGDPGSQGSPGSRGAPGQYGEKGFPGDPGNPGQNNNIKGQKGSKGEQGRQGRSGQKGVQGSPSSRGSRGREGQRGLRGVSGEPGNPGPTGTLGAEGLQGPQGSQGNPGRKGEKGSQGQKGPQGSPGLMGAKGSTGRPGLLGKKGEPGLPGDLGPVGQTGQRGRQGDSGIPGYGQMGRKGVKGPRGFPGDAGQKGDIGNPGIPGGPGPKGFRGLALTVGLKGEEGSRGLPGPPGQRGIKGMAGQPVYSQCDLIRFLREHSLCSLEKCPAYPTELVFALDNSYDVTEESFNKTRDIITSIVNDLNIRENNCPVGARVAMVSYNSGTSYLIRWSDYNRKKQLLQQLSQIKYQDTTEPRDVGNAMRFVTRNVFKRTYAGANVRRVAVFFSNGQTASRSSIITATMEFSALDISPTVFAFDERVFLEAFGFDNTGTFQVIPVPPNGENQTLERLRRCALCYDKCFPNACIREAFLPEDSYMDVVFLIDNSRNIAKDEFKAVKALVSSVIDNFNIASDPLISDSGDRIALLSYSPWESSRRKMGTVKTEFDFITYDNQLLMKNHIQTSFQQLNGEATIGRALLWTTENLFPETPYLRKHKVIFVVSAGENYERKEFVKMMALRAKCQGYVIFVISLGSTRKDDMEELASYPLDQHLIQLGRIHKPDLNYIAKFLKPFLYSVRRGFNQYPPPMLEDACRLINLGGENIQNDGFQFVTELQEDFLGGNGFIGQELNSGRESPFVKTEDNGSDYLVYLPSQMFEPQKLMINYEKDQKSAEIASLTSGHENYGRKEEPDHTYEPGDVSLQEYYMDVAFLIDASQRVGSDEFKEVKAFITSVLDYFHIAPTPLTSTLGDRVAVLSYSPPGYMPNTEECPVYLEFDLVTYNSIHQMKHHLQDSQQLNGDVFIGHALQWTIDNVFVGTPNLRKNKVIFVISAGETNSLDKDVLRNVSLRAKCQGYSIFVFSFGPKHNDKELEELASHPLDHHLVQLGRTHKPDWNYIIKFVKPFVHLIRRAINKYPTEDMKATCVNMTSPNPENGGTENTVLLLPGIYEIKTENGDLFDEFDSQAQHLLVLGNNHSSGSETATDLMQKLYLLFSTEKLAMKDKEKAHLEEISALVVDKQQEKEDKEMEATDI

SEQ ID NO: 97972 - protein, 2615 aa, Artificial Sequence
  derived and/or modified sequence
MKILLIIFVLIIWTETLADQSPGPGPVYADVVFLVDSSDHLGPKSFPFVKTFINKMINSLPIEANKYRVALAQYSDEFHSEFHLSTFKGRSPMLNHLKKNFQFIGGSLQIGKALQEAHRTYFSAPINGRDRKQFPPILVVLASAESEDEVEEASKALQKDGVKIISVGVQKASEENLKAMATSHFHFNLRTIRDLSTFSQNMTQIIKDVTKYKEGAVDADMQVHFPISCQKDSLADLVFLVDESLGTGGNLRHLQTFLENITSSMDVKENCMRLGLMSYSNSAKTISFLKSSTTQSEFQQQIKNLSIQVGKSNTGAAIDQMRRDGFSESYGSRRAQGVPQIAVLVTHRPSDDEVHDAALNLRLEDVNVFALSIQGANNTQLEEIVSYPPEQTISTLKSYADLETYSTKFLKKLQNEIWSQISTYAEQRNLDKTGCVDTKEADIHFLIDGSSSIQEKQFEQIKRFMLEVTEMFSIGPDKVRVGVVQYSDDTEVEFYITDYSNDIDLRKAIFNIKQLTGGTYTGKALDYILQIIKNGMKDRMSKVPCYLIVLTDGMSTDRVVEPAKRLRAEQITVHAVGIGAANKIELQEIAGKEERVSFGQNFDALKSIKNEVVREICAEKGCEDMKADIMFLVDSSWSIGNENFRKMKIFMKNLLTKIQIGADKTQIGVVQFSDKTKEEFQLNRYFTQQEISDAIDRMSLINEGTLTGKALNFVGQYFTHSKGARLGAKKFLILITDGVAQDDVRDPARILRGKDVTIFSVGVYNANRSQLEEISGDSSLVFHVENFDHLKALERKLIFRVCALHDCKRITLLDVVFVLDHSGSIKKQYQDHMINLTIHLVKKADVGRDRVQFGALKYSDQPNILFYLNTYSNRSAIIENLRKRRDTGGNTYTAKALKHANALFTEEHGSRIKQNVKQMLIVITDGESHDHDQLNDTALELRNKGITIFAVGVGKANQKELEGMAGNKNNTIYVDNFDKLKDVFTLVQERMCTEAPEVCHLQEADVIFLCDGSDRVSNSDFVTMTTFLSDLIDNFDIQSQRMKIGMAQFGSNYQSIIELKNSLTKTQWKTQIQNVSKSGGFPRIDFALKKVSNMFNLHAGGRRNAGVPQTLVVITSGDPRYDVADAVKTLKDLGICVLVLGIGDVYKEHLLPITGNSEKIITFQDFDKLKNVDVKKRIIREICQSCGKTNCFMDIVVGFDISTHVQGQPLFQGHPQLESYLPGILEDISSIKGVSCGAGTEAQVSLAFKVNSDQGFPAKFQIYQKAVFDSLLQVNVSGPTHLNAQFLRSLWDTFKDKSASRGQVLLIFSDGLQSESNIMLENQSDRLREAGLDALLVVSLNTTAHHEFSSFEFGKRFDYRTHLTIGMRELGKKLSQYLGNIAERTCCCTFCKCPGIPGPHGTRGLQAMKGSQGLKGSRGHRGEDGNPGVRGDTGPQGDKGIAGCPGAWGQKGLKGFSGPKGGHGDDGIDGLDGEEGCHGFPGIKGEKGDPGSQGSPGSRGAPGQYGEKGFPGDPGNPGQNNNIKGQKGSKGEQGRQGRSGQKGVQGSPSSRGSRGREGQRGLRGVSGEPGNPGPTGTLGAEGLQGPQGSQGNPGRKGEKGSQGQKGPQGSPGLMGAKGSTGRPGLLGKKGEPGLPGDLGPVGQTGQRGRQGDSGIPGYGQMGRKGVKGPRGFPGDAGQKGDIGNPGIPGGPGPKGFRGLALTVGLKGEEGSRGLPGPPGQRGIKGMAGQPVYSQCDLIRFLREHSPCWKEKCPAYPTELVFALDNSYDVTEESFNKTRDIITSIVNDLNIRENNCPVGARVAMVSYNSGTSYLIRWSDYNRKKQLLQQLSQIKYQDTTEPRDVGNAMRFVTRNVFKRTYAGANVRRVAVFFSNGQTASRSSIITATMEFSALDISPTVFAFDERVFLEAFGFDNTGTFQVIPVPPNGENQTLERLRRCALCYDKCFPNACIREAFLPEDSYMDVVFLIDNSRNIAKDEFKAVKALVSSVIDNFNIASDPLISDSGDRIALLSYSPWESSRRKMGTVKTEFDFITYDNQLLMKNHIQTSFQQLNGEATIGRALLWTTENLFPETPYLRKHKVIFVVSAGENYERKEFVKMMALRAKCQGYVIFVISLGSTRKDDMEELASYPLDQHLIQLGRIHKPDLNYIAKFLKPFLYSVRRGFNQYPPPMLEDACRLINLGGENIQNDGFQFVTELQEDFLGGNGFIGQELNSGRESPFVKTEDNGSDYLVYLPSQMFEPQKLMINYEKDQKSAEIASLTSGHENYGRKEEPDHTYEPGDVSLQEYYMDVAFLIDASQRVGSDEFKEVKAFITSVLDYFHIAPTPLTSTLGDRVAVLSYSPPGYMPNTEECPVYLEFDLVTYNSIHQMKHHLQDSQQLNGDVFIGHALQWTIDNVFVGTPNLRKNKVIFVISAGETNSLDKDVLRNVSLRAKCQGYSIFVFSFGPKHNDKELEELASHPLDHHLVQLGRTHKPDWNYIIKFVKPFVHLIRRAINKYPTEDMKATCVNMTSPNPENGGTENTVLLLPGIYEIKTENGDLFDEFDSQAQHLLVLGNNHSSGSETATDLMQKLYLLFSTEKLAMKDKEKAHLEEISALVVDKQQEKEDKEMEATDI

SEQ ID NO: 97973 - protein, 557 aa, Artificial Sequence
  derived and/or modified sequence
IGRALLWTTENLFPETPYLRKHKVIFVVSAGENYERKEFVKMMALRAKCQGYVIFVISLGSTRKDDMEELASYPLDQHLIQLGRIHKPDLNYIAKFLKPFLYSVRRGFNQYPPPMLEDACRLINLGGENIQNDGFQFVTELQEDFLGGNGFIGQELNSGRESPFVKTEDNGSDYLVYLPSQMFEPQKLMINYEKDQKSAEIASLTSGHENYGRKEEPDHTYEPGDVSLQEYYMDVAFLIDASQRVGSDEFKEVKAFITSVLDYFHIAPTPLTSTLGDRVAVLSYSPPGYMPNTEECPVYLEFDLVTYNSIHQMKHHLQDSQQLNGDVFIGHALQWTIDNVFVGTPNLRKNKVIFVISAGETNSLDKDVLRNVSLRAKCQGYSIFVFSFGPKHNDKELEELASHPLDHHLVQLGRTHKPDWNYIIKFVKPFVHLIRRAINKYPTEDMKATCVNMTSPNPENGGTENTVLLLPGIYEIKTENGDLFDEFDSQAQHLLVLGNNHSSGSETATDLMQKLYLLFSTEKLAMKDKEKAHLEEISALVVDKQQEKEDGEDTRSS

SEQ ID NO: 97974 - protein, 2526 aa, Artificial Sequence
  derived and/or modified sequence
MKILLIIFVLIIWTETLADQSPGPGPVYADVVFLVDSSDHLGPKSFPFVKTFINKMINSLPIEANKYRVALAQYSDEFHSEFHLSTFKGRSPMLNHLKKNFQFIGGSLQIGKALQEAHRTYFSAPINGRDRKQFPPILVVLASAESEDEVEEASKALQKDGVKIISVGVQKASEENLKAMATSHFHFNLRTIRDLSTFSQNMTQIIKDVTKYKEGAVDADMQVHFPISCQKDSLADLVFLVDESLGTGGNLRHLQTFLENITSSMDVKENCMRLGLMSYSNSAKTISFLKSSTTQSEFQQQIKNLSIQVGKSNTGAAIDQMRRDGFSESYGSRRAQGVPQIAVLVTHRPSDDEVHDAALNLRLEDVNVFALSIQGANNTQLEEIVSYPPEQTISTLKSYADLETYSTKFLKKLQNEIWSQISTYAEQRNLDKTGCVDTKEADIHFLIDGSSSIQEKQFEQIKRFMLEVTEMFSIGPDKVRVGVVQYSDDTEVEFYITDYSNDIDLRKAIFNIKQLTGGTYTGKALDYILQIIKNGMKDRMSKVPCYLIVLTDGMSTDRVVEPAKRLRAEQITVHAVGIGAANKIELQEIAGKEERVSFGQNFDALKSIKNEVVREICAEKGCEDMKADIMFLVDSSWSIGNENFRKMKIFMKNLLTKIQIGADKTQIGVVQFSDKTKEEFQLNRYFTQQEISDAIDRMSLINEGTLTGKALNFVGQYFTHSKGARLGAKKFLILITDGVAQDDVRDPARILRGKDVTIFSVGVYNANRSQLEEISGDSSLVFHVENFDHLKALERKLIFRVCALHDCKRITLLDVVFVLDHSGSIKKQYQDHMINLTIHLVKKADVGRDRVQFGALKYSDQPNILFYLNTYSNRSAIIENLRKRRDTGGNTYTAKALKHANALFTEEHGSRIKQNVKQMLIVITDGESHDHDQLNDTALELRNKGITIFAVGVGKANQKELEGMAGNKNNTIYVDNFDKLKDVFTLVQERMCTEAPEVCHLQEADVIFLCDGSDRVSNSDFVTMTTFLSDLIDNFDIQSQRMKIGMAQFGSNYQSIIELKNSLTKTQWKTQIQNVSKSGGFPRIDFALKKVSNMFNLHAGGRRNAGVPQTLVVITSGDPRYDVADAVKTLKDLGICVLVLGIGDVYKEHLLPITGNSEKIITFQDFDKLKNVDVKKRIIREICQSCGKTNCFMDIVVGFDISTHVQGQPLFQGHPQLESYLPGILEDISSIKGVSCGAGTEAQVSLAFKVNSDQGFPAKFQIYQKAVFDSLLQVNVSGPTHLNAQFLRSLWDTFKDKSASRGQVLLIFSDGLQSESNIMLENQSDRLREAGLDALLVVSLNTTAHHEFSSFEFGKRFDYRTHLTIGMRELGKKLSQYLGNIAERTCCCTFCKCPGIPGPHGTRGLQAMKGSQGLKGSRGHRGEDGNPGVRGDTGPQGDKGIAGCPGAWGQKGLKGFSGPKGGHGDDGIDGLDGEEGCHGFPGIKGEKGDPGSQGSPGSRGAPGQYGEKGFPGDPGNPGQNNNIKGQKGSKGEQGRQGRSGQKGVQGSPSSRGSRGREGQRGLRGVSGEPGNPGPTGTLGAEGLQGPQGSQGNPGRKGEKGSQGQKGPQGSPGLMGAKGSTGRPGLLGKKGEPGLPGDLGPVGQTGQRGRQGDSGIPGYGQMGRKGVKGPRGFPGDAGQKGDIGNPGIPGGPGPKGFRGLALTVGLKGEEGSRGLPGPPGQRGIKGMAGQPVYSQCDLIRFLREHSLCSLEKCPAYPTELVFALDNSYDVTEESFNKTRDIITSIVNDLNIRENNCPVGARVAMVSYNSGTSYLIRWSDYNRKKQLLQQLSQIKYQDTTEPRDVGNAMRFVTRNVFKRTYAGANVRRVAVFFSNGQTASRSSIITATMEFSALDISPTVFAFDERVFLEAFGFDNTGTFQVIPVPPNGENQTLERLRRCALCYDKCFPNACIREAFLPEDSYMDVVFLIDNSRNIAKDEFKAVKALVSSVIDNFNIASDPLISDSGDRIALLSYSPWESSRRKMGTVKTEFDFITYDNQLLMKNHIQTSFQQLNGEATIGRALLWTTENLFPETPYLRKHKVIFVVSAGENYERKEFVKMMALRAKCQGYVIFVISLGSTRKDDMEELASYPLDQHLIQLGRIHKPDLNYIAKFLKPFLYSVRRGFNQYPPPMLEDACRLINLGGENIQNDGFQFVTELQEDFLGGNGFIGQELNSGRESPFVKTEDNGSDYLVYLPSQMFEPQKLMINYEKDQKSAEIASLTSGHENYGRKEEPDHTYEPGDVSLQEYYMDVAFLIDASQRVGSDEFKEVKAFITSVLDYFHIAPTPLTSTLGDRVAVLSYSPPGYMPNTEECPVYLEFDLVTYNSIHQMKHHLQDSQQLNGDVFIGHALQWTIDNVFVGTPNLRKNKVIFVISAGETNSLDKDVLRNVSLRAKCQGYSIFVFSFGPKHNDKELEELASHPLDHHLVQLGRTHKPDWNYIIKFVKPFVHLIRRAINKYPTEDMKATCVNMTSPNPENGGTENTVLW

SEQ ID NO: 97975 - protein, 443 aa, Artificial Sequence
  derived and/or modified sequence
NQYPPPMLEDACRLINLGGENIQNDGFQFVTELQEDFLGGNGFIGQELNSGRESPFVKTEDNGSDYLVYLPSQMFEPQKLMINYEKDQKSAEIASLTSGHENYGRKEEPDHTYEPGDVSLQEYYMDVAFLIDASQRVGSDEFKEVKAFITSVLDYFHIAPTPLTSTLGDRVAVLSYSPPGYMPNTEECPVYLEFDLVTYNSIHQMKHHLQDSQQLNGDVFIGHALQWTIDNVFVGTPNLRKNKVIFVISAGETNSLDKDVLRNVSLRAKCQGYSIFVFSFGPKHNDKELEELASHPLDHHLVQLGRTHKPDWNYIIKFVKPFVHLIRRAINKYPTEDMKATCVNMTSPNPENGGTENTVLLLPGIYEIKTENGDLFDEFDSQAQHLLVLGNNHSSGSETATDLMQKLYLLFSTEKLAMKDKEKAHLEEISALVVDKQQEKEDL

SEQ ID NO: 97976 - DNA, 7848 bp, Artificial Sequence
  derived and/or modified sequence
atgaagatcctgctgatcatcttcgtgctgatcatctggaccgagaccctggccgaccagagccccggccccggccccgtgtacgccgacgtggtgttcctggtggacagcagcgaccacctgggccccaagagcttccccttcgtgaagaccttcatcaacaagatgatcaacagcctgcccatcgaggccaacaagtacagagtggccctggcccagtacagcgacgagttccacagcgagttccacctgagcaccttcaagggcagaagccccatgctgaaccacctgaagaagaacttccagttcatcggcggcagcctgcagatcggcaaggccctgcaggaggcccacagaacctacttcagcgcccccatcaacggcagagacagaaagcagttcccccccatcctggtggtgctggccagcgccgagagcgaggacgaggtggaggaggccagcaaggccctgcagaaggacggcgtgaagatcatcagcgtgggcgtgcagaaggccagcgaggagaacctgaaggccatggccaccagccacttccacttcaacctgagaaccatcagagacctgagcaccttcagccagaacatgacccagatcatcaaggacgtgaccaagtacaaggagggcgccgtggacgccgacatgcaggtgcacttccccatcagctgccagaaggacagcctggccgacctggtgttcctggtggacgagagcctgggcaccggcggcaacctgagacacctgcagaccttcctggagaacatcaccagcagcatggacgtgaaggagaactgcatgagactgggcctgatgagctacagcaacagcgccaagaccatcagcttcctgaagagcagcaccacccagagcgagttccagcagcagatcaagaacctgagcatccaggtgggcaagagcaacaccggcgccgccatcgaccagatgagaagagacggcttcagcgagagctacggcagcagaagagcccagggcgtgccccagatcgccgtgctggtgacccacagacccagcgacgacgaggtgcacgacgccgccctgaacctgagactggaggacgtgaacgtgttcgccctgagcatccagggcgccaacaacacccagctggaggagatcgtgagctacccccccgagcagaccatcagcaccctgaagagctacgccgacctggagacctacagcaccaagttcctgaagaagctgcagaacgagatctggagccagatcagcacctacgccgagcagagaaacctggacaagaccggctgcgtggacaccaaggaggccgacatccacttcctgatcgacggcagcagcagcatccaggagaagcagttcgagcagatcaagagattcatgctggaggtgaccgagatgttcagcatcggccccgacaaggtgagagtgggcgtggtgcagtacagcgacgacaccgaggtggagttctacatcaccgactacagcaacgacatcgacctgagaaaggccatcttcaacatcaagcagctgaccggcggcacctacaccggcaaggccctggactacatcctgcagatcatcaagaacggcatgaaggacagaatgagcaaggtgccctgctacctgatcgtgctgaccgacggcatgagcaccgacagagtggtggagcccgccaagagactgagagccgagcagatcaccgtgcacgccgtgggcatcggcgccgccaacaagatcgagctgcaggagatcgccggcaaggaggagagagtgagcttcggccagaacttcgacgccctgaagagcatcaagaacgaggtggtgagagagatctgcgccgagaagggctgcgaggacatgaaggccgacatcatgttcctggtggacagcagctggagcatcggcaacgagaacttcagaaagatgaagatcttcatgaagaacctgctgaccaagatccagatcggcgccgacaagacccagatcggcgtggtgcagttcagcgacaagaccaaggaggagttccagctgaacagatacttcacccagcaggagatcagcgacgccatcgacagaatgagcctgatcaacgagggcaccctgaccggcaaggccctgaacttcgtgggccagtacttcacccacagcaagggcgccagactgggcgccaagaagttcctgatcctgatcaccgacggcgtggcccaggacgacgtgagagaccccgccagaatcctgagaggcaaggacgtgaccatcttcagcgtgggcgtgtacaacgccaacagaagccagctggaggagatcagcggcgacagcagcctggtgttccacgtggagaacttcgaccacctgaaggccctggagagaaagctgatcttcagagtgtgcgccctgcacgactgcaagagaatcaccctgctggacgtggtgttcgtgctggaccacagcggcagcatcaagaagcagtaccaggaccacatgatcaacctgaccatccacctggtgaagaaggccgacgtgggcagagacagagtgcagttcggcgccctgaagtacagcgaccagcccaacatcctgttctacctgaacacctacagcaacagaagcgccatcatcgagaacctgagaaagagaagagacaccggcggcaacacctacaccgccaaggccctgaagcacgccaacgccctgttcaccgaggagcacggcagcagaatcaagcagaacgtgaagcagatgctgatcgtgatcaccgacggcgagagccacgaccacgaccagctgaacgacaccgccctggagctgagaaacaagggcatcaccatcttcgccgtgggcgtgggcaaggccaaccagaaggagctggagggcatggccggcaacaagaacaacaccatctacgtggacaacttcgacaagctgaaggacgtgttcaccctggtgcaggagagaatgtgcaccgaggcccccgaggtgtgccacctgcaggaggccgacgtgatcttcctgtgcgacggcagcgacagagtgagcaacagcgacttcgtgaccatgaccaccttcctgagcgacctgatcgacaacttcgacatccagagccagagaatgaagatcggcatggcccagttcggcagcaactaccagagcatcatcgagctgaagaacagcctgaccaagacccagtggaagacccagatccagaacgtgagcaagagcggcggcttccccagaatcgacttcgccctgaagaaggtgagcaacatgttcaacctgcacgccggcggcagaagaaacgccggcgtgccccagaccctggtggtgatcaccagcggcgaccccagatacgacgtggccgacgccgtgaagaccctgaaggacctgggcatctgcgtgctggtgctgggcatcggcgacgtgtacaaggagcacctgctgcccatcaccggcaacagcgagaagatcatcaccttccaggacttcgacaagctgaagaacgtggacgtgaagaagagaatcatcagagagatctgccagagctgcggcaagaccaactgcttcatggacatcgtggtgggcttcgacatcagcacccacgtgcagggccagcccctgttccagggccacccccagctggagagctacctgcccggcatcctggaggacatcagcagcatcaagggcgtgagctgcggcgccggcaccgaggcccaggtgagcctggccttcaaggtgaacagcgaccagggcttccccgccaagttccagatctaccagaaggccgtgttcgacagcctgctgcaggtgaacgtgagcggccccacccacctgaacgcccagttcctgagaagcctgtgggacaccttcaaggacaagagcgccagcagaggccaggtgctgctgatcttcagcgacggcctgcagagcgagagcaacatcatgctggagaaccagagcgacagactgagagaggccggcctggacgccctgctggtggtgagcctgaacaccaccgcccaccacgagttcagcagcttcgagttcggcaagagattcgactacagaacccacctgaccatcggcatgagagagctgggcaagaagctgagccagtacctgggcaacatcgccgagagaacctgctgctgcaccttctgcaagtgccccggcatccccggcccccacggcaccagaggcctgcaggccatgaagggcagccagggcctgaagggcagcagaggccacagaggcgaggacggcaaccccggcgtgagaggcgacaccggcccccagggcgacaagggcatcgccggctgccccggcgcctggggccagaagggcctgaagggcttcagcggccccaagggcggccacggcgacgacggcatcgacggcctggacggcgaggagggctgccacggcttccccggcatcaagggcgagaagggcgaccccggcagccagggcagccccggcagcagaggcgcccccggccagtacggcgagaagggcttccccggcgaccccggcaaccccggccagaacaacaacatcaagggccagaagggcagcaagggcgagcagggcagacagggcagaagcggccagaagggcgtgcagggcagccccagcagcagaggcagcagaggcagagagggccagagaggcctgagaggcgtgagcggcgagcccggcaaccccggccccaccggcaccctgggcgccgagggcctgcagggcccccagggcagccagggcaaccccggcagaaagggcgagaagggcagccagggccagaagggcccccagggcagccccggcctgatgggcgccaagggcagcaccggcagacccggcctgctgggcaagaagggcgagcccggcctgcccggcgacctgggccccgtgggccagaccggccagagaggcagacagggcgacagcggcatccccggctacggccagatgggcagaaagggcgtgaagggccccagaggcttccccggcgacgccggccagaagggcgacatcggcaaccccggcatccccggcggccccggccccaagggcttcagaggcctggccctgaccgtgggcctgaagggcgaggagggcagcagaggcctgcccggcccccccggccagagaggcatcaagggcatggccggccagcccgtgtacagccagtgcgacctgatcagattcctgagagagcacagcctgtgcagcctggagaagtgccccgcctaccccaccgagctggtgttcgccctggacaacagctacgacgtgaccgaggagagcttcaacaagaccagagacatcatcaccagcatcgtgaacgacctgaacatcagagagaacaactgccccgtgggcgccagagtggccatggtgagctacaacagcggcaccagctacctgatcagatggagcgactacaacagaaagaagcagctgctgcagcagctgagccagatcaagtaccaggacaccaccgagcccagagacgtgggcaacgccatgagattcgtgaccagaaacgtgttcaagagaacctacgccggcgccaacgtgagaagagtggccgtgttcttcagcaacggccagaccgccagcagaagcagcatcatcaccgccaccatggagttcagcgccctggacatcagccccaccgtgttcgccttcgacgagagagtgttcctggaggccttcggcttcgacaacaccggcaccttccaggtgatccccgtgccccccaacggcgagaaccagaccctggagagactgagaagatgcgccctgtgctacgacaagtgcttccccaacgcctgcatcagagaggccttcctgcccgaggacagctacatggacgtggtgttcctgatcgacaacagcagaaacatcgccaaggacgagttcaaggccgtgaaggccctggtgagcagcgtgatcgacaacttcaacatcgccagcgaccccctgatcagcgacagcggcgacagaatcgccctgctgagctacagcccctgggagagcagcagaagaaagatgggcaccgtgaagaccgagttcgacttcatcacctacgacaaccagctgctgatgaagaaccacatccagaccagcttccagcagctgaacggcgaggccaccatcggcagagccctgctgtggaccaccgagaacctgttccccgagaccccctacctgagaaagcacaaggtgatcttcgtggtgagcgccggcgagaactacgagagaaaggagttcgtgaagatgatggccctgagagccaagtgccagggctacgtgatcttcgtgatcagcctgggcagcaccagaaaggacgacatggaggagctggccagctaccccctggaccagcacctgatccagctgggcagaatccacaagcccgacctgaactacatcgccaagttcctgaagcccttcctgtacagcgtgagaagaggcttcaaccagtaccccccccccatgctggaggacgcctgcagactgatcaacctgggcggcgagaacatccagaacgacggcttccagttcgtgaccgagctgcaggaggacttcctgggcggcaacggcttcatcggccaggagctgaacagcggcagagagagccccttcgtgaagaccgaggacaacggcagcgactacctggtgtacctgcccagccagatgttcgagccccagaagctgatgatcaactacgagaaggaccagaagagcgccgagatcgccagcctgaccagcggccacgagaactacggcagaaaggaggagcccgaccacacctacgagcccggcgacgtgagcctgcaggagtactacatggacgtggccttcctgatcgacgccagccagagagtgggcagcgacgagttcaaggaggtgaaggccttcatcaccagcgtgctggactacttccacatcgcccccacccccctgaccagcaccctgggcgacagagtggccgtgctgagctacagcccccccggctacatgcccaacaccgaggagtgccccgtgtacctggagttcgacctggtgacctacaacagcatccaccagatgaagcaccacctgcaggacagccagcagctgaacggcgacgtgttcatcggccacgccctgcagtggaccatcgacaacgtgttcgtgggcacccccaacctgagaaagaacaaggtgatcttcgtgatcagcgccggcgagaccaacagcctggacaaggacgtgctgagaaacgtgagcctgagagccaagtgccagggctacagcatcttcgtgttcagcttcggccccaagcacaacgacaaggagctggaggagctggccagccaccccctggaccaccacctggtgcagctgggcagaacccacaagcccgactggaactacatcatcaagttcgtgaagcccttcgtgcacctgatcagaagagccatcaacaagtaccccaccgaggacatgaaggccacctgcgtgaacatgaccagccccaaccccgagaacggcggcaccgagaacaccgtgctgctgctgcccggcatctacgagatcaagaccgagaacggcgacctgttcgacgagttcgacagccaggcccagcacctgctggtgctgggcaacaaccacagcagcggcagcgagaccgccaccgacctgatgcagaagctgtacctgctgttcagcaccgagaagctggccatgaaggacaaggagaaggcccacctggaggagatcagcgccctggtggtggacaagcagcaggagaaggaggacaaggagatggaggccaccgacatctag

SEQ ID NO: 97977 - DNA, 7848 bp, Artificial Sequence
  derived and/or modified sequence
atgaagatcctgctgatcatcttcgtgctgatcatctggaccgagaccctggccgaccagagccccggccccggccccgtgtacgccgacgtggtgttcctggtggacagcagcgaccacctgggccccaagagcttccccttcgtgaagaccttcatcaacaagatgatcaacagcctgcccatcgaggccaacaagtacagagtggccctggcccagtacagcgacgagttccacagcgagttccacctgagcaccttcaagggcagaagccccatgctgaaccacctgaagaagaacttccagttcatcggcggcagcctgcagatcggcaaggccctgcaggaggcccacagaacctacttcagcgcccccatcaacggcagagacagaaagcagttcccccccatcctggtggtgctggccagcgccgagagcgaggacgaggtggaggaggccagcaaggccctgcagaaggacggcgtgaagatcatcagcgtgggcgtgcagaaggccagcgaggagaacctgaaggccatggccaccagccacttccacttcaacctgagaaccatcagagacctgagcaccttcagccagaacatgacccagatcatcaaggacgtgaccaagtacaaggagggcgccgtggacgccgacatgcaggtgcacttccccatcagctgccagaaggacagcctggccgacctggtgttcctggtggacgagagcctgggcaccggcggcaacctgagacacctgcagaccttcctggagaacatcaccagcagcatggacgtgaaggagaactgcatgagactgggcctgatgagctacagcaacagcgccaagaccatcagcttcctgaagagcagcaccacccagagcgagttccagcagcagatcaagaacctgagcatccaggtgggcaagagcaacaccggcgccgccatcgaccagatgagaagagacggcttcagcgagagctacggcagcagaagagcccagggcgtgccccagatcgccgtgctggtgacccacagacccagcgacgacgaggtgcacgacgccgccctgaacctgagactggaggacgtgaacgtgttcgccctgagcatccagggcgccaacaacacccagctggaggagatcgtgagctacccccccgagcagaccatcagcaccctgaagagctacgccgacctggagacctacagcaccaagttcctgaagaagctgcagaacgagatctggagccagatcagcacctacgccgagcagagaaacctggacaagaccggctgcgtggacaccaaggaggccgacatccacttcctgatcgacggcagcagcagcatccaggagaagcagttcgagcagatcaagagattcatgctggaggtgaccgagatgttcagcatcggccccgacaaggtgagagtgggcgtggtgcagtacagcgacgacaccgaggtggagttctacatcaccgactacagcaacgacatcgacctgagaaaggccatcttcaacatcaagcagctgaccggcggcacctacaccggcaaggccctggactacatcctgcagatcatcaagaacggcatgaaggacagaatgagcaaggtgccctgctacctgatcgtgctgaccgacggcatgagcaccgacagagtggtggagcccgccaagagactgagagccgagcagatcaccgtgcacgccgtgggcatcggcgccgccaacaagatcgagctgcaggagatcgccggcaaggaggagagagtgagcttcggccagaacttcgacgccctgaagagcatcaagaacgaggtggtgagagagatctgcgccgagaagggctgcgaggacatgaaggccgacatcatgttcctggtggacagcagctggagcatcggcaacgagaacttcagaaagatgaagatcttcatgaagaacctgctgaccaagatccagatcggcgccgacaagacccagatcggcgtggtgcagttcagcgacaagaccaaggaggagttccagctgaacagatacttcacccagcaggagatcagcgacgccatcgacagaatgagcctgatcaacgagggcaccctgaccggcaaggccctgaacttcgtgggccagtacttcacccacagcaagggcgccagactgggcgccaagaagttcctgatcctgatcaccgacggcgtggcccaggacgacgtgagagaccccgccagaatcctgagaggcaaggacgtgaccatcttcagcgtgggcgtgtacaacgccaacagaagccagctggaggagatcagcggcgacagcagcctggtgttccacgtggagaacttcgaccacctgaaggccctggagagaaagctgatcttcagagtgtgcgccctgcacgactgcaagagaatcaccctgctggacgtggtgttcgtgctggaccacagcggcagcatcaagaagcagtaccaggaccacatgatcaacctgaccatccacctggtgaagaaggccgacgtgggcagagacagagtgcagttcggcgccctgaagtacagcgaccagcccaacatcctgttctacctgaacacctacagcaacagaagcgccatcatcgagaacctgagaaagagaagagacaccggcggcaacacctacaccgccaaggccctgaagcacgccaacgccctgttcaccgaggagcacggcagcagaatcaagcagaacgtgaagcagatgctgatcgtgatcaccgacggcgagagccacgaccacgaccagctgaacgacaccgccctggagctgagaaacaagggcatcaccatcttcgccgtgggcgtgggcaaggccaaccagaaggagctggagggcatggccggcaacaagaacaacaccatctacgtggacaacttcgacaagctgaaggacgtgttcaccctggtgcaggagagaatgtgcaccgaggcccccgaggtgtgccacctgcaggaggccgacgtgatcttcctgtgcgacggcagcgacagagtgagcaacagcgacttcgtgaccatgaccaccttcctgagcgacctgatcgacaacttcgacatccagagccagagaatgaagatcggcatggcccagttcggcagcaactaccagagcatcatcgagctgaagaacagcctgaccaagacccagtggaagacccagatccagaacgtgagcaagagcggcggcttccccagaatcgacttcgccctgaagaaggtgagcaacatgttcaacctgcacgccggcggcagaagaaacgccggcgtgccccagaccctggtggtgatcaccagcggcgaccccagatacgacgtggccgacgccgtgaagaccctgaaggacctgggcatctgcgtgctggtgctgggcatcggcgacgtgtacaaggagcacctgctgcccatcaccggcaacagcgagaagatcatcaccttccaggacttcgacaagctgaagaacgtggacgtgaagaagagaatcatcagagagatctgccagagctgcggcaagaccaactgcttcatggacatcgtggtgggcttcgacatcagcacccacgtgcagggccagcccctgttccagggccacccccagctggagagctacctgcccggcatcctggaggacatcagcagcatcaagggcgtgagctgcggcgccggcaccgaggcccaggtgagcctggccttcaaggtgaacagcgaccagggcttccccgccaagttccagatctaccagaaggccgtgttcgacagcctgctgcaggtgaacgtgagcggccccacccacctgaacgcccagttcctgagaagcctgtgggacaccttcaaggacaagagcgccagcagaggccaggtgctgctgatcttcagcgacggcctgcagagcgagagcaacatcatgctggagaaccagagcgacagactgagagaggccggcctggacgccctgctggtggtgagcctgaacaccaccgcccaccacgagttcagcagcttcgagttcggcaagagattcgactacagaacccacctgaccatcggcatgagagagctgggcaagaagctgagccagtacctgggcaacatcgccgagagaacctgctgctgcaccttctgcaagtgccccggcatccccggcccccacggcaccagaggcctgcaggccatgaagggcagccagggcctgaagggcagcagaggccacagaggcgaggacggcaaccccggcgtgagaggcgacaccggcccccagggcgacaagggcatcgccggctgccccggcgcctggggccagaagggcctgaagggcttcagcggccccaagggcggccacggcgacgacggcatcgacggcctggacggcgaggagggctgccacggcttccccggcatcaagggcgagaagggcgaccccggcagccagggcagccccggcagcagaggcgcccccggccagtacggcgagaagggcttccccggcgaccccggcaaccccggccagaacaacaacatcaagggccagaagggcagcaagggcgagcagggcagacagggcagaagcggccagaagggcgtgcagggcagccccagcagcagaggcagcagaggcagagagggccagagaggcctgagaggcgtgagcggcgagcccggcaaccccggccccaccggcaccctgggcgccgagggcctgcagggcccccagggcagccagggcaaccccggcagaaagggcgagaagggcagccagggccagaagggcccccagggcagccccggcctgatgggcgccaagggcagcaccggcagacccggcctgctgggcaagaagggcgagcccggcctgcccggcgacctgggccccgtgggccagaccggccagagaggcagacagggcgacagcggcatccccggctacggccagatgggcagaaagggcgtgaagggccccagaggcttccccggcgacgccggccagaagggcgacatcggcaaccccggcatccccggcggccccggccccaagggcttcagaggcctggccctgaccgtgggcctgaagggcgaggagggcagcagaggcctgcccggcccccccggccagagaggcatcaagggcatggccggccagcccgtgtacagccagtgcgacctgatcagattcctgagagagcacagcccctgctggaaggagaagtgccccgcctaccccaccgagctggtgttcgccctggacaacagctacgacgtgaccgaggagagcttcaacaagaccagagacatcatcaccagcatcgtgaacgacctgaacatcagagagaacaactgccccgtgggcgccagagtggccatggtgagctacaacagcggcaccagctacctgatcagatggagcgactacaacagaaagaagcagctgctgcagcagctgagccagatcaagtaccaggacaccaccgagcccagagacgtgggcaacgccatgagattcgtgaccagaaacgtgttcaagagaacctacgccggcgccaacgtgagaagagtggccgtgttcttcagcaacggccagaccgccagcagaagcagcatcatcaccgccaccatggagttcagcgccctggacatcagccccaccgtgttcgccttcgacgagagagtgttcctggaggccttcggcttcgacaacaccggcaccttccaggtgatccccgtgccccccaacggcgagaaccagaccctggagagactgagaagatgcgccctgtgctacgacaagtgcttccccaacgcctgcatcagagaggccttcctgcccgaggacagctacatggacgtggtgttcctgatcgacaacagcagaaacatcgccaaggacgagttcaaggccgtgaaggccctggtgagcagcgtgatcgacaacttcaacatcgccagcgaccccctgatcagcgacagcggcgacagaatcgccctgctgagctacagcccctgggagagcagcagaagaaagatgggcaccgtgaagaccgagttcgacttcatcacctacgacaaccagctgctgatgaagaaccacatccagaccagcttccagcagctgaacggcgaggccaccatcggcagagccctgctgtggaccaccgagaacctgttccccgagaccccctacctgagaaagcacaaggtgatcttcgtggtgagcgccggcgagaactacgagagaaaggagttcgtgaagatgatggccctgagagccaagtgccagggctacgtgatcttcgtgatcagcctgggcagcaccagaaaggacgacatggaggagctggccagctaccccctggaccagcacctgatccagctgggcagaatccacaagcccgacctgaactacatcgccaagttcctgaagcccttcctgtacagcgtgagaagaggcttcaaccagtaccccccccccatgctggaggacgcctgcagactgatcaacctgggcggcgagaacatccagaacgacggcttccagttcgtgaccgagctgcaggaggacttcctgggcggcaacggcttcatcggccaggagctgaacagcggcagagagagccccttcgtgaagaccgaggacaacggcagcgactacctggtgtacctgcccagccagatgttcgagccccagaagctgatgatcaactacgagaaggaccagaagagcgccgagatcgccagcctgaccagcggccacgagaactacggcagaaaggaggagcccgaccacacctacgagcccggcgacgtgagcctgcaggagtactacatggacgtggccttcctgatcgacgccagccagagagtgggcagcgacgagttcaaggaggtgaaggccttcatcaccagcgtgctggactacttccacatcgcccccacccccctgaccagcaccctgggcgacagagtggccgtgctgagctacagcccccccggctacatgcccaacaccgaggagtgccccgtgtacctggagttcgacctggtgacctacaacagcatccaccagatgaagcaccacctgcaggacagccagcagctgaacggcgacgtgttcatcggccacgccctgcagtggaccatcgacaacgtgttcgtgggcacccccaacctgagaaagaacaaggtgatcttcgtgatcagcgccggcgagaccaacagcctggacaaggacgtgctgagaaacgtgagcctgagagccaagtgccagggctacagcatcttcgtgttcagcttcggccccaagcacaacgacaaggagctggaggagctggccagccaccccctggaccaccacctggtgcagctgggcagaacccacaagcccgactggaactacatcatcaagttcgtgaagcccttcgtgcacctgatcagaagagccatcaacaagtaccccaccgaggacatgaaggccacctgcgtgaacatgaccagccccaaccccgagaacggcggcaccgagaacaccgtgctgctgctgcccggcatctacgagatcaagaccgagaacggcgacctgttcgacgagttcgacagccaggcccagcacctgctggtgctgggcaacaaccacagcagcggcagcgagaccgccaccgacctgatgcagaagctgtacctgctgttcagcaccgagaagctggccatgaaggacaaggagaaggcccacctggaggagatcagcgccctggtggtggacaagcagcaggagaaggaggacaaggagatggaggccaccgacatctag

SEQ ID NO: 97978 - DNA, 1674 bp, Artificial Sequence
  derived and/or modified sequence
atcggcagagccctgctgtggaccaccgagaacctgttccccgagaccccctacctgagaaagcacaaggtgatcttcgtggtgagcgccggcgagaactacgagagaaaggagttcgtgaagatgatggccctgagagccaagtgccagggctacgtgatcttcgtgatcagcctgggcagcaccagaaaggacgacatggaggagctggccagctaccccctggaccagcacctgatccagctgggcagaatccacaagcccgacctgaactacatcgccaagttcctgaagcccttcctgtacagcgtgagaagaggcttcaaccagtaccccccccccatgctggaggacgcctgcagactgatcaacctgggcggcgagaacatccagaacgacggcttccagttcgtgaccgagctgcaggaggacttcctgggcggcaacggcttcatcggccaggagctgaacagcggcagagagagccccttcgtgaagaccgaggacaacggcagcgactacctggtgtacctgcccagccagatgttcgagccccagaagctgatgatcaactacgagaaggaccagaagagcgccgagatcgccagcctgaccagcggccacgagaactacggcagaaaggaggagcccgaccacacctacgagcccggcgacgtgagcctgcaggagtactacatggacgtggccttcctgatcgacgccagccagagagtgggcagcgacgagttcaaggaggtgaaggccttcatcaccagcgtgctggactacttccacatcgcccccacccccctgaccagcaccctgggcgacagagtggccgtgctgagctacagcccccccggctacatgcccaacaccgaggagtgccccgtgtacctggagttcgacctggtgacctacaacagcatccaccagatgaagcaccacctgcaggacagccagcagctgaacggcgacgtgttcatcggccacgccctgcagtggaccatcgacaacgtgttcgtgggcacccccaacctgagaaagaacaaggtgatcttcgtgatcagcgccggcgagaccaacagcctggacaaggacgtgctgagaaacgtgagcctgagagccaagtgccagggctacagcatcttcgtgttcagcttcggccccaagcacaacgacaaggagctggaggagctggccagccaccccctggaccaccacctggtgcagctgggcagaacccacaagcccgactggaactacatcatcaagttcgtgaagcccttcgtgcacctgatcagaagagccatcaacaagtaccccaccgaggacatgaaggccacctgcgtgaacatgaccagccccaaccccgagaacggcggcaccgagaacaccgtgctgctgctgcccggcatctacgagatcaagaccgagaacggcgacctgttcgacgagttcgacagccaggcccagcacctgctggtgctgggcaacaaccacagcagcggcagcgagaccgccaccgacctgatgcagaagctgtacctgctgttcagcaccgagaagctggccatgaaggacaaggagaaggcccacctggaggagatcagcgccctggtggtggacaagcagcaggagaaggaggacggcgaggacaccagaagcagctag

SEQ ID NO: 97979 - DNA, 7848 bp, Artificial Sequence
  derived and/or modified sequence
atgaaaatcctcctgattattttcgtactgatcatatggactgaaacgttggcagaccagagtccaggccctgggcccgtttatgccgatgtggtcttccttgtagacagcagtgaccacctggggccaaagtcattcccctttgtcaagaccttcattaacaagatgataaactccttgccaatcgaagccaacaaataccgtgtcgctctggcccagtactcggacgaattccattccgagtttcacctgtctacgttcaaaggcaggagccccatgttgaatcacctaaagaagaactttcagttcatcggaggcagcttacagatagggaaggcacttcaggaggcccacaggacttacttctcagcaccgattaacggacgcgacagaaagcaatttccccccatcctggtggtgctcgcctcagcagagtccgaagacgaagtcgaagaagcatctaaggctctccagaaggatggcgttaagatcatctcagttggcgttcagaaagccagcgaggagaatctaaaagcgatggccacatcacattttcacttcaacctgcgaaccatcagagacctgtcaaccttttcccagaacatgacacaaatcattaaagatgtaaccaagtataaagagggagcagtcgacgcagacatgcaggtgcatttccctattagctgtcagaaggacagcctagcagatttggttttcttagtcgatgagtctctgggaaccggtggcaacctccgccatctccaaacgttcctggaaaatataaccagcagcatggatgttaaagagaattgtatgcgcctgggcctgatgtcttatagcaattcggctaagacaatcagcttcctgaagtcttccaccacccaatccgagtttcagcaacagatcaaaaacctttcaatacaggtgggaaagtcaaatacaggtgcagccattgaccagatgcggagggatggtttcagtgagagctatggcagtaggagagcgcagggcgtcccacaaattgcggttcttgttacacataggccttccgatgacgaagtccatgacgcagccctgaacttacgcctggaagacgtgaatgtcttcgctctttccatacagggagccaataacacccagcttgaggagatcgttagctaccctcctgaacaaactatctcaactcttaagagttatgcagatctcgagacttactccacgaagtttctgaaaaagctgcagaacgagatctggtcccagatcagcacatacgccgaacagaggaacctggataagacaggttgcgtagacactaaggaggctgacatccatttcctcatcgacggatctagctctatacaggagaagcaattcgagcagataaagcggtttatgctcgaggtgaccgagatgttttctattggccctgataaggtgagggtcggagttgtacaatacagcgatgacaccgaagtcgaattctatataacagactattccaacgatattgatctccggaaggctatattcaacattaagcaattaaccggcggtacatacacagggaaggccctggactacattctgcagatcattaagaatgggatgaaagacaggatgagcaaagtgccctgctacctgatagtgctgacagacgggatgtccacagaccgtgtggtggaacctgctaaaaggctccgggccgaacagataaccgtgcatgcagtaggcattggtgccgcaaataagattgagctgcaggaaatcgcgggtaaagaggagcgagtgtcctttggccagaactttgacgcactgaagtccatcaaaaatgaagtcgtgcgcgagatctgtgcagagaaaggctgtgaagatatgaaagccgatatcatgttcctggtagatagcagctggagcatcggaaatgaaaatttcagaaaaatgaagatctttatgaaaaacctgctgacaaagattcaaattggcgcagacaagacccagatcggcgtggtccagttcagcgacaagacaaaggaggaatttcaacttaacaggtactttactcaacaggagataagcgatgctatcgatagaatgagcctcatcaatgagggcaccctgactggcaaggcactgaactttgtcggccagtattttacacacagtaagggtgcgaggctgggcgccaaaaagtttctgatactcatcactgatggtgtagcccaggacgatgtgcgagatcccgctcggattctgagaggaaaagacgttactatctttagcgtaggtgtgtacaatgcaaaccgtagccagttagaggagattagcggtgattcctcactggtcttccacgtcgagaatttcgaccatttgaaggctctggaaagaaagctgatcttccgggtttgcgctttacacgattgcaaaagaatcactctgctagatgtggtcttcgttttggaccattctggatctatcaagaagcagtaccaggatcatatgatcaacctcacaattcacctcgtgaaaaaggccgatgttggacgcgaccgggtgcagttcggggcattaaaatacagcgaccaacctaacatcctcttttatctgaacacatactctaaccggagcgccattattgagaacctgagaaagaggcgggacacaggcggtaatacatacactgcaaaagcccttaaacacgcgaacgccttgtttaccgaagagcacggatcacggatcaaacagaatgtcaaacagatgctgatagtgataacagatggcgagtcacacgatcacgaccaactgaatgatacagcactggagcttcggaacaagggcatcaccatttttgcagtgggggtgggaaaagctaaccagaaagagcttgagggcatggcagggaacaagaacaatacgatatacgtcgacaattttgataaactcaaggacgtgtttacactcgtacaagaacgaatgtgcaccgaagctcctgaagtttgccacctgcaagaagctgatgtgatctttctgtgcgacggttcagaccgagtgagcaactcggatttcgtgacaatgactacctttctcagcgacttgattgataattttgacattcagagccagcgtatgaagattgggatggcccagttcgggtccaattaccagagcattatcgaactcaagaattcccttacaaaaacacaatggaaaacccagatccagaatgtctcaaaaagcggcggattcccccggattgacttcgccttaaaaaaagtgtccaatatgttcaatctgcatgcaggggggcgcaggaacgccggcgtgccgcagactctggtcgtaataacgtccggcgatccgagatatgatgtggccgatgccgtcaagacacttaaggacctcggtatctgcgtgctggtcctgggcattggtgatgtgtacaaggaacacctgctccctatcaccggtaactctgagaaaattattacgtttcaggatttcgataagctgaaaaacgtggatgtcaaaaaacggataattagagagatatgtcaatcgtgtggcaaaaccaattgtttcatggatatagtcgttggcttcgatatcagcacccatgtccagggacaaccactattccaaggccaccctcagctagagtcctatttacccggtattctggaggacatctcatcaatcaaaggggttagctgcggagccgggaccgaggcgcaggtttcacttgctttcaaagtaaatagtgaccaaggcttccccgccaagtttcagatttaccagaaggccgtgtttgactcacttctgcaggtcaacgttagtgggccaactcatctcaatgcacagttcctgcgctctctgtgggacactttcaaggataagtcagcctcaagggggcaggtgctgttaattttttcagacggactgcagagtgagtcgaatattatgctcgagaaccagtccgaccgcctcagggaggctggcctcgacgcactcctcgtggtgagcttgaataccaccgcccaccacgaattctcctcgttcgagtttggcaagaggttcgactacagaacacacttgaccattggcatgagagagctgggaaagaagctaagccaatacttaggcaacatcgctgaaaggacatgctgttgcactttctgtaaatgtcccggaattccaggcccgcacggaacccggggccttcaagcaatgaaaggtagccagggattgaaaggatcccgggggcatagaggcgaggacggaaaccctggcgtccggggtgacaccggacctcaaggtgataaggggatcgcgggctgccctggcgcttggggacagaaaggacttaaaggcttctcaggccctaaaggcggtcatggtgacgacggaatcgatggcttagatggtgaggagggctgccacggattccccggaattaagggcgaaaagggcgacccaggttcccaaggaagccccggttctcgcggagcgcccggtcaatatggcgagaaaggtttccccggtgatcctggaaacccaggacaaaacaataatatcaagggccagaaaggatcaaaaggcgaacaagggcggcaggggcgcagcggacagaaaggagttcagggtagtccatcctctagaggatctcggggacgggaaggccagagggggcttcggggcgtcagcggcgagcccgggaacccaggtcctaccgggaccctgggtgccgaaggattgcagggaccccagggcagccaggggaaccccggacggaagggggaaaaaggatcacaagggcagaaaggaccccaggggagccctggtctgatgggggccaagggatctactggacggcccggactgctgggcaaaaagggggagcctggattgccaggcgatttgggcccggtgggtcaaacggggcagagagggcggcagggcgactccgggattccaggctatgggcagatgggtcgaaaaggtgtgaaaggacctagaggatttcccggggacgccgggcagaagggagatattgggaaccccggcattccaggcggccccggtcctaaaggttttaggggactggcgcttaccgtgggtctgaagggagaggagggttcgaggggcctcccaggcccgcctggacagcgtggtattaagggaatggctggccagccggtctattctcaatgtgatctgatcagattcctgcgcgagcatagcctctgttcactagagaaatgtccggcctacccaaccgaactggtgtttgctctagataattcctatgatgtgaccgaggagagcttcaacaaaacccgtgacatcattacatccattgtgaacgatttgaacattagggagaacaactgcccggtgggggcccgggtcgccatggtttcctacaattctggcacaagctatttaattcgatggagcgattacaaccggaaaaagcaactgctccaacaattatctcaaatcaaatatcaagacactactgagcccagagacgtaggcaacgccatgaggtttgtcaccagaaacgtgttcaaacgcacctacgctggtgccaatgtgaggagggtggcagtcttttttagcaacggccagacagcctctcgctcttccatcataaccgctacgatggaattctccgccctggacatatctcccaccgtattcgctttcgatgaaagggtttttttagaggctttcggatttgacaacaccggaacgtttcaagtaattcccgtgcctccaaacggagaaaatcagaccttggaaaggttacgtaggtgtgctctgtgttatgataagtgcttcccaaacgcctgtatccgagaagcttttctgccagaggacagctatatggacgtggtgtttctgatcgacaactctaggaatattgctaaggacgaattcaaagcggtgaaggcactggtaagtagcgtgatcgacaacttcaatattgcttcggacccactgattagcgactcaggagaccgcatcgctctcctttcatatagcccatgggagtcgagccgacgaaagatgggtaccgttaagactgaattcgacttcattacctacgacaatcagttactcatgaagaatcacatccagacctcattccagcagttaaacggtgaggcaaccattgggagggcgcttctctggaccaccgagaatctcttccccgagacgccatacttgaggaagcacaaagtgattttcgtggtttcagcgggtgaaaattacgaaagaaaagaatttgttaagatgatggcactccgcgcgaagtgccaggggtacgtcatctttgtgatctctctgggcagtacaagaaaggatgatatggaggagctagccagttacccgctggatcagcacttaatacagcttgggaggattcataaacccgacttgaattacatcgctaagtttcttaagccctttctctacagtgtcaggcgcgggttcaaccagtacccccctccgatgcttgaggatgcctgcagactaatcaatttggggggggaaaatatccaaaacgatggctttcagttcgtgactgagcttcaggaagactttttgggagggaatggatttatcggccaggaactcaactcagggagagagagtccatttgtcaagactgaggataatggatctgattacctggtgtatctgccatctcagatgttcgaaccccagaaacttatgatcaactatgagaaagaccaaaagtctgcagaaatagcatcattgacatcaggtcacgaaaactatggacgaaaggaagaacctgatcatacgtacgaacccggtgacgtgtccctccaggagtattacatggatgtggctttcctcattgatgcctcccaaagggtagggagtgacgaatttaaagaagtgaaagcatttatcacctccgtcctggactattttcatatcgcccccacaccactcacctctacgctgggagatagagtggctgtgctgagctattctccacctggctacatgcctaacacagaggagtgtcccgtctacttggagtttgacctggttacctacaactcaatccaccagatgaaacaccacctgcaggacagtcaacagctcaacggtgatgtgtttatcggccatgcccttcagtggaccattgataacgtcttcgtcggaacaccaaatctgcggaagaacaaggttatctttgtgattagcgccggggaaaccaattcactagacaaagatgtgctgaggaatgtcagtttgagagccaagtgtcaggggtacagcatctttgtgttttcctttggtcctaagcacaacgacaaggagctagaggagctcgcttcccaccctttggatcaccatctcgtgcagctggggcgtacccacaagcccgactggaactatatcatcaagtttgttaaaccattcgtgcacctcatcagaagggcgatcaataaatatcctaccgaagacatgaaggcgacatgtgtgaacatgaccagcccaaaccccgaaaatggtgggaccgaaaatacggtgttgctgctgcccggaatctacgaaatcaaaaccgagaacggggacctgttcgatgaattcgatagtcaggcgcagcatttgctggtcttagggaataatcattcctctgggtccgagaccgctaccgacttgatgcagaagttgtatctcctattcagcaccgagaagctggccatgaaagataaagagaaggctcatctggaagagatctctgcgctggttgtagataaacagcaggaaaaagaggacaaggagatggaggctaccgatatttag

SEQ ID NO: 97980 - DNA, 7848 bp, Artificial Sequence
  derived and/or modified sequence
atgaagattttgctgataatcttcgtgcttatcatttggactgagaccctcgctgaccagtcccctggacccgggccagtttatgctgacgtggtttttctcgtggactccagcgaccatctgggtcctaaatccttcccattcgtgaaaaccttcatcaataagatgattaactcccttcccatcgaggccaataaataccgggtggcgctcgcacagtactcagacgagttccattctgaattccatttaagcacctttaagggacgtagtccaatgttaaaccacctgaagaagaacttccagttcataggagggtcactgcaaatcggaaaagccctacaagaagcccacagaacctacttcagtgcacccatcaacggccgcgacaggaaacagttcccaccaatactggtggtgcttgccagcgccgagtcagaagacgaggttgaagaagccagtaaggctctccaaaaggacggggtcaagattattagtgtgggcgtgcagaaggcatctgaggagaacctgaaggctatggccactagtcatttccatttcaacctaagaaccatacgggacctgtcgacattcagccaaaacatgactcaaatcattaaggatgtgaccaaatataaggagggtgctgtggacgcggacatgcaggtgcacttccctatcagttgccagaaggactccttggccgacttggtcttcctcgtcgatgaatcactaggaaccggcggaaatctgcgccacctccagacatttctggagaatattacgagctcaatggacgtgaaggaaaattgcatgagactggggttaatgtcttatagcaattctgctaagaccatatcatttctgaagagttctaccacacaatcagaattccagcagcaaatcaagaatctttcaatacaggttggaaagagtaataccggggcagccattgatcagatgcggagggacgggttcagtgaatcttacggctcaaggagggctcagggcgtaccacaaatcgcagttctggtgacccaccgaccctccgacgatgaagtgcacgatgccgccctgaatctgcgtcttgaggacgtcaatgtatttgcgctgagcatccagggagccaataatacgcagcttgaagagatcgtgtcctatccccctgagcaaactatttcaacactgaaatcctatgcggaccttgaaacttactctaccaaattcttgaaaaaactgcagaatgaaatctggtcacagatcagtacatacgctgagcagcggaatctggataagacgggctgcgtggatacaaaggaagccgatatccattttctgattgacggctctagctctatccaggagaagcaattcgaacagattaaaaggttcatgttggaagtgaccgaaatgttctccatcggcccagacaaggtgcgtgtgggggtggtgcagtatagtgacgatacagaagtcgaattttacattaccgattattcgaatgatattgacctcaggaaagctattttcaacattaagcaattgacgggaggtacgtatacagggaaggctctggattacatcctgcagattataaagaacgggatgaaagaccgcatgagtaaagtcccatgctacctgatcgtgctgaccgatggaatgagcaccgaccgggtcgtagagcccgctaaacgtttgcgcgccgagcaaattaccgtacacgcagtgggtatcggcgcagccaataaaattgagctgcaggaaattgccggaaaggaggaacgggtgtcttttggccagaacttcgacgcccttaagtctatcaaaaacgaggtggtgcgggagatatgcgccgagaaggggtgcgaagacatgaaggcagacatcatgttcctggtggacagcagctggagcattggaaatgaaaattttcgtaagatgaagatattcatgaaaaatctgctgaccaaaatacagatcggtgcggacaagactcaaataggtgtcgtacaattttccgacaaaaccaaggaggaatttcaacttaacaggtacttcactcaacaggaaatatccgacgccattgaccgcatgtccttgattaatgagggtacattgacaggcaaggccctcaatttcgtggggcagtacttcacacacagcaagggcgctaggcttggagccaagaaatttctgatcctcatcactgatggtgtcgcccaggacgacgtgagagacccagcacgcatcctacgaggtaaagacgtgaccatctttagtgttggggtatacaacgccaacaggagccagctcgaagagattagcggcgactcaagtcttgtgtttcacgtggaaaatttcgaccacctaaaggcactggagagaaagctgattttccgagtgtgcgcattgcacgactgtaaaaggatcactcttctcgatgttgtgttcgttctggaccattcaggatctattaagaaacagtaccaggaccacatgattaacttgacaatacatctggtcaaaaaggccgacgttggccgggacagggtccaatttggggccttgaaatattctgatcagccgaacattctgttctacctaaacacctattctaatcggtcagcaatcatcgagaacctcaggaaaaggagagatacgggaggtaatacctacaccgccaaggcccttaagcacgctaatgcactttttaccgaggagcacggctctcggataaaacagaacgtaaagcaaatgctgatcgtgattaccgacggagaatcacacgaccatgatcagctgaatgacactgcccttgagctgcggaataagggcatcactatcttcgctgttggtgttggaaaagcaaatcagaaggaattagaggggatggctgggaataaaaacaatactatatacgtagacaattttgacaaactgaaggacgtatttacattggttcaggaacgaatgtgcactgaagcaccggaggtctgtcacctccaggaagccgacgtgatttttctgtgcgatgggtcggaccgagtcagcaattctgatttcgtcacgatgacaaccttcctgagtgatctgatcgacaattttgacatccagagccagaggatgaagatcggaatggcccagttcggctccaactatcagtctatcattgaactgaagaattcattaacaaaaacgcagtggaagactcagatacagaacgtctccaaatccgggggtttccctcggatcgattttgctctgaaaaaggtgtccaatatgttcaatctgcatgctggcggccgtaggaacgcaggcgtgccacagacactggtcgtgataacctccggggaccctcgttacgatgtggccgacgcggtgaagacgctaaaagatctgggcatctgtgtgctggtgctgggaatcggtgatgtatacaaggaacatctgttgcccatcacgggcaattctgaaaagattattacctttcaagactttgataaactcaagaatgtagacgtaaagaagcgaattattcgcgaaatttgtcagtcatgtggaaagacgaattgttttatggacatagtggtcgggtttgacatcagcacacacgtgcaaggccagcccctgttccagggacacccccagttggagtcctatttaccaggcatcctcgaagatatctcgtcaattaagggtgtgtcatgcggagctggcaccgaggcccaggtaagtctggctttcaaggtgaactccgaccaggggttcccggccaaattccagatatatcagaaggcagtgttcgacagtctgttgcaagtaaacgtgagcggccctacccacctgaacgcccagtttctgagaagcctgtgggacacatttaaagacaaaagtgcttcccgaggacaagtgttgctgatcttctccgatggtctccagagtgagtccaacatcatgctggagaatcagtctgaccgtttaagagaagcaggtctggacgcgctactcgtggtgagcttaaacacgacagctcaccacgaattttcaagcttcgaattcggaaagcggtttgactaccgcacccacttgacaatcggaatgcgggaactcggtaaaaagctgagtcagtatctcggaaacattgccgagagaacctgttgttgcacgttctgcaaatgtcccggtataccaggcccccacggcactcgtggcctccaagccatgaaaggttcccaggggctgaaaggctcgcgcggccaccgcggggaggatggcaatcccggggtacgaggtgacactggccctcagggcgacaagggcatcgcaggctgtccaggcgcctggggccagaagggactcaagggcttttcaggccccaagggaggccatggggatgatggcatcgatggattggacggagaggaagggtgtcacggctttcccggaattaaaggtgagaagggggatcctggctcccagggtagccccgggtctcgaggagctcccggtcagtacggggaaaaagggttccctggcgaccctggcaaccccggacagaataacaacattaaaggccagaaagggtcaaaaggcgagcagggccgccaggggcgcagtggtcagaaaggcgtgcagggcagcccctcgtcgcggggctcacgtggaagagagggacagcgagggttgagaggggtatccggagagcctggaaatcctggacctacaggaacactaggagccgagggtctgcagggaccacaagggtcccaaggcaaccccgggagaaaaggggaaaagggctcccaaggccagaagggcccccaaggcagccccgggcttatgggggctaaaggcagtacgggccgtcctggcctgcttgggaagaagggcgagccagggttacctggggacctaggccccgtgggacaaacgggtcagaggggccggcagggggacagtggcattccaggctatggccaaatgggacgcaagggagtgaaagggcctagggggtttccaggagacgcgggacagaaaggggatatcggcaatccgggcatccccggcggcccaggccctaagggtttcaggggactggcactgaccgtcggtctgaagggcgaagaagggagtcgcggattacctggacctcccggccagcggggcattaagggtatggctgggcagccagtttatagccaatgtgacctgataaggtttctgcgagagcactcaccatgctggaaagagaaatgcccggcatacccaaccgaacttgtcttcgccctcgataactcttacgacgtgacggaggagtcatttaacaagacaagggatatcataacctcgattgttaatgacctgaacattagagaaaacaactgcccagtcggcgcgagggtcgccatggtgagctacaactctggcacatcctatttgatccggtggtctgactataaccgcaaaaagcagctgctgcagcagctgtcccagatcaagtaccaggatacaacagaacctagggatgtgggtaacgccatgagatttgtgaccagaaatgttttcaagcgcacctatgcgggtgctaacgtcaggcgcgtcgccgtcttcttctctaatgggcagactgcgtcccgttcctccattattactgctacgatggagttttccgcactggatatatctccaaccgtttttgcctttgatgagcgcgttttcctggaggcattcgggtttgacaatactgggacattccaagtgattcccgtgcctccaaatggagaaaaccaaacactcgagaggcttaggagatgcgcgttgtgctatgacaagtgcttcccgaacgcatgcattagggaggctttcttaccagaggactcctatatggatgtcgtctttctcattgacaactctagaaacatagctaaggatgagttcaaggccgtcaaagcactcgtgtcttcagttatcgacaacttcaacattgcatctgaccctcttatatctgatagcggcgatcggatcgccctgctgtcctactctccatgggagtcatccagaagaaaaatgggaacagtgaagaccgaatttgacttcattacatatgacaatcagcttctaatgaaaaatcacatccaaactagcttccaacagttgaacggagaggcaaccattggccgggcacttttatggacgaccgaaaatctgtttcctgagactccttatttgagaaagcacaaagttatatttgtggtcagcgccggtgagaactacgaaaggaaggaatttgtaaagatgatggcgctgcgagccaagtgccagggctacgttatctttgtgatttccctgggttcaactcgcaaggacgacatggaggagctcgcctcataccccctggaccagcaccttatccaactggggcgaattcacaaaccagatttgaattacattgcaaagtttctgaaaccctttctctattctgtgaggaggggatttaatcagtacccgccccctatgttagaagacgcctgtcgcctcattaacctcgggggcgagaatatccaaaacgatggattccagttcgttaccgagctgcaagaagacttccttggcggcaacggttttataggccaggaactaaactctggccgcgaatcaccattcgtcaagacggaagataatgggtcggactacctcgtgtacttgccatcacagatgttcgaaccgcaaaaactgatgatcaactatgaaaaagaccaaaagtcagccgagatcgcaagtttgacctctgggcacgaaaactatgggcgaaaagaggagcccgaccatacatacgagccaggagatgtctctctacaggagtattacatggacgtggcttttttgatagacgctagccagagagtgggatctgatgaattcaaagaggtgaaggcttttatcacctccgtcctggactacttccatatcgcgccaacccccctcacttccaccttaggtgatcgcgtggcagtgctgagctattctccacctggatatatgcctaatactgaggagtgccctgtctatctcgagttcgacctcgtaacttacaactcaatacaccaaatgaagcaccatctgcaggatagtcagcagctgaatggcgacgtgttcattggccacgctcttcagtggacaatcgataacgtgtttgtcggaacccctaacctcagaaagaacaaagtaatcttcgttataagcgcgggcgaaaccaactcacttgacaaggacgtcctgagaaatgtatcgctacgagcaaaatgccagggctattccatatttgtcttctcttttggccctaagcacaatgacaaggaactggaagagctggcctcccatcctctggatcatcacttagtgcaactgggcagaacccataagccggattggaactacattatcaaatttgtgaaaccttttgtacatctgatacggagagcaataaacaagtatcctaccgaggatatgaaggctacctgtgtgaatatgacttctccgaatccagaaaatggtggcaccgaaaatactgttctgctgctgccaggaatttacgaaataaaaactgagaacggggatctcttcgacgagtttgactctcaggcacagcacttactggtgttaggaaacaaccactcgagtggatctgagaccgctactgatttaatgcagaagctctatctgctgttctctacagagaagctcgccatgaaagacaaagagaaggcccacttggaggagatctctgctctcgtcgtggataaacagcaagagaaagaggacaaggagatggaagcaaccgacatctag

SEQ ID NO: 97981 - DNA, 1674 bp, Artificial Sequence
  derived and/or modified sequence
atcggccgcgccctattgtggacgaccgagaatctgttcccagagacaccttatctgcgtaaacacaaagtgattttcgtggtatctgccggtgagaattatgaaagaaaggaatttgtcaaaatgatggccctgcgggccaagtgccagggctatgttatattcgtgatttccctgggatccacccgcaaggacgacatggaagagctggcaagctatcctttggaccaacatctgattcaactgggtcgcatacacaaacctgatctgaattacatcgcaaaattcttgaagccattcttatattccgtgcgccgtggtttcaatcagtatccacccccgatgctggaggacgcgtgccggctcataaatttgggaggtgagaatatccagaacgatgggttccagttcgtgacagagctgcaagaggatttccttgggggaaacggcttcatcgggcaggaactaaattccgggagggagagcccctttgttaagaccgaggataacggaagtgactatttggtttacttaccgtctcagatgtttgagccgcagaagctgatgataaattatgagaaggaccagaagagcgccgagatcgcctccttaacaagtgggcacgaaaattacggacgtaaagaagagcctgatcacacctatgagccaggagatgtctcactacaggagtactacatggatgtggcctttttaattgacgcaagccagcgggttggatcggatgaattcaaagaagtgaaagcgtttatcacttctgttctcgactactttcacattgctcccacccctttgacaagcacactaggggacagagttgcagttttatcctatagtccccctggatatatgcccaacactgaagaatgccccgtttacttggagtttgatctcgtcacgtataatagtatacaccaaatgaaacaccacttgcaagatagtcagcagctcaacggcgacgtctttatcggccacgccctgcagtggacaattgataacgtgtttgtaggaacccccaatcttcgcaagaacaaagtgatatttgttatttccgccggagaaactaatagcttagataaggacgtgctgcggaacgttagcctgcgggcgaagtgccagggttatagcattttcgtgttttcatttggaccaaagcacaacgataaggaacttgaggaattggcttctcaccctctcgatcaccaccttgttcaactcggcagaacccacaagcccgactggaattacattataaaatttgtcaagccttttgtccacctcattagaagagctataaataagtaccccacggaagacatgaaggccacttgtgtgaacatgacctcgccaaaccccgaaaatgggggaaccgagaacaccgtcctgctgcttccaggtatctacgaaattaagaccgagaacggcgacctttttgatgaattcgatagccaggcacaacatctgctggttctgggcaacaatcactcctccggcagtgagaccgcaaccgaccttatgcaaaaattatacctgcttttctccactgagaaacttgcgatgaaagataaggaaaaggcccatctggaagaaatctcagcacttgtggtggacaagcagcaggagaaggaagacggcgaggacacaaggagtagttag

SEQ ID NO: 97982 - DNA, 7848 bp, Artificial Sequence
  derived and/or modified sequence
atgaagatcctgctgatcatctttgtgctgatcatctggacagagaccctggccgaccagagccctggccctggccctgtgtatgcagatgtggtgttcctggtggacagcagtgaccacctgggccccaagagcttcccctttgtgaagaccttcatcaacaagatgatcaacagcctgcccatcgaggccaacaagtacagagtggccctggcccagtacagtgatgagttccacagcgagttccacctgagcaccttcaagggccgcagccccatgctgaaccacctgaagaagaacttccagttcatcggcggcagcctgcagatcggcaaggccctgcaggaggcccacaggacctacttcagcgcccccatcaatggccgggacaggaagcagtttcctcccatcctggtggtgctggccagcgctgagagtgaagatgaggtggaggaggccagcaaggccctgcagaaggatggagtgaagatcatctctgtgggcgtgcagaaggccagcgaggagaacctgaaggccatggccaccagccacttccacttcaacctgcggaccatccgggacctgagcaccttcagccagaacatgacccagatcatcaaggatgtgaccaagtacaaggagggcgctgtggatgctgacatgcaggtgcacttccccatcagctgccagaaggacagcctggccgacctggtgttcctggtggatgagagcctgggcactggaggcaacctgcggcacctgcagaccttcctggagaacatcaccagctccatggatgtgaaggagaactgcatgaggctgggcctgatgagctacagcaacagcgccaagaccatctccttcctgaagagcagcaccacccagagcgagttccagcagcagatcaagaacctgagcatccaggtgggcaagagcaacacaggagctgccatcgaccagatgagaagagatggcttcagcgagagctatggcagcagaagagcccagggcgtgccccagattgctgtgctggtgacccaccggcccagtgatgatgaggtgcatgatgctgccctgaacctgcggctggaggatgtgaatgtgtttgccctgagcatccagggcgccaacaacacccagctggaggagatcgtgtcctacccacctgagcagaccatcagcaccctgaagagctatgctgacctggagacctacagcaccaagttcctgaagaagctgcagaatgagatctggagccagatcagcacctatgcagagcagaggaacctggacaagacaggctgtgtggacaccaaggaggccgacatccacttcctgattgatggcagcagcagcatccaggagaagcagtttgagcagatcaagcgcttcatgctggaggtgacagagatgttcagcatcggccctgacaaggtgcgggtgggcgtggtgcagtacagtgatgacacagaggtggagttctacatcacagactacagcaatgacatcgacctgaggaaggccatcttcaacatcaagcagctgaccggcggcacctacacaggcaaggccctggactacatcctgcagatcatcaagaatggcatgaaggacaggatgagcaaggtgccctgctacctgattgtgctgacagatggcatgagcacagacagagtggtggagcccgccaagaggctgcgggcagagcagatcaccgtgcatgctgtgggcatcggggccgccaacaagattgagctgcaggagattgctgggaaggaggagcgggtgtcctttggccagaactttgatgccctgaagagcatcaagaatgaggtggtgcgggagatctgtgccgagaagggctgtgaggacatgaaggctgacatcatgttcctggtggacagctcctggagcattggaaatgaaaacttcaggaagatgaagatcttcatgaagaacctgctgaccaagatccagatcggggctgacaagacccagattggagtggtgcagttcagtgacaagaccaaggaggagttccagctgaaccgctacttcacccagcaggagatcagtgatgccatcgacaggatgagcctcatcaatgaaggcaccctgaccgggaaggccctgaactttgtgggccagtacttcacccacagcaagggggcccggctgggcgccaagaagttcctgatcctgatcacagatggagtggcccaggatgatgtgcgggaccctgcccgcatcctgcggggcaaggatgtgaccatcttctctgtgggcgtgtacaatgccaacagaagccagctggaggagatcagcggggacagcagcctggtgttccacgtggagaactttgaccacctgaaggccctggagaggaagctgatcttccgggtgtgtgccctgcatgactgcaagaggatcaccctgctggatgtggtgtttgtgctggaccacagcggcagcatcaagaagcagtaccaggaccacatgatcaacctgaccatccacctggtgaagaaggcagatgtgggccgggacagagtgcagtttggagccctgaagtacagcgaccagcccaacatcctcttctacctgaacacctacagcaacagaagtgccatcatcgagaacctgaggaagaggcgggacacaggaggcaacacctacacagccaaggccctgaagcacgccaatgccctcttcacagaggagcacggcagccgcatcaagcagaatgtgaagcagatgctgattgtcatcacagatggagagagccatgaccatgaccagctgaatgacacagccctggagctgaggaacaagggcatcaccatctttgctgtgggcgtgggcaaggccaaccagaaggagctggagggcatggccggcaacaagaacaacaccatctacgtggacaactttgacaagctgaaggatgtgttcaccctggtgcaggagaggatgtgcacagaggcccctgaggtgtgccacctgcaggaggctgatgtgatcttcctgtgtgatggcagtgacagagtgagcaacagcgactttgtgaccatgaccaccttcctgagtgacctgattgacaactttgacatccagagccagaggatgaagattggcatggcccagtttggcagcaactaccagagcatcatcgagctgaagaacagcctgaccaagacccagtggaagacccagatccagaatgtgtccaagagcggcggcttccccagaattgactttgccctgaagaaggtgagcaacatgttcaacctgcatgctgggggcagaagaaatgccggcgtgccccagaccctggtggtgatcaccagcggggaccccaggtatgatgtggctgatgctgtgaagaccctgaaggacctgggcatctgtgtgctggtgctgggcattggagatgtgtacaaggagcacctgctgcccatcaccggcaacagcgagaagatcatcaccttccaggactttgacaagctgaagaatgtggatgtgaagaagaggatcatccgggagatctgccagagctgtgggaagaccaactgcttcatggacatcgtggtgggctttgacatcagcacccacgtgcagggccagcccctcttccagggccacccccagctggagagctacctgcccggcatcctggaggacatcagcagcatcaagggcgtgtcctgtggggccggcacagaggcccaggtgtccctggccttcaaggtgaacagcgaccagggcttccctgccaagttccagatctaccagaaggctgtgtttgacagcctgctgcaggtgaatgtgtctggccccacccacctgaatgcccagttcctgcggagcctgtgggacaccttcaaggacaagagcgccagccggggccaggtgctgctgatcttcagtgatggcctgcagagcgagagcaacatcatgctggagaaccagagcgaccggctgcgggaggccggcctggatgccctgctggtggtgtccctgaacaccacagcccaccacgagttcagcagctttgaatttgggaagagatttgactaccgcacccacctgaccatcggcatgagggagctgggcaagaagctgagccagtacctgggcaacattgctgagaggacctgctgctgcaccttctgcaagtgccccggcatccctggcccccacggcacccggggcctgcaggccatgaagggcagccagggcctgaagggcagccggggccacagaggagaagatggcaaccctggggtgcggggggacaccggcccccagggcgacaagggcattgctggctgccctggggcctggggccagaagggcctgaagggcttcagcggccccaagggcggccatggagatgatggcattgatggcctggatggagaggagggctgccacggcttccctggcatcaagggggagaagggggaccccggcagccagggcagccctggcagcagaggagcccctggccagtatggagagaagggcttccctggggaccccggcaaccctggccagaacaacaacatcaagggccagaagggcagcaagggggagcagggccggcagggccgcagcggccagaagggcgtgcagggcagccccagcagccggggcagccggggccgggagggccagaggggcctgcggggcgtgtctggagagcccggcaaccctggccccaccggcaccctgggcgctgagggcctgcagggcccccagggcagccagggcaaccctggcaggaagggggagaagggcagccagggccagaagggcccccagggcagccctggcctgatgggcgccaagggcagcacaggccggcccggcctgctgggcaagaagggggagcccggcctgcccggggacctgggccctgtgggccagacaggccagaggggccggcagggcgacagcggcatccctggctacggccagatgggcaggaagggcgtgaagggcccccggggcttccctggagatgctggccagaagggggacatcggcaaccctggcatccctgggggccctggccccaagggcttccggggcctggccctgactgtgggcctgaagggggaggagggcagccggggcctgcccggccccccaggccagaggggcatcaagggcatggccggccagcctgtgtacagccagtgtgacctgatccgcttcctgcgggagcacagcctgtgcagcctggagaagtgcccagcctaccccacagagctggtgtttgccctggacaacagctatgatgtgacagaggagagcttcaacaagacccgggacatcatcaccagcatcgtgaatgacctgaacatccgggagaacaactgccctgtgggcgcccgggtggccatggtgtcctacaacagcggcaccagctacctgatccgctggagcgactacaacaggaagaagcagctgctgcagcagctgagccagatcaagtaccaggacaccacagagcccagagatgtgggcaatgccatgagatttgtgaccagaaatgtgttcaagaggacctacgccggggccaacgtgagaagagtggccgtgttcttcagcaatggccagacagccagccgcagcagcatcatcacagccaccatggagttcagcgccctggacatcagccccaccgtgtttgcctttgatgagagggtcttcctggaggccttcggctttgacaacacaggcaccttccaggtgattcctgtgccccccaacggggagaaccagaccctggagcggctgcggcgctgtgccctgtgctatgacaagtgcttccccaatgcctgcatccgggaggccttcctgcctgaggacagctacatggatgtggtgttcctgattgacaacagcaggaacatcgccaaggatgagttcaaggctgtgaaggccctggtgagcagcgtcatcgacaacttcaacatcgccagtgaccccctcatcagtgacagcggggaccgcatcgccctgctgagctacagcccctgggagagcagcaggaggaagatgggcaccgtgaagacagaatttgacttcatcacctatgacaaccagctgctgatgaagaaccacatccagaccagcttccagcagctgaatggagaggccaccatcggccgggccctgctgtggaccacagaaaatctcttccctgagaccccctacctgaggaagcacaaggtgatctttgtggtgtctgctggagaaaattatgaaaggaaggagtttgtgaagatgatggccctgcgggccaagtgccagggctacgtgatcttcgtcatcagcctgggcagcaccaggaaggatgacatggaggagctggccagctaccccctggaccagcacctgatccagctgggccgcatccacaagccagacctgaactacatcgccaagttcctgaagcccttcctgtacagcgtgcggcggggcttcaaccagtaccccccacccatgctggaggatgcctgccgcctcatcaacctgggcggggagaacatccagaatgatggcttccagtttgtgacagagctgcaggaggacttcctgggcggcaatggcttcatcggccaggagctgaacagcggccgggagagcccctttgtgaagacagaagataatggaagtgactacctggtgtacctgcccagccagatgtttgagccccagaagctgatgatcaactatgagaaggaccagaagtctgctgagatcgccagcctgaccagcggccacgagaactacggcaggaaggaggagccagaccacacctatgagcctggagatgtgtccctgcaggagtactacatggatgtggccttcctgattgatgccagccagagggtgggcagtgatgagttcaaggaggtgaaggccttcatcacctctgtgctggactacttccacatcgcccccacccccctgaccagcaccctgggggacagagtggccgtgctgagctacagccccccaggctacatgcccaacacagaggagtgccctgtgtacctggagtttgacctggtgacctacaacagcatccaccagatgaagcaccacctgcaggacagccagcagctgaatggagatgtgttcatcggccacgccctgcagtggaccatcgacaacgtgtttgtgggcacccccaacctgaggaagaacaaggtgatctttgtgatctctgctggggagaccaacagcctggacaaggatgtgctgagaaatgtgtccctgcgggccaagtgccagggctacagcatctttgtgttctcctttggccccaagcacaatgacaaggagctggaggagctggccagccaccccctggaccaccacctggtgcagctgggccgcacccacaagccagactggaactacatcatcaagtttgtgaagccctttgtgcacctgatccggcgggccatcaacaagtaccccacagaggacatgaaggccacctgtgtgaacatgaccagccccaacccagaaaatggaggaacagaaaatacagtgctgctgctgcccggcatctatgagatcaagacagaaaatggagacctgtttgatgaatttgacagccaggcccagcacctgctggtgctgggcaacaaccacagcagcggcagcgagacagccacagacctgatgcagaagctgtacctgctcttcagcacagagaagctggccatgaaggacaaggagaaggcccacctggaggagatcagcgccctggtggtggacaagcagcaggagaaggaggacaaggagatggaggccacagacatctag

SEQ ID NO: 97983 - DNA, 7848 bp, Artificial Sequence
  derived and/or modified sequence
atgaagatcctgctgatcatctttgtgctgatcatctggacagagaccctggccgaccagagccctggccctggccctgtgtatgcagatgtggtgttcctggtggacagcagtgaccacctgggccccaagagcttcccctttgtgaagaccttcatcaacaagatgatcaacagcctgcccatcgaggccaacaagtacagagtggccctggcccagtacagtgatgagttccacagcgagttccacctgagcaccttcaagggccgcagccccatgctgaaccacctgaagaagaacttccagttcatcggcggcagcctgcagatcggcaaggccctgcaggaggcccacaggacctacttcagcgcccccatcaatggccgggacaggaagcagtttcctcccatcctggtggtgctggccagcgctgagagtgaagatgaggtggaggaggccagcaaggccctgcagaaggatggagtgaagatcatctctgtgggcgtgcagaaggccagcgaggagaacctgaaggccatggccaccagccacttccacttcaacctgcggaccatccgggacctgagcaccttcagccagaacatgacccagatcatcaaggatgtgaccaagtacaaggagggcgctgtggatgctgacatgcaggtgcacttccccatcagctgccagaaggacagcctggccgacctggtgttcctggtggatgagagcctgggcactggaggcaacctgcggcacctgcagaccttcctggagaacatcaccagctccatggatgtgaaggagaactgcatgaggctgggcctgatgagctacagcaacagcgccaagaccatctccttcctgaagagcagcaccacccagagcgagttccagcagcagatcaagaacctgagcatccaggtgggcaagagcaacacaggagctgccatcgaccagatgagaagagatggcttcagcgagagctatggcagcagaagagcccagggcgtgccccagattgctgtgctggtgacccaccggcccagtgatgatgaggtgcatgatgctgccctgaacctgcggctggaggatgtgaatgtgtttgccctgagcatccagggcgccaacaacacccagctggaggagatcgtgtcctacccacctgagcagaccatcagcaccctgaagagctatgctgacctggagacctacagcaccaagttcctgaagaagctgcagaatgagatctggagccagatcagcacctatgcagagcagaggaacctggacaagacaggctgtgtggacaccaaggaggccgacatccacttcctgattgatggcagcagcagcatccaggagaagcagtttgagcagatcaagcgcttcatgctggaggtgacagagatgttcagcatcggccctgacaaggtgcgggtgggcgtggtgcagtacagtgatgacacagaggtggagttctacatcacagactacagcaatgacatcgacctgaggaaggccatcttcaacatcaagcagctgaccggcggcacctacacaggcaaggccctggactacatcctgcagatcatcaagaatggcatgaaggacaggatgagcaaggtgccctgctacctgattgtgctgacagatggcatgagcacagacagagtggtggagcccgccaagaggctgcgggcagagcagatcaccgtgcatgctgtgggcatcggggccgccaacaagattgagctgcaggagattgctgggaaggaggagcgggtgtcctttggccagaactttgatgccctgaagagcatcaagaatgaggtggtgcgggagatctgtgccgagaagggctgtgaggacatgaaggctgacatcatgttcctggtggacagctcctggagcattggaaatgaaaacttcaggaagatgaagatcttcatgaagaacctgctgaccaagatccagatcggggctgacaagacccagattggagtggtgcagttcagtgacaagaccaaggaggagttccagctgaaccgctacttcacccagcaggagatcagtgatgccatcgacaggatgagcctcatcaatgaaggcaccctgaccgggaaggccctgaactttgtgggccagtacttcacccacagcaagggggcccggctgggcgccaagaagttcctgatcctgatcacagatggagtggcccaggatgatgtgcgggaccctgcccgcatcctgcggggcaaggatgtgaccatcttctctgtgggcgtgtacaatgccaacagaagccagctggaggagatcagcggggacagcagcctggtgttccacgtggagaactttgaccacctgaaggccctggagaggaagctgatcttccgggtgtgtgccctgcatgactgcaagaggatcaccctgctggatgtggtgtttgtgctggaccacagcggcagcatcaagaagcagtaccaggaccacatgatcaacctgaccatccacctggtgaagaaggcagatgtgggccgggacagagtgcagtttggagccctgaagtacagcgaccagcccaacatcctcttctacctgaacacctacagcaacagaagtgccatcatcgagaacctgaggaagaggcgggacacaggaggcaacacctacacagccaaggccctgaagcacgccaatgccctcttcacagaggagcacggcagccgcatcaagcagaatgtgaagcagatgctgattgtcatcacagatggagagagccatgaccatgaccagctgaatgacacagccctggagctgaggaacaagggcatcaccatctttgctgtgggcgtgggcaaggccaaccagaaggagctggagggcatggccggcaacaagaacaacaccatctacgtggacaactttgacaagctgaaggatgtgttcaccctggtgcaggagaggatgtgcacagaggcccctgaggtgtgccacctgcaggaggctgatgtgatcttcctgtgtgatggcagtgacagagtgagcaacagcgactttgtgaccatgaccaccttcctgagtgacctgattgacaactttgacatccagagccagaggatgaagattggcatggcccagtttggcagcaactaccagagcatcatcgagctgaagaacagcctgaccaagacccagtggaagacccagatccagaatgtgtccaagagcggcggcttccccagaattgactttgccctgaagaaggtgagcaacatgttcaacctgcatgctgggggcagaagaaatgccggcgtgccccagaccctggtggtgatcaccagcggggaccccaggtatgatgtggctgatgctgtgaagaccctgaaggacctgggcatctgtgtgctggtgctgggcattggagatgtgtacaaggagcacctgctgcccatcaccggcaacagcgagaagatcatcaccttccaggactttgacaagctgaagaatgtggatgtgaagaagaggatcatccgggagatctgccagagctgtgggaagaccaactgcttcatggacatcgtggtgggctttgacatcagcacccacgtgcagggccagcccctcttccagggccacccccagctggagagctacctgcccggcatcctggaggacatcagcagcatcaagggcgtgtcctgtggggccggcacagaggcccaggtgtccctggccttcaaggtgaacagcgaccagggcttccctgccaagttccagatctaccagaaggctgtgtttgacagcctgctgcaggtgaatgtgtctggccccacccacctgaatgcccagttcctgcggagcctgtgggacaccttcaaggacaagagcgccagccggggccaggtgctgctgatcttcagtgatggcctgcagagcgagagcaacatcatgctggagaaccagagcgaccggctgcgggaggccggcctggatgccctgctggtggtgtccctgaacaccacagcccaccacgagttcagcagctttgaatttgggaagagatttgactaccgcacccacctgaccatcggcatgagggagctgggcaagaagctgagccagtacctgggcaacattgctgagaggacctgctgctgcaccttctgcaagtgccccggcatccctggcccccacggcacccggggcctgcaggccatgaagggcagccagggcctgaagggcagccggggccacagaggagaagatggcaaccctggggtgcggggggacaccggcccccagggcgacaagggcattgctggctgccctggggcctggggccagaagggcctgaagggcttcagcggccccaagggcggccatggagatgatggcattgatggcctggatggagaggagggctgccacggcttccctggcatcaagggggagaagggggaccccggcagccagggcagccctggcagcagaggagcccctggccagtatggagagaagggcttccctggggaccccggcaaccctggccagaacaacaacatcaagggccagaagggcagcaagggggagcagggccggcagggccgcagcggccagaagggcgtgcagggcagccccagcagccggggcagccggggccgggagggccagaggggcctgcggggcgtgtctggagagcccggcaaccctggccccaccggcaccctgggcgctgagggcctgcagggcccccagggcagccagggcaaccctggcaggaagggggagaagggcagccagggccagaagggcccccagggcagccctggcctgatgggcgccaagggcagcacaggccggcccggcctgctgggcaagaagggggagcccggcctgcccggggacctgggccctgtgggccagacaggccagaggggccggcagggcgacagcggcatccctggctacggccagatgggcaggaagggcgtgaagggcccccggggcttccctggagatgctggccagaagggggacatcggcaaccctggcatccctgggggccctggccccaagggcttccggggcctggccctgactgtgggcctgaagggggaggagggcagccggggcctgcccggccccccaggccagaggggcatcaagggcatggccggccagcctgtgtacagccagtgtgacctgatccgcttcctgcgggagcacagcccctgctggaaggagaagtgcccagcctaccccacagagctggtgtttgccctggacaacagctatgatgtgacagaggagagcttcaacaagacccgggacatcatcaccagcatcgtgaatgacctgaacatccgggagaacaactgccctgtgggcgcccgggtggccatggtgtcctacaacagcggcaccagctacctgatccgctggagcgactacaacaggaagaagcagctgctgcagcagctgagccagatcaagtaccaggacaccacagagcccagagatgtgggcaatgccatgagatttgtgaccagaaatgtgttcaagaggacctacgccggggccaacgtgagaagagtggccgtgttcttcagcaatggccagacagccagccgcagcagcatcatcacagccaccatggagttcagcgccctggacatcagccccaccgtgtttgcctttgatgagagggtcttcctggaggccttcggctttgacaacacaggcaccttccaggtgattcctgtgccccccaacggggagaaccagaccctggagcggctgcggcgctgtgccctgtgctatgacaagtgcttccccaatgcctgcatccgggaggccttcctgcctgaggacagctacatggatgtggtgttcctgattgacaacagcaggaacatcgccaaggatgagttcaaggctgtgaaggccctggtgagcagcgtcatcgacaacttcaacatcgccagtgaccccctcatcagtgacagcggggaccgcatcgccctgctgagctacagcccctgggagagcagcaggaggaagatgggcaccgtgaagacagaatttgacttcatcacctatgacaaccagctgctgatgaagaaccacatccagaccagcttccagcagctgaatggagaggccaccatcggccgggccctgctgtggaccacagaaaatctcttccctgagaccccctacctgaggaagcacaaggtgatctttgtggtgtctgctggagaaaattatgaaaggaaggagtttgtgaagatgatggccctgcgggccaagtgccagggctacgtgatcttcgtcatcagcctgggcagcaccaggaaggatgacatggaggagctggccagctaccccctggaccagcacctgatccagctgggccgcatccacaagccagacctgaactacatcgccaagttcctgaagcccttcctgtacagcgtgcggcggggcttcaaccagtaccccccacccatgctggaggatgcctgccgcctcatcaacctgggcggggagaacatccagaatgatggcttccagtttgtgacagagctgcaggaggacttcctgggcggcaatggcttcatcggccaggagctgaacagcggccgggagagcccctttgtgaagacagaagataatggaagtgactacctggtgtacctgcccagccagatgtttgagccccagaagctgatgatcaactatgagaaggaccagaagtctgctgagatcgccagcctgaccagcggccacgagaactacggcaggaaggaggagccagaccacacctatgagcctggagatgtgtccctgcaggagtactacatggatgtggccttcctgattgatgccagccagagggtgggcagtgatgagttcaaggaggtgaaggccttcatcacctctgtgctggactacttccacatcgcccccacccccctgaccagcaccctgggggacagagtggccgtgctgagctacagccccccaggctacatgcccaacacagaggagtgccctgtgtacctggagtttgacctggtgacctacaacagcatccaccagatgaagcaccacctgcaggacagccagcagctgaatggagatgtgttcatcggccacgccctgcagtggaccatcgacaacgtgtttgtgggcacccccaacctgaggaagaacaaggtgatctttgtgatctctgctggggagaccaacagcctggacaaggatgtgctgagaaatgtgtccctgcgggccaagtgccagggctacagcatctttgtgttctcctttggccccaagcacaatgacaaggagctggaggagctggccagccaccccctggaccaccacctggtgcagctgggccgcacccacaagccagactggaactacatcatcaagtttgtgaagccctttgtgcacctgatccggcgggccatcaacaagtaccccacagaggacatgaaggccacctgtgtgaacatgaccagccccaacccagaaaatggaggaacagaaaatacagtgctgctgctgcccggcatctatgagatcaagacagaaaatggagacctgtttgatgaatttgacagccaggcccagcacctgctggtgctgggcaacaaccacagcagcggcagcgagacagccacagacctgatgcagaagctgtacctgctcttcagcacagagaagctggccatgaaggacaaggagaaggcccacctggaggagatcagcgccctggtggtggacaagcagcaggagaaggaggacaaggagatggaggccacagacatctag

SEQ ID NO: 97984 - DNA, 1674 bp, Artificial Sequence
  derived and/or modified sequence
attggccgggccctgctgtggaccacagagaacctcttccctgagaccccctacctgaggaagcacaaggtgatctttgtggtgtctgctggggagaactatgaaaggaaggagtttgtgaagatgatggccctgcgggccaagtgccagggctacgtgatctttgtgatcagcctgggcagcaccaggaaggatgacatggaggagctggccagctaccccctggaccagcacctgatccagctgggccgcatccacaagccagacctgaactacatcgccaagttcctgaagcccttcctgtacagcgtgagaagaggcttcaaccagtaccccccacccatgctggaggatgcctgccgcctcatcaacctgggcggggagaacatccagaatgatggcttccagtttgtgacagagctgcaggaggacttcctgggcggcaatggcttcatcggccaggagctgaacagcggccgggagagcccctttgtgaagacagaggacaatggaagtgactacctggtgtacctgcccagccagatgtttgagccccagaagctgatgatcaactatgagaaggaccagaagtctgctgagatcgccagcctgaccagcggccatgaaaattatggcaggaaggaggagccagaccacacctatgagcctggagatgtgtccctgcaggagtactacatggatgtggccttcctgattgatgccagccagagggtgggcagtgatgagttcaaggaggtgaaggccttcatcacctctgtgctggactacttccacatcgcccccacccccctgaccagcaccctgggggacagagtggccgtgctgagctacagccccccaggctacatgcccaacacagaagaatgtcctgtgtacctggagtttgacctggtgacctacaacagcatccaccagatgaagcaccacctgcaggacagccagcagctgaatggagatgtgttcatcggccacgccctgcagtggaccatcgacaacgtgtttgtgggcacccccaacctgaggaagaacaaggtgatcttcgtcatctctgctggggagaccaacagcctggacaaggatgtgctgagaaatgtgtccctgcgggccaagtgccagggctacagcatctttgtgttctcctttggccccaagcacaatgacaaggagctggaggagctggccagccaccccctggaccaccacctggtgcagctgggccgcacccacaagccagactggaactacatcatcaagtttgtgaagccctttgtgcacctgatcagaagagccatcaacaagtaccccacagaggacatgaaggccacctgtgtgaacatgaccagccccaacccagaaaatggaggaacagagaacacagtgctgctgctgcccggcatctatgagatcaagacagaaaatggagacctgtttgatgaatttgacagccaggcccagcacctgctggtgctgggcaacaaccacagcagcggcagcgagacagccacagacctgatgcagaagctgtacctgctcttcagcacagagaagctggccatgaaggacaaggagaaggcccacctggaggagatcagcgccctggtggtggacaagcagcaggagaaggaggatggagaggacaccaggagcagctag

SEQ ID NO: 97985 - DNA, 9226 bp, Artificial Sequence
  derived and/or modified sequence
aaatggcgattcctctgtctaagtagtagaagtgaccgcagctcggctgctagtaaagattgcccttggtttctgagaaattctgactccctaagttcatttggcagccggcggcttctctgaaacaaagccagcaaacagctggagcgtctctggacactcacattaaaacttgtgaagagttaaaagccccagggaagagccaggccaagggcacgggtcagcgccggcttaaaagaccctctcagggcacgaggcgttcgctgcgggaatccacctgcagctgtgcggcgcggaccagggcgtgcggcgcggaccagggcttccggcgcgcgctctatccaactgcgccgcgggcgcccgagaggcgcgcgtttactgcgctcaggagctcggtgcagcctcttctggagagttgggggcggtttccagggtccggagtgtcccctgaccccgggaaagctggaacaaaagtaaaaatcttcactaacaaaatgaagatcttgctaattatatttgtcctaatcatttggactgaaacattggcagaccagagcccagggccaggccctgtgtatgcagatgtcgtgtttctggtggacagctccgatcacctgggacctaagtcattcccattcgtgaaaacgttcatcaacaaaatgatcaacagtctccccatagaggccaacaaataccgtgtagccctggcccagtacagcgacgagtttcacagtgaattccatctgagcaccttcaaaggcagaagccccatgctgaaccacctcaagaagaactttcagttcattggcgggtccctgcagataggaaaggctcttcaggaggctcataggacctacttctctgcacccataaatgggagagacaggaaacagtttcccccaattttggtggtcctggcttcggctgagtctgaggatgaagtggaagaggcttcgaaagccctgcagaaagacggggtgaaaattatctccgtgggggtgcagaaagcttctgaggaaaatctgaaggccatggccacatcccatttccatttcaaccttcggacaatcagagacctcagcacattttcccaaaacatgacacagatcatcaaggatgtaaccaagtataaggagggagccgtcgatgctgatatgcaagttcacttccccatatcctgtcagaaagattcactcgctgacctcgtgttcctggtggatgagtcacttgggaccggaggaaatttaaggcatcttcagaccttccttgagaacattaccagctccatggatgtgaaggaaaattgcatgcgacttggactgatgagttacagcaatagtgccaagactatttcttttcttaaatcaagcacaacccaatctgaatttcagcagcaaatcaagaatctttctatccaagttgggaaatccaatacaggggctgccattgatcagatgagaagagacggcttctcagagtcatatggcagcagaagagcacaaggagtgcctcagattgcagttctggtcacccacagaccatcagatgatgaggtgcatgatgctgcgctgaaccttcgactggaggatgtaaacgtgtttgccttgagcatccaaggggctaacaatacccagttagaagaaatagtgtcttatcctccagaacagacaatttccacgctgaagtcctatgcagacttagaaacttacagtacaaagttcctgaaaaagctccagaatgaaatatggtcccaaatttctacttatgctgaacaaaggaatcttgataaaactggctgtgtggatacaaaagaggctgatatccacttcctcattgatggctcaagcagcatccaggagaaacagtttgagcaaatcaagagatttatgttggaagtgacagaaatgtttagcattggcccagacaaagtccgagttggagttgtgcagtattcagatgacacagaagtggaattttatatcactgactattctaatgatattgacttaagaaaggctatttttaacattaagcaactaactggtggaacttatactgggaaagctctggattacatactgcaaataataaaaaatggaatgaaggatagaatgagcaaggttccctgttacctcattgtgttgactgatgggatgtccacagacagagtcgtggaacctgctaagagactaagggctgagcaaatcactgttcatgcagttggcattggggcagctaataaaatagaactgcaagaaattgctgggaaagaagaaagggttagctttgggcagaactttgatgctttgaaaagcataaaaaatgaagtcgttcgtgaaatctgcgctgaaaaaggatgtgaagacatgaaggccgacatcatgtttctggtggacagttcttggagtataggaaatgaaaattttaggaaaatgaaaatcttcatgaaaaacctgttaactaaaattcaaattggtgcagacaaaacccagattggtgttgttcagttcagtgataaaactaaggaagagttccagcttaatagatattttacacagcaagaaatttctgatgcaatagatagaatgtctctcatcaatgaaggcactttaactggaaaggcactaaattttgtaggtcaatacttcacccactccaagggggcccgtttgggggccaaaaaatttctcatcctcatcacagatggagtagcgcaggatgatgtgagagatcctgctagaattcttcggggcaaagatgtgaccatcttctctgtaggagtatacaatgccaatagatctcagctagaagagatcagtggggatagcagcctagtttttcatgttgagaacttcgatcatctaaaggcactagaaaggaaacttatctttcgtgtgtgtgctctccatgattgtaaaaggattacactactagacgttgtgtttgtgctggatcattcaggtagcataaaaaaacaatatcaagatcacatgattaacctaactatccatttggtgaagaaagcagatgttggcagggaccgagttcagtttggagccctcaaatactctgaccaacctaacatccttttctaccttaatacatactcgaacagatcagcaataattgagaatctgcggaagcgcagggacactggagggaacacctacactgccaaggctctcaagcacgcaaatgccctgtttacagaggaacatggcagccgcatcaagcaaaatgtgaagcagatgctgattgtcatcaccgatggggaatcccatgaccatgatcagctcaatgacacagcattggaactgagaaacaaaggcatcaccatctttgcagtgggtgtaggaaaggccaaccaaaaggaacttgagggtatggcagggaataaaaacaatactatctatgtagataattttgacaaactgaaagatgttttcacacttgttcaagaacgtatgtgtactgaagcaccagaggtctgtcatcttcaggaagctgacgtgattttcctttgcgatggctctgacagggtatctaattcagattttgtaaccatgacaactttcttgtcagacttaatcgataattttgacattcagtctcaaagaatgaaaattggtatggctcaatttggaagcaactaccagagtattattgagttgaaaaactctctgactaaaacccagtggaagactcaaattcagaatgtctccaagagcggtggatttccaagaattgactttgcccttaaaaaagtgagcaatatgtttaatctacatgctggtgggagaagaaatgctggtgtcccccaaactttggttgttatcacatctggagatcctcgctatgatgtggcagatgcagtaaaaaccctgaaggaccttggaatttgtgtcctggttttgggcataggagatgtttataaggaacatctcctgccaataacaggcaattctgaaaaaataatcacttttcaagactttgataaattaaagaatgtggatgtgaaaaaaagaatcatccgtgaaatctgccagagctgtgggaaaaccaattgctttatggacatagtggttgggtttgacatctccactcatgtgcaggggcagcctttgttccagggccacccccagctggaatcctacctcccaggcatcttagaagacatcagctctatcaagggggtgagctgtggggctggcacagaggcacaggtgagcttggcgtttaaggtgaacagtgaccaaggattccctgccaagttccaaatctatcagaaagcagtgtttgacagcttgctgcaagtcaacgtcagtgggccaactcatctgaacgcacagttcttgcggtctctttgggacacatttaaggataaatctgcatcccggggccaggtgctgcttattttttcagacggtctccagagtgaaagcaacataatgcttgaaaatcaatcagacaggctcagagaagcaggacttgatgctctgctggtagtgtcccttaacacaactgctcatcatgagttttctagctttgaatttggaaaaagattcgattacaggactcatctgactattggaatgagagaactgggcaaaaaactatcacagtacctgggaaatattgcagagaggacttgctgctgtacattctgcaaatgtccaggaattccaggacctcatgggacccgaggactacaagccatgaagggttctcaaggtctgaaaggcagcagaggacacaggggagaggatggaaaccctggagtacgaggagacacaggaccccaaggagacaaagggattgcaggatgtccaggggcgtggggtcagaagggactcaaaggattttctggacctaagggaggtcatggagacgatgggattgatggacttgatggggaagagggctgtcatggatttcctggaataaaaggagaaaaaggtgatccaggatctcagggcagcccaggttccagaggtgcccctgggcagtatggagagaagggcttcccaggggatccgggtaatccaggacaaaacaataacatcaaaggacaaaagggctccaaaggagaacaaggaagacaaggtagaagtggacagaaaggggtgcaaggcagtcctagttccagaggcagcaggggaagagaaggtcaaaggggactccgaggtgtctcaggagaaccaggaaatcctggacctacaggcacattgggagctgaaggattacaaggcccacaggggtcacagggaaatcctggcagaaaaggagaaaaaggaagccaggggcagaaaggacctcagggttctcctgggctaatgggagctaaagggagcactggaagacctggacttttggggaaaaaaggagagcctggacttcctggagatctagggccagtggggcaaactgggcagcgaggaagacagggagattctggcatcccaggctacggtcagatgggacgaaaaggagtaaagggcccaagaggattccctggagatgcggggcagaagggtgatattggtaatcctggaattcctgggggacctggacccaaaggatttaggggactagcactcactgtaggcttgaaaggtgaagagggatctcgaggactcccaggccctcctggacagagaggcattaaaggcatggcagggcagcctgtatattctcaatgtgatctgatccggtttttgcgggaacatagtctttgcagtctagaaaaatgtccagcatatccaacagagctagtatttgctctggacaattcctacgatgtcacagaagagagctttaataaaacacgggacatcatcacttccattgtcaatgaccttaacatcagggaaaataactgtcctgtgggagcaagagttgccatggtttcctataactcaggcaccagctatctcatccgctggtctgactacaataggaagaagcagctcctccagcagctttcccaaataaaatatcaagacaccacagagccccgagatgttggtaatgcaatgaggtttgtgacccgcaacgtgttcaagcggacgtatgcaggagccaacgtgaggagagttgctgtgttttttagcaatggtcaaacagccagtaggtcatccatcatcacggccaccatggagtttagtgccctggatatcagtccaacagtctttgcttttgatgagagagttttccttgaagcttttgggtttgacaacactggaacatttcaggtgattccagttcctccaaatggggaaaatcaaacattagaaagacttcggcgctgtgcactttgctatgataaatgttttccaaatgcttgcattcgagaggctttcttacctgaagattcatacatggatgtagtcttcctcatagacaattctcggaatatagcaaaggatgagtttaaggctgtgaaagccttggtgagctcagtgattgacaacttcaacattgcttcagaccctttaatctcagactctggtgataggattgctttgttgagctattctccttgggaaagttccaggagaaagatgggtacagtaaaaacagagtttgatttcatcacttatgacaaccaactcctaatgaagaatcacatccagacttccttccaacagctaaatggagaagcaacaattggtcgtgccctactgtggaccactgaaaatctttttccagaaacaccctatctaagaaaacacaaggtcatctttgtggtctcagctggagaaaattatgagagaaaagaatttgtaaaaatgatggctttgagggctaagtgtcaaggctacgtcatatttgtgatttctctgggctctacacgtaaggatgacatggaggagttagccagctacccacttgatcaacacctgatacagcttgggagaatacataaaccagatctgaattatattgcgaagttcttaaagccatttttatactcggtcaggcggggattcaatcagtacccaccaccgatgcttgaggatgcctgtagactcatcaatttaggaggagagaatattcaaaatgatggtttccaatttgttactgagctacaagaggattttttgggaggtaatggcttcattggccaagaattaaattctgggagagaatcaccttttgtaaagacggaagacaatggaagtgactatttggtttaccttccaagccaaatgtttgagccacaaaaattaatgatcaattatgaaaaagatcaaaaatctgcagaaattgcaagtctcacttctggacatgaaaattatggcagaaaagaagaaccagatcatacttatgaacctggagatgtctctcttcaagaatattacatggatgtggctttcctcatagatgcttcccaaagagtaggaagtgatgagtttaaggaagtaaaagcttttataacctcagtgcttgattactttcacattgcccccactccactgacctccaccttaggagacagggttgctgtcctgagctactctcctccaggctatatgcctaacactgaagaatgccctgtctacctggaatttgatttggttacttataacagtatacaccaaatgaaacatcatctccaagactctcaacagctcaatggagatgtttttattggccatgccttgcagtggacaattgacaatgtctttgtaggaacccccaatctgaggaaaaacaaagttatctttgtaatatctgctggcgaaaccaactctttagacaaagacgtcttaaggaatgtgtctctgagagccaagtgtcaaggctactccatatttgtgttttcctttggccctaaacacaatgacaaagaattagaagaattagccagccaccctctggatcatcacttggtccaacttggccgaacccacaagccagattggaactatatcatcaagtttgtcaagccatttgtccatttaatcagacgtgccatcaacaaatatcccaccgaagatatgaaagccacatgtgttaacatgacctctcccaacccagagaacggtggcacagaaaacactgtattacttcttcctgggatatatgaaataaagacagaaaatggtgatctgtttgatgaatttgattcccaggcacaacatctccttgtattagggaacaatcatagtagtggttctgagacagctactgatttgatgcagaagttatatctgctcttttcaactgagaaactggcaatgaaagacaaggaaaaagcacatttagaagaaatttcagctctagtggttgataaacagcaagaaaaagaagataaggaaatggaagctacagacatctgaagcatcttacctaagaattcagtaattaatccaatactttcgtcatagtgattcatactctatgtttatagaacatggtgaagatacaaggtcatcataggagaaaagaagatagctccactgacatgtataatcccatgtggttctaaccagaatgtataatcatctgttagaggtactgtggtaaatgacagggacttttcacaaaaacaattggctaatagcatgctaaatttgttctccatctcaaatcttgaggagaagaattttcggagtgaagacatcagtaagaagacctgacaaaccaggaatgatttcatttctcctgagaactggggaaaccgacctataagagttaacttttctttgaaagctctgcacagttcaggcatcaattttgatgatgtatctgcctgtaaaagattgtcattattttcaacacatctgtatctcagattggactcctctaaaagcatttggaattggaatttcctaggaatatcttctactaattcttaaaactggaaagccatgcccatgtcatcggttctggggtgaccctaacatttcatctagcagtgattgtcttctaaaacccacctgtcaggctgctatgacccatagttaatgctttctcttcaccaggacattgacaaaagaatggaattggtgaaaaagaaaaaagtgataagaggctaattttatgaaccatattttttgctgtaatcttttgtttaaattttagcagctttgctttgtgtatactgaatttttgcagcaaaagaattacggaaaagcacagatactctatatgaccagagatgttcttgggaattacaatgtagcaagagataatttctaaaataaaaacaagtctgacttgg

SEQ ID NO: 97986 - DNA, 9226 bp, Artificial Sequence
  derived and/or modified sequence
aaatggcgattcctctgtctaagtagtagaagtgaccgcagctcggctgctagtaaagattgcccttggtttctgagaaattctgactccctaagttcatttggcagccggcggcttctctgaaacaaagccagcaaacagctggagcgtctctggacactcacattaaaacttgtgaagagttaaaagccccagggaagagccaggccaagggcacgggtcagcgccggcttaaaagaccctctcagggcacgaggcgttcgctgcgggaatccacctgcagctgtgcggcgcggaccagggcgtgcggcgcggaccagggcttccggcgcgcgctctatccaactgcgccgcgggcgcccgagaggcgcgcgtttactgcgctcaggagctcggtgcagcctcttctggagagttgggggcggtttccagggtccggagtgtcccctgaccccgggaaagctggaacaaaagtaaaaatcttcactaacaaaatgaagatcttgctaattatatttgtcctaatcatttggactgaaacattggcagaccagagcccagggccaggccctgtgtatgcagatgtcgtgtttctggtggacagctccgatcacctgggacctaagtcattcccattcgtgaaaacgttcatcaacaaaatgatcaacagtctccccatagaggccaacaaataccgtgtagccctggcccagtacagcgacgagtttcacagtgaattccatctgagcaccttcaaaggcagaagccccatgctgaaccacctcaagaagaactttcagttcattggcgggtccctgcagataggaaaggctcttcaggaggctcataggacctacttctctgcacccataaatgggagagacaggaaacagtttcccccaattttggtggtcctggcttcggctgagtctgaggatgaagtggaagaggcttcgaaagccctgcagaaagacggggtgaaaattatctccgtgggggtgcagaaagcttctgaggaaaatctgaaggccatggccacatcccatttccatttcaaccttcggacaatcagagacctcagcacattttcccaaaacatgacacagatcatcaaggatgtaaccaagtataaggagggagccgtcgatgctgatatgcaagttcacttccccatatcctgtcagaaagattcactcgctgacctcgtgttcctggtggatgagtcacttgggaccggaggaaatttaaggcatcttcagaccttccttgagaacattaccagctccatggatgtgaaggaaaattgcatgcgacttggactgatgagttacagcaatagtgccaagactatttcttttcttaaatcaagcacaacccaatctgaatttcagcagcaaatcaagaatctttctatccaagttgggaaatccaatacaggggctgccattgatcagatgagaagagacggcttctcagagtcatatggcagcagaagagcacaaggagtgcctcagattgcagttctggtcacccacagaccatcagatgatgaggtgcatgatgctgcgctgaaccttcgactggaggatgtaaacgtgtttgccttgagcatccaaggggctaacaatacccagttagaagaaatagtgtcttatcctccagaacagacaatttccacgctgaagtcctatgcagacttagaaacttacagtacaaagttcctgaaaaagctccagaatgaaatatggtcccaaatttctacttatgctgaacaaaggaatcttgataaaactggctgtgtggatacaaaagaggctgatatccacttcctcattgatggctcaagcagcatccaggagaaacagtttgagcaaatcaagagatttatgttggaagtgacagaaatgtttagcattggcccagacaaagtccgagttggagttgtgcagtattcagatgacacagaagtggaattttatatcactgactattctaatgatattgacttaagaaaggctatttttaacattaagcaactaactggtggaacttatactgggaaagctctggattacatactgcaaataataaaaaatggaatgaaggatagaatgagcaaggttccctgttacctcattgtgttgactgatgggatgtccacagacagagtcgtggaacctgctaagagactaagggctgagcaaatcactgttcatgcagttggcattggggcagctaataaaatagaactgcaagaaattgctgggaaagaagaaagggttagctttgggcagaactttgatgctttgaaaagcataaaaaatgaagtcgttcgtgaaatctgcgctgaaaaaggatgtgaagacatgaaggccgacatcatgtttctggtggacagttcttggagtataggaaatgaaaattttaggaaaatgaaaatcttcatgaaaaacctgttaactaaaattcaaattggtgcagacaaaacccagattggtgttgttcagttcagtgataaaactaaggaagagttccagcttaatagatattttacacagcaagaaatttctgatgcaatagatagaatgtctctcatcaatgaaggcactttaactggaaaggcactaaattttgtaggtcaatacttcacccactccaagggggcccgtttgggggccaaaaaatttctcatcctcatcacagatggagtagcgcaggatgatgtgagagatcctgctagaattcttcggggcaaagatgtgaccatcttctctgtaggagtatacaatgccaatagatctcagctagaagagatcagtggggatagcagcctagtttttcatgttgagaacttcgatcatctaaaggcactagaaaggaaacttatctttcgtgtgtgtgctctccatgattgtaaaaggattacactactagacgttgtgtttgtgctggatcattcaggtagcataaaaaaacaatatcaagatcacatgattaacctaactatccatttggtgaagaaagcagatgttggcagggaccgagttcagtttggagccctcaaatactctgaccaacctaacatccttttctaccttaatacatactcgaacagatcagcaataattgagaatctgcggaagcgcagggacactggagggaacacctacactgccaaggctctcaagcacgcaaatgccctgtttacagaggaacatggcagccgcatcaagcaaaatgtgaagcagatgctgattgtcatcaccgatggggaatcccatgaccatgatcagctcaatgacacagcattggaactgagaaacaaaggcatcaccatctttgcagtgggtgtaggaaaggccaaccaaaaggaacttgagggtatggcagggaataaaaacaatactatctatgtagataattttgacaaactgaaagatgttttcacacttgttcaagaacgtatgtgtactgaagcaccagaggtctgtcatcttcaggaagctgacgtgattttcctttgcgatggctctgacagggtatctaattcagattttgtaaccatgacaactttcttgtcagacttaatcgataattttgacattcagtctcaaagaatgaaaattggtatggctcaatttggaagcaactaccagagtattattgagttgaaaaactctctgactaaaacccagtggaagactcaaattcagaatgtctccaagagcggtggatttccaagaattgactttgcccttaaaaaagtgagcaatatgtttaatctacatgctggtgggagaagaaatgctggtgtcccccaaactttggttgttatcacatctggagatcctcgctatgatgtggcagatgcagtaaaaaccctgaaggaccttggaatttgtgtcctggttttgggcataggagatgtttataaggaacatctcctgccaataacaggcaattctgaaaaaataatcacttttcaagactttgataaattaaagaatgtggatgtgaaaaaaagaatcatccgtgaaatctgccagagctgtgggaaaaccaattgctttatggacatagtggttgggtttgacatctccactcatgtgcaggggcagcctttgttccagggccacccccagctggaatcctacctcccaggcatcttagaagacatcagctctatcaagggggtgagctgtggggctggcacagaggcacaggtgagcttggcgtttaaggtgaacagtgaccaaggattccctgccaagttccaaatctatcagaaagcagtgtttgacagcttgctgcaagtcaacgtcagtgggccaactcatctgaacgcacagttcttgcggtctctttgggacacatttaaggataaatctgcatcccggggccaggtgctgcttattttttcagacggtctccagagtgaaagcaacataatgcttgaaaatcaatcagacaggctcagagaagcaggacttgatgctctgctggtagtgtcccttaacacaactgctcatcatgagttttctagctttgaatttggaaaaagattcgattacaggactcatctgactattggaatgagagaactgggcaaaaaactatcacagtacctgggaaatattgcagagaggacttgctgctgtacattctgcaaatgtccaggaattccaggacctcatgggacccgaggactacaagccatgaagggttctcaaggtctgaaaggcagcagaggacacaggggagaggatggaaaccctggagtacgaggagacacaggaccccaaggagacaaagggattgcaggatgtccaggggcgtggggtcagaagggactcaaaggattttctggacctaagggaggtcatggagacgatgggattgatggacttgatggggaagagggctgtcatggatttcctggaataaaaggagaaaaaggtgatccaggatctcagggcagcccaggttccagaggtgcccctgggcagtatggagagaagggcttcccaggggatccgggtaatccaggacaaaacaataacatcaaaggacaaaagggctccaaaggagaacaaggaagacaaggtagaagtggacagaaaggggtgcaaggcagtcctagttccagaggcagcaggggaagagaaggtcaaaggggactccgaggtgtctcaggagaaccaggaaatcctggacctacaggcacattgggagctgaaggattacaaggcccacaggggtcacagggaaatcctggcagaaaaggagaaaaaggaagccaggggcagaaaggacctcagggttctcctgggctaatgggagctaaagggagcactggaagacctggacttttggggaaaaaaggagagcctggacttcctggagatctagggccagtggggcaaactgggcagcgaggaagacagggagattctggcatcccaggctacggtcagatgggacgaaaaggagtaaagggcccaagaggattccctggagatgcggggcagaagggtgatattggtaatcctggaattcctgggggacctggacccaaaggatttaggggactagcactcactgtaggcttgaaaggtgaagagggatctcgaggactcccaggccctcctggacagagaggcattaaaggcatggcagggcagcctgtatattctcaatgtgatctgatccggtttttgcgggaacatagtccttgctggaaagaaaaatgtccagcatatccaacagagctagtatttgctctggacaattcctacgatgtcacagaagagagctttaataaaacacgggacatcatcacttccattgtcaatgaccttaacatcagggaaaataactgtcctgtgggagcaagagttgccatggtttcctataactcaggcaccagctatctcatccgctggtctgactacaataggaagaagcagctcctccagcagctttcccaaataaaatatcaagacaccacagagccccgagatgttggtaatgcaatgaggtttgtgacccgcaacgtgttcaagcggacgtatgcaggagccaacgtgaggagagttgctgtgttttttagcaatggtcaaacagccagtaggtcatccatcatcacggccaccatggagtttagtgccctggatatcagtccaacagtctttgcttttgatgagagagttttccttgaagcttttgggtttgacaacactggaacatttcaggtgattccagttcctccaaatggggaaaatcaaacattagaaagacttcggcgctgtgcactttgctatgataaatgttttccaaatgcttgcattcgagaggctttcttacctgaagattcatacatggatgtagtcttcctcatagacaattctcggaatatagcaaaggatgagtttaaggctgtgaaagccttggtgagctcagtgattgacaacttcaacattgcttcagaccctttaatctcagactctggtgataggattgctttgttgagctattctccttgggaaagttccaggagaaagatgggtacagtaaaaacagagtttgatttcatcacttatgacaaccaactcctaatgaagaatcacatccagacttccttccaacagctaaatggagaagcaacaattggtcgtgccctactgtggaccactgaaaatctttttccagaaacaccctatctaagaaaacacaaggtcatctttgtggtctcagctggagaaaattatgagagaaaagaatttgtaaaaatgatggctttgagggctaagtgtcaaggctacgtcatatttgtgatttctctgggctctacacgtaaggatgacatggaggagttagccagctacccacttgatcaacacctgatacagcttgggagaatacataaaccagatctgaattatattgcgaagttcttaaagccatttttatactcggtcaggcggggattcaatcagtacccaccaccgatgcttgaggatgcctgtagactcatcaatttaggaggagagaatattcaaaatgatggtttccaatttgttactgagctacaagaggattttttgggaggtaatggcttcattggccaagaattaaattctgggagagaatcaccttttgtaaagacggaagacaatggaagtgactatttggtttaccttccaagccaaatgtttgagccacaaaaattaatgatcaattatgaaaaagatcaaaaatctgcagaaattgcaagtctcacttctggacatgaaaattatggcagaaaagaagaaccagatcatacttatgaacctggagatgtctctcttcaagaatattacatggatgtggctttcctcatagatgcttcccaaagagtaggaagtgatgagtttaaggaagtaaaagcttttataacctcagtgcttgattactttcacattgcccccactccactgacctccaccttaggagacagggttgctgtcctgagctactctcctccaggctatatgcctaacactgaagaatgccctgtctacctggaatttgatttggttacttataacagtatacaccaaatgaaacatcatctccaagactctcaacagctcaatggagatgtttttattggccatgccttgcagtggacaattgacaatgtctttgtaggaacccccaatctgaggaaaaacaaagttatctttgtaatatctgctggcgaaaccaactctttagacaaagacgtcttaaggaatgtgtctctgagagccaagtgtcaaggctactccatatttgtgttttcctttggccctaaacacaatgacaaagaattagaagaattagccagccaccctctggatcatcacttggtccaacttggccgaacccacaagccagattggaactatatcatcaagtttgtcaagccatttgtccatttaatcagacgtgccatcaacaaatatcccaccgaagatatgaaagccacatgtgttaacatgacctctcccaacccagagaacggtggcacagaaaacactgtattacttcttcctgggatatatgaaataaagacagaaaatggtgatctgtttgatgaatttgattcccaggcacaacatctccttgtattagggaacaatcatagtagtggttctgagacagctactgatttgatgcagaagttatatctgctcttttcaactgagaaactggcaatgaaagacaaggaaaaagcacatttagaagaaatttcagctctagtggttgataaacagcaagaaaaagaagataaggaaatggaagctacagacatctgaagcatcttacctaagaattcagtaattaatccaatactttcgtcatagtgattcatactctatgtttatagaacatggtgaagatacaaggtcatcataggagaaaagaagatagctccactgacatgtataatcccatgtggttctaaccagaatgtataatcatctgttagaggtactgtggtaaatgacagggacttttcacaaaaacaattggctaatagcatgctaaatttgttctccatctcaaatcttgaggagaagaattttcggagtgaagacatcagtaagaagacctgacaaaccaggaatgatttcatttctcctgagaactggggaaaccgacctataagagttaacttttctttgaaagctctgcacagttcaggcatcaattttgatgatgtatctgcctgtaaaagattgtcattattttcaacacatctgtatctcagattggactcctctaaaagcatttggaattggaatttcctaggaatatcttctactaattcttaaaactggaaagccatgcccatgtcatcggttctggggtgaccctaacatttcatctagcagtgattgtcttctaaaacccacctgtcaggctgctatgacccatagttaatgctttctcttcaccaggacattgacaaaagaatggaattggtgaaaaagaaaaaagtgataagaggctaattttatgaaccatattttttgctgtaatcttttgtttaaattttagcagctttgctttgtgtatactgaatttttgcagcaaaagaattacggaaaagcacagatactctatatgaccagagatgttcttgggaattacaatgtagcaagagataatttctaaaataaaaacaagtctgacttgg

SEQ ID NO: 97987 - DNA, 1770 bp, Artificial Sequence
  derived and/or modified sequence
attggtcgtgccctactgtggaccactgaaaatctttttccagaaacaccctatctaagaaaacacaaggtcatctttgtggtctcagctggagaaaattatgagagaaaagaatttgtaaaaatgatggctttgagggctaagtgtcaaggctacgtcatatttgtgatttctctgggctctacacgtaaggatgacatggaggagttagccagctacccacttgatcaacacctgatacagcttgggagaatacataaaccagatctgaattatattgcgaagttcttaaagccatttttatactcggtcaggcggggattcaatcagtacccaccaccgatgcttgaggatgcctgtagactcatcaatttaggaggagagaatattcaaaatgatggtttccaatttgttactgagctacaagaggattttttgggaggtaatggcttcattggccaagaattaaattctgggagagaatcaccttttgtaaagacggaagacaatggaagtgactatttggtttaccttccaagccaaatgtttgagccacaaaaattaatgatcaattatgaaaaagatcaaaaatctgcagaaattgcaagtctcacttctggacatgaaaattatggcagaaaagaagaaccagatcatacttatgaacctggagatgtctctcttcaagaatattacatggatgtggctttcctcatagatgcttcccaaagagtaggaagtgatgagtttaaggaagtaaaagcttttataacctcagtgcttgattactttcacattgcccccactccactgacctccaccttaggagacagggttgctgtcctgagctactctcctccaggctatatgcctaacactgaagaatgccctgtctacctggaatttgatttggttacttataacagtatacaccaaatgaaacatcatctccaagactctcaacagctcaatggagatgtttttattggccatgccttgcagtggacaattgacaatgtctttgtaggaacccccaatctgaggaaaaacaaagttatctttgtaatatctgctggcgaaaccaactctttagacaaagacgtcttaaggaatgtgtctctgagagccaagtgtcaaggctactccatatttgtgttttcctttggccctaaacacaatgacaaagaattagaagaattagccagccaccctctggatcatcacttggtccaacttggccgaacccacaagccagattggaactatatcatcaagtttgtcaagccatttgtccatttaatcagacgtgccatcaacaaatatcccaccgaagatatgaaagccacatgtgttaacatgacctctcccaacccagagaacggtggcacagaaaacactgtattacttcttcctgggatatatgaaataaagacagaaaatggtgatctgtttgatgaatttgattcccaggcacaacatctccttgtattagggaacaatcatagtagtggttctgagacagctactgatttgatgcagaagttatatctgctcttttcaactgagaaactggcaatgaaagacaaggaaaaagcacatttagaagaaatttcagctctagtggttgataaacagcaagaaaaagaagatggtgaagatacaaggtcatcataggagaaaagaagatagctccactgacatgtataatcccatgtggttctaaccagaatgtataatcatctgttagaggtactgtggtaaatgacaggg

SEQ ID NO: 97988 - DNA, 7848 bp, Artificial Sequence
  derived and/or modified sequence
atgaagatcctgctgatcatcttcgtgctgatcatctggaccgagactcttgcggaccagtctcctggaccaggtccagtgtatgccgacgttgtttttctcgttgacagtagtgaccacctcggacctaaatcattcccattcgtgaaaacctttatcaacaaaatgataaactcgctgcccattgaggctaataagtacagggtggcccttgcgcagtatagcgacgaatttcactctgaattccacctctccacgtttaaagggaggtcaccaatgctgaatcatctgaaaaaaaattttcagttcatcggcggatccctccagatcggcaaagcactgcaggaggcccacaggacttatttctcagcccccatcaacggacgcgatcggaaacaatttccgcctatcctggtagtgctggcgagcgccgagtctgaagatgaggttgaggaggcctcgaaggctctgcagaaggacggggtgaaaatcataagtgttggggttcagaaggcaagtgaggaaaacctcaaggccatggcaacttcccattttcatttcaatctcaggactatacgagacctaagcacattttcacagaatatgacgcagattatcaaggatgtaacgaagtataaggaaggagccgtggacgccgatatgcaggtgcattttccgatctcttgtcagaaggatagcctggccgacctggtcttcctcgtcgacgagtctctcggcacaggtgggaaccttcggcatttacaaacattcctggaaaacataacgtcgagcatggacgtgaaggaaaactgcatgagacttggtctgatgagctacagcaatagcgctaaaaccatctcctttctgaagagttccactacccagagcgaatttcagcaacagattaaaaatctgtctatacaggttgggaaaagtaataccggcgctgccatagaccaaatgcgccgcgacggattcagcgagtcatacggaagtcggagggcacagggcgtgcctcagatagccgtcctggtgacccatagaccttcagacgatgaggtgcacgacgctgccctgaacctccgactcgaggacgtgaacgtgtttgccctctctattcagggagcaaacaacacccaactggaggaaatcgtttcttatccccccgaacagacgattagcaccctgaagtcttatgcagatctcgaaacctactcaacaaaatttctcaagaagctgcagaacgaaatctggtctcagattagcacctatgcagaacagcgcaacttggataagacagggtgcgtggacactaaagaggcagacattcatttcctcattgacggcagctcaagcattcaggagaagcaatttgagcagattaagcgcttcatgcttgaagtgaccgaaatgttcagcatcggtcccgataaagttagagtgggggtcgtgcagtattcagacgacacagaggtggagttctacatcacggactactccaacgacattgacctgcgcaaagccatctttaatatcaagcagctgaccgggggcacttacaccgggaaagcactcgactacatccttcagatcattaaaaatgggatgaaggacaggatgtccaaggtaccatgctatttgatcgtgctgacagatgggatgagcaccgaccgcgtggtggaaccagccaaaaggctgagagccgaacagattactgtgcacgccgtgggcatcggcgccgccaacaaaatcgagctgcaggaaatcgctgggaaggaagagcgcgtcagttttggccagaacttcgatgccctcaaatccattaaaaatgaggtggtaagggagatctgtgctgagaaagggtgcgaggatatgaaggcagatattatgtttcttgttgattcatcatggtctatcggcaacgagaacttccgcaaaatgaagatatttatgaagaacttattaacaaaaatccagataggggcagacaaaacacagatcggagtcgtgcagttctccgataaaaccaaggaggagttccagcttaacaggtacttcacccaacaggagatcagcgatgctatagatcggatgagcctcatcaacgagggtacattgacgggtaaagcccttaattttgtgggccaatacttcactcacagcaaaggcgctaggttaggggcaaaaaagttcttgatcctgatcacggacggcgtagcacaggatgacgtgcgagatcccgcgcgcatcttaagaggaaaagacgtgaccatcttttctgtcggggtgtataacgcaaacaggagccagctcgaggagatttccggcgattcttcgctggtgttccacgtggagaacttcgaccacttaaaggctctcgaaagaaaacttattttcagggtgtgtgctctgcacgattgcaaacgtattaccctgctcgacgtagtctttgtactggaccattccggctcaatcaaaaaacagtatcaagatcatatgatcaatcttacgattcatcttgtgaaaaaggccgacgttggccgggaccgggtgcaattcggtgcgctaaaatacagcgatcagcccaacatcctgttctacttaaatacttactctaaccggtccgccattatcgaaaacttgcggaagcggcgggacaccgggggaaatacatatactgccaaagcccttaaacatgcgaatgccctatttaccgaggaacatggctctaggatcaaacagaatgttaaacagatgctgatagtcataacagacggggagagccacgatcacgatcagctgaatgacaccgctctagagttgcgcaacaaggggattacaatcttcgctgttggtgtgggaaaggcaaatcaaaaggagctggaaggcatggccggaaacaagaataacaccatctatgttgacaatttcgataagctgaaagatgtctttacactcgttcaggagcggatgtgtactgaagcccccgaagtatgtcatttgcaagaggccgacgttatctttctgtgtgatggctctgaccgagttagcaacagcgactttgtcacaatgaccacttttctgagcgacctaatcgataattttgacatacagagtcaacgcatgaagatcggaatggctcagtttggttcaaactaccagagcatcatcgagctgaaaaactcactgacaaagacacaatggaagactcagatacagaatgtaagcaagtccggcggcttcccacgaatcgactttgctttgaaaaaagtgagtaatatgtttaacctgcatgccggaggtaggagaaatgctggggttccacaaacacttgtcgttattacttcaggagatccacgctatgacgtggcggacgccgtcaagacactcaaagatctcggcatctgcgtgttggtcttaggaatcggcgatgtgtacaaggagcacttgctgcccatcacaggaaactctgaaaagatcattacgtttcaggattttgataagctgaagaatgtcgacgttaaaaagcggattattcgcgaaatttgccagtcctgtgggaaaacaaattgttttatggacatcgtggtgggctttgatatttccacgcatgtgcaggggcaaccactgttccagggacacccccagctggagtcttacctaccgggaattctggaggacataagtagcatcaagggcgtgagttgtggtgctggaaccgaagcccaggtatccctagcttttaaagtgaactctgatcaggggtttcctgccaagttccagatatatcagaaggcggtgttcgactcattactgcaggtcaatgtgagcgggcctactcatctcaacgcccagtttctcaggtccctgtgggacaccttcaaggataagagtgctagtcggggccaagtgctgctcatcttttctgatgggctgcaaagtgaatccaacatcatgctcgagaatcagtcggatcggctacgcgaagccggcctcgacgccctgctagtcgtgtcactgaatactacagcccaccatgaatttagtagctttgaatttggcaagcgctttgattatcgcactcacttgactattgggatgcgggagttgggaaagaaattgtctcagtatctcggcaatatcgcagaacgtacatgctgttgtacattctgtaagtgccctggcatccctggaccacacggcactagggggcttcaggcgatgaagggaagtcagggtctgaaaggctcaaggggacatagaggcgaggacggtaaccccggggttaggggtgatactggcccccagggagataaagggatcgcgggatgccccggagcctggggtcaaaaggggcttaaaggattttccggcccaaaaggcggccatggcgacgatggcattgatggcttagatggggaggagggctgtcacggctttcccggaattaagggcgagaaaggcgacccaggctcccagggtagccccggctctcgcggtgcaccaggccagtacggggagaagggattccctggcgacccagggaatccagggcagaacaataacatcaagggacagaaaggaagtaagggggagcaggggcggcagggacggtccggccagaagggtgtccaagggagcccctcatctcgcggttcgagagggcgggagggacagagagggctgcgaggggtctccggcgagccaggaaaccctggccccacaggaacgcttggcgctgagggtctccaggggcctcaggggagtcaaggcaatccagggcgcaaaggcgagaaaggcagccagggccaaaaggggccacagggttctcccgggctcatgggtgctaagggctctactggcaggccgggtctgttgggaaagaaaggcgagccaggactacctggcgacctcgggcctgttggacagactggacaaaggggaagacagggagactctggcataccagggtatggccagatgggtaggaagggtgtgaaggggccgcgtggcttcccaggcgatgcaggccaaaagggggatatcggcaaccctggtatccccggaggcccaggtccaaagggattccgcggtttggctctgactgtgggattaaagggcgaggaggggagcagagggttaccagggccccccgggcaaagagggataaaggggatggccggccagccagtctactcgcaatgtgatctgattcgcttcctgagagaacacagcctgtgtagtttggaaaagtgtcccgcatacccaaccgaattagtcttcgccctggataactcctatgacgtgactgaagaaagtttcaataagacacgggacattatcaccagcattgtaaatgatctgaacattagggagaacaactgccctgtcggcgcacgagtcgcaatggtgtcctataactccggcacctcctatttgattcgatggagcgactacaaccggaaaaaacagctccttcagcagctgtctcaaatcaagtaccaagacacaaccgaacctcgcgatgtcggcaatgcgatgcggtttgtgacaagaaacgtgttcaagcggacttacgccggcgctaacgtccggagggtcgccgttttttttagcaatggacaaacggcatctagaagttcaatcatcactgcgaccatggagttttctgccctggatatttcacccacagtgtttgccttcgacgagcgggtattcctggaggcgtttggctttgacaatacggggacatttcaagtgattccagtgcctccaaacggcgaaaaccaaaccctggaaaggcttcggcggtgtgctctatgttacgataagtgctttcctaatgcgtgcatccgggaagcgtttctgccagaagacagctacatggatgtagtgttcctaattgacaatagcaggaatatcgctaaggacgaattcaaggctgtgaaagcgctcgtgtccagcgtcatcgacaattttaacatagcctcagatccactgatcagcgattcaggcgacagaatcgccttactaagttattcaccttgggagtcatcccgccgaaaaatgggcacggtcaagacagaatttgacttcattacttatgataatcaactgttaatgaagaatcacatacagaccagttttcagcagctgaatggagaggccaccataggcagggcattgctctggaccactgaaaatctattccctgaaacgccgtatctccggaaacataaggtgatattcgtggtctccgccggcgaaaactacgagcgcaaggagtttgtgaagatgatggccctaagagccaagtgccagggctatgtgatatttgtaatcagtctgggcagcacaagaaaagatgatatggaagagctggcaagttaccctttggatcagcatctaatccagctcggaagaatccacaagccagacctaaactacattgcgaaattcctcaagccgtttctttacagcgttagacgcggattcaaccagtatccccctcccatgctggaggatgcatgtcgcttaattaacttaggcggggagaatattcagaatgacggttttcaattcgtgaccgagctccaagaggacttcctcggcgggaacggcttcattggacaagagctaaactccggacgcgaaagtccattcgtaaagaccgaggacaacgggtctgactacctggtttatctgccatcgcagatgtttgagccccagaaacttatgataaattacgagaaggaccaaaagagcgctgagatcgcatcacttaccagcggccacgaaaattacggcaggaaggaggagcctgatcatacatacgaaccgggagatgtctctttacaagagtactacatggatgtagcatttttgatagatgcatcccagagagtgggctctgatgaatttaaggaagtgaaagcctttataacttctgtgctggattacttccacatcgcacccactcctctgacgagcacccttggtgatcgtgtggctgttctgagttatagcccaccgggatacatgcccaatactgaggagtgcccagtttacctagagttcgatctcgtgacatacaattctatacaccagatgaagcaccatctgcaagattcccagcaactgaatggggacgtttttattggccatgcactgcagtggacaatcgacaatgtgtttgttggtacaccaaacttgcgcaagaacaaggtcatctttgtgatctcggccggtgagacgaactcattggataaggacgtgttacgtaacgtgtcactgcgggctaagtgtcaaggttacagcatcttcgtattctcatttggccccaagcacaacgacaaagagctggaggaactggcaagccatccattggaccaccatctggttcaactgggcagaacccataagcctgactggaattatataattaaattcgtgaaaccattcgtacacctaatacgtcgcgcaataaataagtatcctacagaggacatgaaagccacctgcgtgaatatgacctcacctaatcccgagaacggaggcaccgaaaacactgtcctactcctaccaggaatttacgagataaagactgagaacggcgatttgtttgatgagtttgacagccaagcgcagcacttacttgtgcttggaaataatcattctagcgggagcgaaacagccaccgacctaatgcaaaagctgtatctcctgttcagtaccgaaaaactcgcaatgaaggacaaagagaaggcccacctagaggagatttcagccttagtggttgataaacagcaagaaaaagaagacaaggagatggaggctacagatatatag

SEQ ID NO: 97989 - DNA, 7848 bp, Artificial Sequence
  derived and/or modified sequence
atgaagatcctgctgatcatcttcgtgctgatcatctggaccgagactctggcagaccagagtccagggccagggcctgtgtatgccgatgtcgtcttcctggtcgacagttccgatcacctcgggccaaaaagttttcccttcgtgaagacatttatcaataagatgattaatagtctgccaattgaggcaaataagtatcgcgttgccctcgctcaatactcggatgaatttcacagtgagtttcaccttagcacattcaaaggtagatccccgatgctcaatcacctgaaaaaaaattttcagtttattggtggcagcttgcagatcggaaaagccctgcaggaggcccatcggacatacttcagcgcccctatcaatggtagggaccgcaaacagttcccgcctattctcgttgttctagccagcgccgagtctgaagacgaggtcgaggaagcctccaaggcgctgcagaaagacggggtcaaaataatcagcgttggggtccagaaggctagcgaagagaatctcaaagcaatggccacttctcactttcacttcaatctgcggaccattagggacctgagtaccttctcccagaatatgacccagatcatcaaagatgtgaccaagtacaaagagggtgctgtcgacgccgatatgcaagttcactttccgatctcttgccagaaggactcgctggccgatctggtgtttttagtggatgaatccctcggcacaggtgggaacctacgtcaccttcaaacctttttggagaatattactagcagcatggacgtaaaggaaaactgtatgcgactgggactcatgagctactccaactcggctaagactatatcatttctgaagtcttccacaacgcaaagtgagttccagcagcagatcaaaaatctcagcatccaggtgggaaaaagcaataccggtgctgctattgaccagatgaggagggacggtttctcagagagctatggcagcagacgggcacagggagtgccccagattgccgtactcgtcacccatagaccttctgacgacgaagtgcacgatgctgctttaaatttgcgcttagaggacgtgaacgtattcgctcttagcatacagggggccaacaacacccagcttgaggagatagtgtcataccctccggagcaaacgatcagcaccctcaaatcctacgcagatttggagacatattctacaaagtttctgaaaaagctccaaaacgagatctggtcccaaatctcaacatacgcggaacagcgtaatctcgataaaacaggatgcgtggacaccaaagaggccgatatccactttctcattgacggctcttcttcaattcaggaaaaacagttcgaacagatcaaacgctttatgttggaggtgaccgaaatgttttccatcggtccggataaagtcagggtgggcgtagtgcagtatagcgacgacaccgaggtggagttctacatcaccgactatagcaatgatatcgatctccggaaagcaattttcaacataaagcaactgaccgggggaacctacacaggcaaagcccttgattacatcctccagataatcaaaaatggaatgaaggaccgaatgtctaaagtgccatgctacctcatcgttcttaccgatgggatgtctaccgatcgcgtcgttgaaccagccaagaggctgcgagctgaacagatcaccgtgcacgctgtgggcataggagctgccaacaagattgagttgcaggaaatagccggtaaggaggagcgtgtgagcttcggtcaaaatttcgacgccttgaagagtatcaaaaacgaggtcgtgagggaaatttgcgccgagaagggatgcgaagatatgaaggccgacattatgttcctggtggactcctcctggtctatcggaaacgagaattttcgtaagatgaagatttttatgaaaaatctgttgacgaaaatccagatcggcgctgacaaaacacagattggggtggtacaattctctgacaagacaaaggaggaattccagttaaaccgttacttcactcagcaggaaatctccgacgcaatagacaggatgtctctgatcaatgagggcactttgaccggcaaggctttgaattttgtggggcagtactttacccactccaagggggccagactgggtgccaaaaagttcctgatactcattacagatggcgttgcccaggacgatgtccgtgaccctgcacggattctgcggggaaaagatgtcacaattttctccgtcggagtgtacaatgctaatcgcagtcagttggaggaaatcagcggtgattcatctcttgttttccacgtggagaacttcgatcaccttaaggcactggagcggaaactaatcttccgtgtctgtgcccttcacgattgtaaacgcattacgctgctggacgtagtcttcgttttggaccactccggctcaattaaaaagcagtaccaggatcacatgattaatctgactatccatctcgtgaagaaagccgacgtgggcagggaccgagtgcagttcggtgccctgaaatactcagatcaaccaaacatactgttctatctgaatacttattccaatcgctctgccataattgagaatctccgtaaaaggcgcgacacaggaggcaacacttacaccgcaaaagctctgaaacatgccaacgccctttttaccgaagagcatggctcccgtataaaacagaatgtcaaacaaatgctcatcgtgatcacggacggagagagccatgatcacgatcaactgaatgataccgcgctcgaactgaggaacaaaggcatcaccatttttgcggttggcgtgggaaaagcaaaccagaaagagctagaggggatggccgggaataagaacaacactatctatgtggataactttgataaattaaaggatgtgttcaccctggtgcaagagcgtatgtgcactgaagcgccagaagtctgccatctccaggaagcagacgtgattttcctctgcgacgggtccgaccgagtatccaatagcgacttcgtgactatgaccacattcctttctgacctgattgataacttcgatatccagtcccagcgaatgaaaatagggatggctcagtttggctcaaactaccagtctataatagagttaaaaaactctttgactaagacccagtggaagactcagatccagaacgtgagtaagtcaggcggctttcccagaatcgatttcgctctaaagaaggtcagtaacatgttcaacttacacgccgggggccgtaggaacgctggagtgccacagaccctcgtcgttattacttctggcgaccccaggtatgacgtagcagacgctgtcaaaactctcaaagacctcggcatatgtgtgctggtgctcgggatcggtgacgtctataaggagcatctactgcctattactgggaatagtgagaaaatcattacctttcaggacttcgacaagcttaagaacgtcgatgtgaagaagaggattattagagagatttgccaatcctgcggaaagactaactgttttatggatatcgtcgtgggattcgacatctcaacgcacgtgcagggccagccactgtttcagggtcaccctcaactcgaatcttacctccccggcattctcgaagatatctcctctattaaaggtgtgtcctgcggagccggtactgaagcacaggtgagcctggctttcaaagtgaactctgaccagggcttcccagctaagttccagatttaccagaaagccgtgttcgactccctcctgcaagttaacgtcagcgggcccacccacctgaatgctcaattcctgcgatccctgtgggatactttcaaggacaaaagcgcaagcagaggtcaggtccttctgattttttccgacggcctccagtccgagtccaacattatgctagaaaaccagagcgaccgcctgcgcgaagcaggactcgatgccctgcttgttgtatcactaaatactaccgcccaccatgagttcagctcgtttgaattcggcaagaggtttgactatcgcacccatctgaccattggtatgcgagagttaggtaagaagctatcccagtacctgggcaatatcgccgaaagaacatgctgctgcacattctgcaagtgtcctggcattcctggcccgcatggtactagaggccttcaggccatgaaaggaagccaggggctcaaagggtcccggggacaccgcggcgaggacggtaatccgggagtgaggggggacaccggcccccaaggggataagggaatcgcgggatgccctggagcctggggccaaaagggacttaagggcttctctgggcctaagggtggccatggcgatgatggcattgacgggctggatggagaggaaggttgtcacgggtttcctggaatcaagggcgagaagggagaccctggtagccaggggagccctggctccagaggggcacccggtcagtatggggagaaaggattccccggtgatccgggcaaccctgggcagaataacaacattaagggccagaaaggaagcaagggagaacagggacgccaggggcgctctgggcagaagggggttcagggcagccctagcagcaggggctctagaggccgggaaggtcaaagaggcctccggggagtctcaggggagcccggcaacccaggaccaacgggtactctgggagccgaggggctgcagggcccccagggcagtcagggaaatcctggccggaagggagaaaaggggtctcaaggtcagaagggaccgcagggatctcccggccttatgggcgcaaaaggctccacagggcgtcccggcttgctgggcaagaagggcgaacccggtctccccggtgatctgggaccagttggccagaccggccagagaggcagacagggcgactctggaattccgggttacggccaaatgggccgcaagggcgttaagggtcctagaggctttccaggagacgccggacagaagggtgacataggaaatccaggcatccccggcggtccaggacccaaagggttccgcggtctcgccctcacagttgggctgaagggagaggaggggagcagaggtctccctggaccccccgggcaacgcggaattaaaggaatggctggccagcctgtgtattctcagtgcgacctcatccgctttctgagggagcactcaccatgctggaaggagaaatgtccagcataccccaccgagctggtctttgctctggataactcctacgatgtgaccgaggagtccttcaataagacaagggacattatcacatctatcgtgaacgatctcaatatcagagagaataattgcccagtaggagcacgcgtagcgatggtgtcatacaatagcggcaccagttatctgatacggtggtctgactacaaccgcaaaaagcagctcctgcagcagttaagtcaaataaaataccaggatactacggagccccgtgacgtcggaaacgctatgcgctttgtcacacggaatgtctttaagagaacctacgccggcgccaacgtgcgacgagtcgcagtctttttctctaacggccaaacggcatcgcggagctcaataatcaccgctacgatggagttttccgctctagacatttcgcccaccgtgttcgccttcgacgagcgggtgtttctggaggccttcgggttcgacaacacagggactttccaggtgattcccgtgccgcccaatggggagaatcagacactagagaggcttaggagatgtgctctgtgttatgataaatgcttccccaacgcatgcattcgcgaggctttcttaccagaagactcctatatggatgtggtgttcctgatcgacaattcccgaaacatcgctaaagatgaattcaaagctgtgaaagcccttgtctcctctgtgatcgacaacttcaacattgcttctgacccactaattagcgactcgggtgacagaattgcgctgctaagctatagcccctgggagtctagccgccgcaaaatgggcactgttaagactgagttcgatttcataacctatgacaatcagttgctgatgaagaaccacatacagaccagcttccagcagttgaacggagaggctaccattggaagagctctgctgtggactacagagaacctcttcccagagacaccctatttacgcaagcacaaggttattttcgtggtcagtgcaggggagaattacgagagaaaggagtttgtgaagatgatggcattgcgagcaaagtgtcagggctacgtcattttcgtgattagcctgggctccaccagaaaggacgacatggaggagttggcttcctacccactggaccagcatctaattcagctcggcaggattcataagcccgatctgaactacatcgccaaattcctgaagcctttcctgtattcagtgcgtcgcggattcaaccaataccctcctcccatgcttgaggacgcctgcagactgattaacttagggggtgagaacatccagaatgatggctttcaattcgtgactgagcttcaggaggatttcctcggggggaatggctttattggccaagagctgaactctggaagggaatccccattcgtgaagactgaggacaacggctctgattacctggtctaccttcctagccagatgttcgagcctcaaaagcttatgataaactacgagaaagatcagaagtcggcagagatagcatcactgacctctgggcacgagaattacggccggaaagaggagccagaccacacatacgaacctggagatgtgagtctgcaggagtactatatggatgtggctttcctcatagacgcctcacagcgggtgggttcggatgagttcaaggaagtgaaggcctttattacatcggtcctcgactacttccatatcgcccccacacccctaacctcgaccctgggcgacagggtggccgttctctcttacagtccacccgggtacatgcccaacacagaggagtgccctgtgtacctagagttcgatctggtgacatacaatagtatccatcaaatgaaacaccatcttcaggacagccaacaactaaatggggatgtcttcatcggtcatgccctccagtggaccattgacaacgtgttcgtcggaacacccaacctgcgcaagaacaaagtaattttcgtcatcagcgccggcgagacaaattctctcgacaaagatgtgttgagaaacgtgtccctgagagcgaaatgtcagggctattccattttcgtattcagctttggtcccaagcacaacgataaggagctggaggagcttgccagtcaccctctggaccaccacctcgtgcagctggggcgcacacacaaacctgattggaattacattatcaagttcgtgaaaccttttgtacacctcattcgtcgggcgatcaataaataccctacagaagacatgaaggctacatgtgttaatatgacatcaccgaacccagagaacgggggcaccgagaacactgtcctgctgttaccaggcatatatgaaattaagacagagaacggggatcttttcgatgagtttgactctcaggcccaacacctgctggtcttaggaaataatcacagctcaggctcagagacagccacagacttaatgcagaagctctatttgttgttctctactgagaaactggcaatgaaagataaagagaaagctcacctggaagagatctcagctctggttgtcgacaagcagcaggaaaaagaagacaaggagatggaagctactgacatctag

SEQ ID NO: 97990 - DNA, 1674 bp, Artificial Sequence
  derived and/or modified sequence
atcggccgggccctgctgtggaccaccgagaacctgttccccgagacaccctatctgcgcaaacataaggtaattttcgtggttagtgccggagagaattacgaaaggaaagagtttgtgaaaatgatggccctacgggcaaaatgtcaggggtacgtgatctttgtgatttcactgggctcaaccaggaaggacgacatggaggagctcgcatcttaccctctggaccaacacctgatccagttaggacgcatccataaacccgacctcaattatatcgccaagtttctcaaacccttcctctatagcgttcggcggggcttcaatcagtatcctccccctatgcttgaggacgcttgtcgtctgattaatttgggtggagagaatatccagaatgacggctttcagttcgttacagagctgcaggaggactttctgggagggaacggattcatcggtcaagaattgaattccggccgggaatcaccattcgttaaaaccgaagataacggctcagattacctggtgtacctgccctctcagatgtttgaaccacagaaactcatgatcaactacgaaaaagatcagaaatccgctgagatcgcgtcactgacaagcggtcacgaaaactatggacggaaagaagaacccgaccatacctatgagcctggcgacgtgtccttacaagagtattacatggacgtggcctttctgattgacgcttcccaacgcgtgggatctgatgagttcaaagaagtgaaagctttcatcacatccgtgctggattacttccacattgcccccacgccccttacttccaccttaggagaccgggtggctgtgctttcttatagtcccccaggatatatgccgaataccgaggaatgccctgtttacctggagtttgatcttgtcacctacaactcaatacatcagatgaaacaccacctgcaggattctcagcagttgaatggggacgtttttataggccatgcgctgcaatggacaatcgacaacgttttcgtcggcacaccaaacctcaggaagaataaggtaattttcgtgatcagtgcaggggagacaaacagcctcgacaaggatgttctgcgcaatgtctcattgagggcgaaatgccagggctattccattttcgtcttctctttcggaccaaaacacaacgacaaagaacttgaagagctagctagccaccctctcgaccaccatctggtgcagctagggcggacacacaagcctgactggaattacatcattaagttcgtaaagcctttcgtgcatctgatcagacgagccatcaacaagtacccaaccgaagatatgaaagccacctgcgtgaatatgacctctcctaatcctgagaatggaggtactgagaacaccgtgctcctgctccccggtatatacgaaattaagacagagaatggcgatctctttgatgaattcgattctcaggctcagcatctgctcgttcttggcaataatcactcttccggatctgaaaccgcaacggacctgatgcagaaactgtatctcctcttctctacagaaaagctggccatgaaagataaggagaaagcccacctggaggagatatctgcccttgtggtggacaagcagcaagagaaggaggatggcgaggacacccgttcttcttag

SEQ ID NO: 97991 - DNA, 7847 bp, Artificial Sequence
  derived and/or modified sequence
atgaagatcctgctgataattttcgtgctgattatttggacagaaacactggcagaccagagccctggacctggcccagtgtacgcagacgtcgtctttctggtggacagcagcgaccatttgggcccaaaatcttttccctttgtaaagacctttatcaacaaaatgattaattccctgcccatcgaagccaataagtacagagtggcactagcccagtacagtgacgaatttcacagtgagttccacctttccacattcaagggccgatcacccatgttgaaccacctcaaaaaaaacttccagttcattggtggaagcctacagatcggcaaggcccttcaggaggcccaccgaacatacttttctgcaccaattaatgggcgtgatagaaaacagttccctcctatcctggttgttttggcaagcgctgaatcagaggacgaggtagaggaggctagcaaggcactccagaaagatggggtgaagatcatctctgtcggggtacagaaagcaagcgaagagaacttgaaggcgatggccaccagccacttccactttaatctgaggactattagggacctgagcacattctcccagaacatgacccagataattaaagacgtcaccaaatataaggagggagcagttgacgcagacatgcaggtgcactttccgatctcatgccagaaggattccttggctgacttggtctttttggtggatgaatcactgggtaccgggggaaatctgcgccacctgcagactttcttggaaaatataacatctagcatggatgtaaaagagaattgcatgaggctgggactgatgtcatacagcaacagtgccaaaacgatcagtttccttaagtcatcaactacccagagcgaattccaacaacagattaagaatctctctattcaggtggggaaatcaaacaccggggcagccattgaccagatgagacgggacggcttcagtgagtcctacgggtctaggcgggctcagggcgtccctcagatagctgttctggtcacccaccgcccatcagacgacgaagtgcatgacgccgcactcaatttacgcctcgaagacgttaacgtgtttgccctcagcatccagggagctaacaatacacagctggaggagatcgtctcatacccacctgagcagactatcagtaccttgaagagctatgccgatctggagacatacagcacgaagtttttgaaaaaactccagaacgaaatctggtcacagatctctacctacgctgagcagcggaacctcgacaagactggttgcgtagatacaaaagaggcggatatacattttttgattgatggcagtagtagcattcaggaaaaacaatttgagcagattaagcgatttatgctggaggtcacggagatgttctcaatcgggccagacaaggtgcgggtgggagttgttcagtactcagatgacaccgaagtggaattttacattaccgactattccaatgacatcgacttgcgcaaagccatatttaatattaagcagctgactggtggaacatacaccggtaaagctctggactacattttgcaaatcataaaaaacgggatgaaggaccggatgagcaaggttccctgttatctgatagttcttacagacggtatgagtacagatcgagtggtggaacctgcgaaacgcctgagggcggagcagataactgtgcacgcagtaggtatcggcgctgctaacaaaattgaattgcaagaaatagccggtaaggaagagcgcgtttcttttggccagaatttcgacgccctaaagtctattaaaaacgaggtggtgcgagaaatctgtgctgaaaaaggttgtgaagacatgaaggccgatatcatgttcctggtcgattcctcgtggagcattggtaacgagaattttcgaaagatgaagatttttatgaaaaacctcctcacaaaaatacagatcggtgccgacaagacgcagatcggcgttgtgcagttttctgacaagacaaaagaagaattccaactcaacagatacttcacacagcaagagattagtgatgccatcgaccggatgagtctgattaatgagggaacactcacaggtaaggccttgaattttgtcggtcagtactttacacactcaaaaggtgcaagactgggcgctaagaagttcttaatactcattaccgatggcgtagcccaagatgatgtacgagaccccgctaggattctacggggtaaggacgttaccatctttagtgtgggcgtgtataatgccaatcgcagccaattggaggagatttcaggggatagctccctagtttttcacgtggagaacttcgatcatctgaaggcactggagagaaagctgatctttagggtatgcgctctccacgattgtaaaaggattacactgttggatgtcgtcttcgttctcgatcactctggctccattaagaagcaataccaggatcacatgattaatttgacaatccacttggtcaagaaagcagacgttggtcgcgaccgtgtgcaattcggagcactcaaatatagtgaccaaccaaacattcttttctatctcaacacctacagcaatcggtcagctataatcgaaaacctccgcaaaaggagggataccgggggtaatacttacactgccaaggccttgaaacatgccaatgccctgttcaccgaggagcacgggagccgcattaagcagaacgtgaaacagatgctgatcgtcatcactgacggagagtcacacgaccacgaccaacttaatgacacagcccttgagttacgcaacaaaggaattacgatttttgcagtgggagtggggaaggccaaccaaaaggaactcgagggaatggctgggaacaagaataataccatttacgttgacaacttcgacaagcttaaggatgtattcactcttgtccaagagcgaatgtgcactgaagccccagaggtgtgccacctccaagaagccgacgtgatttttctctgcgatggttcggatagagtgtccaattctgatttcgtcactatgaccacatttctttcagacctcatcgacaattttgacatccagtcacagagaatgaagataggcatggcgcagttcggcagcaattaccaaagcataattgagctgaaaaacagcctcaccaaaactcagtggaaaactcagatccaaaacgtttccaagtccgggggttttccacgcatcgactttgctctcaagaaagtgagcaacatgttcaatctccatgctggtgggagaagaaacgctggtgtaccacagactcttgtagtgattacatccggcgaccccagatacgacgttgctgacgccgtcaaaacccttaaggatctaggaatctgtgtacttgttttgggtatcggcgatgtgtataaggagcacctcttgcccatcaccgggaacagcgaaaagataattacgttccaagacttcgataagctgaaaaacgttgacgtcaagaaacggataattcgagagatctgccagtcctgcggcaaaactaactgctttatggacattgtcgtgggatttgacatttcaactcacgtgcagggacagcctctgtttcagggccaccctcaactggaatcctatctaccgggtattcttgaagacatcagctccattaagggtgtgtcatgcggagccggaacagaagcgcaagtgagtttggctttcaaggtcaacagcgaccaaggattccccgctaagtttcagatatatcagaaggcagtgtttgattccctcctgcaggtgaacgttagtggccctacccacctgaatgctcagttcctcagatctctgtgggacaccttcaaggataaaagcgcttcaaggggacaagttctgctgattttctctgatgggctccagagcgaaagcaatataatgctggaaaatcagtccgatcggcttcgggaagctgggttagacgcgcttttggtggttagtctgaatacgacagctcatcacgagttctcctcatttgaattcgggaagcggttcgactatagaacccaccttaccatcggcatgcgcgaactgggcaaaaagctgtcacagtacctggggaatatagctgaaagaacgtgctgctgcacgttctgcaaatgtcccggaatcccaggaccacacggaacgcgcggtctacaggcgatgaaaggaagccagggcctcaaagggtccaggggacacaggggcgaagatggcaacccaggggtgcgaggcgacactggtccccaaggtgataaggggatcgcgggatgtcctggggcatggggccagaagggcttaaaaggtttcagcgggccaaaagggggtcacggtgatgatgggattgatggactggacggcgaggagggatgccatgggtttcctggtataaagggggaaaaaggtgaccctggctctcaaggatctcccggaagccggggtgcccctggccagtatggcgaaaagggatttcccggtgatcctggcaatccaggccagaataataatattaagggccagaaaggttccaaaggggagcagggcaggcagggtaggtccggccagaagggtgtgcaaggaagtccatcaagcagaggatcgcgaggcagagaaggccagcgcggactcagaggagtgtccggcgagcctggtaatcccggtccaaccggcactctaggcgcagaaggcttgcaaggcccacagggctcccagggaaatccaggccgaaagggtgaaaagggatcccagggccagaaagggccacagggttctccagggctgatgggcgctaaaggctcaacaggaaggcccggtctgctggggaaaaaaggggagcctgggctgccaggggacctcggacccgtgggacagactggccagcggggtaggcagggggacagcggaatcccgggttacggacagatgggcaggaagggagttaaagggcctagaggtttcccaggcgatgccggacagaagggtgacattggtaaccctggcattccagggggtcctggcccaaagggcttccgtggactggcacttactgtgggactcaaaggggaggagggtagcagaggactgcctggacctcccggacagaggggaatcaaagggatggctgggcaaccagtgtactctcaatgtgaccttattagattcctccgtgagcattcactatgttcacttgagaaatgtcccgcttatcccactgagctggttttcgccttggataacagttacgatgtgacagaggagtccttcaataaaacacgtgacattatcacaagcattgtcaacgacctgaatatacgagaaaacaactgccccgtgggggcaagagtagccatggtctcttataattcgggcacctcctatctgattagatggtctgactataaccgcaagaagcagctcttacagcagctctctcaaattaaatatcaggataccacggagcctagagacgttgggaacgctatgcgcttcgtaacacggaacgtgttcaaaagaacctatgccggagccaatgtaagacgtgtggctgtgtttttctccaacggccaaacagcatccaggtcaagtattatcacagccacaatggaattctcggcacttgatatcagtccgacggtttttgccttcgatgagcgagttttcctggaggcctttggcttcgacaatacaggaacattccaggtcattccggttccacccaacggtgagaaccaaactctcgaaaggttaagacgctgtgctctttgttacgacaaatgttttccaaatgcttgcatcagagaagctttcttaccggaagatagttatatggatgtggtcttcctgatcgacaatagtcgaaacattgctaaggacgagtttaaagctgtaaaggctcttgtttcctccgtaattgacaattttaatatagcaagcgacccactgatctctgacagcggagatcgcatagcgctcctctcttactctccctgggaaagctccaggcggaagatggggacagtgaaaacagaatttgattttattacctacgataatcagctgctgatgaaaaaccacatacagaccagctttcaacagctgaacggtgaggccactatagggagggccctgctgtggacaaccgaaaacctctttcctgagactccctacttgcggaagcacaaggtcattttcgttgtgagcgccggtgagaattatgaaaggaaggaattcgttaagatgatggccctgcgtgccaagtgccaaggttacgtgattttcgttatttcactggggtccaccagaaaagatgacatggaggagcttgcctcctacccattggaccagcacctgatccaattaggaaggatccacaagccagacctgaactacattgcaaagttccttaagccttttctctactcagtgagacggggttttaaccagtaccctccaccgatgctggaggatgcatgccgcttgattaatctggggggagaaaatatacagaacgatggctttcagtttgtgacagaactgcaggaggattttctgggtgggaatggtttcatcggtcaggagcttaattccggacgggagtcaccttttgttaaaaccgaagacaacggttctgattatctcgtctatcttccatcacagatgtttgagccacagaagttaatgatcaattacgagaaagatcaaaaatcagctgaaatagcctccctcaccagtggccatgaaaattatggtcgaaaggaggagcctgatcatacctacgaaccaggtgacgttagccttcaggagtactacatggatgtggcattccttattgacgcttctcagagggtgggtagcgatgagtttaaggaggtaaaggcatttataacgtccgtgttagactatttccacattgctccaactccacttacttccacgttgggcgatcgagtggccgtattgagttactcccctcccggttatatgccaaacactgaggagtgccccgtgtatctagagtttgacttggtaacctacaatagtatccaccaaatgaagcaccatctgcaggatagccagcagctgaatggtgatgttttcatcggacacgccctccagtggaccatcgacaacgtgttcgtggggacccccaacctgcgcaagaataaagtgatctttgtgatctccgccggtgagaccaacagcctcgataaagacgttcttaggaacgtgtccctccgcgctaaatgccaggggtacagcatttttgtgttctctttcggaccgaagcataacgacaaggaactagaggagctggcctctcacccgctggatcatcacttggttcagctgggcagaacgcataaaccggactggaactacattatcaagttcgtgaagccattcgtgcacctaatcaggcgagccatcaataaatatcctacggaagacatgaaagccacctgcgtgaatatgacctctccaaatcctgagaatgggggaaccgaaaatacagtcctcctgctgccgggtatttacgagataaagacagaaaacggcgacctctttgatgaattcgacagccaagctcagcacctcttggtcctgggaaacaaccattcttccggctctgaaactgctaccgacctaatgcagaagctctatttactcttcagtaccgagaaactagccatgaaagataaagagaaggcccatttggaagagatctcagctctggtcgttgacaagcaacaggagaaggaggataaggagatggaggcaaccgacatcta

SEQ ID NO: 97992 - DNA, 7848 bp, Artificial Sequence
  derived and/or modified sequence
atgaagattctgctgatcatcttcgtcttaatcatctggactgaaacactggctgatcaaagcccagggccaggtccagtgtacgccgacgtggttttcctggttgattcttctgaccacctgggccctaaatccttccccttcgtgaaaacctttattaataaaatgatcaattccctccccatcgaggcaaataaatatagagtcgctttggcacaatatagcgatgagtttcattccgaattccacctgagtacttttaagggtcgctctcccatgctcaaccacctcaagaagaattttcagtttattggcggaagcctacagatcggcaaggctctgcaggaagcccatcgcacatatttctccgctcccatcaacggccgagatcgcaagcaattccctccgatcttggtggtcctcgctagcgccgagtctgaggacgaagtcgaggaagccagtaaggccctccagaaagacggagtcaagatcattagtgttggagtacaaaaggcaagtgaagagaaccttaaggccatggccaccagccacttccactttaacttaagaactatcagagatctctcaactttctctcagaatatgacccagattataaaggacgtgaccaagtacaaagaaggggctgttgacgcagacatgcaggttcattttccaatttcttgtcagaaggatagcctagccgatctcgtgttccttgtggacgagtctctgggcactgggggtaatctgaggcatctgcagacgtttttggagaacataaccagttcaatggatgtgaaagaaaattgcatgcgtctgggtctgatgagttacagcaattcagccaagaccatttctttcctcaaatccagtaccacacagagcgaattccagcagcagatcaaaaatctgtcaattcaggtcgggaaaagtaacactggagctgccattgaccagatgagacgtgacgggttctccgagtcgtacggctcccgaagggcacagggcgtcccccaaatagccgtcctcgtgacccacagaccctctgatgatgaggtgcacgacgccgcactgaatcttcggctagaggatgtgaacgtttttgccctttcaatccagggcgctaacaacacgcagcttgaagagatcgtgagttatcccccagagcagactataagcactctgaagtcttatgctgaccttgaaacctactcaaccaaatttctgaaaaaattgcaaaacgaaatatggagccagatttccacatacgctgagcagcgcaatctcgataaaaccgggtgcgtagacactaaggaagctgacatccacttcttgattgatggctcctcctctatccaggagaagcagtttgaacaaatcaaaagattcatgttggaagtaacggagatgttcagcatcggtccagataaggtccgggtgggagttgtccagtatagtgatgacacggaggtcgaattttacattaccgactattcgaatgatatcgatctacgaaaggcgatcttcaacattaagcagctaacaggcggaacgtacactgggaaagctctggactacattctgcaaattatcaagaacggcatgaaggatcgaatgagcaaagttccctgttacctcatcgtgttaactgacggaatgtccactgatcgagtcgtggaacctgccaaacggctgagagccgagcagataaccgttcacgcagtgggcatcggagccgcaaataagatagagctacaggagatcgccggaaaagaggagagggtctcctttggtcagaacttcgacgccttgaaaagcataaagaacgaggtggtgagggagatttgcgccgagaaaggttgtgaagacatgaaggccgacatcatgttcctggtggacagtagctggtcaataggtaacgagaattttagaaagatgaagatattcatgaagaatctcttaactaagatccagattggagcagataaaactcagataggggtggtacaattctccgataaaactaaagaggagttccagttgaataggtatttcacccagcaagagatcagcgatgcgatagaccgcatgagcttaatcaatgagggcaccctgacaggtaaagcccttaactttgtgggtcaatattttacacattcaaagggcgctcggttgggcgctaaaaagtttctaattttgatcaccgatggtgtggctcaggacgacgtgcgagacccagcaagaatcctcaggggcaaggatgtgacaattttctctgttggagtctataatgcaaataggtcccagttagaagagatctcaggagacagtagcttggttttccacgtggaaaacttcgatcacctcaaggccctcgaaaggaaactgatattccgtgtgtgtgctttacatgactgcaagcggatcacacttttggatgtggtgttcgtgctggaccactctggctccatcaagaagcagtaccaggatcatatgataaacctgactattcacttagtgaaaaaggcagatgtgggcagggatagggtacagtttggagctctcaaatactccgaccagcctaatattctgttctatctgaacacctatagcaacaggtcagcaattatcgagaacctgagaaaacgcagagatacagggggaaacacctacacagctaaagctctgaagcacgcaaacgcactgttcacagaggaacatggatctcggatcaaacaaaacgtcaagcagatgctaatagtcatcacagacggtgaaagtcacgatcatgaccagctgaacgataccgccttggaactgcgcaataagggtatcacaatattcgccgttggtgtggggaaagccaaccagaaagagctggaagggatggcaggaaataagaacaacactatctacgtggataattttgataaattgaaggacgtctttactttggtgcaagaacggatgtgcaccgaagctcctgaggtctgccatctgcaggaagctgacgtaatttttctctgcgacgggtccgaccgggtgtccaacagtgattttgttacaatgacaacctttttgagtgacctaatcgacaattttgacatccagagccaaaggatgaaaataggaatggcacagttcggaagcaactaccagtcaatcattgagcttaagaattcccttaccaagacccagtggaagacacaaattcagaacgttagtaagtctgggggattccccaggatcgactttgcactcaagaaagtctccaatatgtttaaccttcacgccggaggccgacggaacgcaggggttccacagaccctggtcgtcatcaccagtggtgacccaagatacgacgtcgctgatgctgtgaaaacgctcaaagacctgggcatctgtgtgttggtgctaggtattggtgacgtatataaagaacacctactgcctattaccgggaacagcgaaaaaataattacttttcaggactttgataagctgaagaacgtcgacgtgaaaaagcgaatcataagagaaatctgccaatcctgtggcaaaacaaattgcttcatggacatcgtcgttggcttcgacataagcacccacgttcaaggacagccactgttccagggtcatccacagctggaaagctacttacctggcatcttggaagatattagcagtatcaaaggggttagttgcggggcaggaacagaagcccaggtgagcctcgcctttaaggtgaatagcgatcagggtttcccggcaaaattccagatctatcagaaggctgtgttcgattccctcctgcaagtgaacgtatctgggcctacacatctgaatgctcagttcctccgatccttgtgggatacctttaaggacaagagcgcatctcgaggacaggtgcttcttatatttagcgacggccttcagtctgagtctaacattatgctggagaatcagagcgacagactccgtgaggccggattagacgcactactggtggttagcctaaataccaccgcccaccatgagttctcatcatttgagtttggaaaaagatttgactataggactcacctaaccatcggcatgagggagctcggcaaaaagctgagtcagtatctggggaatatcgctgaacgcacttgttgttgtaccttctgtaaatgcccagggatccctggaccacacggaaccagggggctccaagccatgaagggaagccagggccttaagggctctcggggtcatcgcggtgaggacggcaaccctggcgtgcggggagatactgggcctcagggtgataagggtattgcaggatgcccaggcgcatggggccagaagggccttaaggggttctccgggccaaagggagggcatggggacgacggtatcgacgggctggatggtgaggagggatgccatgggttcccaggaattaagggcgagaagggtgacccaggtagtcagggctctccgggttcccggggagctccgggacagtacggagagaaaggattcccgggagatcccggaaatcccggacagaacaataacattaagggacagaaagggagcaagggagagcaggggaggcagggccgttcaggacagaagggagtccagggatcaccttcatcaagaggctctcggggacgagaaggccagagaggtcttcgaggggtttccggagaacccggaaatcccggtccaacggggacccttggagccgagggattacagggaccgcagggatcacagggcaatccaggaagaaagggggagaaggggtcccagggtcaaaaggggccacaaggaagtcccggtctcatgggagcaaaaggttcaaccggcaggcctggcctcctgggaaaaaaaggggagcccggactccccggagatctggggcctgtcggacagacaggccaaagagggagacagggcgatagcgggatcccgggatatggtcagatggggaggaaaggggtgaagggacccagaggctttccaggagatgcaggccagaagggcgacatcggaaaccccggtatccccggaggcccaggccctaagggttttcgaggcttggctctgaccgtcggcttaaagggtgaggagggtagcaggggccttcccggtcctccaggccagaggggtattaagggcatggcgggacagcccgtgtactcacagtgcgacctgattcgcttcttgagggaacacagcccttgttggaaagagaagtgtccagcatatccaactgaactggtgttcgccctcgacaatagctatgatgtgaccgaggagtcattcaacaaaacccgtgatattattacctccattgttaatgatttgaatattagggagaataattgtcctgtcggagcccgtgtggccatggtctcatataactcaggcacatcatatctgatcaggtggtctgactataaccggaagaagcagcttttacagcaactttcccagatcaaatatcaagataccacagagccccgagacgttggcaatgcaatgaggttcgtgacgcgcaacgtgttcaaacggacatacgcaggagcaaacgtgagacgcgtcgctgtgttttttagcaacggccaaaccgcctctaggtctagcattatcactgccacaatggagttcagcgcactggatatctctcccactgtctttgcattcgatgaaagggtgttcttggaagcctttggcttcgacaacactggcacttttcaggtgatccctgtgccacctaacggagaaaaccagacattggagagactgcgaaggtgtgcgttatgttatgacaaatgcttcccgaatgcttgtataagggaagcattcctcccagaggactcatacatggatgtcgtttttctgatcgataactccaggaacattgcaaaggatgaattcaaagccgtgaaggcacttgtctcctccgtcattgataactttaatatcgcctcagatccgctaatctcagatagcggcgaccgcatagccttgctttcctacagcccctgggaaagttcccggagaaagatgggaaccgtgaaaactgaattcgatttcataacctacgacaaccagctcctgatgaagaaccatatacagactagttttcaacagctgaacggcgaagccaccataggacgagcccttctctggacaacagagaatctgtttcccgagactccttatctgaggaaacataaagttatatttgtagtttcagccggagaaaactacgagcgaaaggagtttgtcaaaatgatggccctgcgcgcaaaatgccagggctacgtcatttttgtaatctccttgggctctacacggaaggatgacatggaggaactcgcctcctaccccctcgaccagcacctcattcagttggggcgaatccacaaacctgatctgaactatatcgcaaagttcctgaaaccatttctatatagcgttaggaggggattcaatcaatacccgcctcccatgctagaagatgcatgtaggctgatcaatttgggaggtgaaaatatccagaacgacggctttcaatttgtcactgagctccaagaagatttcctgggaggtaacggatttatcggacaagaactaaacagcggccgagaaagccccttcgtgaagacggaagataacggatctgactacctcgtgtacctacccagccaaatgtttgagccgcagaagctcatgatcaattacgagaaggatcaaaagtccgccgagatcgcttcccttacctcgggacacgagaattacggtcggaaggaggaaccagatcacacatacgagcccggagacgtcagtctgcaggagtattatatggatgtggcctttctcatcgatgcttcacaacgcgtcgggagcgatgaatttaaagaggtcaaggctttcatcaccagtgtgttagactatttccacatcgcccctactcctctcacgagcacattgggggaccgcgtagcggtcctgagttactcaccccctgggtatatgcccaataccgaggagtgcccagtgtacttggagttcgatcttgtaacttataacagcatccaccagatgaaacaccaccttcaggacagccagcaactaaatggggacgtgtttattggccatgcacttcagtggactattgataacgtctttgtgggcacacccaaccttcggaaaaataaagtgatctttgtgatctcagcaggagaaaccaatagcctggacaaagatgttttgcggaatgtgtctctgagggcaaagtgccagggctatagcattttcgtattctcttttggacctaagcacaacgataaagagcttgaggagctcgcttcccatcccctggatcaccacctggtgcaactgggacgcactcataagccagactggaactacatcatcaaattcgtgaagccctttgtgcacctgatcagacgcgcaattaacaaataccctaccgaagacatgaaggccacctgtgttaatatgaccagccccaaccccgagaatgggggtacagagaatacagtgcttttactcccaggaatttacgagatcaagactgaaaacggggatctgttcgacgaattcgatagccaggcacagcacctgctcgtcctgggtaataaccactccagcggaagcgagaccgccacagatctgatgcaaaaactgtatctgctgttcagcactgagaagctcgcaatgaaggacaaggaaaaggcccacctggaagaaataagcgctctcgttgtggacaaacagcaggagaaggaagataaggaaatggaagccacagacatctat

SEQ ID NO: 97993 - DNA, 1674 bp, Artificial Sequence
  derived and/or modified sequence
ataggcagggcacttctgtggaccacagaaaacctcttcccagagaccccctacctgagaaagcacaaagtgatttttgtggtgtccgccggagagaactacgagcgtaaagagtttgtgaagatgatggcccttcgggctaagtgccaggggtacgtcattttcgttatcagcctgggctcgactcgcaaggatgatatggaggagttggctagttatccactggatcaacacctgatccagctagggaggattcacaaaccagatctaaattatatagcgaaatttctgaagccttttctctacagcgtgaggaggggctttaaccaatacccccctcccatgctggaggacgcctgtcgtctaatcaacctgggtggggagaacattcagaatgacggctttcagtttgttacagaactccaggaggactttctgggtggcaatggcttcatcggccaggaattaaactcaggcagagagagtccctttgtcaaaactgaggataatggtagtgattaccttgtctatctcccctcacagatgtttgagccacagaagctgatgattaactacgagaaagatcagaaaagtgcggagattgcctctttaaccagcggacacgaaaattacgggaggaaggaggaacccgaccacacatatgagccaggggacgtgagtctgcaagagtactacatggacgtcgccttccttatcgacgcatcccagagggtggggagtgacgagttcaaggaggttaaggccttcattacatctgtccttgactactttcacatcgcccctaccccactgactagcacattaggagatcgggttgctgtgctcagttacagtcccccaggctacatgcccaatacagaagaatgtccggtgtatctcgagttcgatttggtgacatataactcaatacatcagatgaagcaccatctccaggacagccagcagttaaacggggatgtgtttattggtcacgctctgcagtggacaatcgacaatgttttcgtgggcacacccaatctgaggaagaacaaagttatttttgtaataagcgcaggcgagacaaattccttggataaggatgttctgaggaatgtctccttacgtgccaaatgccagggatattcaatcttcgtcttcagctttggtcccaaacataacgataaagaactggaagaacttgcttcccaccctctggaccaccacttagtgcaattaggccgtacccataaacctgattggaactacattattaagtttgtaaagcccttcgtgcatctcattaggcgcgctatcaataagtaccctacggaggacatgaaggctacatgtgtaaacatgaccagtcccaaccccgaaaacggcggtaccgagaacacggtcttgctgctgcctgggatatacgagataaagactgaaaacggagatctctttgatgaatttgattcgcaggcacaacatctgctggtgttgggcaacaatcactcatcaggcagcgaaacagctactgacctgatgcagaaactctatcttttgttttctaccgagaaactggccatgaaggataaggaaaaggcccaccttgaggaaatcagcgctctggtcgtggataagcagcaagaaaaagaggatggagaagatactcggagtagctag

SEQ ID NO: 97994 - DNA, 7848 bp, Artificial Sequence
  derived and/or modified sequence
atgaagatccttctgatcatttttgtgctgataatctggactgagaccctggccgatcagtcccccgggccaggaccagtgtacgctgatgtggtatttctggtcgacagtagcgaccacctgggacccaagtcttttccttttgtgaagaccttcattaacaaaatgattaactcacttccaattgaggccaacaagtacagagttgcgcttgctcagtattccgatgagttccattcagagttccatctctcgacctttaaaggccgctctccgatgctcaaccatcttaagaagaatttccagtttattggaggctcattgcagattggtaaagcattgcaggaagctcatcgtacctatttttcagccccaataaacggtagagatcgtaaacagttcccccctatcctggtcgtgctcgctagtgctgaatctgaggatgaagtcgaagaagccagcaaggccctccagaaggatggtgtgaaaataatttctgtaggcgttcagaaggcgagtgaagagaacctcaaagctatggccacgtctcactttcattttaacctacggaccatccgcgatctttccacattctctcagaatatgacacagatcataaaggacgtgacgaagtacaaggaaggcgcggtcgatgcggacatgcaggtgcactttcccatctcctgccagaaagattctctggctgaccttgtgttccttgttgacgagtcacttggcacgggaggaaatcttcggcacctgcagactttccttgagaacattactagcagtatggacgtgaaagagaactgtatgcgtttaggactcatgtcgtactcaaacagcgcgaaaactatttccttcctcaaaagcagcacgacccaatccgagtttcagcagcagatcaaaaatctgtctattcaggtaggaaagtcaaataccggcgccgctatcgatcagatgagacgcgatggattttctgagagttatggcagcaggcgggcacagggcgtgcctcagatcgccgtgctggttacccatcggccatccgacgacgaagtgcatgatgctgctctgaacctgagactagaagatgtgaacgtctttgccctgagcatccagggggctaacaatacccagctggaagagatcgtgtcttaccctcctgagcagaccatctccaccctcaagagttacgcagatctggagacctactcaacaaagttccttaaaaagctgcaaaacgagatttggagtcagatcagcacttacgccgaacagagaaacctggataaaactgggtgtgtggacacaaaagaggcagatatacattttctgatcgatggatccagctccattcaggagaaacaatttgaacagattaagcggtttatgctggaggtcacagaaatgttcagtattggacctgacaaggtccgggtgggggtagtccaatactcggacgatacggaagtggagttttacatcacggactatagcaatgacattgatctccgcaaagccatctttaacatcaagcaactgaccgggggaacttacaccggcaaggctttagattatatcctgcagatcatcaaaaacggtatgaaagaccgtatgtctaaagtcccgtgctacttaattgttctgacagatggaatgtcgaccgatcgcgtggttgaaccggcaaagaggttgagggccgagcaaataactgtgcacgccgttgggatcggggccgccaataaaatcgagctccaggagatcgctgggaaagaggagagggtgtccttcgggcaaaacttcgacgctctcaaatcaattaagaacgaggtggtgcgtgagatttgtgcggagaaaggatgcgaggatatgaaagcagatatcatgtttctcgttgattcttcttggagcattggtaacgaaaacttccgcaaaatgaagatctttatgaaaaacctccttacaaaaattcagatcggagctgataagacccagataggcgtggttcaattttccgataagactaaggaagaattccagctgaacagatactttactcaacaggagatttcagatgccatcgaccgaatgtctctgattaacgaggggactttgactggtaaggcacttaactttgtgggtcaatatttcactcactccaaaggcgcccgcctgggcgctaagaagttcctcatcctcattaccgacggcgtggcccaggacgatgtgcgtgatccagccaggatcctgagaggtaaagacgtcacaatattttctgtgggcgtctataacgctaacagatcacaactcgaagaaattagcggagacagtagtctggtctttcatgtggagaatttcgaccacctgaaggccctagagaggaagttaatcttccgtgtctgcgctttgcacgattgtaagcggatcactctgctcgatgtggtctttgttctagaccattcagggtcaatcaagaaacagtatcaggatcacatgatcaacttgactatccaccttgtaaaaaaagccgacgtcggacgcgaccgcgttcagttcggcgcccttaagtatagcgaccaaccaaacattctgttctatctgaacacatactccaaccgtagtgccatcattgagaacctacggaaaaggagggacaccggaggtaacacatatacagcaaaggctctgaagcatgcaaacgccctcttcacagaagaacacggatccagaattaagcagaacgtgaaacagatgttaatagtaattaccgacggcgagtcccatgatcatgatcagctgaacgacacggcactggaattgagaaataaagggatcaccatattcgccgtcggtgtgggaaaggccaaccagaaagaacttgagggaatggccgggaataaaaacaacactatctatgtagataacttcgacaagctgaaggatgtgttcacactcgtgcaggaaaggatgtgtacagaagcaccggaagtgtgtcacttacaggaggcggacgtcatatttctctgcgatggctcagaccgggtgtccaactcagactttgttacaatgaccacatttctgtcagatctcatcgataacttcgatattcagagccagcgaatgaaaataggaatggcgcagtttgggagcaattaccaatctatcattgagttaaagaattcacttactaaaacccaatggaagacgcagatccagaacgtcagtaagtctgggggctttccccggatcgattttgccctgaagaaagtcagcaatatgtttaatttgcacgctggcggtcgcagaaacgctggagttccacagacacttgttgtgatcacgtctggggaccctagatacgatgtcgcagacgctgtgaagaccctgaaggacctgggcatttgcgtgcttgttctgggcatcggagatgtctataaggaacacctcctacccattacaggtaacagcgaaaaaataatcacattccaagactttgacaagctgaaaaatgtcgatgtcaaaaagaggattatcagggaaatttgccaatcctgtgggaagactaattgtttcatggatatagtcgtcgggtttgacatttcaacccatgtgcaaggacagccactttttcagggccaccctcagcttgagtcctatctccccggcattttggaggatatttcatcaatcaagggcgtcagctgcggtgctggtacagaggcacaggtatctttagcatttaaagttaacagcgatcaaggattcccggccaagtttcagatttaccagaaggcggtgttcgactcactgctccaagtaaacgtctctgggccaactcatcttaatgcccagtttttaagaagtctgtgggacacctttaaagacaaaagtgcgtctcgcggacaggttcttttgattttttcagacgggctgcagtccgaatcgaatatcatgctcgaaaaccagtcggatagattaagagaagcaggcttggatgcccttctcgtggtcagtctgaacacaactgcccaccatgagttttctagctttgaatttgggaaaagattcgactacaggactcacctgactatcggcatgcgtgaactgggaaaaaaactgagccagtatcttggtaatattgcagagcggacatgctgttgcacgttttgtaagtgcccgggaattccaggtccccatggaacacggggcttacaagctatgaaagggtctcaagggctcaagggttcgcgcggacacagaggagaagacggtaaccccggcgttcgcggagatacaggccctcaaggggacaagggcattgcaggctgtcctggagcctggggtcaaaagggactcaagggattcagtgggccaaaaggtggacatggggatgatggaattgatgggcttgatggcgaggaaggttgccatggatttcccggaataaaaggcgagaagggtgaccccggatcccagggttctcccggcagcagaggggccccgggacagtacggagagaaaggattcccgggggaccctggcaatcctgggcaaaacaacaacataaaaggtcagaaggggtcaaagggggaacaggggagacaagggcgatcagggcaaaagggcgtacagggctccccctccagtaggggctcccgtggacgcgagggccagcgcggcctcagaggagtaagtggcgaaccaggaaaccctggcccaacaggtacactgggggcggagggactgcagggacctcagggttctcagggaaaccccggaagaaagggcgagaaagggagccaggggcaaaaaggtccccaggggagtcccggtctgatgggggctaaaggatcaacgggacgtccaggactgcttggcaaaaaaggcgagccggggctgccaggcgatctgggaccagtcggccaaacaggccagagaggcagacagggagattccggaatccccggatacggccagatgggcaggaaaggtgtcaaaggtcctaggggcttcccaggggacgctgggcagaaaggcgatatcggcaaccctggcatcccagggggaccgggtcccaaaggttttcgcgggctggcgctaactgtcggattaaagggtgaagaaggcagccgcgggctcccagggcctccaggtcagcgggggattaagggaatggctgggcagcccgtatacagccagtgcgatctaatacggttccttcgggagcattcgctttgttctctggaaaagtgcccggcgtatcccactgagttagttttcgccctcgacaattcctatgacgttacggaagagagttttaataagaccagagatataattacctctatagtcaatgatctgaacatccgggaaaacaactgcccagtcggcgctagggtggccatggtaagctacaacagtggtacgagttatctcattagatggtccgactataatagaaagaaacaattgctacaacagttgtcacagattaaatatcaggatacaacagagcctagggacgtgggcaatgcaatgcggtttgtgacgcggaacgtgttcaagcgtacatatgctggcgcgaacgtccgtcgcgtagcagtttttttctccaacgggcaaaccgccagccgctcctcaatcattacagcaaccatggagttcagtgccctcgacatctcccccaccgttttcgcttttgacgagagggtttttctggaggcttttggtttcgacaatactggaacttttcaggtgatccccgtaccgccaaatggggaaaatcaaactctggaacggctacgcagatgtgccctgtgctacgacaagtgcttcccaaatgcttgtattcgcgaagctttcttacctgaggactcatatatggacgttgtgttcctcatcgataactccagaaatattgccaaagacgagttcaaagcagtgaaagccttggtctcttctgtgatcgacaattttaacattgcatccgacccacttatctcagactccggcgatcgaatcgcgcttctttcatacagcccctgggagtctagtaggagaaagatgggaacagttaagaccgagtttgacttcatcacatatgataatcaactgttaatgaaaaaccacattcagacaagctttcaacagttgaatggagaggcaaccattggacgagcgcttctgtggactaccgaaaatttgttccctgagacaccctacctccggaaacacaaagtcatctttgtggtctctgcaggagagaattacgaaagaaaggagttcgttaagatgatggccctccgggccaaatgtcagggctacgtcatttttgtaattagccttggatcgacgcggaaagatgatatggaagaattggcctcttatcctctggaccaacatcttatccagctgggaaggatacataaaccagatctgaactatattgccaagtttctgaagccattcctttattcagtgcgacgggggttcaatcagtacccacccccaatgcttgaggacgcttgccgcctcataaatctgggcggcgagaatatacagaacgatggattccagtttgttacagaactccaagaggattttttgggcggaaacggtttcattggacaggaactaaatagtggccgagagtccccttttgtcaagaccgaggataatggcagtgattatctggtatacctgccctcgcagatgtttgagcctcaaaaactgatgatcaattatgagaaagaccagaaatccgccgaaatcgcatcccttaccagcgggcacgagaactacggcagaaaggaggagcccgaccatacatatgagcctggcgatgtaagcttgcaggaatattacatggacgtggcctttctgatcgacgcatctcagagagtgggatctgacgaattcaaagaggtgaaagccttcattacgtccgtcttggattacttccacattgctcctacccctttgacctccacactcggagatcgagttgctgttctgagctactcaccacctgggtatatgccaaatacagaggagtgtcctgtctatcttgagtttgatctggtcacgtataactccattcaccagatgaagcaccatctgcaagactcacaacaattaaatggtgacgtgttcatagggcacgcccttcagtggacaattgataacgtcttcgtcggcacccccaatctacgcaagaacaaagtgatatttgtcatctctgcgggagaaaccaatagtttggacaaggacgtgcttcggaatgtgtctctccgggctaaatgccagggctatagtatattcgtgttttccttcggtcctaaacataatgataaggaactcgaagagttagctagtcatcccctggaccatcatctggtgcagctgggccgcacccacaagcctgattggaattatatcattaaattcgtgaaaccattcgtccacctgatccggagggcaataaacaaataccccactgaagacatgaaggcaacatgcgtgaatatgacctcaccaaatcccgaaaatggaggaaccgagaatactgtgctcctgctgccaggaatctacgaaattaagaccgagaacggggacctgtttgatgaattcgatagccaagcgcagcacctcctggtactcggtaacaatcactcctcgggcagcgaaaccgccactgatcttatgcaaaaactatacctgctgtttagcaccgagaagctggccatgaaggacaaagagaaggcacatcttgaagagatctccgcattagtggtggataagcagcaggaaaaggaagataaggaaatggaagctaccgacatatag

SEQ ID NO: 97995 - DNA, 7848 bp, Artificial Sequence
  derived and/or modified sequence
atgaaaatcttactgatcattttcgtcttaattatttggacagagacgctggcagaccagtcaccgggccctggtccagtctacgctgatgtggtgtttctcgtcgattctagtgatcatctgggcccaaaatcatttccattcgtgaaaaccttcatcaataagatgatcaactctcttcccatcgaggctaacaagtacagggtcgcgcttgcacaatattccgacgagttccacagcgagttccacctgtctacatttaagggtcgctctccgatgttaaaccacttgaagaagaatttccaatttatcggcggaagcttacaaatcggtaaggccctccaggaagcacacaggacctactttagcgctccaatcaatggccgagatcgtaagcaattcccacctatcttagtggtgttggcctccgcggaatccgaggacgaagtggaggaggcatccaaagccctgcagaaggacggagttaaaatcatctccgttggggtgcagaaggcttccgaagaaaacctgaaggccatggccaccagccattttcacttcaatctgcgaaccattagagatctctccacgttcagtcaaaatatgacccaaatcatcaaagacgtaacgaaatacaaggagggtgccgtggacgctgacatgcaagtgcactttcctatctcgtgtcagaaagacagcctggctgatttagtcttcctcgttgacgagtcccttggaaccggaggaaatttacgacacctgcagacctttctcgagaacataactagttccatggacgtaaaggaaaattgtatgcggctgggactgatgtcatactctaatagcgcaaaaactatcagctttctcaaaagctcaacaacacaaagcgagtttcagcaacagattaaaaatctatcgatccaggtgggaaagtcaaatacaggtgctgccatagatcaaatgcgacgggatggtttctccgaaagctatggctcacgcagagcccagggggtgccacagatagccgtgctggttacacatcgtccatctgatgacgaggtgcacgatgccgcactgaatttgcgcctggaagacgttaatgtgttcgccctctcaatccagggagcaaataatacccagctcgaagagattgtgtcgtatcctcccgaacagaccatttccacccttaaaagctacgctgacctggagacatactctacaaaatttctcaagaagcttcagaatgaaatttggagccaaatttccacctacgccgagcagaggaacttagacaaaaccgggtgtgtcgataccaaggaagcagatatccactttctgatcgatggtagtagctcaatccaggaaaaacagttcgagcagatcaagcggtttatgcttgaggtcacagaaatgttctcaattggtcctgacaaagttcgagtgggtgtagtccagtattccgacgacactgaggtcgagttttatatcactgattattcgaacgacattgacctcagaaaagcaatctttaatatcaagcagctcacagggggcacatataccggcaaggctctggattacatactgcaaattatcaaaaatggaatgaaagatcggatgtcgaaagtaccatgttacctcatcgtcctaacggacggaatgtctacagatagagtggtcgagccagcaaagcgccttagagcagagcaaatcaccgtgcacgccgttgggataggggcagccaataaaatcgaactgcaggaaatcgccgggaaggaagaacgcgtttcttttggccagaatttcgacgcacttaagtctattaagaatgaggtggtgagggaaatctgtgccgagaagggctgtgaggatatgaaggcagacataatgttcctcgtggacagcagttggagtatcggaaacgaaaacttccgtaagatgaagattttcatgaaaaacctgctcaccaaaatccagattggcgctgacaagactcagattggggtggtacaatttagcgacaaaacaaaagaagagtttcagctcaaccggtactttacccagcaggaaattagcgacgctatcgatagaatgtcgctcatcaacgagggcacgctgactgggaaggccttgaactttgtgggacagtatttcacccactcgaaaggagcgcgacttggggcaaagaaatttctcatccttatcacagatggcgttgcgcaggatgatgttcgggatcctgcaaggatacttcgaggcaaagatgtgacgatattcagtgtcggcgtatataacgctaaccgaagtcagcttgaggagattagcggcgactcctccctggtattccatgtggagaatttcgaccatctgaaggccctggaacgcaagctgatcttcagggtgtgtgccctgcatgactgcaaacgcataactctcctcgatgtagtgttcgtgctggaccactccggaagtatcaaaaagcagtatcaggaccacatgattaacctcactatccatctagtgaaaaaagccgacgtgggtcgggacagagtacagttcggagctctgaaatattcagaccagccaaatatactgttctatttgaatacatactctaacaggagcgcgatcattgaaaacctccgcaagaggagagacacagggggcaacacttatacagcaaaggctctgaagcacgcgaatgccttgttcactgaagaacatggaagcagaatcaagcaaaatgtaaagcagatgctgattgttataacggacggagagagccatgatcatgatcagctgaacgacacggctctggaattgaggaataaggggatcaccatcttcgctgtgggagttgggaaagctaaccagaaggaactagaaggaatggcgggtaataagaataatacaatatatgtggataactttgataaactgaaagacgtgttcactttagttcaggaaaggatgtgtacggaagcacctgaggtctgtcacctacaggaagcagatgtcatctttctttgcgacggctcggaccgagtgtcaaacagcgattttgtcacaatgaccaccttcttatcagacctgattgataattttgatatccagagccagagaatgaaaatcggaatggcccagttcggttctaattaccaatccattattgagctgaagaactccctgaccaaaactcagtggaaaacacagatccagaacgtgagcaagagcggaggtttccccaggattgactttgctctgaagaaagtcagcaatatgttcaacctgcatgcagggggcagacgcaacgctggggttccccagacactcgtcgtgatcacttccggggatcctcgatatgatgtagcagacgcggtcaaaaccctcaaggatttaggtatttgtgttttggtcctcgggattggcgacgtctataaggagcacttgctgcctattacaggtaattccgagaagattattaccttccaggacttcgacaaacttaaaaacgtggatgtgaaaaaaagaataattcgggagatctgtcagagctgcggcaagacgaactgttttatggacatcgtggtagggttcgacatttccacgcatgtccaaggtcaaccactgtttcagggtcatcctcaattggagagctatcttcctgggattctcgaggatattagtagtatcaagggggtgtcgtgcggcgcaggcactgaagcacaggtatcccttgccttcaaggtcaactcggatcagggatttcccgccaagttccagatttatcaaaaagccgtatttgacagcctcttgcaagtcaacgtgagcggacctacacacctgaacgcccagttcctgaggtctttatgggatacttttaaggacaaatctgcaagtcggggccaggtacttctgatattcagtgacggactgcaaagcgagtccaacatcatgctggaaaaccaatctgaccgtcttcgagaggccgggctcgacgctctgctggtcgttagtctcaacaccacggcccatcacgagttttcatcgtttgaattcggtaaaagattcgactaccgtacccatttgacaattggaatgagggaacttggcaagaagttgtcccagtatttgggcaacatcgctgagcggacctgttgttgcaccttttgcaagtgcccaggaatcccaggtccacatggcacccgcggtctgcaggctatgaaaggcagccagggccttaaaggatcaagaggacacagaggagaagacgggaaccctggtgtgaggggagatactggaccacaaggtgacaaaggaatcgccggatgccccggggcatggggccaaaagggactgaaaggattttctgggcccaagggagggcacggagatgatggcatagatgggctcgacggggaagaaggatgccacggtttccctggtattaaaggggagaagggggacccaggcagccaggggtcaccaggcagtcgaggagcgccaggccagtacggggagaaagggtttcccggtgatcccgggaatccggggcagaataataacattaaagggcagaagggcagcaagggcgagcaaggccgccagggtcgcagcggtcagaaaggagtgcagggttcaccctcatctcgcggtagccgtgggagggaagggcaacgcggactgaggggggtttctggagagcctggcaatccagggcccaccggaactctgggagccgaagggttacaggggccccaggggagtcaaggtaatcctgggagaaagggggaaaagggatctcagggtcaaaaggggccacagggatcgcccggattgatgggggccaagggatcaactgggagacccggcctgttgggaaaaaaaggagagcccggactgcccggagacttgggtcctgtgggtcagaccggacagagaggcagacagggcgattcaggtattcctggttatggccagatgggccgaaagggggtgaaaggcccccggggctttccgggcgacgcaggccaaaaaggagacattggaaaccccggcataccaggtggaccaggaccgaagggcttccgtggcctggctttgaccgtcgggctgaaaggggaggaaggaagtaggggcctgcccggccctcccggccagcgtggtatcaagggaatggctggccaaccggtttacagtcaatgcgacctcatcaggtttctgagggaacactctccatgctggaaggagaaatgccccgcatatccaacagaacttgtcttcgctctggataactcctatgacgtgacggaagaatccttcaacaaaacacgggacatcatcacctccatagtgaacgacctcaatattcgcgagaataactgtccggtcggggcacgagtagcaatggtgtcctacaactctggcacttcatatctgatccggtggagtgactacaataggaagaaacagttgctgcagcaactcagccagattaaataccaggacacaactgagcctagagatgttggtaatgccatgcgcttcgtgactaggaatgtctttaagagaacatacgcaggcgccaatgtccgccgggtagccgtgttttttagtaatgggcagacagcttctagaagtagcattatcactgcaactatggagttttccgcccttgacatttctccaacagtgtttgcctttgacgagagggtcttcctcgaagcgtttggcttcgacaacactggcacattccaggtgatccccgtgccacctaacggagagaatcagacacttgaaagattgcgtcggtgcgcgctttgctatgataagtgtttcccaaacgcgtgcatccgggaggcttttttgcctgaagattcttacatggacgtggtgttcctgatcgacaattcaagaaacattgcgaaagacgagttcaaggcagttaaagccctagtaagctcagtcatcgataattttaatatagcctctgatccattaattagtgattctggcgaccgaattgccctgctctcatattcaccctgggagagtagccggcgaaaaatgggtacagtcaagaccgagtttgacttcatcacttatgataaccagctgctgatgaaaaaccacatacagacgagctttcaacagttgaacggcgaagcaaccattggcagagcgctactatggacgaccgagaacctctttcccgaaactccgtatttacgcaagcacaaagtcatctttgtggtatcagccggcgagaattatgaacgaaaggagttcgtcaaaatgatggccctgagagccaagtgtcaggggtatgtgatatttgtgatatcattgggcagcactagaaaggatgatatggaagaattagcaagctatcctctcgatcaacaccttattcagcttggacggattcataagcccgatctgaattatattgctaagtttttgaaaccattcctctacagcgtccggagaggtttcaatcagtatccccctcccatgcttgaagacgcctgccgacttatcaacctggggggggaaaacatccaaaacgacggtttccagtttgtaaccgagctgcaggaagatttccttggggggaatgggttcataggccaagaactcaattctgggagagagtcccctttcgtaaagactgaggacaacggcagcgattatctggtgtacttaccttctcagatgtttgaaccccagaagctcatgatcaattacgagaaagaccagaaatccgcagagattgctagcctcacatcaggacatgaaaattacggtcggaaggaggagccagatcatacctatgagcccggggacgtgtcgctccaggaatactatatggacgtagcttttttgatcgatgcctcacaaagagtcggatctgacgagttcaaggaggtcaaagcttttattactagcgtcctggactacttccatatcgccccaacccccctcaccagtacactgggggaccgagtagctgttctctcttactcacctcctggttacatgcccaatacagaagagtgcccggtgtatctcgaattcgatttggtcacttataactccatccatcagatgaaacaccacctgcaggattcccaacagctgaatggagatgtgttcattggccacgccctgcagtggaccatcgacaatgtgttcgtgggcacccctaacttgcggaagaacaaagtgatcttcgtgatatcagccggagagaccaactccctggataaggatgttctgcgcaacgtgtctctgagggccaagtgtcagggttattccatctttgtgttcagctttggccctaaacacaacgataaagagctagaagagttggcctcacacccactggaccaccatcttgtgcagcttgggagaacacacaaaccggactggaactacatcatcaaatttgtgaaaccgtttgtgcacctcatacgtagggctatcaataaatacccaaccgaggacatgaaagcaacctgtgtgaatatgacaagccctaaccccgagaatggtggcacagagaacaccgtacttctcctgccaggcatatatgagattaaaactgaaaatggggatcttttcgacgaattcgactctcaagcacagcatttgttggtactgggtaataaccacagtagtgggtccgagacagctaccgacctgatgcaaaaactctacctgctattctccaccgagaagctggcgatgaaggataaagaaaaggcccatctggaagaaatctcagccttggtcgtagacaagcagcaagagaaggaggacaaggagatggaagccactgacatatag

SEQ ID NO: 97996 - DNA, 1674 bp, Artificial Sequence
  derived and/or modified sequence
attggcagagccttgctctggaccacagaaaacctgttccctgagactccttaccttcggaagcacaaagtcatttttgtggtatccgccggcgagaattacgagagaaaagaattcgtgaagatgatggctttgagggcaaagtgtcagggatatgttattttcgtgatctccctgggaagtacgagaaaagatgacatggaagaactcgctagttatcctctggaccaacacctgatacagctcggtagaatccacaaaccagatctaaactacatcgccaaattccttaagccctttctctattctgtccggcgcggatttaaccaatatccaccgcccatgctggaggacgcttgccggctcatcaacctgggcggcgaaaatatacagaatgatgggttccaatttgttacagagctgcaagaggatttcctgggtggcaacggtttcattggacaggaactgaacagcgggcgtgaatcaccttttgtcaagactgaagacaacggtagcgactatctggtttaccttccctcccagatgttcgaaccgcagaagctaatgattaattatgagaaggaccaaaagtctgccgagattgcatctctcacttctggacatgagaactacggccgcaaggaagagcctgatcacacatacgagcctggggacgtctcactgcaggagtattacatggatgttgccttcctaatcgacgcctctcagcgagttggatctgatgagtttaaagaggttaaggccttcatcaccagtgtcctggattactttcacatcgcacccacgcctctaacaagtaccctgggggatagagtagctgttttgagttacagcccaccaggctacatgcccaatacagaggagtgtccagtgtacctagaattcgacctggtgacctataattccatccaccaaatgaaacatcatcttcaggacagtcaacagctcaatggcgacgtcttcattggtcacgctctgcagtggacaattgataatgtatttgtggggacaccaaacttgagaaaaaataaggtcatttttgtgatttccgcaggcgagaccaacagtctggataaagacgtgctgaggaatgtgagcttgcgcgccaaatgccaggggtacagcatatttgtgttctccttcggacccaagcacaatgacaaagaactcgaggaactagcttcgcatcctctagatcatcatttggtccagctcgggcgcacacacaagcctgactggaattacatcattaaattcgtgaagccctttgtacatcttattcgtagagccatcaacaagtatccaactgaggatatgaaagcaacatgcgtgaacatgacctctcctaacccagagaatgggggcaccgagaatactgttctcctgctgcccggtatctacgagatcaaaaccgaaaatggcgacttgtttgacgagttcgattcgcaagcacagcacctccttgtattaggcaataatcacagctccggttcagagaccgccaccgacctgatgcagaagctatatctcctattttcaaccgagaaattagcaatgaaggataaggaaaaggcacacctggaggagatcagtgctctggtcgttgataagcaacaggaaaaggaggacggcgaagacactcgttcatcctag

SEQ ID NO: 97997 - DNA, 7848 bp, Artificial Sequence
  derived and/or modified sequence
atgaagattctccttatcatattcgtactgatcatatggaccgagaccctagctgaccagtctccaggacccggacctgtgtatgccgacgtggtgtttctggtagactcatctgatcacctaggacccaagtcattccccttcgtaaagacttttataaataaaatgatcaattctctgcccatagaagcaaacaagtaccgcgtagcattggcccagtactctgacgaatttcattctgagtttcacctttctactttcaagggccgcagcccaatgctcaatcacctcaagaagaatttccagtttatcggaggaagcttacagatcggcaaggctctgcaagaggctcatcgaacatattttagtgcgcctataaacggtagggacagaaaacaatttccacctatattggtagttttagcttctgcagaatccgaggacgaagtcgaggaagcctccaaggctctgcagaaagatggcgtgaagattatttcagtgggggtgcagaaggcaagtgaggaaaatctaaaggcaatggccaccagtcactttcatttcaatctgagaacaatacgggacctgagtacctttagccaaaacatgacacaaataattaaggatgttactaaatacaaagaaggagccgtagacgcagacatgcaggtgcactttcccatatcttgccaaaaggatagccttgccgatctggtttttcttgttgatgagtcccttggcacgggaggtaatttaagacacttacagaccttcctggaaaacattacttctagtatggacgtgaaagagaattgtatgcgcttaggcctgatgtcctactcgaattcagccaaaactatctcatttctgaagagtagtactacccaatccgaatttcaacagcaaatcaaaaatctgtccattcaggtaggaaagagcaacacaggtgcagctattgatcagatgcgccgagatgggttctcagagtcatatggaagtagacgggcacagggagtcccccagatcgccgtactagtgacgcacagacccagcgacgacgaggtgcatgacgcagccctcaacttgaggctggaagatgttaacgtgttcgctctgagcattcaaggggctaacaacacccaactggaagagatagtttcatacccccccgaacaaaccatcagtactctaaagagttatgctgacctggaaacttactctaccaaatttctaaagaaacttcagaacgaaatatggtcacagatcagtacttatgccgagcagagaaacctggacaaaactggatgtgtggatactaaggaggcggatattcacttcctgatcgatggatcatcaagcatccaagagaaacagttcgaacagataaaaagatttatgctggaggtcacggagatgttttccattggacccgacaaggttagggtcggtgtggttcaatacagtgatgatacagaagtcgaattttatatcacagattatagtaacgacatcgatcttagaaaagctatcttcaacatcaaacaactgacgggcggtacatacacaggaaaggccctcgattatattctgcagatcattaaaaatggtatgaaagatcgtatgtcaaaggtgccatgctacttaatcgtcctgacggatggcatgtcaaccgatcgcgtcgtagaacccgccaaacggctccgggctgagcagattacagtgcatgccgtcggcattggggcagccaataagatcgaactacaggaaattgcaggaaaggaagagcgggtttcatttggacagaatttcgacgccttgaaaagcataaaaaacgaagtggtgcgggagatatgtgccgagaaaggttgtgaggatatgaaagcagacatcatgttcctggtcgattcaagttggagcattggaaatgagaactttcgaaaaatgaaaatcttcatgaagaatctgttgactaaaatccagatcggagccgacaaaacacagataggcgtggtccagttctccgataagaccaaagaggagtttcagctaaacagatactttacccagcaggagatctctgacgcgattgacaggatgagtttaattaacgaagggacactgacgggaaaggcactgaacttcgtgggacagtactttactcacagtaaaggcgcaagattgggggccaaaaaatttctgattctgattactgatggcgtcgctcaagatgacgtaagggaccctgcccgtattctccgtgggaaggacgtcactatcttctccgtgggggtgtataatgccaatcgatcgcagttggaagaaatttctggagactcatccctagtgtttcacgtagagaacttcgatcatctaaaggccctggagcgaaaattgatttttcgagtgtgtgcactgcatgattgtaagaggatcactctccttgacgtagtatttgttctggatcactccggctccattaagaagcagtatcaagatcacatgattaacctgacaatccacctggttaagaaggctgatgtcggacgagaccgcgtgcagtttggagccctcaaatattcagatcaacctaatatacttttctaccttaacacctacagcaatagatctgccattatagaaaacctgaggaaacgacgagatactggcggaaatacttacactgccaaagccctgaagcatgccaatgccctgttcaccgaagaacacggttccagaatcaaacaaaatgtgaagcagatgctgatcgtgattacagacggagagagccatgaccatgaccaactgaacgacaccgcacttgaattaaggaacaagggaattacgatatttgccgtaggtgtagggaaggctaaccagaaggaactcgaagggatggccggcaacaaaaacaataccatctacgtggataacttcgacaagctcaaggacgtttttacgctcgttcaggaaaggatgtgcacagaagccccggaggtctgccatctccaggaggcggatgttatattcctttgcgacggctccgatcgggtgtccaattcagactttgtgaccatgacgacgtttttaagtgacttaatcgataacttcgacatccagtctcaacgtatgaaaataggtatggcccaattcggatccaactatcaatctattatcgagctaaaaaattctctgacaaagactcaatggaagacacagatacaaaacgtctcaaaatccgggggcttcccacgcattgattttgcgctgaagaaagtcagcaatatgttcaatcttcatgcagggggtaggagaaacgccggtgttcctcagaccttagtggtaataacaagcggagacccaagatacgacgttgccgacgcggtcaaaaccctgaaggaccttggcatctgcgtcttggtgctgggaatcggggatgtctataaagagcaccttctccccattaccggaaactcagagaagattattacattccaggattttgacaaactgaaaaacgttgacgttaaaaaacgtatcattcgcgaaatatgccaaagttgcggtaagacaaattgtttcatggatatcgtcgttggattcgacatttccacacatgtgcagggacaaccattattccaaggccatccccagctagagtcctaccttcctggaattctcgaagatattagctccatcaaaggcgtctcatgcggagccggcaccgaggcgcaggtctcactcgcttttaaggttaacagcgatcagggatttcccgctaaatttcaaatctatcagaaggccgtattcgactcactgctgcaggtgaacgtttccggacctacccacctaaacgcgcagtttctgagatctttgtgggatacgtttaaagacaagtctgcctctagaggacaggtcttattaattttttcggacgggttgcagtccgaatcgaacattatgttggagaatcagagtgatcgcctgcgcgaagcggggctggatgcactccttgtcgtcagcctgaatacgaccgcccaccacgagttctcaagcttcgagttcggcaaacgtttcgactatagaacccacttgacaattggtatgagagaattaggcaagaagctatcgcagtacttgggcaacattgccgagcgcacctgctgttgtaccttctgtaaatgtccaggcatccccgggccacacggcacgagaggcttgcaggcgatgaagggatcacagggtttgaagggatcgagaggccatagaggagaagacggcaatcctggtgtgcgtggcgacacgggtccccagggggacaagggtatagccggatgccccggagcttggggtcagaaaggactaaagggattctcaggacctaagggtgggcacggggacgatgggattgatggtttagacggcgaggaggggtgccacggattcccagggattaaaggggagaagggtgatccaggctctcagggctcgccagggagtaggggcgctccaggccaatacggcgagaagggttttcctggagatccggggaacccgggacagaacaataacattaagggacagaagggttcaaaaggcgagcaggggcggcagggacggagcgggcaaaaaggggtgcaggggtccccaagtagccgagggagtcggggcagagaagggcagcggggactgcgcggtgtgagtggcgagcctggcaaccctggacccaccggaacactcggcgcagagggtctccagggtccacagggttctcaaggcaacccagggaggaaaggtgaaaagggctctcaaggtcaaaagggcccacaaggaagtcctggattgatgggagccaaaggctcaactggaaggcccggattgctaggtaaaaaaggcgagcctggcctccccggggatctcggacctgtgggacagacaggtcaaaggggaaggcagggcgattcaggcataccgggctacgggcagatgggaaggaagggggtgaaagggccacgcgggtttcctggtgacgcgggacagaagggggacataggaaatcctggtatccccggcggtccaggcccaaaaggtttcagaggactagccttaaccgttggattgaaaggcgaagaaggcagcagaggccttcccggccctccggggcagagaggaatcaagggaatggccggccagccagtgtatagccagtgtgacctaatccgttttcttcgcgagcactccttatgctccttggaaaagtgtccagcctacccgaccgagttggtttttgctctcgataattcttacgacgtaaccgaagaatccttcaacaaaacaagagatatcattacctctatagtgaatgacctgaacatacgtgagaataattgcccagttggcgccagggttgctatggtaagctataactcagggacgtcctacttgatcaggtggtcagattacaatagaaaaaagcaacttctccagcagctctcccagatcaaataccaggacacaaccgagccaagagacgtggggaatgcaatgcggttcgtaacgcgcaacgtgttcaagcgcacatacgcaggagccaacgtccgtcgggtcgccgtcttttttagcaatggacagactgcatcacgatcctctattataactgcgaccatggagttcagtgctctcgatatcagtccaaccgtttttgcttttgatgaacgtgttttcctcgaagcgttcggatttgacaacaccggaacttttcaggtaattcccgttcctcccaacggtgagaatcagactttagaaagactcaggaggtgtgctctttgctacgacaagtgtttcccgaatgcatgtatcagggaagctttcttgcctgaagattcttatatggatgtagtttttctcatcgataactcccgcaatatcgcaaaggacgaattcaaagcggtcaaggccttggtgagctctgttatcgacaactttaatatcgccagtgatccattgatatcggattcaggcgataggattgcgcttctctcttacagcccttgggagtcttcccgcagaaagatgggaactgttaaaacagaatttgactttattacatacgataaccagctgctaatgaagaatcacatccagacctcatttcaacagcttaatggcgaagctacaattggccgcgctctgctgtggacaaccgaaaatttgtttcctgaaacaccttacttaagaaagcataaagtcatattcgtggtcagcgcaggagagaattacgagcgtaaagaatttgtgaaaatgatggcccttcgagcaaagtgccagggctacgtcatcttcgtaattagcttaggctccacgcggaaagacgatatggaagaactcgcttcataccccctagatcagcacctgatccagctcggtcgtatccataaacccgatctgaattacatagcaaaattcctaaaaccattcctgtactcggtacgtagaggctttaaccaatacccacccccgatgctggaagatgcttgtcgccttatcaatttaggtggtgaaaatattcagaacgacggcttccaatttgtgacagaactgcaagaggactttttagggggcaatggtttcataggacaggaactgaattccggaagggaatcaccgtttgtgaaaacagaggataatggatctgattacctggtgtatctaccctcccagatgtttgaaccccaaaagctgatgattaattacgagaaagaccaaaaaagtgccgagattgcaagcttaaccagcggacatgagaactacgggaggaaggaagaacccgatcatacttatgagccaggcgacgtttctctgcaggaatattacatggacgttgcattcctaatcgatgccagtcagagagtgggctctgacgagttcaaggaagtgaaggctttcattacatcagtgctggactactttcatatcgctcctacacccttgacttcaaccctgggagacagagttgccgtgctttcctactctccacccggctatatgcctaataccgaagaatgccctgtttacttagagttcgaccttgtcacctacaattctatccaccagatgaaacatcatttgcaagattcccagcagcttaatggggatgtgttcatcgggcatgccctgcagtggaccattgataatgtgttcgtcggcacacccaatctacgcaagaataaagtgattttcgtgatatcagccggagaaactaattcactggacaaggacgtgttgaggaacgtgagcctgcgcgcaaagtgccaggggtattctatcttcgtcttctcattcggacccaagcataatgataaagaacttgaggagcttgcttcgcatccactagaccaccatttagtacagctggggagaactcacaaaccagattggaactacattataaaattcgtcaagcccttcgtacatctgattaggcgagcaataaataagtaccccacagaagatatgaaagccacctgcgtaaacatgacgtcgccgaacccagaaaacggcggaaccgaaaataccgtgctattactgcctggcatctatgagatcaagaccgaaaatggagatctgtttgatgaatttgacagccaagcacagcacctcctggtcttgggaaataaccactcttcaggctctgagacagcaactgacttgatgcaaaagctgtacctgttattttctaccgagaagcttgctatgaaagataaagaaaaggcccacctggaggaaatctcagctctcgtggtggataagcagcaggagaaggaagacaaagagatggaagcgacagacatatag

SEQ ID NO: 97998 - DNA, 7848 bp, Artificial Sequence
  derived and/or modified sequence
atgaaaatactgctaatcatatttgtgctgataatctggactgaaaccctggccgatcagtcacccggccccggccctgtttatgcagacgttgtgttcttggtagattcttctgaccatttaggccccaagagctttccattcgtaaagacctttataaacaaaatgatcaatagtctcccaatcgaagcaaacaagtacagggtggccttggcacaatattccgatgaattccattccgagttccacttatctacatttaaaggacggtcacccatgctgaaccatttgaagaagaacttccagtttatcgggggttcactgcagattggtaaagccctacaagaagctcaccgaacatatttttccgcccccatcaatggtagagaccgcaaacaattcccaccaatcctggtggtcctggctagtgccgagtccgaggatgaggtggaggaagccagcaaagcactccagaaagacggcgtaaaaatcataagcgttggcgttcagaaagccagcgaagaaaatctcaaggcaatggcgacaagtcacttccattttaacctacgcacaataagagacctatcaactttcagccaaaacatgacccaaatcataaaagatgtaaccaagtacaaagaaggcgccgtggacgcggacatgcaagttcacttccccatttcgtgccagaaggactccttagctgacctcgtatttctggtggatgagagcttgggaactgggggaaacctgaggcatctacaaacatttctcgaaaatattacatctagcatggatgttaaagaaaattgcatgcgactgggccttatgtcttactctaactcggcaaaaactatctcttttctcaagtccagtaccacacagtcagaattccagcagcaaataaaaaacttgagtatccaggtcggaaagtcaaatacaggagcagcaatagaccagatgcgcagggacggtttttctgagtcgtatggatctcgcagggcccaaggcgtgccacagattgcagtgttggtcacgcacagacccagtgacgatgaagtccatgacgccgccctgaaccttcgccttgaagatgtcaatgtatttgccttatcaatacaaggagccaataatacccagctggaggaaatcgtttcctaccctcctgagcaaacaatcagcactcttaagtcttatgcagacctggagacttacagtaccaaatttctgaaaaaactgcagaacgaaatctggagtcagatttctacttacgcagagcagcgaaacttagacaaaacaggttgcgtcgatactaaagaagctgatatccatttcctcattgacggctcttcatctatacaggaaaagcaattcgagcagatcaagcgcttcatgttagaggtgacagagatgttttctatcggtccagacaaagtgagagtgggcgtggtccagtacagcgatgatacggaagttgagttttacatcaccgattattccaatgacattgatctccgaaaagccatttttaatataaaacaactaacaggaggaacctacacagggaaagcgctggattatatcctccaaattataaaaaacgggatgaaagatcgaatgagcaaagtcccctgttatctgattgtcttaacagatggaatgtccacagatcgagtggtggagcctgccaaacgattaagagccgaacaaattacagttcatgcagtcgggataggggcggcaaacaaaatagaactgcaggaaatagctggaaaggaggagcgggtctcctttggacaaaatttcgatgcactcaaaagtattaagaacgaagttgtacgcgaaatctgtgctgaaaaaggctgcgaggatatgaaggctgacataatgtttctagtggatagctcatggagcattgggaacgaaaactttaggaaaatgaaaatctttatgaaaaatcttctcaccaagattcaaattggggccgacaaaacccaaatcggagtcgtgcagttcagtgacaagacgaaagaggaattccaactcaataggtattttactcagcaagagatttcagacgcgatcgacagaatgtccttgatcaatgaaggcactttaactggaaaagctctgaattttgttggccagtacttcactcattcaaaaggagctcgactgggcgccaaaaaatttctgatactgattactgacggcgtggcccaggacgacgtacgcgacccggccagaattttgcgaggaaaagacgtgactattttcagcgtgggggtttataacgcaaatcgcagccagttggaggagataagtggcgacagtagccttgtgtttcatgtggaaaactttgaccaccttaaagcccttgagcggaagcttatttttcgcgtctgtgccttgcatgattgcaaaaggatcacactcctcgatgttgtatttgtgctggatcactctggcagtattaagaaacagtatcaggatcacatgattaacctgaccatccatctcgttaaaaaggccgacgtcggtcgggatcgcgtccagttcggcgctcttaaatactccgaccagcctaatatcctcttttacttgaatacatactctaaccgttctgctattattgaaaacctccgtaagcgccgtgacacaggaggaaatacctatacagccaaggctctgaagcatgcgaacgccctgtttaccgaggaacatggatccagaataaaacaaaacgtcaagcaaatgctcatcgtgataaccgacggagaatcacacgatcacgaccaactaaacgacacagctcttgaactgagaaataagggtattacaattttcgccgtgggcgtggggaaggctaaccaaaaagaactagaagggatggctggcaacaagaataatacaatttatgtggacaacttcgataagctcaaggacgtctttactctggtgcaggaacgtatgtgcacagaggcacccgaggtctgccatctccaggaagccgatgtgatctttttgtgcgacggatctgatagagtcagcaatagcgatttcgtgactatgactacctttctctccgacctcatagacaactttgatatccagagccagagaatgaagatcggtatggctcaatttgggagtaactatcagtctattatcgagctgaaaaatagccttacaaagacccagtggaagacccagattcagaatgtgagcaagtcaggcggctttccaagaatcgacttcgccctgaaaaaagtgtctaacatgtttaatttgcacgctggtgggagacgtaatgcaggtgtacctcagacgctcgtagttatcacctcaggggatcctagatatgatgttgctgacgccgttaagaccttgaaagaccttggaatttgtgtgctggtcttaggaatcggcgatgtttacaaggagcacctacttcccattacaggcaatagcgagaagattatcactttccaggactttgacaagctcaaaaatgtcgacgtcaaaaaaagaatcattagagagatctgccagtcttgcggaaagaccaattgctttatggatattgtggtcggcttcgacattagcacgcacgtccagggacaacccctctttcagggacacccacagctggaaagttatctgccaggtattctcgaggacatatccagtattaaaggggtctcgtgtggtgccggtaccgaggctcaggtctccctcgctttcaaggtgaattctgatcagggctttcctgctaaatttcaaatatatcagaaggctgttttcgactcacttcttcaggttaacgtttctggaccaacgcatttgaatgcacagtttctaaggagcctgtgggacacctttaaggacaaaagcgccagccgcgggcaggtcttgctgatcttctccgacgggctgcaatccgaatccaatatcatgctggagaatcaatcggacaggctgcgcgaagctggactggatgcactgctagtagtgtccctcaacaccaccgcacaccacgagttctctagctttgaatttggtaaaagattcgactacaggacccatctgacaattggtatgagagagctaggaaaaaagttgtcccagtatctaggaaacattgctgaacgaacatgttgttgcactttctgtaagtgtcccggaatccctgggccccacgggacacgagggctccaggccatgaaaggatcacagggactcaaggggagccgcggacacagaggagaggacggcaatcctggcgtgcggggggacactggaccacaaggggataaagggatagcaggctgtccaggcgcttggggtcagaaaggactaaaaggtttttcaggcccgaaagggggccatggtgacgatggaattgacggcctggatggggaagaaggttgccatggttttcctggtatcaaaggtgagaagggggatcccggctctcagggctcgccaggatcaaggggagccccagggcagtacggagagaagggattccctggagatcctgggaaccctggccaaaacaataacatcaaggggcagaagggctcaaaaggagaacagggccgacagggacgaagcgggcagaagggagttcaaggctcaccaagcagtagaggaagtagggggagggaaggacaacggggtttacggggggtgtcaggagagcccggtaaccccggcccaaccggcacgctaggggcagagggacttcagggaccgcagggcagtcaaggtaaccccggcaggaagggcgaaaaaggaagccagggccaaaaaggacctcaaggttcccctgggctcatgggcgcgaaaggcagtacaggacgacccggattgttgggcaagaagggcgagccgggtctgccaggggatttaggcccagtaggacaaactggccagcgtggcaggcagggggattcagggatacctggttatgggcagatgggacggaagggagtgaaaggacctcgtggattcccaggagacgctggccaaaaaggtgacatcggcaacccaggcatccccggcgggcctggacctaaaggatttcggggcctagctttgactgtaggcctgaagggagaagaggggtcgcgcggtctcccaggtcctccaggacagcgcggtatcaagggaatggccggccagcctgtgtacagccaatgtgacttaatacgctttctgagggagcattctccttgttggaaagagaaatgtccagcgtatccaaccgaactggtctttgcacttgacaatagctacgacgtgactgaagagtccttcaataagacccgtgatattattacgtccatcgtgaacgacctcaatattagagaaaataactgtccggtgggagctcgagtggcaatggtgtcatacaacagcggcacatcttatctgatacgctggtctgattataaccgaaaaaaacaactgttacaacagctctcacaaattaaatatcaagacacaacagagcccagagatgtcggcaacgcaatgcgtttcgtgacccgaaacgtttttaaaagaacatacgccggcgctaatgtacgcagggtggccgtcttcttcagtaacgggcagaccgcttccagatcctcaattataacagctactatggagttctccgcactggatattagccctacggtctttgcctttgacgagagagtgttcctggaagctttcggattcgataatacaggaaccttccaggtgatccccgtaccaccgaacggagaaaaccagaccctagaaagactgcggagatgtgccctatgttatgacaaatgctttccaaacgcgtgtatcagagaggccttccttcccgaggattcatacatggatgtggtgtttctcattgataacagccgaaatatcgccaaagatgaatttaaggctgtcaaagccctagtgagctctgtcattgataattttaatattgcctcagatcccctcatatccgattcaggcgaccggattgccttgcttagttactcaccatgggaaagctcacgcaggaaaatggggaccgtcaaaacagaattcgacttcataacatacgacaatcaactactgatgaagaatcatattcagacatcattccaacagctgaacggggaggccacaatcggacgggctctcttatggacaaccgaaaatctgtttccagaaaccccatatctgaggaaacacaaagttattttcgttgtgtcagccggagaaaactacgaacgaaaggagtttgtcaagatgatggccctgagagctaagtgtcaaggctatgtgatattcgtcatctctctagggtccacacgaaaagacgatatggaggaactggcttcctaccccctggaccagcatctgattcagctagggcgcatccacaagcctgatttaaactacattgccaaattcctaaagccattcctgtattccgtgagacgcggattcaatcagtacccccctcccatgctagaagatgcctgtagactgatcaacttgggaggtgagaacattcaaaacgatggatttcagtttgtcaccgaactgcaagaggactttttgggcgggaacggatttattggccaggaactgaacagtggccgcgagtcaccctttgtcaagaccgaagataacggatctgattacctggtctacctcccgagccagatgtttgaaccacaaaagctgatgattaattacgaaaaagatcagaaatccgcagaaatcgcatccctgacctccggacatgaaaactatggccgaaaggaagagccagaccacacatacgagcctggagatgtcagcctccaagagtactatatggacgtcgcatttctgattgatgcctcccaacgcgttggatcagacgagtttaaagaagtcaaagcattcataacttcagtgcttgattatttccacatcgcacctacgcctcttactagtaccctgggtgatcgtgtggctgttttgtcctattcgcctccaggatacatgcctaataccgaagaatgtcctgtttaccttgagttcgacctcgtgacatacaacagcattcatcagatgaagcatcacctccaagacagtcaacaattgaacggagatgtcttcataggacacgcgctacaatggactatagacaacgtgttcgtcggaactcccaacctgaggaaaaataaagtgatttttgtgataagcgccggagaaacaaacagcctcgacaaagacgttctgcgcaatgttagcctcagggcaaaatgccaaggatactcaatattcgttttttccttcgggccgaagcataacgataaagaactggaagagcttgcttctcaccccctggatcaccaccttgtacagttggggcgaacccacaagccagattggaactacattatcaagttcgtcaagcctttcgtgcacctgattcgaagagctataaataaatatccaacggaagacatgaaggctacttgtgttaatatgacttcacctaatcctgagaatggcggcaccgagaacaccgtgttactccttcccggcatctacgaaattaagactgagaacggcgacctatttgacgaattcgattcccaggcgcagcacttgcttgtattaggtaataatcattcatctggctccgaaaccgcgaccgatctgatgcaaaaactttacctcctcttcagtactgaaaaactggctatgaaggataaagaaaaggcgcaccttgaggaaataagtgctctcgttgtagataaacaacaagaaaaagaagataaggagatggaagctacagatatatag

SEQ ID NO: 97999 - DNA, 1674 bp, Artificial Sequence
  derived and/or modified sequence
attggaagagcgttgctctggacaaccgagaacttgttcccagagaccccatatttgagaaaacacaaggttatctttgttgtgagcgccggcgaaaattacgagagaaaggaattcgttaaaatgatggctctaagggctaagtgccaaggctacgtgatattcgtgatcagtctcggtagcacaagaaaagacgatatggaagaactcgcttcttacccactggaccagcacttgattcaactcggacgtattcacaagcctgacttgaactatattgctaaattccttaagcccttcctctacagtgtccgaagagggtttaaccaatacccacctcctatgctcgaggacgcttgcagacttataaacctgggcggggagaacatccaaaatgacggctttcagtttgtgaccgaattacaggaggattttttaggcgggaacggttttattggacaggagctgaattcaggacgcgaatcgcccttcgtcaagaccgaagataatggctctgactatctcgtctacctaccaagccagatgttcgagcctcagaagctgatgattaactatgaaaaagaccagaaatccgcagaaatcgcatctctaacttcaggccacgagaactacggacgtaaagaagaacctgatcacacctacgaaccaggggacgtcagcctccaagagtattacatggatgtcgctttcctgatcgacgcgtctcagcgggtcggatccgacgaatttaaagaagtgaaagcatttatcacaagcgttctagactatttccatatcgccccaacacccttaacctcgaccctaggagaccgagtggccgtgttatcctattcaccccccgggtatatgcctaacacagaggaatgccccgtgtatctggaatttgacctcgtgacgtacaactctatacaccagatgaagcatcacttacaggattcccagcaactgaatggggatgtattcattggccatgcgctacaatggacgattgataacgtattcgttggcacacccaatctgcggaaaaataaggtaatattcgtgatttctgccggggaaactaactcgttagataaggatgtactcagaaacgtcagtcttcgggccaaatgtcagggatactccatctttgttttttccttcgggccaaaacacaacgataaagagttagaggagctagcctcacaccccttagaccaccatctagtgcagttgggccgaacacataaacccgattggaattatatcattaaatttgtaaaaccctttgtgcatcttattcgtcgcgccatcaataagtaccctacagaggacatgaaagccacgtgtgtcaatatgacttctccaaatcccgaaaatggcggaaccgagaacaccgtgttactgctgcccggaatttacgaaataaagacagaaaacggtgatctattcgatgaatttgactctcaggcgcagcatctacttgtgctgggtaataaccattcctccggttcagaaactgcgacggatctcatgcagaaactgtatttactgttctctactgaaaaattggcaatgaaagataaggaaaaggcacacctagaagaaatatccgcgctcgtagtggataaacagcaagagaaggaagatggcgaagatacaagatcatcatag

SEQ ID NO: 98000 - RNA, 7848 nt, Artificial Sequence
  derived and/or modified sequence
augaagauccuucugaucauuuuugugcugauaaucuggacugagacccuggccgaucagucccccgggccaggaccaguguacgcugaugugguauuucuggucgacaguagcgaccaccugggacccaagucuuuuccuuuugugaagaccuucauuaacaaaaugauuaacucacuuccaauugaggccaacaaguacagaguugcgcuugcucaguauuccgaugaguuccauucagaguuccaucucucgaccuuuaaaggccgcucuccgaugcucaaccaucuuaagaagaauuuccaguuuauuggaggcucauugcagauugguaaagcauugcaggaagcucaucguaccuauuuuucagccccaauaaacgguagagaucguaaacaguuccccccuauccuggucgugcucgcuagugcugaaucugaggaugaagucgaagaagccagcaaggcccuccagaaggauggugugaaaauaauuucuguaggcguucagaaggcgagugaagagaaccucaaagcuauggccacgucucacuuucauuuuaaccuacggaccauccgcgaucuuuccacauucucucagaauaugacacagaucauaaaggacgugacgaaguacaaggaaggcgcggucgaugcggacaugcaggugcacuuucccaucuccugccagaaagauucucuggcugaccuuguguuccuuguugacgagucacuuggcacgggaggaaaucuucggcaccugcagacuuuccuugagaacauuacuagcaguauggacgugaaagagaacuguaugcguuuaggacucaugucguacucaaacagcgcgaaaacuauuuccuuccucaaaagcagcacgacccaauccgaguuucagcagcagaucaaaaaucugucuauucagguaggaaagucaaauaccggcgccgcuaucgaucagaugagacgcgauggauuuucugagaguuauggcagcaggcgggcacagggcgugccucagaucgccgugcugguuacccaucggccauccgacgacgaagugcaugaugcugcucugaaccugagacuagaagaugugaacgucuuugcccugagcauccagggggcuaacaauacccagcuggaagagaucgugucuuacccuccugagcagaccaucuccacccucaagaguuacgcagaucuggagaccuacucaacaaaguuccuuaaaaagcugcaaaacgagauuuggagucagaucagcacuuacgccgaacagagaaaccuggauaaaacuggguguguggacacaaaagaggcagauauacauuuucugaucgauggauccagcuccauucaggagaaacaauuugaacagauuaagcgguuuaugcuggaggucacagaaauguucaguauuggaccugacaagguccggguggggguaguccaauacucggacgauacggaaguggaguuuuacaucacggacuauagcaaugacauugaucuccgcaaagccaucuuuaacaucaagcaacugaccgggggaacuuacaccggcaaggcuuuagauuauauccugcagaucaucaaaaacgguaugaaagaccguaugucuaaagucccgugcuacuuaauuguucugacagauggaaugucgaccgaucgcgugguugaaccggcaaagagguugagggccgagcaaauaacugugcacgccguugggaucggggccgccaauaaaaucgagcuccaggagaucgcugggaaagaggagaggguguccuucgggcaaaacuucgacgcucucaaaucaauuaagaacgagguggugcgugagauuugugcggagaaaggaugcgaggauaugaaagcagauaucauguuucucguugauucuucuuggagcauugguaacgaaaacuuccgcaaaaugaagaucuuuaugaaaaaccuccuuacaaaaauucagaucggagcugauaagacccagauaggcgugguucaauuuuccgauaagacuaaggaagaauuccagcugaacagauacuuuacucaacaggagauuucagaugccaucgaccgaaugucucugauuaacgaggggacuuugacugguaaggcacuuaacuuugugggucaauauuucacucacuccaaaggcgcccgccugggcgcuaagaaguuccucauccucauuaccgacggcguggcccaggacgaugugcgugauccagccaggauccugagagguaaagacgucacaauauuuucugugggcgucuauaacgcuaacagaucacaacucgaagaaauuagcggagacaguagucuggucuuucauguggagaauuucgaccaccugaaggcccuagagaggaaguuaaucuuccgugucugcgcuuugcacgauuguaagcggaucacucugcucgauguggucuuuguucuagaccauucagggucaaucaagaaacaguaucaggaucacaugaucaacuugacuauccaccuuguaaaaaaagccgacgucggacgcgaccgcguucaguucggcgcccuuaaguauagcgaccaaccaaacauucuguucuaucugaacacauacuccaaccguagugccaucauugagaaccuacggaaaaggagggacaccggagguaacacauauacagcaaaggcucugaagcaugcaaacgcccucuucacagaagaacacggauccagaauuaagcagaacgugaaacagauguuaauaguaauuaccgacggcgagucccaugaucaugaucagcugaacgacacggcacuggaauugagaaauaaagggaucaccauauucgccgucggugugggaaaggccaaccagaaagaacuugagggaauggccgggaauaaaaacaacacuaucuauguagauaacuucgacaagcugaaggauguguucacacucgugcaggaaaggauguguacagaagcaccggaagugugucacuuacaggaggcggacgucauauuucucugcgauggcucagaccggguguccaacucagacuuuguuacaaugaccacauuucugucagaucucaucgauaacuucgauauucagagccagcgaaugaaaauaggaauggcgcaguuugggagcaauuaccaaucuaucauugaguuaaagaauucacuuacuaaaacccaauggaagacgcagauccagaacgucaguaagucugggggcuuuccccggaucgauuuugcccugaagaaagucagcaauauguuuaauuugcacgcuggcggucgcagaaacgcuggaguuccacagacacuuguugugaucacgucuggggacccuagauacgaugucgcagacgcugugaagacccugaaggaccugggcauuugcgugcuuguucugggcaucggagaugucuauaaggaacaccuccuacccauuacagguaacagcgaaaaaauaaucacauuccaagacuuugacaagcugaaaaaugucgaugucaaaaagaggauuaucagggaaauuugccaauccugugggaagacuaauuguuucauggauauagucgucggguuugacauuucaacccaugugcaaggacagccacuuuuucagggccacccucagcuugaguccuaucuccccggcauuuuggaggauauuucaucaaucaagggcgucagcugcggugcugguacagaggcacagguaucuuuagcauuuaaaguuaacagcgaucaaggauucccggccaaguuucagauuuaccagaaggcgguguucgacucacugcuccaaguaaacgucucugggccaacucaucuuaaugcccaguuuuuaagaagucugugggacaccuuuaaagacaaaagugcgucucgcggacagguucuuuugauuuuuucagacgggcugcaguccgaaucgaauaucaugcucgaaaaccagucggauagauuaagagaagcaggcuuggaugcccuucucguggucagucugaacacaacugcccaccaugaguuuucuagcuuugaauuugggaaaagauucgacuacaggacucaccugacuaucggcaugcgugaacugggaaaaaaacugagccaguaucuugguaauauugcagagcggacaugcuguugcacguuuuguaagugcccgggaauuccagguccccauggaacacggggcuuacaagcuaugaaagggucucaagggcucaaggguucgcgcggacacagaggagaagacgguaaccccggcguucgcggagauacaggcccucaaggggacaagggcauugcaggcuguccuggagccuggggucaaaagggacucaagggauucagugggccaaaagguggacauggggaugauggaauugaugggcuugauggcgaggaagguugccauggauuucccggaauaaaaggcgagaagggugaccccggaucccaggguucucccggcagcagaggggccccgggacaguacggagagaaaggauucccgggggacccuggcaauccugggcaaaacaacaacauaaaaggucagaaggggucaaagggggaacaggggagacaagggcgaucagggcaaaagggcguacagggcucccccuccaguaggggcucccguggacgcgagggccagcgcggccucagaggaguaaguggcgaaccaggaaacccuggcccaacagguacacugggggcggagggacugcagggaccucaggguucucagggaaaccccggaagaaagggcgagaaagggagccaggggcaaaaagguccccaggggagucccggucugaugggggcuaaaggaucaacgggacguccaggacugcuuggcaaaaaaggcgagccggggcugccaggcgaucugggaccagucggccaaacaggccagagaggcagacagggagauuccggaauccccggauacggccagaugggcaggaaaggugucaaagguccuaggggcuucccaggggacgcugggcagaaaggcgauaucggcaacccuggcaucccagggggaccgggucccaaagguuuucgcgggcuggcgcuaacugucggauuaaagggugaagaaggcagccgcgggcucccagggccuccaggucagcgggggauuaagggaauggcugggcagcccguauacagccagugcgaucuaauacgguuccuucgggagcauucgcuuuguucucuggaaaagugcccggcguaucccacugaguuaguuuucgcccucgacaauuccuaugacguuacggaagagaguuuuaauaagaccagagauauaauuaccucuauagucaaugaucugaacauccgggaaaacaacugcccagucggcgcuaggguggccaugguaagcuacaacagugguacgaguuaucucauuagaugguccgacuauaauagaaagaaacaauugcuacaacaguugucacagauuaaauaucaggauacaacagagccuagggacgugggcaaugcaaugcgguuugugacgcggaacguguucaagcguacauaugcuggcgcgaacguccgucgcguagcaguuuuuuucuccaacgggcaaaccgccagccgcuccucaaucauuacagcaaccauggaguucagugcccucgacaucucccccaccguuuucgcuuuugacgagaggguuuuucuggaggcuuuugguuucgacaauacuggaacuuuucaggugauccccguaccgccaaauggggaaaaucaaacucuggaacggcuacgcagaugugcccugugcuacgacaagugcuucccaaaugcuuguauucgcgaagcuuucuuaccugaggacucauauauggacguuguguuccucaucgauaacuccagaaauauugccaaagacgaguucaaagcagugaaagccuuggucucuucugugaucgacaauuuuaacauugcauccgacccacuuaucucagacuccggcgaucgaaucgcgcuucuuucauacagccccugggagucuaguaggagaaagaugggaacaguuaagaccgaguuugacuucaucacauaugauaaucaacuguuaaugaaaaaccacauucagacaagcuuucaacaguugaauggagaggcaaccauuggacgagcgcuucuguggacuaccgaaaauuuguucccugagacacccuaccuccggaaacacaaagucaucuuuguggucucugcaggagagaauuacgaaagaaaggaguucguuaagaugauggcccuccgggccaaaugucagggcuacgucauuuuuguaauuagccuuggaucgacgcggaaagaugauauggaagaauuggccucuuauccucuggaccaacaucuuauccagcugggaaggauacauaaaccagaucugaacuauauugccaaguuucugaagccauuccuuuauucagugcgacggggguucaaucaguacccacccccaaugcuugaggacgcuugccgccucauaaaucugggcggcgagaauauacagaacgauggauuccaguuuguuacagaacuccaagaggauuuuuugggcggaaacgguuucauuggacaggaacuaaauaguggccgagaguccccuuuugucaagaccgaggauaauggcagugauuaucugguauaccugcccucgcagauguuugagccucaaaaacugaugaucaauuaugagaaagaccagaaauccgccgaaaucgcaucccuuaccagcgggcacgagaacuacggcagaaaggaggagcccgaccauacauaugagccuggcgauguaagcuugcaggaauauuacauggacguggccuuucugaucgacgcaucucagagagugggaucugacgaauucaaagaggugaaagccuucauuacguccgucuuggauuacuuccacauugcuccuaccccuuugaccuccacacucggagaucgaguugcuguucugagcuacucaccaccuggguauaugccaaauacagaggaguguccugucuaucuugaguuugaucuggucacguauaacuccauucaccagaugaagcaccaucugcaagacucacaacaauuaaauggugacguguucauagggcacgcccuucaguggacaauugauaacgucuucgucggcacccccaaucuacgcaagaacaaagugauauuugucaucucugcgggagaaaccaauaguuuggacaaggacgugcuucggaaugugucucuccgggcuaaaugccagggcuauaguauauucguguuuuccuucgguccuaaacauaaugauaaggaacucgaagaguuagcuagucauccccuggaccaucaucuggugcagcugggccgcacccacaagccugauuggaauuauaucauuaaauucgugaaaccauucguccaccugauccggagggcaauaaacaaauaccccacugaagacaugaaggcaacaugcgugaauaugaccucaccaaaucccgaaaauggaggaaccgagaauacugugcuccugcugccaggaaucuacgaaauuaagaccgagaacggggaccuguuugaugaauucgauagccaagcgcagcaccuccugguacucgguaacaaucacuccucgggcagcgaaaccgccacugaucuuaugcaaaaacuauaccugcuguuuagcaccgagaagcuggccaugaaggacaaagagaaggcacaucuugaagagaucuccgcauuagugguggauaagcagcaggaaaaggaagauaaggaaauggaagcuaccgacauauag

SEQ ID NO: 98001 - RNA, 7848 nt, Artificial Sequence
  derived and/or modified sequence
augaaaaucuuacugaucauuuucgucuuaauuauuuggacagagacgcuggcagaccagucaccgggcccugguccagucuacgcugaugugguguuucucgucgauucuagugaucaucugggcccaaaaucauuuccauucgugaaaaccuucaucaauaagaugaucaacucucuucccaucgaggcuaacaaguacagggucgcgcuugcacaauauuccgacgaguuccacagcgaguuccaccugucuacauuuaagggucgcucuccgauguuaaaccacuugaagaagaauuuccaauuuaucggcggaagcuuacaaaucgguaaggcccuccaggaagcacacaggaccuacuuuagcgcuccaaucaauggccgagaucguaagcaauucccaccuaucuuagugguguuggccuccgcggaauccgaggacgaaguggaggaggcauccaaagcccugcagaaggacggaguuaaaaucaucuccguuggggugcagaaggcuuccgaagaaaaccugaaggccauggccaccagccauuuucacuucaaucugcgaaccauuagagaucucuccacguucagucaaaauaugacccaaaucaucaaagacguaacgaaauacaaggagggugccguggacgcugacaugcaagugcacuuuccuaucucgugucagaaagacagccuggcugauuuagucuuccucguugacgagucccuuggaaccggaggaaauuuacgacaccugcagaccuuucucgagaacauaacuaguuccauggacguaaaggaaaauuguaugcggcugggacugaugucauacucuaauagcgcaaaaacuaucagcuuucucaaaagcucaacaacacaaagcgaguuucagcaacagauuaaaaaucuaucgauccaggugggaaagucaaauacaggugcugccauagaucaaaugcgacgggaugguuucuccgaaagcuauggcucacgcagagcccagggggugccacagauagccgugcugguuacacaucguccaucugaugacgaggugcacgaugccgcacugaauuugcgccuggaagacguuaauguguucgcccucucaauccagggagcaaauaauacccagcucgaagagauugugucguauccucccgaacagaccauuuccacccuuaaaagcuacgcugaccuggagacauacucuacaaaauuucucaagaagcuucagaaugaaauuuggagccaaauuuccaccuacgccgagcagaggaacuuagacaaaaccgggugugucgauaccaaggaagcagauauccacuuucugaucgaugguaguagcucaauccaggaaaaacaguucgagcagaucaagcgguuuaugcuugaggucacagaaauguucucaauugguccugacaaaguucgaguggguguaguccaguauuccgacgacacugaggucgaguuuuauaucacugauuauucgaacgacauugaccucagaaaagcaaucuuuaauaucaagcagcucacagggggcacauauaccggcaaggcucuggauuacauacugcaaauuaucaaaaauggaaugaaagaucggaugucgaaaguaccauguuaccucaucguccuaacggacggaaugucuacagauagaguggucgagccagcaaagcgccuuagagcagagcaaaucaccgugcacgccguugggauaggggcagccaauaaaaucgaacugcaggaaaucgccgggaaggaagaacgcguuucuuuuggccagaauuucgacgcacuuaagucuauuaagaaugagguggugagggaaaucugugccgagaagggcugugaggauaugaaggcagacauaauguuccucguggacagcaguuggaguaucggaaacgaaaacuuccguaagaugaagauuuucaugaaaaaccugcucaccaaaauccagauuggcgcugacaagacucagauuggggugguacaauuuagcgacaaaacaaaagaagaguuucagcucaaccgguacuuuacccagcaggaaauuagcgacgcuaucgauagaaugucgcucaucaacgagggcacgcugacugggaaggccuugaacuuugugggacaguauuucacccacucgaaaggagcgcgacuuggggcaaagaaauuucucauccuuaucacagauggcguugcgcaggaugauguucgggauccugcaaggauacuucgaggcaaagaugugacgauauucagugucggcguauauaacgcuaaccgaagucagcuugaggagauuagcggcgacuccucccugguauuccauguggagaauuucgaccaucugaaggcccuggaacgcaagcugaucuucagggugugugcccugcaugacugcaaacgcauaacucuccucgauguaguguucgugcuggaccacuccggaaguaucaaaaagcaguaucaggaccacaugauuaaccucacuauccaucuagugaaaaaagccgacgugggucgggacagaguacaguucggagcucugaaauauucagaccagccaaauauacuguucuauuugaauacauacucuaacaggagcgcgaucauugaaaaccuccgcaagaggagagacacagggggcaacacuuauacagcaaaggcucugaagcacgcgaaugccuuguucacugaagaacauggaagcagaaucaagcaaaauguaaagcagaugcugauuguuauaacggacggagagagccaugaucaugaucagcugaacgacacggcucuggaauugaggaauaaggggaucaccaucuucgcugugggaguugggaaagcuaaccagaaggaacuagaaggaauggcggguaauaagaauaauacaauauauguggauaacuuugauaaacugaaagacguguucacuuuaguucaggaaaggauguguacggaagcaccugaggucugucaccuacaggaagcagaugucaucuuucuuugcgacggcucggaccgagugucaaacagcgauuuugucacaaugaccaccuucuuaucagaccugauugauaauuuugauauccagagccagagaaugaaaaucggaauggcccaguucgguucuaauuaccaauccauuauugagcugaagaacucccugaccaaaacucaguggaaaacacagauccagaacgugagcaagagcggagguuuccccaggauugacuuugcucugaagaaagucagcaauauguucaaccugcaugcagggggcagacgcaacgcugggguuccccagacacucgucgugaucacuuccggggauccucgauaugauguagcagacgcggucaaaacccucaaggauuuagguauuuguguuuugguccucgggauuggcgacgucuauaaggagcacuugcugccuauuacagguaauuccgagaagauuauuaccuuccaggacuucgacaaacuuaaaaacguggaugugaaaaaaagaauaauucgggagaucugucagagcugcggcaagacgaacuguuuuauggacaucgugguaggguucgacauuuccacgcauguccaaggucaaccacuguuucagggucauccucaauuggagagcuaucuuccugggauucucgaggauauuaguaguaucaagggggugucgugcggcgcaggcacugaagcacagguaucccuugccuucaaggucaacucggaucagggauuucccgccaaguuccagauuuaucaaaaagccguauuugacagccucuugcaagucaacgugagcggaccuacacaccugaacgcccaguuccugaggucuuuaugggauacuuuuaaggacaaaucugcaagucggggccagguacuucugauauucagugacggacugcaaagcgaguccaacaucaugcuggaaaaccaaucugaccgucuucgagaggccgggcucgacgcucugcuggucguuagucucaacaccacggcccaucacgaguuuucaucguuugaauucgguaaaagauucgacuaccguacccauuugacaauuggaaugagggaacuuggcaagaaguugucccaguauuugggcaacaucgcugagcggaccuguuguugcaccuuuugcaagugcccaggaaucccagguccacauggcacccgcggucugcaggcuaugaaaggcagccagggccuuaaaggaucaagaggacacagaggagaagacgggaacccuggugugaggggagauacuggaccacaaggugacaaaggaaucgccggaugccccggggcauggggccaaaagggacugaaaggauuuucugggcccaagggagggcacggagaugauggcauagaugggcucgacggggaagaaggaugccacgguuucccugguauuaaaggggagaagggggacccaggcagccaggggucaccaggcagucgaggagcgccaggccaguacggggagaaaggguuucccggugaucccgggaauccggggcagaauaauaacauuaaagggcagaagggcagcaagggcgagcaaggccgccagggucgcagcggucagaaaggagugcaggguucacccucaucucgcgguagccgugggagggaagggcaacgcggacugagggggguuucuggagagccuggcaauccagggcccaccggaacucugggagccgaaggguuacaggggccccaggggagucaagguaauccugggagaaagggggaaaagggaucucagggucaaaaggggccacagggaucgcccggauugaugggggccaagggaucaacugggagacccggccuguugggaaaaaaaggagagcccggacugcccggagacuuggguccugugggucagaccggacagagaggcagacagggcgauucagguauuccugguuauggccagaugggccgaaagggggugaaaggcccccggggcuuuccgggcgacgcaggccaaaaaggagacauuggaaaccccggcauaccagguggaccaggaccgaagggcuuccguggccuggcuuugaccgucgggcugaaaggggaggaaggaaguaggggccugcccggcccucccggccagcgugguaucaagggaauggcuggccaaccgguuuacagucaaugcgaccucaucagguuucugagggaacacucuccaugcuggaaggagaaaugccccgcauauccaacagaacuugucuucgcucuggauaacuccuaugacgugacggaagaauccuucaacaaaacacgggacaucaucaccuccauagugaacgaccucaauauucgcgagaauaacuguccggucggggcacgaguagcaaugguguccuacaacucuggcacuucauaucugauccgguggagugacuacaauaggaagaaacaguugcugcagcaacucagccagauuaaauaccaggacacaacugagccuagagauguugguaaugccaugcgcuucgugacuaggaaugucuuuaagagaacauacgcaggcgccaauguccgccggguagccguguuuuuuaguaaugggcagacagcuucuagaaguagcauuaucacugcaacuauggaguuuuccgcccuugacauuucuccaacaguguuugccuuugacgagagggucuuccucgaagcguuuggcuucgacaacacuggcacauuccaggugauccccgugccaccuaacggagagaaucagacacuugaaagauugcgucggugcgcgcuuugcuaugauaaguguuucccaaacgcgugcauccgggaggcuuuuuugccugaagauucuuacauggacgugguguuccugaucgacaauucaagaaacauugcgaaagacgaguucaaggcaguuaaagcccuaguaagcucagucaucgauaauuuuaauauagccucugauccauuaauuagugauucuggcgaccgaauugcccugcucucauauucacccugggagaguagccggcgaaaaauggguacagucaagaccgaguuugacuucaucacuuaugauaaccagcugcugaugaaaaaccacauacagacgagcuuucaacaguugaacggcgaagcaaccauuggcagagcgcuacuauggacgaccgagaaccucuuucccgaaacuccguauuuacgcaagcacaaagucaucuuugugguaucagccggcgagaauuaugaacgaaaggaguucgucaaaaugauggcccugagagccaagugucagggguaugugauauuugugauaucauugggcagcacuagaaaggaugauauggaagaauuagcaagcuauccucucgaucaacaccuuauucagcuuggacggauucauaagcccgaucugaauuauauugcuaaguuuuugaaaccauuccucuacagcguccggagagguuucaaucaguaucccccucccaugcuugaagacgccugccgacuuaucaaccuggggggggaaaacauccaaaacgacgguuuccaguuuguaaccgagcugcaggaagauuuccuuggggggaauggguucauaggccaagaacucaauucugggagagaguccccuuucguaaagacugaggacaacggcagcgauuaucugguguacuuaccuucucagauguuugaaccccagaagcucaugaucaauuacgagaaagaccagaaauccgcagagauugcuagccucacaucaggacaugaaaauuacggucggaaggaggagccagaucauaccuaugagcccggggacgugucgcuccaggaauacuauauggacguagcuuuuuugaucgaugccucacaaagagucggaucugacgaguucaaggaggucaaagcuuuuauuacuagcguccuggacuacuuccauaucgccccaaccccccucaccaguacacugggggaccgaguagcuguucucucuuacucaccuccugguuacaugcccaauacagaagagugcccgguguaucucgaauucgauuuggucacuuauaacuccauccaucagaugaaacaccaccugcaggauucccaacagcugaauggagauguguucauuggccacgcccugcaguggaccaucgacaauguguucgugggcaccccuaacuugcggaagaacaaagugaucuucgugauaucagccggagagaccaacucccuggauaaggauguucugcgcaacgugucucugagggccaagugucaggguuauuccaucuuuguguucagcuuuggcccuaaacacaacgauaaagagcuagaagaguuggccucacacccacuggaccaccaucuugugcagcuugggagaacacacaaaccggacuggaacuacaucaucaaauuugugaaaccguuugugcaccucauacguagggcuaucaauaaauacccaaccgaggacaugaaagcaaccugugugaauaugacaagcccuaaccccgagaaugguggcacagagaacaccguacuucuccugccaggcauauaugagauuaaaacugaaaauggggaucuuuucgacgaauucgacucucaagcacagcauuuguugguacuggguaauaaccacaguaguggguccgagacagcuaccgaccugaugcaaaaacucuaccugcuauucuccaccgagaagcuggcgaugaaggauaaagaaaaggcccaucuggaagaaaucucagccuuggucguagacaagcagcaagagaaggaggacaaggagauggaagccacugacauauag

SEQ ID NO: 98002 - RNA, 1674 nt, Artificial Sequence
  derived and/or modified sequence
auuggcagagccuugcucuggaccacagaaaaccuguucccugagacuccuuaccuucggaagcacaaagucauuuuugugguauccgccggcgagaauuacgagagaaaagaauucgugaagaugauggcuuugagggcaaagugucagggauauguuauuuucgugaucucccugggaaguacgagaaaagaugacauggaagaacucgcuaguuauccucuggaccaacaccugauacagcucgguagaauccacaaaccagaucuaaacuacaucgccaaauuccuuaagcccuuucucuauucuguccggcgcggauuuaaccaauauccaccgcccaugcuggaggacgcuugccggcucaucaaccugggcggcgaaaauauacagaaugauggguuccaauuuguuacagagcugcaagaggauuuccuggguggcaacgguuucauuggacaggaacugaacagcgggcgugaaucaccuuuugucaagacugaagacaacgguagcgacuaucugguuuaccuucccucccagauguucgaaccgcagaagcuaaugauuaauuaugagaaggaccaaaagucugccgagauugcaucucucacuucuggacaugagaacuacggccgcaaggaagagccugaucacacauacgagccuggggacgucucacugcaggaguauuacauggauguugccuuccuaaucgacgccucucagcgaguuggaucugaugaguuuaaagagguuaaggccuucaucaccaguguccuggauuacuuucacaucgcacccacgccucuaacaaguacccugggggauagaguagcuguuuugaguuacagcccaccaggcuacaugcccaauacagaggaguguccaguguaccuagaauucgaccuggugaccuauaauuccauccaccaaaugaaacaucaucuucaggacagucaacagcucaauggcgacgucuucauuggucacgcucugcaguggacaauugauaauguauuuguggggacaccaaacuugagaaaaaauaaggucauuuuugugauuuccgcaggcgagaccaacagucuggauaaagacgugcugaggaaugugagcuugcgcgccaaaugccagggguacagcauauuuguguucuccuucggacccaagcacaaugacaaagaacucgaggaacuagcuucgcauccucuagaucaucauuugguccagcucgggcgcacacacaagccugacuggaauuacaucauuaaauucgugaagcccuuuguacaucuuauucguagagccaucaacaaguauccaacugaggauaugaaagcaacaugcgugaacaugaccucuccuaacccagagaaugggggcaccgagaauacuguucuccugcugcccgguaucuacgagaucaaaaccgaaaauggcgacuuguuugacgaguucgauucgcaagcacagcaccuccuuguauuaggcaauaaucacagcuccgguucagagaccgccaccgaccugaugcagaagcuauaucuccuauuuucaaccgagaaauuagcaaugaaggauaaggaaaaggcacaccuggaggagaucagugcucuggucguugauaagcaacaggaaaaggaggacggcgaagacacucguucauccuag

SEQ ID NO: 98003 - RNA, 7848 nt, Artificial Sequence
  derived and/or modified sequence
augaagauucuccuuaucauauucguacugaucauauggaccgagacccuagcugaccagucuccaggacccggaccuguguaugccgacgugguguuucugguagacucaucugaucaccuaggacccaagucauuccccuucguaaagacuuuuauaaauaaaaugaucaauucucugcccauagaagcaaacaaguaccgcguagcauuggcccaguacucugacgaauuucauucugaguuucaccuuucuacuuucaagggccgcagcccaaugcucaaucaccucaagaagaauuuccaguuuaucggaggaagcuuacagaucggcaaggcucugcaagaggcucaucgaacauauuuuagugcgccuauaaacgguagggacagaaaacaauuuccaccuauauugguaguuuuagcuucugcagaauccgaggacgaagucgaggaagccuccaaggcucugcagaaagauggcgugaagauuauuucagugggggugcagaaggcaagugaggaaaaucuaaaggcaauggccaccagucacuuucauuucaaucugagaacaauacgggaccugaguaccuuuagccaaaacaugacacaaauaauuaaggauguuacuaaauacaaagaaggagccguagacgcagacaugcaggugcacuuucccauaucuugccaaaaggauagccuugccgaucugguuuuucuuguugaugagucccuuggcacgggagguaauuuaagacacuuacagaccuuccuggaaaacauuacuucuaguauggacgugaaagagaauuguaugcgcuuaggccugauguccuacucgaauucagccaaaacuaucucauuucugaagaguaguacuacccaauccgaauuucaacagcaaaucaaaaaucuguccauucagguaggaaagagcaacacaggugcagcuauugaucagaugcgccgagauggguucucagagucauauggaaguagacgggcacagggagucccccagaucgccguacuagugacgcacagacccagcgacgacgaggugcaugacgcagcccucaacuugaggcuggaagauguuaacguguucgcucugagcauucaaggggcuaacaacacccaacuggaagagauaguuucauacccccccgaacaaaccaucaguacucuaaagaguuaugcugaccuggaaacuuacucuaccaaauuucuaaagaaacuucagaacgaaauauggucacagaucaguacuuaugccgagcagagaaaccuggacaaaacuggauguguggauacuaaggaggcggauauucacuuccugaucgauggaucaucaagcauccaagagaaacaguucgaacagauaaaaagauuuaugcuggaggucacggagauguuuuccauuggacccgacaagguuagggucggugugguucaauacagugaugauacagaagucgaauuuuauaucacagauuauaguaacgacaucgaucuuagaaaagcuaucuucaacaucaaacaacugacgggcgguacauacacaggaaaggcccucgauuauauucugcagaucauuaaaaaugguaugaaagaucguaugucaaaggugccaugcuacuuaaucguccugacggauggcaugucaaccgaucgcgucguagaacccgccaaacggcuccgggcugagcagauuacagugcaugccgucggcauuggggcagccaauaagaucgaacuacaggaaauugcaggaaaggaagagcggguuucauuuggacagaauuucgacgccuugaaaagcauaaaaaacgaaguggugcgggagauaugugccgagaaagguugugaggauaugaaagcagacaucauguuccuggucgauucaaguuggagcauuggaaaugagaacuuucgaaaaaugaaaaucuucaugaagaaucuguugacuaaaauccagaucggagccgacaaaacacagauaggcgugguccaguucuccgauaagaccaaagaggaguuucagcuaaacagauacuuuacccagcaggagaucucugacgcgauugacaggaugaguuuaauuaacgaagggacacugacgggaaaggcacugaacuucgugggacaguacuuuacucacaguaaaggcgcaagauugggggccaaaaaauuucugauucugauuacugauggcgucgcucaagaugacguaagggacccugcccguauucuccgugggaaggacgucacuaucuucuccguggggguguauaaugccaaucgaucgcaguuggaagaaauuucuggagacucaucccuaguguuucacguagagaacuucgaucaucuaaaggcccuggagcgaaaauugauuuuucgagugugugcacugcaugauuguaagaggaucacucuccuugacguaguauuuguucuggaucacuccggcuccauuaagaagcaguaucaagaucacaugauuaaccugacaauccaccugguuaagaaggcugaugucggacgagaccgcgugcaguuuggagcccucaaauauucagaucaaccuaauauacuuuucuaccuuaacaccuacagcaauagaucugccauuauagaaaaccugaggaaacgacgagauacuggcggaaauacuuacacugccaaagcccugaagcaugccaaugcccuguucaccgaagaacacgguuccagaaucaaacaaaaugugaagcagaugcugaucgugauuacagacggagagagccaugaccaugaccaacugaacgacaccgcacuugaauuaaggaacaagggaauuacgauauuugccguagguguagggaaggcuaaccagaaggaacucgaagggauggccggcaacaaaaacaauaccaucuacguggauaacuucgacaagcucaaggacguuuuuacgcucguucaggaaaggaugugcacagaagccccggaggucugccaucuccaggaggcggauguuauauuccuuugcgacggcuccgaucggguguccaauucagacuuugugaccaugacgacguuuuuaagugacuuaaucgauaacuucgacauccagucucaacguaugaaaauagguauggcccaauucggauccaacuaucaaucuauuaucgagcuaaaaaauucucugacaaagacucaauggaagacacagauacaaaacgucucaaaauccgggggcuucccacgcauugauuuugcgcugaagaaagucagcaauauguucaaucuucaugcaggggguaggagaaacgccgguguuccucagaccuuagugguaauaacaagcggagacccaagauacgacguugccgacgcggucaaaacccugaaggaccuuggcaucugcgucuuggugcugggaaucggggaugucuauaaagagcaccuucuccccauuaccggaaacucagagaagauuauuacauuccaggauuuugacaaacugaaaaacguugacguuaaaaaacguaucauucgcgaaauaugccaaaguugcgguaagacaaauuguuucauggauaucgucguuggauucgacauuuccacacaugugcagggacaaccauuauuccaaggccauccccagcuagaguccuaccuuccuggaauucucgaagauauuagcuccaucaaaggcgucucaugcggagccggcaccgaggcgcaggucucacucgcuuuuaagguuaacagcgaucagggauuucccgcuaaauuucaaaucuaucagaaggccguauucgacucacugcugcaggugaacguuuccggaccuacccaccuaaacgcgcaguuucugagaucuuugugggauacguuuaaagacaagucugccucuagaggacaggucuuauuaauuuuuucggacggguugcaguccgaaucgaacauuauguuggagaaucagagugaucgccugcgcgaagcggggcuggaugcacuccuugucgucagccugaauacgaccgcccaccacgaguucucaagcuucgaguucggcaaacguuucgacuauagaacccacuugacaauugguaugagagaauuaggcaagaagcuaucgcaguacuugggcaacauugccgagcgcaccugcuguuguaccuucuguaaauguccaggcauccccgggccacacggcacgagaggcuugcaggcgaugaagggaucacaggguuugaagggaucgagaggccauagaggagaagacggcaauccuggugugcguggcgacacggguccccagggggacaaggguauagccggaugccccggagcuuggggucagaaaggacuaaagggauucucaggaccuaagggugggcacggggacgaugggauugaugguuuagacggcgaggaggggugccacggauucccagggauuaaaggggagaagggugauccaggcucucagggcucgccagggaguaggggcgcuccaggccaauacggcgagaaggguuuuccuggagauccggggaacccgggacagaacaauaacauuaagggacagaaggguucaaaaggcgagcaggggcggcagggacggagcgggcaaaaaggggugcagggguccccaaguagccgagggagucggggcagagaagggcagcggggacugcgcggugugaguggcgagccuggcaacccuggacccaccggaacacucggcgcagagggucuccaggguccacaggguucucaaggcaacccagggaggaaaggugaaaagggcucucaaggucaaaagggcccacaaggaaguccuggauugaugggagccaaaggcucaacuggaaggcccggauugcuagguaaaaaaggcgagccuggccuccccggggaucucggaccugugggacagacaggucaaaggggaaggcagggcgauucaggcauaccgggcuacgggcagaugggaaggaagggggugaaagggccacgcggguuuccuggugacgcgggacagaagggggacauaggaaauccugguauccccggcgguccaggcccaaaagguuucagaggacuagccuuaaccguuggauugaaaggcgaagaaggcagcagaggccuucccggcccuccggggcagagaggaaucaagggaauggccggccagccaguguauagccagugugaccuaauccguuuucuucgcgagcacuccuuaugcuccuuggaaaaguguccagccuacccgaccgaguugguuuuugcucucgauaauucuuacgacguaaccgaagaauccuucaacaaaacaagagauaucauuaccucuauagugaaugaccugaacauacgugagaauaauugcccaguuggcgccaggguugcuaugguaagcuauaacucagggacguccuacuugaucagguggucagauuacaauagaaaaaagcaacuucuccagcagcucucccagaucaaauaccaggacacaaccgagccaagagacguggggaaugcaaugcgguucguaacgcgcaacguguucaagcgcacauacgcaggagccaacguccgucgggucgccgucuuuuuuagcaauggacagacugcaucacgauccucuauuauaacugcgaccauggaguucagugcucucgauaucaguccaaccguuuuugcuuuugaugaacguguuuuccucgaagcguucggauuugacaacaccggaacuuuucagguaauucccguuccucccaacggugagaaucagacuuuagaaagacucaggaggugugcucuuugcuacgacaaguguuucccgaaugcauguaucagggaagcuuucuugccugaagauucuuauauggauguaguuuuucucaucgauaacucccgcaauaucgcaaaggacgaauucaaagcggucaaggccuuggugagcucuguuaucgacaacuuuaauaucgccagugauccauugauaucggauucaggcgauaggauugcgcuucucucuuacagcccuugggagucuucccgcagaaagaugggaacuguuaaaacagaauuugacuuuauuacauacgauaaccagcugcuaaugaagaaucacauccagaccucauuucaacagcuuaauggcgaagcuacaauuggccgcgcucugcuguggacaaccgaaaauuuguuuccugaaacaccuuacuuaagaaagcauaaagucauauucguggucagcgcaggagagaauuacgagcguaaagaauuugugaaaaugauggcccuucgagcaaagugccagggcuacgucaucuucguaauuagcuuaggcuccacgcggaaagacgauauggaagaacucgcuucauacccccuagaucagcaccugauccagcucggucguauccauaaacccgaucugaauuacauagcaaaauuccuaaaaccauuccuguacucgguacguagaggcuuuaaccaauacccacccccgaugcuggaagaugcuugucgccuuaucaauuuagguggugaaaauauucagaacgacggcuuccaauuugugacagaacugcaagaggacuuuuuagggggcaaugguuucauaggacaggaacugaauuccggaagggaaucaccguuugugaaaacagaggauaauggaucugauuaccugguguaucuacccucccagauguuugaaccccaaaagcugaugauuaauuacgagaaagaccaaaaaagugccgagauugcaagcuuaaccagcggacaugagaacuacgggaggaaggaagaacccgaucauacuuaugagccaggcgacguuucucugcaggaauauuacauggacguugcauuccuaaucgaugccagucagagagugggcucugacgaguucaaggaagugaaggcuuucauuacaucagugcuggacuacuuucauaucgcuccuacacccuugacuucaacccugggagacagaguugccgugcuuuccuacucuccacccggcuauaugccuaauaccgaagaaugcccuguuuacuuagaguucgaccuugucaccuacaauucuauccaccagaugaaacaucauuugcaagauucccagcagcuuaauggggauguguucaucgggcaugcccugcaguggaccauugauaauguguucgucggcacacccaaucuacgcaagaauaaagugauuuucgugauaucagccggagaaacuaauucacuggacaaggacguguugaggaacgugagccugcgcgcaaagugccagggguauucuaucuucgucuucucauucggacccaagcauaaugauaaagaacuugaggagcuugcuucgcauccacuagaccaccauuuaguacagcuggggagaacucacaaaccagauuggaacuacauuauaaaauucgucaagcccuucguacaucugauuaggcgagcaauaaauaaguaccccacagaagauaugaaagccaccugcguaaacaugacgucgccgaacccagaaaacggcggaaccgaaaauaccgugcuauuacugccuggcaucuaugagaucaagaccgaaaauggagaucuguuugaugaauuugacagccaagcacagcaccuccuggucuugggaaauaaccacucuucaggcucugagacagcaacugacuugaugcaaaagcuguaccuguuauuuucuaccgagaagcuugcuaugaaagauaaagaaaaggcccaccuggaggaaaucucagcucucgugguggauaagcagcaggagaaggaagacaaagagauggaagcgacagacauauag

SEQ ID NO: 98004 - RNA, 7848 nt, Artificial Sequence
  derived and/or modified sequence
augaaaauacugcuaaucauauuugugcugauaaucuggacugaaacccuggccgaucagucacccggccccggcccuguuuaugcagacguuguguucuugguagauucuucugaccauuuaggccccaagagcuuuccauucguaaagaccuuuauaaacaaaaugaucaauagucucccaaucgaagcaaacaaguacaggguggccuuggcacaauauuccgaugaauuccauuccgaguuccacuuaucuacauuuaaaggacggucacccaugcugaaccauuugaagaagaacuuccaguuuaucggggguucacugcagauugguaaagcccuacaagaagcucaccgaacauauuuuuccgcccccaucaaugguagagaccgcaaacaauucccaccaauccuggugguccuggcuagugccgaguccgaggaugagguggaggaagccagcaaagcacuccagaaagacggcguaaaaaucauaagcguuggcguucagaaagccagcgaagaaaaucucaaggcaauggcgacaagucacuuccauuuuaaccuacgcacaauaagagaccuaucaacuuucagccaaaacaugacccaaaucauaaaagauguaaccaaguacaaagaaggcgccguggacgcggacaugcaaguucacuuccccauuucgugccagaaggacuccuuagcugaccucguauuucugguggaugagagcuugggaacugggggaaaccugaggcaucuacaaacauuucucgaaaauauuacaucuagcauggauguuaaagaaaauugcaugcgacugggccuuaugucuuacucuaacucggcaaaaacuaucucuuuucucaaguccaguaccacacagucagaauuccagcagcaaauaaaaaacuugaguauccaggucggaaagucaaauacaggagcagcaauagaccagaugcgcagggacgguuuuucugagucguauggaucucgcagggcccaaggcgugccacagauugcaguguuggucacgcacagacccagugacgaugaaguccaugacgccgcccugaaccuucgccuugaagaugucaauguauuugccuuaucaauacaaggagccaauaauacccagcuggaggaaaucguuuccuacccuccugagcaaacaaucagcacucuuaagucuuaugcagaccuggagacuuacaguaccaaauuucugaaaaaacugcagaacgaaaucuggagucagauuucuacuuacgcagagcagcgaaacuuagacaaaacagguugcgucgauacuaaagaagcugauauccauuuccucauugacggcucuucaucuauacaggaaaagcaauucgagcagaucaagcgcuucauguuagaggugacagagauguuuucuaucgguccagacaaagugagagugggcgugguccaguacagcgaugauacggaaguugaguuuuacaucaccgauuauuccaaugacauugaucuccgaaaagccauuuuuaauauaaaacaacuaacaggaggaaccuacacagggaaagcgcuggauuauauccuccaaauuauaaaaaacgggaugaaagaucgaaugagcaaaguccccuguuaucugauugucuuaacagauggaauguccacagaucgagugguggagccugccaaacgauuaagagccgaacaaauuacaguucaugcagucgggauaggggcggcaaacaaaauagaacugcaggaaauagcuggaaaggaggagcgggucuccuuuggacaaaauuucgaugcacucaaaaguauuaagaacgaaguuguacgcgaaaucugugcugaaaaaggcugcgaggauaugaaggcugacauaauguuucuaguggauagcucauggagcauugggaacgaaaacuuuaggaaaaugaaaaucuuuaugaaaaaucuucucaccaagauucaaauuggggccgacaaaacccaaaucggagucgugcaguucagugacaagacgaaagaggaauuccaacucaauagguauuuuacucagcaagagauuucagacgcgaucgacagaauguccuugaucaaugaaggcacuuuaacuggaaaagcucugaauuuuguuggccaguacuucacucauucaaaaggagcucgacugggcgccaaaaaauuucugauacugauuacugacggcguggcccaggacgacguacgcgacccggccagaauuuugcgaggaaaagacgugacuauuuucagcguggggguuuauaacgcaaaucgcagccaguuggaggagauaaguggcgacaguagccuuguguuucauguggaaaacuuugaccaccuuaaagcccuugagcggaagcuuauuuuucgcgucugugccuugcaugauugcaaaaggaucacacuccucgauguuguauuugugcuggaucacucuggcaguauuaagaaacaguaucaggaucacaugauuaaccugaccauccaucucguuaaaaaggccgacgucggucgggaucgcguccaguucggcgcucuuaaauacuccgaccagccuaauauccucuuuuacuugaauacauacucuaaccguucugcuauuauugaaaaccuccguaagcgccgugacacaggaggaaauaccuauacagccaaggcucugaagcaugcgaacgcccuguuuaccgaggaacauggauccagaauaaaacaaaacgucaagcaaaugcucaucgugauaaccgacggagaaucacacgaucacgaccaacuaaacgacacagcucuugaacugagaaauaaggguauuacaauuuucgccgugggcguggggaaggcuaaccaaaaagaacuagaagggauggcuggcaacaagaauaauacaauuuauguggacaacuucgauaagcucaaggacgucuuuacucuggugcaggaacguaugugcacagaggcacccgaggucugccaucuccaggaagccgaugugaucuuuuugugcgacggaucugauagagucagcaauagcgauuucgugacuaugacuaccuuucucuccgaccucauagacaacuuugauauccagagccagagaaugaagaucgguauggcucaauuugggaguaacuaucagucuauuaucgagcugaaaaauagccuuacaaagacccaguggaagacccagauucagaaugugagcaagucaggcggcuuuccaagaaucgacuucgcccugaaaaaagugucuaacauguuuaauuugcacgcuggugggagacguaaugcagguguaccucagacgcucguaguuaucaccucaggggauccuagauaugauguugcugacgccguuaagaccuugaaagaccuuggaauuugugugcuggucuuaggaaucggcgauguuuacaaggagcaccuacuucccauuacaggcaauagcgagaagauuaucacuuuccaggacuuugacaagcucaaaaaugucgacgucaaaaaaagaaucauuagagagaucugccagucuugcggaaagaccaauugcuuuauggauauuguggucggcuucgacauuagcacgcacguccagggacaaccccucuuucagggacacccacagcuggaaaguuaucugccagguauucucgaggacauauccaguauuaaaggggucucguguggugccgguaccgaggcucaggucucccucgcuuucaaggugaauucugaucagggcuuuccugcuaaauuucaaauauaucagaaggcuguuuucgacucacuucuucagguuaacguuucuggaccaacgcauuugaaugcacaguuucuaaggagccugugggacaccuuuaaggacaaaagcgccagccgcgggcaggucuugcugaucuucuccgacgggcugcaauccgaauccaauaucaugcuggagaaucaaucggacaggcugcgcgaagcuggacuggaugcacugcuaguagugucccucaacaccaccgcacaccacgaguucucuagcuuugaauuugguaaaagauucgacuacaggacccaucugacaauugguaugagagagcuaggaaaaaaguugucccaguaucuaggaaacauugcugaacgaacauguuguugcacuuucuguaagugucccggaaucccugggccccacgggacacgagggcuccaggccaugaaaggaucacagggacucaaggggagccgcggacacagaggagaggacggcaauccuggcgugcggggggacacuggaccacaaggggauaaagggauagcaggcuguccaggcgcuuggggucagaaaggacuaaaagguuuuucaggcccgaaagggggccauggugacgauggaauugacggccuggauggggaagaagguugccaugguuuuccugguaucaaaggugagaagggggaucccggcucucagggcucgccaggaucaaggggagccccagggcaguacggagagaagggauucccuggagauccugggaacccuggccaaaacaauaacaucaaggggcagaagggcucaaaaggagaacagggccgacagggacgaagcgggcagaagggaguucaaggcucaccaagcaguagaggaaguagggggagggaaggacaacgggguuuacggggggugucaggagagcccgguaaccccggcccaaccggcacgcuaggggcagagggacuucagggaccgcagggcagucaagguaaccccggcaggaagggcgaaaaaggaagccagggccaaaaaggaccucaagguuccccugggcucaugggcgcgaaaggcaguacaggacgacccggauuguugggcaagaagggcgagccgggucugccaggggauuuaggcccaguaggacaaacuggccagcguggcaggcagggggauucagggauaccugguuaugggcagaugggacggaagggagugaaaggaccucguggauucccaggagacgcuggccaaaaaggugacaucggcaacccaggcauccccggcgggccuggaccuaaaggauuucggggccuagcuuugacuguaggccugaagggagaagaggggucgcgcggucucccagguccuccaggacagcgcgguaucaagggaauggccggccagccuguguacagccaaugugacuuaauacgcuuucugagggagcauucuccuuguuggaaagagaaauguccagcguauccaaccgaacuggucuuugcacuugacaauagcuacgacgugacugaagaguccuucaauaagacccgugauauuauuacguccaucgugaacgaccucaauauuagagaaaauaacuguccggugggagcucgaguggcaauggugucauacaacagcggcacaucuuaucugauacgcuggucugauuauaaccgaaaaaaacaacuguuacaacagcucucacaaauuaaauaucaagacacaacagagcccagagaugucggcaacgcaaugcguuucgugacccgaaacguuuuuaaaagaacauacgccggcgcuaauguacgcaggguggccgucuucuucaguaacgggcagaccgcuuccagauccucaauuauaacagcuacuauggaguucuccgcacuggauauuagcccuacggucuuugccuuugacgagagaguguuccuggaagcuuucggauucgauaauacaggaaccuuccaggugauccccguaccaccgaacggagaaaaccagacccuagaaagacugcggagaugugcccuauguuaugacaaaugcuuuccaaacgcguguaucagagaggccuuccuucccgaggauucauacauggaugugguguuucucauugauaacagccgaaauaucgccaaagaugaauuuaaggcugucaaagcccuagugagcucugucauugauaauuuuaauauugccucagauccccucauauccgauucaggcgaccggauugccuugcuuaguuacucaccaugggaaagcucacgcaggaaaauggggaccgucaaaacagaauucgacuucauaacauacgacaaucaacuacugaugaagaaucauauucagacaucauuccaacagcugaacggggaggccacaaucggacgggcucucuuauggacaaccgaaaaucuguuuccagaaaccccauaucugaggaaacacaaaguuauuuucguugugucagccggagaaaacuacgaacgaaaggaguuugucaagaugauggcccugagagcuaagugucaaggcuaugugauauucgucaucucucuaggguccacacgaaaagacgauauggaggaacuggcuuccuacccccuggaccagcaucugauucagcuagggcgcauccacaagccugauuuaaacuacauugccaaauuccuaaagccauuccuguauuccgugagacgcggauucaaucaguaccccccucccaugcuagaagaugccuguagacugaucaacuugggaggugagaacauucaaaacgauggauuucaguuugucaccgaacugcaagaggacuuuuugggcgggaacggauuuauuggccaggaacugaacaguggccgcgagucacccuuugucaagaccgaagauaacggaucugauuaccuggucuaccucccgagccagauguuugaaccacaaaagcugaugauuaauuacgaaaaagaucagaaauccgcagaaaucgcaucccugaccuccggacaugaaaacuauggccgaaaggaagagccagaccacacauacgagccuggagaugucagccuccaagaguacuauauggacgucgcauuucugauugaugccucccaacgcguuggaucagacgaguuuaaagaagucaaagcauucauaacuucagugcuugauuauuuccacaucgcaccuacgccucuuacuaguacccugggugaucguguggcuguuuuguccuauucgccuccaggauacaugccuaauaccgaagaauguccuguuuaccuugaguucgaccucgugacauacaacagcauucaucagaugaagcaucaccuccaagacagucaacaauugaacggagaugucuucauaggacacgcgcuacaauggacuauagacaacguguucgucggaacucccaaccugaggaaaaauaaagugauuuuugugauaagcgccggagaaacaaacagccucgacaaagacguucugcgcaauguuagccucagggcaaaaugccaaggauacucaauauucguuuuuuccuucgggccgaagcauaacgauaaagaacuggaagagcuugcuucucacccccuggaucaccaccuuguacaguuggggcgaacccacaagccagauuggaacuacauuaucaaguucgucaagccuuucgugcaccugauucgaagagcuauaaauaaauauccaacggaagacaugaaggcuacuuguguuaauaugacuucaccuaauccugagaauggcggcaccgagaacaccguguuacuccuucccggcaucuacgaaauuaagacugagaacggcgaccuauuugacgaauucgauucccaggcgcagcacuugcuuguauuagguaauaaucauucaucuggcuccgaaaccgcgaccgaucugaugcaaaaacuuuaccuccucuucaguacugaaaaacuggcuaugaaggauaaagaaaaggcgcaccuugaggaaauaagugcucucguuguagauaaacaacaagaaaaagaagauaaggagauggaagcuacagauauauag

SEQ ID NO: 98005 - RNA, 1674 nt, Artificial Sequence
  derived and/or modified sequence
auuggaagagcguugcucuggacaaccgagaacuuguucccagagaccccauauuugagaaaacacaagguuaucuuuguugugagcgccggcgaaaauuacgagagaaaggaauucguuaaaaugauggcucuaagggcuaagugccaaggcuacgugauauucgugaucagucucgguagcacaagaaaagacgauauggaagaacucgcuucuuacccacuggaccagcacuugauucaacucggacguauucacaagccugacuugaacuauauugcuaaauuccuuaagcccuuccucuacaguguccgaagaggguuuaaccaauacccaccuccuaugcucgaggacgcuugcagacuuauaaaccugggcggggagaacauccaaaaugacggcuuucaguuugugaccgaauuacaggaggauuuuuuaggcgggaacgguuuuauuggacaggagcugaauucaggacgcgaaucgcccuucgucaagaccgaagauaauggcucugacuaucucgucuaccuaccaagccagauguucgagccucagaagcugaugauuaacuaugaaaaagaccagaaauccgcagaaaucgcaucucuaacuucaggccacgagaacuacggacguaaagaagaaccugaucacaccuacgaaccaggggacgucagccuccaagaguauuacauggaugucgcuuuccugaucgacgcgucucagcgggucggauccgacgaauuuaaagaagugaaagcauuuaucacaagcguucuagacuauuuccauaucgccccaacacccuuaaccucgacccuaggagaccgaguggccguguuauccuauucaccccccggguauaugccuaacacagaggaaugccccguguaucuggaauuugaccucgugacguacaacucuauacaccagaugaagcaucacuuacaggauucccagcaacugaauggggauguauucauuggccaugcgcuacaauggacgauugauaacguauucguuggcacacccaaucugcggaaaaauaagguaauauucgugauuucugccggggaaacuaacucguuagauaaggauguacucagaaacgucagucuucgggccaaaugucagggauacuccaucuuuguuuuuuccuucgggccaaaacacaacgauaaagaguuagaggagcuagccucacaccccuuagaccaccaucuagugcaguugggccgaacacauaaacccgauuggaauuauaucauuaaauuuguaaaacccuuugugcaucuuauucgucgcgccaucaauaaguacccuacagaggacaugaaagccacgugugucaauaugacuucuccaaaucccgaaaauggcggaaccgagaacaccguguuacugcugcccggaauuuacgaaauaaagacagaaaacggugaucuauucgaugaauuugacucucaggcgcagcaucuacuugugcuggguaauaaccauuccuccgguucagaaacugcgacggaucucaugcagaaacuguauuuacuguucucuacugaaaaauuggcaaugaaagauaaggaaaaggcacaccuagaagaaauauccgcgcucguaguggauaaacagcaagagaaggaagauggcgaagauacaagaucaucauag

SEQ ID NO: 98006 - protein, 241 aa, Artificial Sequence
  derived and/or modified sequence
MAAEQGQILVIATAAVGGFTLLVILTLFFLITGRCQWYIKAKMKSEEKRRNHLQNGHLRFPGIKTYIDPDTYEDPSLAVHEFAKEIDPSRIRIERVIGAGEFGEVCSGRLKTPGKREIPVAIKTLKGGHMDRQRRDFLREASIMGQFDHPNIIRLEGVVTKRSFPAIGVEAFCPSFLRAGFLNSIQAPHPVPGGGSLPPRIPAGRPVMIVVEYMENGSLDSFLRLYPKAEYNGKQCSRYSI

SEQ ID NO: 98007 - protein, 285 aa, Artificial Sequence
  derived and/or modified sequence
MGGCEVREFLLQFGFFLPLLTAWPGDCSHVSNNQVVLLDTTTVLGELGWKTYPLNGWDAITEMDEHNRPIHTYQVCNVMEPNQNNWLRTNWISRDAAQKIYVEMKFTLRDCNSIPWVLGTCKETFNLFYMESDESHGIKFKPNQYTKIDTIAADESFTQMDLGDRILKLNTEIREVGPIERKGFYLAFQDIGACIALVSVRVFYKKCPFTVRNLAMFPDTIPRVDSSSLVEVRGSCVKSAEERDTPKLYCGADGDWLVPLGRCICSTGYEEIEGSCHGASKGRCF

SEQ ID NO: 98008 - DNA, 858 bp, Artificial Sequence
  derived and/or modified sequence
atgggcggctgcgaggtgagagagttcctgctgcagttcggcttcttcctgcccctgctgaccgcctggcccggcgactgcagccacgtgagcaacaaccaggtggtgctgctggacaccaccaccgtgctgggcgagctgggctggaagacctaccccctgaacggctgggacgccatcaccgagatggacgagcacaacagacccatccacacctaccaggtgtgcaacgtgatggagcccaaccagaacaactggctgagaaccaactggatcagcagagacgccgcccagaagatctacgtggagatgaagttcaccctgagagactgcaacagcatcccctgggtgctgggcacctgcaaggagaccttcaacctgttctacatggagagcgacgagagccacggcatcaagttcaagcccaaccagtacaccaagatcgacaccatcgccgccgacgagagcttcacccagatggacctgggcgacagaatcctgaagctgaacaccgagatcagagaggtgggccccatcgagagaaagggcttctacctggccttccaggacatcggcgcctgcatcgccctggtgagcgtgagagtgttctacaagaagtgccccttcaccgtgagaaacctggccatgttccccgacaccatccccagagtggacagcagcagcctggtggaggtgagaggcagctgcgtgaagagcgccgaggagagagacacccccaagctgtactgcggcgccgacggcgactggctggtgcccctgggcagatgcatctgcagcaccggctacgaggagatcgagggcagctgccacggcgccagcaagggcagatgcttctag

SEQ ID NO: 98009 - DNA, 858 bp, Artificial Sequence
  derived and/or modified sequence
atgggaggttgcgaagtgcgtgaatttctgttgcagttcggatttttcctgccactgttgacagcgtggccaggcgattgctcccatgtatctaacaatcaggtcgttctcctggataccactaccgttctgggtgaattgggctggaaaacgtatccgctcaatggatgggatgcaatcactgaaatggatgaacacaacagaccgatccacacttaccaggtctgtaacgtaatggagcctaatcagaacaattggttacgtaccaattggatttcgcgggatgccgcacagaagatttacgtcgagatgaagtttacactccgcgattgtaattccatcccatgggtgctgggaacgtgtaaagagacctttaatttattttacatggagagcgacgagagccacggcatcaagttcaagccaaaccagtacacaaaaatcgacacgattgcagctgatgagagctttacgcagatggacctgggcgacaggattctgaagctcaatactgagatccgcgaagtcggtcccattgagaggaagggtttttacttggctttccaggacattggagcctgtatcgccctggtctctgtgcgggtcttctataagaaatgtccattcaccgtacgaaatctcgccatgttccccgataccatccctcgggtcgactcctcctccctggtcgaggtgagaggtagttgcgtgaaatccgcagaggagcgtgacactcccaagctgtactgtggcgccgacggtgactggttggtcccactcgggcgctgtatctgctccacgggatacgaggagatcgaggggagctgccacggagcatctaaggggcgctgcttttag

SEQ ID NO: 98010 - DNA, 1082 bp, Artificial Sequence
  derived and/or modified sequence
ggccgggtggaggaggaagaggaggaggaggaagaagacgtggacaaggacccccatcctacccagaacacctgcctgcgctgccgccacttctctttaagggagaggaaaagagagcctaggagaaccatggggggctgcgaagtccgggaatttcttttgcaatttggtttcttcttgcctctgctgacagcgtggccaggcgactgcagtcacgtctccaacaaccaagttgtgttgcttgatacaacaactgtactgggagagctaggatggaaaacatatccattaaatgggtgggatgccatcactgaaatggatgaacataataggcccattcacacataccaggtatgtaatgtaatggaaccaaaccaaaacaactggcttcgtacaaactggatctcccgtgatgcagctcagaaaatttatgtggaaatgaaattcacactaagggattgtaacagcatcccatgggtcttggggacttgcaaagaaacatttaatctgttttatatggaatcagatgagtcccacggaattaaattcaagccaaaccagtatacaaagatcgacacaattgctgctgatgagagttttacccagatggatttgggtgatcgcatcctcaaactcaacactgaaattcgtgaggtggggcctatagaaaggaaaggattttatctggcttttcaagacattggggcgtgcattgccctggtttcagtccgtgttttctacaagaaatgccccttcactgttcgtaacttggccatgtttcctgataccattccaagggttgattcctcctctttggttgaagtacggggttcttgtgtgaagagtgctgaagagcgtgacactcctaaactgtattgtggagctgatggagattggctggttcctcttggaaggtgcatctgcagtacaggatatgaagaaattgagggttcttgccatggagcctccaaaggccgctgcttctagttggccatcttggccccaccccgaaacagtaacctttgaagaataaaagaaaaagcaaaagagtagcattactaaaatattaaacggttacattt

SEQ ID NO: 98011 - DNA, 858 bp, Artificial Sequence
  derived and/or modified sequence
atgggcggctgtgaggtgcgggagttcctgctgcagtttggcttcttcctgcccctgctgacagcctggccaggggactgcagccacgtgagcaacaaccaggtggtgctgctggacaccaccaccgtgctgggggagctgggctggaagacctaccccctgaatggctgggatgccatcacagagatggatgagcacaaccggcccatccacacctaccaggtgtgcaatgtgatggagcccaaccagaacaactggctgcggaccaactggatcagcagagatgctgcccagaagatctacgtggagatgaagttcaccctgcgggactgcaacagcatcccctgggtgctgggcacctgcaaggagaccttcaacctcttctacatggagagtgatgagagccacggcatcaagttcaagcccaaccagtacaccaagattgacaccatcgctgctgatgagagcttcacccagatggacctgggggaccgcatcctgaagctgaacacagagatccgggaggtgggccccattgaaaggaagggcttctacctggccttccaggacattggagcctgcatcgccctggtgtctgtgcgggtcttctacaagaagtgccccttcaccgtgaggaacctggccatgtttcctgacaccatcccccgggtggacagcagcagcctggtggaggtgcggggcagctgtgtgaagtctgctgaggagcgggacacccccaagctgtactgtggggctgatggagactggctggtgcccctgggccgctgcatctgcagcacaggctatgaggagattgagggcagctgccacggggccagcaagggccgctgcttctag

SEQ ID NO: 98012 - DNA, 858 bp, Artificial Sequence
  derived and/or modified sequence
atgggcggctgcgaggtgcgggagttcctgctgcagttcggcttctttctcccgttactgacggcatggccaggagactgcagccacgtgtccaacaaccaagtggtcctgcttgacacaactaccgtgttgggcgaactgggatggaagacctacccactgaatggatgggacgcaatcaccgaaatggacgagcacaatcgcccgatccacacctaccaggtgtgcaacgtgatggagcccaatcagaacaactggctgcgaacaaactggatttctcgtgatgcggcccaaaagatatatgtagagatgaaatttacccttagagactgcaatagcataccctgggtgctcggcacctgcaaagaaacatttaatttattctatatggaatcagacgaaagccatggaatcaagtttaagcctaaccagtatacaaagattgatacgatagctgccgacgagagctttacccagatggacctgggcgacaggatcctcaagctgaacactgagatcagggaagtgggccccattgagaggaaagggttttacctcgctttccaggacattggggcatgtatagccctggttagcgtacgggtcttctacaagaaatgtcccttcaccgtgcgcaatctagccatgttcccagacaccatcccccgggtggattcttcctccctggttgaagttcgcgggtcgtgtgtgaagagcgctgaggaacgggatacacctaagctttactgcggagccgacggagattggctggtgccattgggtaggtgtatctgctcaactggatatgaggaaattgaggggagctgccatggggcctctaagggaagatgtttttag

SEQ ID NO: 98013 - DNA, 858 bp, Artificial Sequence
  derived and/or modified sequence
atgggaggttgcgaggtacgtgagttcctgctccagttcggtttcttcttgcccttattgaccgcttggccaggtgattgtagccacgtttccaacaaccaagtggtgctgttggatacgacaactgttctgggggagttaggctggaagacatatcctctcaatggctgggacgctatcacagagatggacgagcataacaggccaattcacacttaccaggtgtgcaacgtaatggagcccaatcagaacaactggctgcggacaaactggatatcccgagatgccgcacagaagatctacgtggagatgaagtttaccctgcgagactgtaattctatcccctgggtccttggaacgtgcaaggaaacattcaatttgttctacatggagagtgatgagtcccatggaattaagtttaagcccaaccagtacactaaaatagacactattgccgcagatgagtcatttacccagatggacctgggcgaccgcattctgaagctgaatacagaaattcgcgaggttggtccgattgaaagaaaaggcttctatttggccttccaggacatcggcgcttgtatcgcgctggtctcagttcgagtgttctataagaagtgtcccttcacagtgcggaacctcgcaatgtttcctgatactatacctagagtcgactcttcatcacttgtggaagtaaggggatcctgtgtgaagtcagccgaggagcgcgacacgcctaagctgtactgcggcgctgacggagattggctggtgccgttaggccgatgtatctgttccaccggctacgaggagatcgagggaagctgtcatggggcatcaaaaggaaggtgtttctag

SEQ ID NO: 98014 - protein, 186 aa, Artificial Sequence
  derived and/or modified sequence
MKSDFYFQKSEPHSLSSEALMRRAVSLVTDSTSTFLSQTTYALIEAITEYTKAVYTLTSLYRQYTSLLGKMNSEEEDEVWQVIIGARAEMTSKHQEYLKLETTWMTAVGLSEMAAEAAYQTGADQASITARNHIQLVKLQVEEVHQLSRKAETKLAEAQIEELRQKTQEEGEERAESEQEAYLRED

SEQ ID NO: 98015 - DNA, 561 bp, Artificial Sequence
  derived and/or modified sequence
atgaagagcgacttctacttccagaagagcgagccccacagcctgagcagcgaggccctgatgagaagagccgtgagcctggtgaccgacagcaccagcaccttcctgagccagaccacctacgccctgatcgaggccatcaccgagtacaccaaggccgtgtacaccctgaccagcctgtacagacagtacaccagcctgctgggcaagatgaacagcgaggaggaggacgaggtgtggcaggtgatcatcggcgccagagccgagatgaccagcaagcaccaggagtacctgaagctggagaccacctggatgaccgccgtgggcctgagcgagatggccgccgaggccgcctaccagaccggcgccgaccaggccagcatcaccgccagaaaccacatccagctggtgaagctgcaggtggaggaggtgcaccagctgagcagaaaggccgagaccaagctggccgaggcccagatcgaggagctgagacagaagacccaggaggagggcgaggagagagccgagagcgagcaggaggcctacctgagagaggactag

SEQ ID NO: 98016 - DNA, 1316 bp, Artificial Sequence
  derived and/or modified sequence
acttccggcgtgtgcgtctggcgtccgcgcgctgcacaatggcggctctgaagagttggctgtcgcgcagcgtaacttcattcttcaggttcctgcttggctcgagtttgagtttacagcccctgcaagtaaatccaagagcctgttacagattggcggtcgtgccttatgaaatctgacttctacttccagaaatcagagcctcattcccttagtagtgaagcattgatgaggagagcagtgtctttggtaacagatagcacctctacctttctctctcagaccacatatgcgttgattgaagctattactgaatatactaaggctgtttataccttaacttctctttaccgacaatatacaagtttacttgggaaaatgaattcagaggaggaagatgaagtgtggcaggtgatcataggagccagagctgagatgacttcaaaacaccaagagtacttgaagctggaaaccacttggatgactgcagttggtctttcagagatggcagcagaagctgcatatcaaactggcgcagatcaggcctctataaccgccaggaatcacattcagctggtgaaactgcaggtggaagaggtgcaccagctctcccggaaagcagaaaccaagctggcagaagcacagatagaagagctccgtcagaaaacacaggaggaaggggaggagcgggctgagtcggagcaggaggcctacctgcgtgaggattgagggcctgagcacactgccctgtctccccactcagtggggaaagcaggggcagatgccaccctgcccagggttggcatgactgtctgtgcaccgagaagaggcggcagatcctgccctggccaatcaggcgagacgcctttgtgagctgtgagtgcctcctgtggtctcaggcttgcgctggacctggttcttagcccttgggcactgcaccctgtttaacatttcaccccactctgtacagctgctcttacccattttttttacctcacacccaaagcattttgcctacctgggtcagagagaggagtcctttttgtcatgcccttaagttcagcaactgtttaacctgttttcagtcttatttacgtcgtcaaaaatgatttagtacttgttccctctgttgggatgccagttgtggcagggggaggggaacctgtccagtttgtacgatttctttgtatgtatttctgatgtgttctctgatctgcccccactgtcctgtgaggacagctgaggccaaggagtgaaaaacctattactactaagagaaggggtgcagagtgtttacctggtgctctcaacaggac

SEQ ID NO: 98017 - DNA, 2569 bp, Artificial Sequence
  derived and/or modified sequence
aagctgcgtcacttccggcgtgtgcgtctggcgtccgcgcgctgcacaatggcggctctgaagagttggctgtcgcgcagcgtaacttcattcttcaggtaccgctgcggccgcgtagaggggacaggaccagagggagggaccgacgcggacagcgctgtggcccggcccacggcgcccgccttccttacgcgctcatctctcgtccgcccagctgggtcgcggcgtctcgctccggtcgggaggactgaggacagccccgcctccgccccctgggtcaagcccggcttccttttcagttcgtccatcttctagaaacgagtccccgagaccccgggctgccttcttggggctgctccgcctcctgaccagccctcgtcagccactcgaagtccctgaggagacgtggagaggaggagggacacggcatggggggagtccgggaagggagacgagcgtctgaagacgtcctcccgagggcagaaggggccgggggagctggcgcagggctctctacctagcgctgcaggctcctgggcgattgtagcgggaccgtcacacacaactggcacccaggccaggggtccagagctaaattctgcctgcaggagcggttattgtggcatccgtttctaaaaagtttaaaggcaacattttattttattttaatttttttgagacaagatctgcctctgtcgcccaggctggagtgcagtggcgagatctcagctcactgcaacctgtgcctcccggcttcaagcgattctcagcctcagcctcccgagtagctgggattgcaggcgcccgccaccacgcccggctaatttttttttttctttttgttttgtttgagactcagtctcgctctgttgcccaggctgaagtgcagtggggcgctctcggctcactgcaacctctgcctcccaggttcaagcgattctcctgcctcagcctcccgagtagctgggattacaggagcgtgccaccactccgggctaatttttgtgttttaagtagagatggggtttcaccatgttggtcaggcagatttcgaattcctgacctcaagtgatccacccgcctcggcctttatttacttatttttttttaatagacacggggtcatgttgccagccatgttgcccaggctggtcgtgaactcctgggctcaagtgatcctcccgccttgcccttggccttccaagtgctaggattacaggcgtgagccaccaacaccctgcctgaggcaacattttaaacttggtgtatgttgaaaatttcaaaacccctcagctgtcctgcatcctcatttaggttcctgcttggctcgagtttgagtttacagcccctgcaagtaaatccaagagcctgttacagattggcggtcgtgccttatgaaatctgacttctacttccagaaatcagagcctcattcccttagtagtgaagcattgatgaggagagcagtgtctttggtaacagatagcacctctacctttctctctcagaccacatatgcgttgattgaagctattactgaatatactaaggctgtttataccttaacttctctttaccgacaatatacaagtttacttgggaaaatgaattcagaggaggaagatgaagtgtggcaggtgatcataggagccagagctgagatgacttcaaaacaccaagagtacttgaagctggaaaccacttggatgactgcagttggtctttcagagatggcagcagaagctgcatatcaaactggcgcagatcaggcctctataaccgccaggaatcacattcagctggtgaaactgcaggtggaagaggtgcaccagctctcccggaaagcagaaaccaagctggcagaagcacagatagaagagctccgtcagaaaacacaggaggaaggggaggagcgggctgagtcggagcaggaggcctacctgcgtgaggattgagggcctgagcacactgccctgtctccccactcagtggggaaagcaggggcagatgccaccctgcccagggttggcatgactgtctgtgcaccgagaagaggcggcagatcctgccctggccaatcaggcgagacgcctttgtgagctgtgagtgcctcctgtggtctcaggcttgcgctggacctggttcttagcccttgggcactgcaccctgtttaacatttcaccccactctgtacagctgctcttacccattttttttacctcacacccaaagcattttgcctacctgggtcagagagaggagtcctttttgtcatgcccttaagttcagcaactgtttaacctgttttcagtcttatttacgtcgtcaaaaatgatttagtacttgttccctctgttgggatgccagttgtggcagggggaggggaacctgtccagtttgtacgatttctttgtatgtatttctgatgtgttctctgatctgcccccactgtcctgtgaggacagctgaggccaaggagtgaaaaacctattactactaagagaaggggtgcagagtgtttacctggtgctctcaacaggacttaacatcaacaggacttaacacaggc

SEQ ID NO: 98018 - DNA, 561 bp, Artificial Sequence
  derived and/or modified sequence
atgaagtccgacttttacttccaaaaatccgaacctcatagcctatctagcgaagctctaatgcgccgtgctgtgagcctcgtaactgactctacctctacctttctatcacagaccacatatgcactgatcgaagccatcacagagtacaccaaagctgtttatactctgacaagcttgtacaggcagtacacatctctgctcgggaagatgaatagcgaggaggaagacgaagtctggcaggttatcattggggcaagagctgagatgactagtaaacaccaagaatatctgaagttggagaccacatggatgacggctgtcggtttatccgaaatggctgctgaggccgcctaccagactggcgctgatcaggccagtattacagctaggaatcacatacagctggtgaaattgcaggtggaggaagtgcaccaactgtctaggaaagcagagactaaacttgcagaggcccagatagaagaactgcgccagaagacccaggaggaaggagaggagcgcgctgaaagcgaacaggaggcctacctgcgcgaggattag

SEQ ID NO: 98019 - DNA, 561 bp, Artificial Sequence
  derived and/or modified sequence
atgaagagtgatttctatttccagaagagtgagccccactctttgtccagcgaagccctaatgagaagagccgtgagtctggtgactgatagcaccagcacattcctcagtcaaacaacttatgcactgattgaggcgattacggagtatacaaaagcagtgtatactctgactagtttatatcgccagtatacttctttgctggggaaaatgaattccgaggaggaggacgaagtgtggcaggtgataatcggcgcacgcgctgagatgactagtaagcatcaggagtatctgaagctggaaactacttggatgactgccgtaggactctctgaaatggcggccgaggccgcctaccagaccggcgccgatcaggcttctattaccgcaaggaaccacattcagctggtgaagctgcaggtagaggaggttcaccagctttcgagaaaggccgagaccaagctggctgaggcacagatcgaggagcttaggcagaagacccaggaagagggcgaggaacgggccgagagtgagcaggaggcctatctgagggaggattag

SEQ ID NO: 98020 - DNA, 561 bp, Artificial Sequence
  derived and/or modified sequence
atgaagagtgacttctacttccagaagtctgagccccacagcctgagcagcgaggccctgatgagaagagctgtgtccctggtgacagacagcaccagcaccttcctgagccagaccacctacgccctgattgaggccatcacagagtacaccaaggctgtgtacaccctgaccagcctgtaccggcagtacaccagcctgctgggcaagatgaacagcgaggaggaggatgaggtgtggcaggtgatcatcggggcccgggcagagatgaccagcaagcaccaggagtacctgaagctggagaccacctggatgacagctgtgggcctgtctgagatggctgctgaggccgcctaccagacaggagctgaccaggccagcatcacagccaggaaccacatccagctggtgaagctgcaggtggaggaggtgcaccagctgagcaggaaggccgagaccaagctggccgaggcccagatcgaggagctgcggcagaagacccaggaggagggggaggagagagctgagagcgagcaggaggcctacctgagagaagattag

SEQ ID NO: 98021 - DNA, 561 bp, Artificial Sequence
  derived and/or modified sequence
atgaagagcgacttctacttccagaagagcgagccccacagcctgtcttccgaggcactgatgcggagggccgtgtcactggtgacagatagcacttccaccttcctatcccagactacgtatgccttgatcgaggccatcacggaatacacaaaggccgtatacaccctgacgtcattatataggcaatacacgagtctgctgggaaaaatgaacagtgaagaggaggatgaggtctggcaggtgattattggcgcccgtgctgagatgactagtaaacatcaggagtatctcaaactggaaaccacttggatgactgcagtggggctgtctgaaatggcggcagaagccgcctatcaaacaggggctgatcaagcttctattactgcaagaaatcacatccagctggtgaaactccaagtcgaagaggtgcaccaactcagcaggaaggccgagaccaaactggctgaagcacagatagaagagttacgccaaaagacacaagaagaaggtgaagagagagctgaatccgagcaggaggcgtacttgagggaagattag

SEQ ID NO: 98022 - DNA, 561 bp, Artificial Sequence
  derived and/or modified sequence
atgaagagcgacttctacttccagaagagcgagccccacagcctgtcatccgaagcactgatgagaagagccgtatctctcgtgaccgactcgacaagtacattcttatcccagaccacctatgcattgattgaggctattactgaatataccaaagctgtttataccctgacctccctctaccggcagtatacttccctccttggtaaaatgaatagcgaagaggaagacgaggtatggcaggtcatcattggcgcaagagctgagatgaccagtaagcaccaagagtatttaaagctggagactacatggatgacagctgtcgggttgtctgaaatggctgctgaggcagcctaccagacaggtgcggatcaagcgagcataacggcccgaaatcacatccaactcgtgaagctccaggtcgaagaggttcaccagctaagtcgcaaggcagagaccaaactggcggaggcacagattgaagagctgcgccagaaaacccaagaggagggtgaggaacgggcggagagcgaacaggaagcctatctcagggaggactag

SEQ ID NO: 98023 - DNA, 561 bp, Artificial Sequence
  derived and/or modified sequence
atgaaatccgatttttactttcaaaagtccgagccacactcactgtcctcagaagcactcatgcgaagagccgtgagcctggtcaccgattcgacttcgacgtttttgtctcagactacctatgctctgatcgaggccataacagagtacacaaaagccgtgtacaccttaacaagtctgtatcgtcagtacacatcactgctcggtaaaatgaattcagaggaggaggacgaagtctggcaggtcataatcggcgcacgagccgagatgaccagtaagcaccaggagtatctgaaactggaaacgacatggatgacagccgtgggtctttctgaaatggccgcagaggcagcctaccagaccggtgcggatcaggcctcaatcactgcccgaaaccacatccagcttgtgaagttgcaagtggaggaagtacaccagctgtcccgcaaggcggagaccaaactcgccgaggcacagattgaagaactcaggcagaaaacacaggaggagggggaggaacgtgcagaaagtgagcaggaggcctacctgcgagaagattag

SEQ ID NO: 98024 - DNA, 561 bp, Artificial Sequence
  derived and/or modified sequence
atgaagtccgacttctactttcagaaatcagaaccccactccctcagctcagaggctctgatgagacgggctgtaagcttggtcactgattcaactagcacgtttttatcccaaacaacttacgcattgatcgaagccataaccgaatacactaaggcagtgtacacactgacttcactgtatagacagtacaccagccttttaggcaagatgaattctgaagaggaagacgaagtgtggcaggtgatcatcggagcccgagctgagatgacatcgaagcaccaggagtatttgaaattggagactacttggatgaccgcggtgggcctgtctgagatggccgctgaggcagcttaccaaacaggtgcagaccaggcttctataacggctcggaaccacatccagttggtgaaactgcaggtggaggaagtccatcagctgtctcgtaaggcagagacgaaacttgccgaagcccaaattgaagaactgaggcaaaagacccaagaggagggtgaggagcgggcagaatcggaacaggaagcatatcttagagaggattag

SEQ ID NO: 98025 - DNA, 558 bp, Artificial Sequence
  derived and/or modified sequence
atgaagagcgacttctacttccagaagagcgagccccacagcctgagcagcgaggccctgatgcgccgcgccgtgagcctggtgaccgacagcaccagcaccttcctgagccagaccacctacgccctgatcgaggccatcaccgagtacaccaaggccgtgtacaccctgaccagcctgtaccgccagtacaccagcctgctgggcaagatgaacagcgaggaggaggacgaggtgtggcaggtgatcatcggcgcccgcgccgagatgaccagcaagcaccaggagtacctgaagctggagaccacctggatgaccgccgtgggcctgagcgagatggccgccgaggccgcctaccagaccggcgccgaccaggccagcatcaccgcccgcaaccacatccagctggtgaagctgcaggtggaggaggtgcaccagctgagccgcaaggccgagaccaagctggccgaggcccagatcgaggagctgcgccagaagacccaggaggagggcgaggagcgcgccgagagcgagcaggaggcctacctgcgcgaggac

SEQ ID NO: 98026 - DNA, 291 bp, Artificial Sequence
  derived and/or modified sequence
atgagcgagaaggtggactggctgcagagccagaacggcgtgtgcaaggtggacgtgtacagccccggcgacaaccaggcccaggactggaagatggacaccagcaccgaccccgtgagagtgctgagctggctgagaagagacctggagaagagcaccgccgagttccaggacgtgagattcaagcccggcgagagcttcggcggcgagaccagcaacagcggcgacccccacaagggcttcagcgtggactactacaacaccaccaccaagggcacccccgagagatag

SEQ ID NO: 98027 - DNA, 291 bp, Artificial Sequence
  derived and/or modified sequence
atgagcgaaaaggtggactggctgcaaagtcagaacggagtttgtaaagtcgacgtctacagccctggagataaccaggcccaggactggaaaatggacactagcactgatccagtgcgggtattatcttggttgaggcgggatctcgagaagtcgacagcagagttccaggatgtcagatttaagcccggcgagagcttcggtggggaaacgagcaactctggtgatccccacaaggggttcagcgtggactattataacacaaccactaaaggaacacccgagcgatag

SEQ ID NO: 98028 - DNA, 291 bp, Artificial Sequence
  derived and/or modified sequence
atgtctgagaaggtggactggctgcagagccagaatggagtgtgcaaggtggatgtgtacagccctggggacaaccaggcccaggactggaagatggacaccagcacagatcctgtgcgggtgctgtcctggctgcggcgggacctggagaagagcacagctgagttccaggatgtgcgcttcaagccaggagagagctttggaggagagaccagcaacagcggggacccccacaagggcttctctgtggactactacaacaccaccaccaagggcaccccagagaggtag

SEQ ID NO: 98029 - DNA, 291 bp, Artificial Sequence
  derived and/or modified sequence
atgagcgagaaggtggactggctgcagagccagaacggcgtgtgcaaagtggacgtgtacagcccaggggacaatcaggcccaagattggaagatggacacctccaccgatcccgtcagagtcttgtcctggttacgacgggacctcgagaagtcgaccgctgaatttcaagacgtccggttcaaacccggggagtctttcggaggcgaaacctctaattccggtgaccctcacaaaggattttctgttgactattataatacaacaacgaagggaacccccgagcggtag

SEQ ID NO: 98030 - DNA, 291 bp, Artificial Sequence
  derived and/or modified sequence
atgagtgagaaggtggattggttgcaatctcagaatggggtgtgtaaagtagacgtgtactcgcccggagacaatcaggcgcaggattggaagatggacaccagcaccgatcccgtgagggtactctcctggctgcgaagggaccttgaaaagtcaactgccgagttccaggacgtacgatttaagcctggggagtcctttggtggtgagaccagcaactccggggacccacacaagggcttctctgtcgattactacaacacaaccacaaaaggcactcctgagagatag

SEQ ID NO: 98031 - DNA, 528 bp, Artificial Sequence
  derived and/or modified sequence
aagaaacaagatcttgagctgagcaagaacatcccagcatcttcattgactttaaaagtatattctggagtcttccgtggttcactattccagtactacagagtcatttttatctgtgtctttccattgcagattccttatattacatggcaggaggggggtaaactgagggatagtgaagacaacaataaattaatcaagagctttcctcatatctcagaacctatcctctgtaagaatgtcagaaaaggttgactggttacaaagccaaaatggagtatgcaaagttgatgtctattctcctggagacaaccaagcccaggactggaaaatggacacctccacggatcctgtcagagtgctcagctggctccgcagagacctggagaagagtacagcagagttccaagatgttcggttcaaacccggagaatcatttggtggggaaacgtccaactcaggagacccacacaaaggtttctctgtagactattacaacaccaccaccaagggcactccagaaagatt

SEQ ID NO: 98032 - protein, 1327 aa, Artificial Sequence
  derived and/or modified sequence
MPSSLLGAAMPASTSAAALQEALENAGRLIDRQLQEDRMYPDLSELLMVSAPNNPTVSGMSDMDYPLQGPGLLSVPNLPEISSIRRVPLPPELVEQFGHMQCNCMMGVFPPISRAWLTIDSDIFMWNYEDGGDLAYFDGLSETILAVGLVKPKAGIFQPHVRHLLVLATPVDIVILGLSYANLQTGSGVLNDSLSGGMQLLPDPLYSLPTDNTYLLTITSTDNGRIFLAGKDGCLYEVAYQAEAGWFSQRCRKINHSKSSLSFLVPSLLQFTFSEDDPILQIAIDNSRNILYTRSEKGVIQVYDLGQDGQGMSRVASVSQNAIVSAAGNIARTIDRSVFKPIVQIAVIENSESLDCQLLAVTHAGVRLYFSTCPFRQPLARPNTLTLVHVRLPPGFSASSTVEKPSKVHRALYSKGILLMAASENEDNDILWCVNHDTFPFQKPMMETQMTAGVDGHSWALSAIDELKVDKIITPLNKDHIPITDSPVVVQQHMLPPKKFVLLSAQGSLMFHKLRPVDQLRHLLVSNVGGDGEEIERFFKLHQEDQACATCLILACSTAACDREVSAWATRAFFRYGGEAQMRFPTTLPPPSNVGPILGSPVYSSSPVPSGSPYPNPSFLGTPSHGIQPPAMSTPVCALGNPATQATNMSCVTGPEIVYSGKHNGICIYFSRIMGNIWDASLVVERIFKSGNREITAIESSVPCQLLESVLQELKGLQEFLDRNSQFAGGPLGNPNTTAKVQQRLIGFMRPENGNPQQMQQELQRKFHEAQLSEKISLQAIQQLVRKSYQALALWKLLCEHQFTIIVAELQKANELLQRSRQVQNKTEKERMLRESLKEYQKISNQVDLSNVCAQYRQVRFYEGVVELSLTAAEKKDPQGLGLHFYKHGEPEEDIVGLQAFQERLNSYKCITDTLQELVNQSKAAPQSPSVPKKPGPPVLSSDPNMLSNEEAGHHFEQMLKLSQRSKDELFSIALYNWLIQVDLADKLLQVASPFLEPHLVRMAKVDQNRVRYMDLLWRYYEKNRSFSNAARVLSRLADMHSTEISLQQRLEYIARAILSAKSSTAISSIAADGEFLHELEEKMEVARIQLQIQETLQRQYSHHSSVQDAVSQLDSELMDITKLYGEFADPFKLAECKLAIIHCAGYSDPILVQTLWQDIIEKELSDSVTLSSSDRMHALSLKIVLLGKIYAGTPRFFPLDFIVQFLEQQVCTLNWDVGFVIQTMNEIGVPLPRLLEVYDQLFKSRDPFWNRMKKPLHLLDCIHVLLIRYVENPSQVLNCERRRFTNLCLDAVCGYLVELQSMSSSVAVQAITGNFKSLQAKLERLH

SEQ ID NO: 98033 - DNA, 3984 bp, Artificial Sequence
  derived and/or modified sequence
atgcccagctcactcctgggggctgcaatgcccgctagcaccagcgccgccgcccttcaagaggccctggaaaatgcaggacgtctcattgatcgacaactgcaagaggataggatgtatcctgacctcagtgaattattgatggttagcgcacccaataatcccaccgtgtctggcatgagcgatatggactacccgctacagggacctggacttctgtccgtgcctaatctgcccgagatttccagcattcgaagagtgcccctcccacccgaactggtggagcagttcggccacatgcagtgtaattgtatgatgggagtctttccacctatctctcgggcgtggcttacgatcgactccgatatttttatgtggaattatgaagatggcggtgaccttgcctattttgacgggctgtcagagaccattctggcagtcggcttggtgaagcccaaggctggcatctttcaacctcatgttcggcatctactggtactggcaaccccagtcgacatcgtgattctcggattatcatacgcaaatctacaaacaggttcaggggtgttaaacgactctctctccggagggatgcagctgctgccggaccctttgtacagtctacccaccgacaacacatatctgctgacaatcacctccactgataacggccgcattttcctcgcaggcaaggacggatgtttgtacgaagttgcatatcaggctgaggctggatggttctcccagaggtgccgcaaaattaaccactccaagtcctctttgtcttttctggttccctctttgcttcagtttacatttagcgaggatgacccgatcttgcagatcgcaatcgacaattcgagaaatattctatatacacggagcgaaaagggagttattcaggtctatgacctggggcaagatggccaagggatgagcagggtggcgagcgtgtctcagaatgcaatcgtctcagcagctggtaatatcgctcgaacaatcgaccgctcggtattcaagcctatcgtgcagatcgctgtcattgagaactccgagagcctcgactgtcagctgctggctgtgacccatgctggagtgcggctgtatttttccacctgtccattccggcagccactggcccgcccaaataccctgactctcgtgcatgtaaggctccccccaggattttctgcctcatctacagtcgaaaagcctagcaaggttcacagagctctatacagcaaggggatcctacttatggctgcttccgagaatgaagataacgacattctgtggtgtgtcaaccacgacacattcccctttcagaagcctatgatggaaacacagatgaccgcgggggttgacggacacagctgggccctgagtgcaatcgatgagcttaaagtcgacaagatcattacaccgctgaacaaggaccatataccaatcaccgattctcccgtcgtagttcagcaacacatgcttcctcccaaaaagttcgtgttgctcagcgcgcagggatctttaatgttccataagctaagacccgtggaccagctacgacacctcctggtgtccaatgttgggggagacggcgaggagatagagcgtttctttaagttgcaccaagaggatcaggcctgcgcgacctgtctaatcttggcgtgctcaaccgccgcctgtgaccgagaggtctcagcgtgggcaacaagggcttttttcaggtatggtggagaggcacaaatgaggttccctaccaccctaccacccccaagtaacgtcgggccaattctgggctcccccgtctattccagttccccggttccctctggcagtccatatcccaatccgtcatttctcggaacgccttctcacggcattcagccaccagccatgagcacccctgtgtgtgccctgggaaatccagctacccaagctaccaacatgtcctgcgttacagggcccgagatcgtgtactccggcaagcacaatggtatatgcatatactttagtcgaatcatggggaacatttgggatgcaagtctcgtggtggagagaatctttaagagcggaaaccgggagattaccgctattgaatcttctgtcccatgtcagctgctagagagtgtgctgcaggaattgaagggactccaggaatttctggaccgcaattcacaattcgccggtggacctcttggaaaccctaacacaaccgccaaggtccagcagcgccttataggctttatgcggccggaaaacggaaatcctcagcagatgcagcaggagctccagaggaagttccatgaggcacagctatctgaaaagatttctctccaagctatacagcaactggtgagaaaatcgtaccaggccctggcactttggaagctcctctgtgagcaccagtttaccataattgtcgctgagctacagaaggctaacgagctgctgcagcgatctaggcaagttcaaaacaagaccgagaaggaacgtatgctgcgcgagtcccttaaggaatatcaaaaaattagtaaccaggttgacctgtctaatgtttgcgcccagtaccggcaggtaagattttacgagggcgtggtcgaactttcgctgactgctgctgagaaaaaggaccctcagggcctggggctgcatttttacaagcatggtgaaccagaggaggatattgttggccttcaggcatttcaggaaaggctcaactcatacaagtgcatcacggacacactgcaggaactggtgaaccagagtaaagctgctcctcaaagtcccagcgttcccaaaaaacccggacccccagtgctctcgtccgatccaaatatgctcagcaatgaggaagcagggcaccactttgagcagatgctgaaattaagtcagagatcaaaggatgaactctttagcatagccctgtacaactggctcatccaggtggacctggcagacaaactgttgcaggtagcttcaccattcctggagccccatctggtgaggatggccaaggtagaccaaaacagagtgcggtacatggacctgctgtggaggtactacgagaagaatcggtcctttagcaacgcagctcgagtcctctctcggcttgccgacatgcacagcacagagatctcactccagcagagactagaatatatcgctcgagcgatcctgagtgctaagagttcaaccgcaatctcgtcaattgcagcggacggcgaattcctccatgaactggaggagaagatggaagtggcccgaattcagctccagattcaggaaacgcttcaaaggcagtattcacaccatagctctgtccaggacgccgtaagtcagctagacagtgagctgatggatataactaaactgtatggagaatttgctgacccatttaagctggctgaatgcaagctggctattattcattgcgcaggttactctgatccaattcttgtgcagactttgtggcaagacatcatcgaaaaagagctgtcagactctgtgactctctcgtcctcagatcggatgcatgctctgagtcttaagatcgtgctgctggggaaaatatacgccgggacccctcggttctttcctctggatttcatcgttcagttcctggaacagcaggtctgtaccctgaactgggacgtaggcttcgtcattcagactatgaatgaaattggcgttcctttgccccgactgttggaagtctacgatcagctgtttaagtctcgcgaccccttctggaataggatgaaaaaaccactgcatcttctggactgtatacatgtactgctgatcaggtacgttgaaaatccatcacaggtgctgaattgcgaaaggcggcgctttacaaacctgtgcttggatgctgtctgcgggtatttggtagaattacaaagtatgagctcctctgtcgcagtccaggcaatcaccggtaatttcaagtccttgcaggcgaagttagagcgtctgcactag

SEQ ID NO: 98034 - DNA, 3984 bp, Artificial Sequence
  derived and/or modified sequence
atgcccagcagcctgctgggcgccgccatgcctgccagcaccagcgctgctgccctgcaggaggccctggagaatgccggccgcctgattgaccggcagctgcaggaggacaggatgtacccagacctgtctgagctgctgatggtgtctgcccccaacaaccccaccgtgtctggcatgtctgacatggactaccccctgcagggccctggcctgctgtctgtgcccaacctgcctgagatcagcagcatcagaagagtgcccctgcccccagagctggtggagcagtttggccacatgcagtgcaactgcatgatgggcgtcttcccccccatcagccgggcctggctgaccatcgacagcgacatcttcatgtggaactatgaagatggaggagacctggcctactttgatggcctgtctgagaccatcctggccgtgggcctggtgaagcccaaggccggcatcttccagccccacgtgcgccacctgctggtgctggccacccctgtggacatcgtcatcctgggcctgtcctatgccaacctgcagacaggcagcggcgtgctgaatgacagcctgagcggcggcatgcagctgctgcctgaccccctgtacagcctgcccacagacaacacctacctgctgaccatcaccagcacagacaatggccgcatcttcctggccggcaaggatggctgcctgtatgaggtggcctaccaggccgaggccggctggttcagccagcgctgcaggaagatcaaccacagcaagagcagcctgtccttcctggtgcccagcctgctgcagttcaccttctctgaagatgaccccatcctgcagatcgccatcgacaacagcaggaacatcctgtacaccaggtctgagaagggcgtcatccaggtgtatgacctgggccaggacggccagggcatgagccgggtggcctctgtgtcccagaatgccatcgtgtctgctgctggcaacatcgcccggaccatcgacagatctgtgttcaagcccatcgtgcagattgctgtgattgaaaattctgagagcctggactgccagctgctggccgtgacccacgccggcgtgcggctgtacttcagcacctgccccttccggcagcccctggcccggcccaacaccctgaccctggtgcacgtgcggctgcccccaggcttcagcgccagcagcacagtggagaagcccagcaaggtgcaccgggccctgtacagcaagggcatcctgctgatggccgcctctgaaaatgaagataatgacatcctgtggtgtgtgaaccacgacaccttccccttccagaagcccatgatggagacccagatgacagctggggtggatggccacagctgggccctgagcgccattgatgagctgaaggtggacaagatcatcacccccctgaacaaggaccacatccccatcacagacagccctgtggtggtgcagcagcacatgctgccccccaagaagtttgtgctgctgagcgcccagggcagcctgatgttccacaagctgcggcctgtggaccagctgcggcacctgctggtgtccaatgtgggcggagatggagaggagattgagcgcttcttcaagctgcaccaggaggaccaggcctgtgccacctgcctgatcctggcctgcagcacagctgcctgtgaccgggaggtgtctgcctgggccacccgggccttcttccgctatggaggagaggcccagatgaggttccccaccaccctgcccccacccagcaatgtgggccccatcctgggcagccctgtgtacagcagcagccctgtgcccagcggcagcccctaccccaaccccagcttcctgggcacccccagccacggcatccagcccccagccatgagcacccctgtgtgtgccctgggcaacccagccacccaggccaccaacatgagctgtgtgactggacctgagatcgtgtacagcggcaagcacaacggcatctgcatctacttcagccgcatcatgggcaacatctgggatgccagcctggtggtggagcgcatcttcaagagcggcaaccgggagatcacagccatcgagagctctgtgccctgccagctgctggagagcgtgctgcaggagctgaagggcctgcaggagttcctggacaggaacagccagtttgctgggggccccctgggcaaccccaacaccacagccaaggtgcagcagaggctcatcggcttcatgaggccagaaaatggaaacccccagcagatgcagcaggagctgcagaggaagttccacgaggcccagctgtctgagaagatcagcctgcaggccatccagcagctggtgaggaagagctaccaggccctggccctgtggaagctgctgtgtgagcaccagttcaccatcatcgtggccgagctgcagaaggccaatgagctgctgcagaggagccggcaggtgcagaacaagacagagaaggagaggatgctgcgggagagcctgaaggagtaccagaagatcagcaaccaggtggacctgagcaatgtgtgtgcccagtaccggcaggtgcgcttctatgagggcgtggtggagctgagcctgacagctgctgagaagaaggacccccagggcctgggcctgcacttctacaagcacggggagccagaagaagatattgtgggcctgcaggccttccaggagcggctgaacagctacaagtgcatcacagacaccctgcaggagctggtgaaccagagcaaggccgccccccagagccccagcgtgcccaagaagccaggcccccctgtgctgagcagtgaccccaacatgctgagcaatgaggaggccggccaccactttgagcagatgctgaagctgagccagaggagcaaggatgagctgttcagcatcgccctgtacaactggctgatccaggtggacctggccgacaagctgctgcaggtggccagccccttcctggagccccacctggtgaggatggccaaggtggaccagaacagagtgcgctacatggacctgctgtggagatactatgagaagaacagaagcttcagcaatgctgcccgggtgctgagccggctggccgacatgcacagcacagagatcagcctgcagcagaggctggagtacatcgcccgggccatcctgagcgccaagagcagcacagccatcagcagcattgctgctgatggagagttcctgcacgagctggaggagaagatggaggtggcccgcatccagctgcagatccaggagaccctgcagaggcagtacagccaccacagctctgtgcaggatgctgtgtcccagctggacagcgagctgatggacatcaccaagctgtatggagaatttgctgaccccttcaagctggccgagtgcaagctggccatcatccactgtgccggctacagcgaccccatcctggtgcagaccctgtggcaggacatcatcgagaaggagctgagtgacagcgtgaccctgagcagcagtgacaggatgcacgccctgagcctgaagatcgtgctgctgggcaagatctatgccggcaccccccgcttcttccccctggacttcatcgtgcagttcctggagcagcaggtgtgcaccctgaactgggatgtgggcttcgtcatccagaccatgaatgaaattggagtgcccctgccccggctgctggaggtgtatgaccagctgttcaagagccgggaccccttctggaacaggatgaagaagcccctgcacctgctggactgcatccacgtgctgctgatccgctacgtggagaaccccagccaggtgctgaactgtgagcggcggcgcttcaccaacctgtgcctggatgctgtgtgtggctacctggtggagctgcagagcatgagcagctctgtggccgtgcaggccatcactggaaacttcaagagcctgcaggccaagctggagcggctgcactag

SEQ ID NO: 98035 - DNA, 3984 bp, Artificial Sequence
  derived and/or modified sequence
atgcccagcagcctgctgggcgccgccatgcccgccagcaccagcgctgcggcactccaggaagctctggagaatgcagggcgcctcatcgatagacaactgcaggaggatcgaatgtatcccgacctaagcgaactgttaatggtcagcgctcctaacaacccaacggtgagcggaatgtccgacatggattaccctctacagggtcctggtttattgtcagtgcccaacctgccagagattagttctatcagaagagtaccacttccgccggagcttgtggaacaattcggacatatgcagtgtaactgcatgatgggggtctttcccccaatatcaagggcttggttaacaatagattcagacatctttatgtggaactacgaagatggcggggatttggcctacttcgatgggctttcagagactatcctggccgtgggtttggtcaagcctaaggccgggatctttcagccccatgttaggcacctgctagttctggcaactcccgtcgacattgttattctgggattgtcttatgctaatctccagactgggtcgggggtgttgaacgactcgctgtctgggggtatgcagttgctgccggacccgctgtacagcctccccaccgacaacacttacctgttgacaatcacatccactgacaacggccggattttcttagcaggtaaggacgggtgtctgtatgaggttgcttaccaggcagaggcagggtggttctcccagcggtgccgcaaaatcaatcattctaaatctagtctgtcatttcttgtcccctcgctgctgcaatttacattctccgaggacgacccaattttgcaaattgcgatagataactctcgaaatatcctgtataccagatctgagaagggcgttattcaggtctatgatttgggccaggacggccagggaatgagtcgggtggctagtgttagccagaatgctatcgtctccgcagccgggaatattgccaggaccatagaccggtctgtctttaagcctatcgtacaaatcgccgtcattgagaatagcgagtctcttgattgtcagctgctggccgtgacccatgccggggtcagactctattttagtacatgccccttcagacagcccctcgctcgacccaatactctgactctggtacatgtgcgtctgccacctgggttcagtgcaagcagcaccgtagagaagccaagtaaggtgcacagggctctctacagtaagggaattctgctgatggctgccagcgaaaacgaggacaacgacattctgtggtgcgtgaatcatgacacatttccattccagaagcccatgatggagacgcagatgacggccggggtggatggccactcctgggccctctctgccatcgacgagctaaaagtggacaagattattactcctctgaataaggatcacatacctataacagacagccccgtggttgtgcagcaacacatgcttcctcctaaaaagttcgtccttctgtctgcccagggcagcctgatgttccacaagttgagacccgttgaccagcttaggcatctcctggtctcaaatgttggcggcgatggagaggagatcgagcgatttttcaaacttcatcaagaggaccaagcctgtgcaacctgtctgattttggcttgctctactgctgcatgtgatcgcgaggtgtcagcctgggcaaccagggccttttttagatacggaggggaggcacagatgcgctttccgacaacactgccccctccaagcaatgttggccccatcctaggttcgcctgtatatagttcttccccagtgcctagcggatcaccatatcctaacccctcatttttaggcacgccttcccacgggatccagccacccgcgatgagtacccctgtatgcgctttaggtaatcctgcaacccaggccactaatatgagctgcgtaaccggacctgaaatcgtgtactctggcaagcataatggaatatgcatctacttcagcagaattatgggcaatatctgggacgccagcctggtcgtagagcgcatcttcaaatctgggaatagggaaattactgccatagagagctcagtgccttgccagttgctcgagtctgtgctgcaggagttgaaagggctccaggagttcctcgaccgaaatagccagttcgcaggcggcccgctcgggaatcccaacacaaccgctaaggttcagcaacgcctaatcggcttcatgcggcctgagaacggtaatccacagcagatgcagcaggaactccaaagaaaattccacgaagcccaactctctgaaaagatttccctgcaggccattcagcagctggtccgtaaatcttatcaggccttagcactgtggaagctgctttgcgaacatcaatttactatcatcgtcgccgagcttcagaaggccaacgaactgcttcagcgaagtaggcaagtgcagaataaaacggaaaaggagcggatgcttagagaatcgctgaaagaatatcagaagatcagcaaccaggtagatctgagcaacgtttgtgcccagtaccgccaggtgcgtttctacgaaggggtcgtggagctgtccctgaccgctgccgagaagaaggacccacaggggctgggcctccatttctacaaacatggggagcctgaggaggacatagtggggcttcaggcgtttcaggagcggctaaattcctacaagtgtatcacagacacactgcaagaactagtaaatcagagcaaagcagcaccccagtcacccagtgtccccaaaaaacctgggccccccgttctgtcatccgatccaaacatgctctccaacgaggaagccgggcaccatttcgaacaaatgctgaaactgtcccagaggagcaaggacgagttgttcagcatagccctctacaattggctcatccaggtggatctcgccgataaattactgcaggtggcctcaccatttttggagccacatctcgttagaatggccaaggtggaccaaaaccgggtcagatacatggatcttctctggcgttattacgaaaaaaataggtcctttagcaatgcagccagagtgctcagccgcctggcagacatgcactcaacggagatttctctgcagcagagactggagtacatcgcaagggctatcttatctgctaaatcttccaccgccatatctagtattgccgccgatggggagttcctccatgaactggaagaaaagatggaggttgctaggattcagctgcagatccaagagaccttgcaacggcaatactcccaccattcttcagtacaggatgcagtttcacagctggactctgaattgatggacatcactaaactttatggggagtttgccgacccgttcaagctcgctgagtgtaagttagccatcattcattgtgccggctactctgaccctatcctggtccaaactctatggcaagacataatcgagaaagagctgtcagacagtgtaaccctgtccagcagtgatcgaatgcatgccctttccctgaaaatcgtgctgctggggaagatatacgcgggtaccccccgattctttcctttagactttattgttcagttcctggaacagcaagtctgcactcttaattgggatgttgggttcgttatccagactatgaacgagatcggagtccccctgccccgcctgctggaagtgtacgatcagttgttcaaatcacgcgacccattttggaatagaatgaaaaagcccctgcacctgctggattgtatacatgtccttctcatcaggtatgtagagaatccatcacaggtccttaactgtgagaggaggcgatttacaaacctgtgccttgatgccgtttgcggctacctggtggagctccaatcgatgtcttcatctgttgcagtccaagctattaccggcaatttcaagtcgttgcaggcgaagctcgaacggctacactag

SEQ ID NO: 98036 - DNA, 4088 bp, Artificial Sequence
  derived and/or modified sequence
gcgcgcgcgccctaggcggcggatctaagctaacttcttggatcttttcttgtttctccttggtttttgactttttctggaccctggtgtctacgatttccgagatgccgtcttctttgttgggcgcggcgatgccggcctctacatctgccgcagccctgcaggaagctctggaaaatgctggacggctcatcgaccgtcagttgcaagaggaccgcatgtacccggacctttccgagctgcttatggtgtctgccccaaataatcccaccgtttctggcatgtcagatatggattatcctttgcaaggacctggtttgctgtccgtacccaaccttccagagatcagttccatccgaagagttcctctcccacctgaacttgttgagcagtttggacatatgcagtgtaattgcatgatgggtgtgttccctcctatcagcagagcttggctcacaattgacagtgatatattcatgtggaactatgaggatggaggagaccttgcctattttgatggacttagtgagactattcttgctgtggggcttgtgaagccaaaagcaggcatctttcaacctcatgtgcgacacctcctggttttggcgacccctgtagacatagtaattcttggactcagctatgctaatttgcaaacaggttctggagttcttaatgatagtttgtctggtggaatgcagttgcttccagatcctttatattctcttcctactgataatacttaccttttaacaataacttccactgataatggcagaattttcttggctggaaaggatggctgtttatatgaagtagcctaccaggctgaagcagggtggtttagccaaagatgtaggaaaataaaccactcaaagagctcactttctttccttgttccttccttgctacaattcacgttctcagaagatgatcctattcttcaaattgcaattgataattctagaaatattttatatacacgatctgagaaaggagtaatacaggtgtatgatttgggacaagatggacaaggaatgagcagagttgcctctgtgtcacagaatgccattgtctctgctgctggtaacattgctaggaccatcgatcgttctgtttttaaaccaattgtccaaatagcagtgattgaaaattctgaatcactggactgtcagttattggctgtcacacatgcaggtgttaggttatattttagcacttgtccattcagacagccattagcacggcctaatacactgacgctggttcatgtccgcttacctcctggattctcagcatcttcaaccgtggaaaagccttcaaaagtacatagagctctttatagtaaaggtattctattgatggcagcctcagaaaatgaggataatgatattttatggtgtgtcaaccatgatacttttcctttccaaaagccaatgatggaaacccagatgacagctggtgttgatggtcattcctgggctctttctgcgatagatgaattgaaagtagataaaataattacacctttaaacaaggatcatattccaataactgattcaccagttgttgtacagcagcacatgttacctccgaagaaatttgttctcctctcagcacaggggagccttatgtttcataaacttagacctgtagatcaactgaggcatctacttgtgagtaatgtgggaggagatggagaagagattgaaagattctttaaattacatcaggaagaccaggcttgtgcaacttgccttattcttgcttgctccactgctgcctgtgatagagaagtatctgcctgggctactcgggctttctttaggtatggtggtgaagcacagatgagatttccaaccactcttccgcctccaagtaatgttggtcccatcttggggtctcctgtctattctagttctcctgttcctagtggtagtccctatccaaatccatcctttttgggaacaccgtctcatggtatacagcctcctgccatgtcaactccagtgtgtgctctgggaaacccagcaactcaggccacaaatatgagttgtgtgactggaccagagattgtgtactctggaaaacacaatggtatttgcatttacttttctcggatcatgggaaacatttgggatgcaagcttagttgtggagagaatattcaagagtggcaacagagagatcactgcaattgaaagtagtgttccctgccaactgctagagtcagtgctacaagaactaaagggtttgcaggaatttctagacagaaactcccagtttgcaggaggaccattaggaaatccaaatactactgctaaagtgcagcagaggctgataggattcatgcgtcctgaaaacggaaatccccagcaaatgcaacaggaactgcagaggaagtttcatgaggctcaactaagtgaaaagatttcacttcaggcaattcagcagttggttcgaaaatcatatcaggctctggctttatggaaacttctttgtgaacatcaattcactatcattgtggcagaacttcagaaggcaaatgagcttctccagcgttcccgacaagttcaaaataagactgaaaaagaaagaatgttaagggaatcattaaaggaatatcaaaaaattagcaatcaagtggacctttccaatgtttgtgctcagtatagacaagtgagattttatgagggtgtggtggaactttctcttacggctgcagagaaaaaagatcctcaaggtcttgggcttcatttctataaacatggagaaccagaagaagacatagttggacttcaggccttccaagaaagattaaacagttacaaatgcattacagacacacttcaagaactggtaaatcaaagtaaggccgctcctcagtctcccagtgtacccaaaaaacctggtcctccagtgttgtcatctgatccaaatatgctgagtaatgaagaagcaggacatcattttgaacaaatgcttaaattgtcacagcgatccaaggatgagctctttagtattgccctttataattggctaatacaagtcgaccttgcagataagctgctacaggttgcttctccatttctggagccacatctagtccgaatggccaaagttgatcaaaacagagttcgttatatggatttactctggcggtattacgagaagaacagaagtttcagtaatgctgctcgtgtactgtccagactggctgacatgcatagcacagaaatttcacttcagcagcgactagagtacattgctcgagccattcttagtgccaaaagttccactgccatttcatcaatagctgccgatggtgaatttcttcatgaattagaagaaaaaatggaggttgctaggatccaacttcagatacaggagacactacaaaggcagtattcccatcattcttctgtacaggatgcagtttctcagctggattctgagctgatggacataactaagctttatggggaatttgctgacccatttaaacttgcagagtgcaaacttgcaataattcattgtgccggttattcagaccctatattggtgcagacactttggcaagatatcatagagaaagaattgagtgacagtgtgacattgagctcctcggatagaatgcatgctcttagtctcaagattgttctccttggcaaaatttatgctggcacaccacgcttctttcctttagattttattgtacagtttttagaacagcaggtttgtactttgaactgggatgtgggcttcgtaatacagacaatgaatgaaattggagtaccattacctagactactagaagtttatgatcagttgttcaaatcacgggatccattctggaacagaatgaagaagccactgcaccttttggattgtatacatgtattattgataagatatgttgagaatcccagccaagttttaaattgtgaaaggagaagatttacaaatctctgcctggatgctgtttgtggttaccttgttgagctccagtctatgagctcgtcagtagcagtacaagccatcactgggaattttaaatctcttcaagctaaattagaacggcttcattaa

SEQ ID NO: 98037 - DNA, 3984 bp, Artificial Sequence
  derived and/or modified sequence
atgcccagctccctgctgggggcagccatgcctgccagtacttctgcagctgcactgcaggaggcactggaaaatgccggaaggttaatcgaccggcagttacaggaggacagaatgtatcccgacttgagtgagttgctgatggtgtcagcacccaacaatcccacagttagtgggatgtcggacatggactatcctcttcagggcccagggttactgtctgtgcccaatttgccggagattagttcaattcgccgtgtccctctcccacccgaattggtcgaacaatttggccacatgcaatgcaattgtatgatgggggtctttcctcctatatcgcgggcttggctaaccattgacagcgatatcttcatgtggaattatgaagacggcggtgacttagcctattttgacggactgtccgaaaccatactggctgtcgggcttgtcaagcctaaggcaggaattttccagcctcacgtcagacatctccttgtgttagctaccccggtggacatagtcatcctcgggctgtcgtacgcaaacctccagacaggatcaggagtcctaaatgactcgctcagcgggggtatgcagttattgcccgatcccctttattctctccccactgacaatacatatctgttgacaattacttccactgataatggcaggatctttctggccggtaaagatggctgcctctacgaggtggcctaccaggctgaagcaggatggttttcccaaaggtgccggaagatcaatcacagtaagagctctctgtcatttctcgtaccctcactactgcagtttaccttctctgaagatgatccaatcttgcaaatcgccatagataatagcaggaacatcctctatactcggtccgagaaaggggtcatccaagtctatgacctggggcaagacgggcaggggatgagtcgcgttgctagcgtcagtcagaacgctattgtgtcagctgctggcaacattgcacgcacaatagatcggagcgtttttaagcccatcgtccaaattgcagtaatcgaaaacagtgagagtctcgactgtcagctcctggccgtgacccacgcaggcgtcaggctctatttcagcacatgtccgttcaggcagcctctggcaaggcctaatacactgaccctagtgcatgttaggctcccgccaggcttttcagccagctcaacagttgagaagccgagcaaggtccacagagccctttactcgaaggggatcttactgatggcagcctccgagaacgaggacaacgatatcctgtggtgtgtaaatcatgacacattcccatttcagaaaccaatgatggagactcagatgactgctggagtggatgggcactcatgggcactgtccgccatcgacgagctgaaagtcgataaaattatcacccccctgaataaagaccacattcctatcacggactcaccggtcgtggttcagcagcatatgctgcccccaaaaaagttcgtgttactgtcggcccaggggagcttaatgtttcataagttacgccctgtggaccagctccggcatctgctcgtgtccaacgtggggggagacggcgaggaaatcgaacggttcttcaaactgcatcaggaagatcaggcgtgtgctacatgcctgattctggcctgttctacagcagcctgcgaccgggaagtgagcgcttgggccaccagggcgtttttccgatacgggggagaggcccaaatgagatttcccacgacgcttcctccaccaagcaacgtcggacccatcctaggctcccccgtttactcatcttcacccgtcccaagcggaagcccctacccaaatccctcattcctgggaaccccgagtcacggtattcagcctcccgctatgagtacccccgtttgtgccctcggcaaccctgccactcaggctactaatatgtcatgcgtaacagggcctgagattgtgtactccggaaaacacaacggaatttgcatctactttagcaggattatgggcaatatttgggacgcctctctggttgtggagaggatcttcaagagcggaaaccgggagatcactgctatcgaatcctccgtcccatgtcagctgctggaatccgtgctacaggagcttaagggattgcaggaattcctggaccgaaacagtcagttcgccggaggacctctgggaaatccaaatactacggcaaaggtacagcaacgtttgatcggatttatgcggcctgaaaatggaaatcctcagcaaatgcaacaggagctacaaagaaagtttcatgaggcccaattgtcagaaaagatatccttacaggccatccaacagctagtccgaaaatcttatcaggccttagctctgtggaagctcctgtgtgagcaccagttcacaatcatcgtggcagagctccaaaaagctaacgaactgttgcagcgctcccgccaggtacagaataagacagagaaggagcgtatgttgagagagagtctcaaagagtaccaaaaaatcagcaaccaagtcgatctctctaatgtgtgcgcacagtaccggcaggttcggttttatgaaggagtcgtggagctgagcttaaccgccgctgaaaagaaagacccccaagggctgggactacacttctataaacacggcgagcccgaagaggacatagtagggctgcaggctttccaagaacgccttaactcttataaatgcataacagatactttgcaggagctggtgaaccaaagtaaggcagcaccccaatctccgtctgtaccaaagaaacctggcccacccgtgctgtcttctgatccgaacatgttgtccaacgaagaagccggtcaccacttcgaacagatgctcaaactgtcccaaagatcaaaggatgaactcttttctatcgctctctacaactggctgatccaagtggacctagctgacaaactacttcaggtggcttcccccttcctcgagcctcacctggtccgcatggcaaaagtcgaccaaaaccgtgtccggtacatggacctgctatggaggtattacgaaaagaaccggtcgttcagcaatgcagcgcgagtgctgtctcgcctggcagacatgcactccaccgagatttctcttcagcagcggctcgagtacatcgctagagccatcttaagcgctaaatcctcaacagctatctcatcaattgccgcagatggcgaattcctacacgagctcgaggaaaaaatggaggtggctagaattcagctacagattcaagaaactcttcagcggcagtactctcaccacagctccgtgcaggatgccgttagtcaattggactctgagctgatggatatcaccaaattgtatggagagttcgccgatccgtttaagctggcagaatgcaaattggcaattatccattgcgctgggtactctgaccctattctggtccagacgctctggcaagacataatagagaaagaactgtccgattccgtgaccctatcttcgagcgatcgcatgcacgctttaagtctcaaaatagtcctgctgggtaaaatttatgcaggcacccccaggtttttcccccttgacttcatagtgcagttcctggaacagcaggtatgtacattaaattgggatgtcggtttcgtgatccagactatgaacgagattggtgttcctctgccgagactattggaggtttatgaccagctgtttaagtctagggatccattttggaacagaatgaaaaagcccttacacctgctcgactgtattcacgtcctcttgattcgctacgtcgagaatccctctcaagtgctaaattgtgaaaggcggagatttacgaatctctgtctggacgctgtttgcggctacctcgtcgaactgcaatctatgtcttctagcgtcgcagtgcaagctattacaggcaattttaagagcctgcaagcaaaactggaacgtttgcattag

SEQ ID NO: 98038 - DNA, 3984 bp, Artificial Sequence
  derived and/or modified sequence
atgcccagcagcctgctgggcgccgccatgcccgccagcaccagcgccgccgccctgcaggaggccctggagaacgccggcagactgatcgacagacagctgcaggaggacagaatgtaccccgacctgagcgagctgctgatggtgagcgcccccaacaaccccaccgtgagcggcatgagcgacatggactaccccctgcagggccccggcctgctgagcgtgcccaacctgcccgagatcagcagcatcagaagagtgcccctgccccccgagctggtggagcagttcggccacatgcagtgcaactgcatgatgggcgtgttcccccccatcagcagagcctggctgaccatcgacagcgacatcttcatgtggaactacgaggacggcggcgacctggcctacttcgacggcctgagcgagaccatcctggccgtgggcctggtgaagcccaaggccggcatcttccagccccacgtgagacacctgctggtgctggccacccccgtggacatcgtgatcctgggcctgagctacgccaacctgcagaccggcagcggcgtgctgaacgacagcctgagcggcggcatgcagctgctgcccgaccccctgtacagcctgcccaccgacaacacctacctgctgaccatcaccagcaccgacaacggcagaatcttcctggccggcaaggacggctgcctgtacgaggtggcctaccaggccgaggccggctggttcagccagagatgcagaaagatcaaccacagcaagagcagcctgagcttcctggtgcccagcctgctgcagttcaccttcagcgaggacgaccccatcctgcagatcgccatcgacaacagcagaaacatcctgtacaccagaagcgagaagggcgtgatccaggtgtacgacctgggccaggacggccagggcatgagcagagtggccagcgtgagccagaacgccatcgtgagcgccgccggcaacatcgccagaaccatcgacagaagcgtgttcaagcccatcgtgcagatcgccgtgatcgagaacagcgagagcctggactgccagctgctggccgtgacccacgccggcgtgagactgtacttcagcacctgccccttcagacagcccctggccagacccaacaccctgaccctggtgcacgtgagactgccccccggcttcagcgccagcagcaccgtggagaagcccagcaaggtgcacagagccctgtacagcaagggcatcctgctgatggccgccagcgagaacgaggacaacgacatcctgtggtgcgtgaaccacgacaccttccccttccagaagcccatgatggagacccagatgaccgccggcgtggacggccacagctgggccctgagcgccatcgacgagctgaaggtggacaagatcatcacccccctgaacaaggaccacatccccatcaccgacagccccgtggtggtgcagcagcacatgctgccccccaagaagttcgtgctgctgagcgcccagggcagcctgatgttccacaagctgagacccgtggaccagctgagacacctgctggtgagcaacgtgggcggcgacggcgaggagatcgagagattcttcaagctgcaccaggaggaccaggcctgcgccacctgcctgatcctggcctgcagcaccgccgcctgcgacagagaggtgagcgcctgggccaccagagccttcttcagatacggcggcgaggcccagatgagattccccaccaccctgcccccccccagcaacgtgggccccatcctgggcagccccgtgtacagcagcagccccgtgcccagcggcagcccctaccccaaccccagcttcctgggcacccccagccacggcatccagccccccgccatgagcacccccgtgtgcgccctgggcaaccccgccacccaggccaccaacatgagctgcgtgaccggccccgagatcgtgtacagcggcaagcacaacggcatctgcatctacttcagcagaatcatgggcaacatctgggacgccagcctggtggtggagagaatcttcaagagcggcaacagagagatcaccgccatcgagagcagcgtgccctgccagctgctggagagcgtgctgcaggagctgaagggcctgcaggagttcctggacagaaacagccagttcgccggcggccccctgggcaaccccaacaccaccgccaaggtgcagcagagactgatcggcttcatgagacccgagaacggcaacccccagcagatgcagcaggagctgcagagaaagttccacgaggcccagctgagcgagaagatcagcctgcaggccatccagcagctggtgagaaagagctaccaggccctggccctgtggaagctgctgtgcgagcaccagttcaccatcatcgtggccgagctgcagaaggccaacgagctgctgcagagaagcagacaggtgcagaacaagaccgagaaggagagaatgctgagagagagcctgaaggagtaccagaagatcagcaaccaggtggacctgagcaacgtgtgcgcccagtacagacaggtgagattctacgagggcgtggtggagctgagcctgaccgccgccgagaagaaggacccccagggcctgggcctgcacttctacaagcacggcgagcccgaggaggacatcgtgggcctgcaggccttccaggagagactgaacagctacaagtgcatcaccgacaccctgcaggagctggtgaaccagagcaaggccgccccccagagccccagcgtgcccaagaagcccggcccccccgtgctgagcagcgaccccaacatgctgagcaacgaggaggccggccaccacttcgagcagatgctgaagctgagccagagaagcaaggacgagctgttcagcatcgccctgtacaactggctgatccaggtggacctggccgacaagctgctgcaggtggccagccccttcctggagccccacctggtgagaatggccaaggtggaccagaacagagtgagatacatggacctgctgtggagatactacgagaagaacagaagcttcagcaacgccgccagagtgctgagcagactggccgacatgcacagcaccgagatcagcctgcagcagagactggagtacatcgccagagccatcctgagcgccaagagcagcaccgccatcagcagcatcgccgccgacggcgagttcctgcacgagctggaggagaagatggaggtggccagaatccagctgcagatccaggagaccctgcagagacagtacagccaccacagcagcgtgcaggacgccgtgagccagctggacagcgagctgatggacatcaccaagctgtacggcgagttcgccgaccccttcaagctggccgagtgcaagctggccatcatccactgcgccggctacagcgaccccatcctggtgcagaccctgtggcaggacatcatcgagaaggagctgagcgacagcgtgaccctgagcagcagcgacagaatgcacgccctgagcctgaagatcgtgctgctgggcaagatctacgccggcacccccagattcttccccctggacttcatcgtgcagttcctggagcagcaggtgtgcaccctgaactgggacgtgggcttcgtgatccagaccatgaacgagatcggcgtgcccctgcccagactgctggaggtgtacgaccagctgttcaagagcagagaccccttctggaacagaatgaagaagcccctgcacctgctggactgcatccacgtgctgctgatcagatacgtggagaaccccagccaggtgctgaactgcgagagaagaagattcaccaacctgtgcctggacgccgtgtgcggctacctggtggagctgcagagcatgagcagcagcgtggccgtgcaggccatcaccggcaacttcaagagcctgcaggccaagctggagagactgcactag

SEQ ID NO: 98039 - protein, 532 aa, Artificial Sequence
  derived and/or modified sequence
MMALPGGRHLDSVTLPGQRLHLMQVDSVQRWMEDLKLMTECECMCVLQAKPISLEEDAQGDLILAGGPGPGDPLQLLLKRGWVISTELRRIGQKLAQDRWARVHSMSVRLTCHARSMVSEYSAVSRNSLKEMGEIEKLLMEKCSELSAVTERCLQVENEHVLKSMKACVSETLSMLGQHFGQLLELALTREVQALVRKIDASDNIYTTESTTGNLFSLTQEGAPLCRIIAKEGGVVALFKVCRQDSFRCLYPQALRTLASICCVEEGVHQLEKVDGVLCLADILTDNSHSEATRAEAAAVVAQVTSPHLPVTQHLSSFLESMEEIVTALVKLCQEASSGEVFLLASAALANITFFDTMACEMLLQLNAIRVLLEACSDKQRVDTPYTRDQIVTILANMSVLEQCASDIIQENGVQLIMGMLSEKPRSGTPAEVAACERVQQKAAVTLARLSRDPDVAREAVRLSCMSRLIELCRSPSERNSSDAVLVACLAALRRLAGVCPEGLQDSDFQQLVQPRLVDSFLLCSNMEESFV

SEQ ID NO: 98040 - DNA, 1599 bp, Artificial Sequence
  derived and/or modified sequence
atgatggctctccccggcgggcgacacctggatagtgtcacactcccagggcagcgactgcacctgatgcaggtcgacagtgtgcaaagatggatggaggatcttaaacttatgacagagtgcgaatgtatgtgcgtgctgcaggctaagccgatctcactagaggaggacgcccagggagatctgattctggccgggggccctgggcctggcgaccctttacagctcctgctgaagcgcggctgggtgataagtactgaattgagacggattggccagaaattagcccaggataggtgggcgcgggtccactcaatgagcgtacgcctcacttgtcacgctcgtagtatggtgtccgaatattcagccgtctctcgaaactctctgaaagagatgggagagatagaaaaactgttgatggaaaagtgcagcgagctatccgccgttacagagaggtgtctgcaggtggaaaacgaacatgtgctcaaaagtatgaaggcgtgcgttagtgaaacactatctatgctggggcaacactttgggcagctgttggagctcgctctgacgcgtgaagtgcaagccctagtgaggaagatcgacgctagtgacaatatttataccactgagagtacgaccggtaatcttttcagtctgacgcaggagggggccccattatgcaggatcatcgccaaggaaggcggagtagtcgcacttttcaaggtttgccgtcaggacagcttccgctgcctgtacccacaggccctacggacccttgctagtatctgctgtgttgaggagggagtgcaccagctcgagaaggtcgatggggtcctctgccttgccgatattctgactgacaatagtcacagcgaggcaacccgagcagaggcggctgctgtcgtggctcaggttacctcaccacatctgcccgtgacacaacacctgtcttccttcctcgagtctatggaggagattgtaactgcgttggtaaaactatgtcaggaggcatcctcaggcgaagtgtttttactagcttccgccgccttggctaacatcacattttttgacaccatggcatgtgagatgctgcttcagctgaatgctatacgcgtgctactggaggcgtgttccgacaagcaacgcgtggatacaccttacactagggaccagatcgtcaccatactggcaaatatgtctgttctcgagcagtgcgcttctgacattatccaggagaatggtgtccagctcataatgggtatgctatctgaaaaacctcggtccggaactcctgccgaagtagcagcttgcgagcgagtgcagcagaaggccgcagtcacattggcgcgtctaagtagggacccggacgtggccagagaagctgttcggctatcatgcatgtcgcgcctcatcgagctttgcagatctccctctgaacgtaactcaagtgacgctgtgttagttgcttgcctggccgctctcaggcgtctcgccggagtgtgccctgaggggctgcaggattccgacttccagcaattagtgcaaccgcggctagtggattccttcttgctgtgtagcaacatggaagagagctttgtctag

SEQ ID NO: 98041 - DNA, 1599 bp, Artificial Sequence
  derived and/or modified sequence
atgatggcactgccggggggcagacacctcgatagcgtcaccctgccgggtcaaaggctgcacctgatgcaggtggatagcgtgcagagatggatggaggacttgaagcttatgacagaatgcgaatgcatgtgcgttcttcaggctaaaccaatctccctggaagaggatgcccagggtgatctgatcctagccggaggccccggtccaggcgatccactgcagctcctgctgaaaaggggctgggtgatatctaccgagctccgacggatcggacagaaactggctcaggacaggtgggcccgggtccatagcatgagtgtgaggctgacatgtcacgcgaggagcatggtgagcgaatattcggcggtgagccgtaatagtctcaaggaaatgggggaaatcgaaaaattgctcatggaaaaatgctctgagctgagcgccgtgacagaaaggtgcctgcaggttgagaatgagcatgttttaaagtccatgaaagcctgcgttagcgagaccttatcaatgctgggacagcacttcggtcagctgctagaattagccctcacccgggaggtgcaggctctcgtacgcaaaatcgacgcttctgacaacatctatacgaccgagtcgactactggcaatctattctccctaacccaggaaggagcccccctctgtaggattatcgctaaggaggggggggtggttgctctatttaaggtctgtcgccaagactcattcaggtgcctgtatccccaggccctgagaacgctggcatcaatctgttgcgtggaagagggcgtgcatcagcttgaaaaggtggacggagtgctttgcctggctgatatactcactgacaattcccatagcgaagctacacgtgccgaggctgccgctgtggtcgcccaggtaacttcgccccatctgccagttactcagcacttgagttctttcctggagtctatggaggagattgtcacagcattagtcaagctttgccaggaggccagcagcggtgaggtgtttttgctggcatccgccgccctcgctaacatcactttttttgacactatggcttgcgaaatgctcctccagctgaatgccatcagggtcctgctcgaagcatgttctgataagcagagggtcgacacaccatacacgcgcgaccaaattgtgacaatcttagcaaatatgagcgtgctggaacagtgcgcatctgatattatacaggagaacggcgtgcagttaataatggggatgttaagcgagaaacctcgaagcggcacccctgcagaggtcgccgcgtgcgagcgggtccaacagaaagctgcggtaacactggctcggctgagtagagaccctgacgtcgcccgagaagccgttcggctgtcatgtatgagcaggctcatcgagttgtgtagatccccatcggaacggaactcatcagatgcggttctggtggcttgcctcgccgccctgcggaggctcgctggcgtttgcccagaggggctccaggatagcgatttccagcagctggttcagccaaggctggtcgacagcttcctgctctgtagcaatatggaagaatctttcgtttag

SEQ ID NO: 98042 - DNA, 1599 bp, Artificial Sequence
  derived and/or modified sequence
atgatggccctgcccggcggccgccacctggacagcgtgaccctgcccggccagaggctgcacctgatgcaggtggacagcgtgcagcgctggatggaggacctgaagctgatgacagaatgtgagtgcatgtgtgtgctgcaggccaagcccatcagcctggaggaggatgcccagggcgacctgatcctggccggcggccctggccctggggaccccctgcagctgctgctgaagaggggctgggtgatcagcacagagctgcggagaattggccagaagctggcccaggaccgctgggcccgggtgcacagcatgtctgtgcggctgacctgccacgcccgctccatggtgtctgagtacagcgctgtgtccaggaacagcctgaaggagatgggagaaattgagaagctgctgatggagaagtgcagcgagctgtctgctgtgacagagcgctgcctgcaggtggagaatgagcacgtgctgaagtccatgaaggcctgtgtgtctgagaccctgtccatgctgggccagcacttcggccagctgctggagctggccctgacccgggaggtgcaggccctggtgaggaagattgatgccagtgacaacatctacaccacagagagcaccaccggcaacctcttcagcctgacccaggagggcgcccccctgtgccgcatcatcgccaaggagggcggcgtggtggccctcttcaaggtgtgccggcaggacagcttccgctgcctgtacccccaggccctgcggaccctggccagcatctgctgcgtggaggagggcgtgcaccagctggagaaggtggatggagtgctgtgcctggccgacatcctgacagacaacagccacagcgaggccaccagggctgaggccgctgctgtggtggcccaggtgaccagcccccacctgcctgtgacccagcacctgagcagcttcctggagagcatggaggagatcgtgacagccctggtgaagctgtgccaggaggccagcagcggggaggtgttcctgctggccagcgctgccctggccaacatcaccttctttgacaccatggcctgtgagatgctgctgcagctgaatgccatccgggtgctgctggaggcctgcagcgacaagcagagggtggacaccccctacacccgggaccagatcgtgaccatcctggccaacatgtctgtgctggagcagtgtgccagtgacatcatccaggagaatggagtgcagctgatcatgggcatgctgtctgagaagcccaggagcggcaccccagctgaggtggccgcctgtgagcgggtgcagcagaaggctgctgtgaccctggcccggctgagccgggaccctgatgtggcccgggaggccgtgcggctgagctgcatgagccgcctcatcgagctgtgccgcagccccagcgagaggaacagcagtgatgctgtgctggtggcctgcctggccgccctgcggcggctggccggcgtgtgcccagagggcctgcaggacagcgacttccagcagctggtgcagccccggctggtggacagcttcctgctgtgcagcaacatggaggagagctttgtgtag

SEQ ID NO: 98043 - DNA, 1599 bp, Artificial Sequence
  derived and/or modified sequence
atgatggccctgcccggcggccggcacctggacagcgtgaccctgcccgggcagagactccaccttatgcaggtggattctgtccagagatggatggaagatctgaagctgatgaccgagtgcgaatgtatgtgcgtgctccaggctaagccgataagcctggaggaagatgcgcagggggatttgattcttgcaggaggcccagggcccggagatcctctgcagcttctcctcaaacgcggctgggtcatcagtaccgagttgcgcagaatcggtcagaagctggctcaggaccgatgggctagagtccattcaatgagtgtaaggttgacatgccatgcccgcagcatggtgtccgaatacagcgctgtgtcgcgtaactcattgaaggagatgggggaaatcgagaagctgctgatggagaaatgttctgagctgagcgccgtaaccgaacggtgcctgcaggtcgagaatgagcacgtcctgaagtccatgaaggcatgcgttagtgaaaccctgtcaatgctaggccagcattttgggcagctgctagaattagccctgacgcgcgaagtgcaagccttggtgcggaaaattgacgcttcagacaacatttacaccacagaaagcacaacgggcaatctgttttccctgacgcaagagggcgccccactctgccgcatcatcgccaaagaggggggggtggtggcgctctttaaggtgtgtaggcaagattccttccgatgcttatatccccaggccctgcggaccctggcttccatctgctgcgttgaagagggcgtacatcagttggaaaaagtagacggggtgctgtgtctagccgatatactcactgacaattctcactcagaagctacgcgcgccgaggcggctgctgtggttgcccaggtcacgtctccacacctcccggtgacccagcacctctctagttttctggagtcaatggaagagatcgtaaccgcactcgtcaagctgtgtcaggaggcatcaagcggggaggtgtttcttctggcttctgccgccctagccaacatcacgttctttgataccatggcctgcgaaatgttactacagctgaacgccatcagagttctgctcgaggcatgctctgacaagcaaagggtggatacaccatacacccgtgaccaaatcgtcaccattctggccaatatgtctgtacttgagcagtgcgcatcagatattattcaggaaaacggagtccagctgatcatgggtatgctgtcagagaagccccgatcgggaacaccggcagaggtcgccgcctgcgaacgagtgcaacaaaaagccgctgtcaccttggccaggctcagtagggaccctgacgtcgcgagagaggcagttagactgagctgcatgtctcgcttgattgagttatgtcgatctccctctgaaaggaactccagcgatgctgtactggtcgcctgtttggccgcactcaggaggctggccggcgtgtgcccagaaggcttgcaggactcggattttcagcaattagtgcagcctcgcctggtggactctttcctgttgtgtagcaatatggaagaaagttttgtctag

SEQ ID NO: 98044 - DNA, 1599 bp, Artificial Sequence
  derived and/or modified sequence
atgatggccctgcccggcggccggcacctggacagcgtgaccctgcctggccagcgcttacatctcatgcaggtggactctgtgcaaagatggatggaggacctgaagttgatgactgaatgtgaatgcatgtgcgtgctacaggcaaaaccaattagcctcgaagaagacgcccagggagacttaatcctggcaggcggcccgggacctggcgatcctcttcagctattgctcaagagaggctgggtgatctcaaccgagctccgacgcatcggtcagaaactggcccaggacaggtgggctcgcgtccattcaatgtcggtccgcctaacatgccacgcacgctccatggtctccgagtactctgcagtatctagaaatagccttaaagaaatgggggagatcgaaaaactgcttatggaaaaatgcagcgaactcagtgctgtcaccgagcggtgtctgcaggtagaaaatgaacacgtgctgaaatcaatgaaggcatgtgtctccgagacactctccatgttgggacagcactttggccagctactggagctcgcgctgaccagagaggtgcaggccttggtgcgaaagatagacgcctctgacaatatctatactacagagtcgacaactgggaaccttttttctctcactcaggagggtgcacccctgtgtagaattatcgctaaggaaggtggcgtggtagccctatttaaggtttgccggcaggattcatttcgttgcttataccctcaggcactgaggacattagctagtatatgctgcgtggaagagggggtgcatcaactagagaaggtcgacggcgtgctatgccttgctgacatcctgactgacaatagtcatagcgaggcgactcgagcggaggcagcggccgtggttgcccaggtgaccagcccccacttacctgtgactcaacacctgtcctctttccttgagagcatggaggagattgtgacagccctggtgaagctatgtcaggaggcgtcctccggtgaggtatttctgctggcctctgcagctctggcgaacatcaccttctttgacactatggcgtgcgaaatgctgctccagctaaatgctatccgagttctgctggaggcttgttcagacaagcagcgcgttgacacaccctacactagagaccagatcgtcactatcctggccaatatgtcagtgctcgagcagtgtgcctccgacatcatccaggaaaatggagttcaactgataatggggatgctatccgagaaacccagatctggaacacccgccgaggttgcagcatgtgagcgggtacagcagaaagccgccgtcacccttgctcgtctgtccagagatcccgacgtcgcaagagaggctgttagactatcctgtatgtcccgtctaattgagctgtgcaggagtccaagcgaacggaactccagcgacgccgtgttggtggcctgtcttgcggcattgagacgcttggctggagtgtgcccagaaggcctccaggatagcgactttcagcaactcgtccagccccggttagtcgactcattcctcctgtgttcgaatatggaggaatcatttgtttag

SEQ ID NO: 98045 - DNA, 1599 bp, Artificial Sequence
  derived and/or modified sequence
atgatggcactgcctggagggcgtcaccttgatagcgtgactctgcctgggcagcgtctgcaccttatgcaggtagatagtgttcagcgctggatggaagatctcaaactgatgactgagtgcgagtgcatgtgcgtgctgcaggccaagccaatttctctagaggaggatgcgcaaggggacctgatactggcaggaggcccaggcccaggagacccacttcaactacttctaaagagaggctgggtgatctccacagaactcaggcggatcgggcagaagctcgcccaggatcggtgggctcgggtacactccatgagcgtgagattgacatgtcacgccagaagcatggtttccgagtacagtgctgttagccgtaattccctaaaggagatgggtgagatcgaaaagctcctgatggaaaagtgttctgagttgtccgccgtcacagagagatgcctgcaggtggagaacgagcacgtcctcaagagcatgaaagcctgtgtttctgagaccttgtccatgcttggacagcatttcgggcagctgcttgaactagcgttgacccgcgaggtacaggccctggtgcggaagatcgacgccagcgacaacatttacacgactgagtccacaacaggaaacctgttttccttgacccaggagggggctccgctgtgtcgcatcatcgcaaaggagggtggagtggtggcactctttaaagtttgtcgtcaggacagcttccggtgcctctacccccaagccctccgaaccctagcctccatctgctgcgttgaagaaggggttcatcagttagagaaggtggacggcgtcctctgtctggctgatattcttacagacaattcccacagcgaggcaactagagccgaagctgccgctgtcgtggctcaggtgactagcccgcacttgcccgtcacacagcatctgagcagctttctcgaaagcatggaggagattgtgaccgctctggtcaaactgtgtcaggaggcctcttcaggagaagtgtttctgctggccagcgcggcactggcaaatattacattttttgatactatggcctgtgagatgcttcttcagctgaacgccattagggtcctccttgaagcatgcagtgacaagcagagagtggacaccccgtacacacgggatcagatcgtgactatcctggccaatatgtctgtgctggagcagtgcgccagcgacattattcaggaaaatggggtgcagctcattatgggaatgctcagcgagaaacctcggtccgggacacctgccgaggtagcagcctgcgagcgggtacagcaaaaagcagccgtcacattggctcggctcagccgcgatccagatgtcgcacgcgaagcggtgagacttagttgcatgtctcgcttgatcgaattgtgccgctctcctagtgaacgaaatagtagcgacgcagtgctagtggcatgcctcgctgcgttgcggagattagccggtgtgtgccctgaagggctgcaagattctgactttcagcagcttgttcagcctcgcctggtggactcttttctcctgtgctctaacatggaggaaagctttgtgtag

SEQ ID NO: 98046 - DNA, 1599 bp, Artificial Sequence
  derived and/or modified sequence
atgatggctctgcccggagggcgacacctggattcggttacactcccaggccagaggttacacctcatgcaggtggactccgtgcagcgctggatggaagacttgaaactgatgacagaatgcgaatgtatgtgcgttttgcaggccaagcctatctccttagaggaggacgcccagggcgatctgattctggcaggtggtccaggtcccggagatcctctgcaactattgctcaagaggggttgggtgatctccacagaacttagacggattggccagaagcttgcccaggacagatgggctcgggtgcatagcatgtcagttcggctcacatgtcatgcaaggagcatggtgtccgagtactccgcggtttcaaggaattctctcaaagaaatgggggaaatcgagaagctcctgatggaaaaatgttccgaactgagcgcagtgacagaaaggtgcttgcaggtcgagaatgagcatgtcttgaagtcaatgaaagcttgtgtctcagaaactttgtctatgctagggcagcattttggacaacttctggagttagccctcaccagagaagtgcaagctttggtgaggaagatcgatgcatccgataatatctatacgaccgagagcactaccggaaacttattttcattaacccaggaaggagctcccttgtgcaggatcattgccaaggaaggcggtgtggtggccctttttaaagtatgccgccaagacagcttccgttgtctttacccccaggctctgagaaccctggcatccatctgctgcgtggaagagggagtgcaccaactcgagaaggtggatggagtgttgtgcctcgctgacattctaaccgacaattcacattctgaggccactcgggctgaggccgctgccgtcgtggcccaggtcactagccctcacctgcctgtgacccaacacctaagctcctttctggagagtatggaagaaatcgtgacagccctggtcaagctgtgccaggaagcgtcgtctggcgaggttttcctgctggcctcagccgctctggctaatattacgttctttgatacaatggcctgtgaaatgttattacagctaaatgccattcgggtcctcctagaagcttgcagtgataagcagagagtcgacacaccctatacccgcgaccaaatcgttaccatcctggctaatatgtccgttctcgaacagtgtgcttcagacataatacaggagaacggagtgcagctgataatggggatgctgagcgagaagccgaggtctggaacccctgctgaggtcgccgcatgcgagagggtacagcaaaaggcagcagttacactcgccagactctcccgagacccagacgttgcacgggaggccgtcagattgagctgcatgtctcgtttgatcgagttgtgtagatcccctagcgagaggaacagttccgatgccgtgttggtggcctgtcttgccgcactgcgcaggctagcgggagtatgcccggagggactgcaagattctgatttccaacagctggttcagccacgactcgtagactccttcttgctttgttcaaatatggaagagtcttttgtctag

SEQ ID NO: 98047 - DNA, 1599 bp, Artificial Sequence
  derived and/or modified sequence
atgatggccctgcccggcggcagacacctggacagcgtgaccctgcccggccagagactgcacctgatgcaggtggacagcgtgcagagatggatggaggacctgaagctgatgaccgagtgcgagtgcatgtgcgtgctgcaggccaagcccatcagcctggaggaggacgcccagggcgacctgatcctggccggcggccccggccccggcgaccccctgcagctgctgctgaagagaggctgggtgatcagcaccgagctgagaagaatcggccagaagctggcccaggacagatgggccagagtgcacagcatgagcgtgagactgacctgccacgccagaagcatggtgagcgagtacagcgccgtgagcagaaacagcctgaaggagatgggcgagatcgagaagctgctgatggagaagtgcagcgagctgagcgccgtgaccgagagatgcctgcaggtggagaacgagcacgtgctgaagagcatgaaggcctgcgtgagcgagaccctgagcatgctgggccagcacttcggccagctgctggagctggccctgaccagagaggtgcaggccctggtgagaaagatcgacgccagcgacaacatctacaccaccgagagcaccaccggcaacctgttcagcctgacccaggagggcgcccccctgtgcagaatcatcgccaaggagggcggcgtggtggccctgttcaaggtgtgcagacaggacagcttcagatgcctgtacccccaggccctgagaaccctggccagcatctgctgcgtggaggagggcgtgcaccagctggagaaggtggacggcgtgctgtgcctggccgacatcctgaccgacaacagccacagcgaggccaccagagccgaggccgccgccgtggtggcccaggtgaccagcccccacctgcccgtgacccagcacctgagcagcttcctggagagcatggaggagatcgtgaccgccctggtgaagctgtgccaggaggccagcagcggcgaggtgttcctgctggccagcgccgccctggccaacatcaccttcttcgacaccatggcctgcgagatgctgctgcagctgaacgccatcagagtgctgctggaggcctgcagcgacaagcagagagtggacaccccctacaccagagaccagatcgtgaccatcctggccaacatgagcgtgctggagcagtgcgccagcgacatcatccaggagaacggcgtgcagctgatcatgggcatgctgagcgagaagcccagaagcggcacccccgccgaggtggccgcctgcgagagagtgcagcagaaggccgccgtgaccctggccagactgagcagagaccccgacgtggccagagaggccgtgagactgagctgcatgagcagactgatcgagctgtgcagaagccccagcgagagaaacagcagcgacgccgtgctggtggcctgcctggccgccctgagaagactggccggcgtgtgccccgagggcctgcaggacagcgacttccagcagctggtgcagcccagactggtggacagcttcctgctgtgcagcaacatggaggagagcttcgtgtag

SEQ ID NO: 98048 - protein, 308 aa, Artificial Sequence
  derived and/or modified sequence
MMALPGGRHLDSVTLPGQRLHLMQVDSVQRWMEDLKLMTECECMCVLQAKPISLEEDAQGDLILAGGPGPGDPLQLLLKRGWVISTELRRIGQKLAQDRWARVHSMSVRLTCHARSMVSEYSAVSRNSLKEMGEIEKLLMEKCSELSAVTERCLQVENEHVLKSMKACVSETLSMLGQHFGQLLELALTREVQVESHSVTRLECSGAISAQCNLRLLGSSDSPASASQALVRKIDASDNIYTTESTTGNLFSLTQEGAPLCRIIAKEGGVVALFKVCRQDSFRCLYPQALRTLASICCVEEGVHQLEK

SEQ ID NO: 98049 - DNA, 927 bp, Artificial Sequence
  derived and/or modified sequence
atgatggccctgcctggtggtcggcatctggactccgtgactcttccgggccagcggctccacctgatgcaggtggattctgtgcagaggtggatggaggatttaaagctgatgacagagtgtgaatgtatgtgtgtgctgcaggccaaacccattagtctggaagaggatgcacagggcgacctgatacttgctggagggcctggcccaggagatcctttgcagttactgctgaaaaggggctgggtcatctcgaccgagctgcggaggatcggtcagaaactggctcaggaccggtgggcgcgcgtgcactctatgtctgtgaggttaacctgtcacgcgcgttccatggtatccgagtatagtgcagtgtcccgcaactctctcaaagagatgggagaaatcgaaaagctgcttatggaaaaatgctctgagctgtctgctgtcacagagcgctgtctacaggtcgaaaatgagcacgttctcaagagtatgaaggcgtgcgtgagcgagacgttgtcaatgcttggccagcactttggacagctcctggagctcgccctaacccgtgaggtccaggtcgaatcacattctgtgacccgtctggaatgcagcggcgcgatcagtgcccagtgcaatcttcgcttactggggagcagcgacagccccgcaagtgctagccaagctctcgtgagaaagatcgacgctagtgacaatatttatactacagagtcgactacgggcaacctgtttagcctcacacaagaaggggcgccgctgtgcaggataattgcaaaggaggggggagttgtggcactgtttaaagtgtgccggcaggacagcttcagatgcctatacccccaggcgctaaggactctcgcttccatatgttgcgtggaagagggagtgcaccagttggaaaagtag

SEQ ID NO: 98050 - DNA, 2981 bp, Artificial Sequence
  derived and/or modified sequence
tctggagctccagctgcgccccgccaccactggccgctcgcactaccagcctgtctcgcacgctaaggtcacgaccgctgcaagcaggctttgctgcagattgggatcaacatgatggcactgcctggaggtcgccacctggactccgtcaccctgccgggtcagcggctacacctgatgcaggtggactcagtccagcgctggatggaagatctgaagctcatgaccgagtgcgagtgcatgtgtgtcctgcaggccaagcccatcagcctggaagaggatgcacagggtgacctcatcctggcaggtggccctggccctggagaccccctgcagctgctgctcaaacggggttgggtcattagcacagagctgcgcaggatcgggcagaagctggcccaggaccgctgggcacgggtgcacagcatgagcgtgcgtctgacctgccatgcccgctccatggtcagcgagtacagtgctgtcagcaggaactccttgaaggaaatgggcgagattgagaagctgctaatggagaaatgctcggagctctcggcagtcacagagaggtgccttcaggttgagaatgagcatgtcctgaagtcaatgaaggcctgcgtgagtgagaccctgagcatgctgggccagcactttggtcagctgctggagctggccctgacacgggaggttcaggtggagtctcactctgtcaccaggctggagtgcagtggtgcaatctcggctcaatgcaacctccgcctcctgggttcaagtgattcccctgcctcagcctcccaggcactggtgagaaaaattgatgcctcagacaatatctacaccacagagtccaccacagggaacctgttcagcctgacccaggagggggctcccttgtgccgcatcatagccaaggagggtggggtcgtagcactcttcaaggtttgccggcaggacagtttccggtgcttgtacccccaggcgctccgcacgctggcctccatctgctgcgtggaagagggtgtccaccagctggagaaggtggatggcgttctgtgcttggccgacatcctgaccgacaacagccactcagaggccacacgggctgaggctgcggctgtggtggcccaggtcacctccccacacctgcccgtcacccagcacctcagtagcttcctggagagcatggaggagatcgtgacagccctcgtcaaactgtgccaagaggcctcatcaggggaagtcttcctactggcctctgcggcccttgccaacatcacgttctttgacacaatggcctgcgagatgctcctgcagttgaatgccatccgtgttctcctggaagcctgcagtgacaagcagagagtggacacgccttacactcgggaccagattgtgaccatcttggcaaacatgtctgtcctagaacagtgtgcctctgacatcattcaggaaaatggggtccagcttatcatgggcatgctgtctgaaaaaccaaggtctgggactcctgctgaagtggcagcctgtgagcgagtccagcagaaagctgcagtgaccctggctcgtctcagccgagacccagatgtggcacgggaggccgtgcggctcagctgcatgtcccgtctcatcgagctctgcagatccccatcagagaggaacagcagtgacgccgtgcttgtggcctgcctggctgctctgcgtagattggctggggtctgccctgaaggcctccaggactctgactttcagcagttggtccagcctcggctggtggactccttcttactctgcagcaacatggaggagagttttgtgtagtgagtgtgggcgaagaaatacatttggctgttctcacaccccctctgactatgcaccagtgaacacatctgagtacataccagctctcctcatcttcttatttatacttaacttatttttgtgtgaaataaatggaggacaaaatcttagagcaacatcatcaaacagtctttggtccttgagaatcttctttgtgttttattttttgatttctgtagcttttcagttgcagatgttgaaattcgtaatgacaaatatgacaaattgtcatgggtgattccacttcatcttattttttctactctcactatacaatcttgcctcattttttaaaactttggaaccagaggatttcaactgcctagcaagttttttttttaagttggatttgctcttcccaaaaatctaaaatgaatttaataattgggtagaatatattggaaagaagtttctttttctttaataaatggaatcatataaaatgtatcccggattttcttattaaattgtattttaaactaggttcttgcttcccaggtttcattccccaaaaacttttccaaccattaaaagtacacacagaattgtcttgttttcataggtgtataaataggttaagttctgagtgacttagtgagaaaccaaagtgactttcaaaaatacacccaaaggcaccagaaaccctgcttcctttggcttctttgcttttgtgtaacctcctgttcacctcctggtgaatagaatcctcagatgaggcttattgaatgattgattcctcctcaaaagtatacttgaaagcagtggtgtgctgaagccagctcatgcccactcacaagggacaactgtgagaatttcttcctaactctgcactcagtgaccttgcgttggtagccatgagctacttcatgagccctcatgttgaaattggccatagtgggagtatttacaccacagaaattcacagatgctataaagcacagctttcgctttttttttttttagagagagctggtttaccaatttcactgcttgaaagtatcacaaaaatctggggatccttttgaaaatataaatgccatcatattgtgatataatttatacaatataatataattgtgtaaaatcatgattataataatgtttcaataaacatttcttaaattccc

SEQ ID NO: 98051 - DNA, 927 bp, Artificial Sequence
  derived and/or modified sequence
atgatggccctgcccggcggccgccacctggacagcgtgaccctgcccggccagaggctgcacctgatgcaggtggacagcgtgcagcgctggatggaggacctgaagctgatgacagaatgtgagtgcatgtgtgtgctgcaggccaagcccatcagcctggaggaggatgcccagggcgacctgatcctggccggcggccctggccctggggaccccctgcagctgctgctgaagaggggctgggtgatcagcacagagctgcggagaattggccagaagctggcccaggaccgctgggcccgggtgcacagcatgtctgtgcggctgacctgccacgcccgctccatggtgtctgagtacagcgctgtgtccaggaacagcctgaaggagatgggagaaattgagaagctgctgatggagaagtgcagcgagctgtctgctgtgacagagcgctgcctgcaggtggagaatgagcacgtgctgaagtccatgaaggcctgtgtgtctgagaccctgtccatgctgggccagcacttcggccagctgctggagctggccctgacccgggaggtgcaggtggagagccacagcgtgacccggctggagtgcagcggggccatcagcgcccagtgcaacctgcggctgctgggcagcagtgacagccctgccagcgccagccaggccctggtgaggaagattgatgccagtgacaacatctacaccacagagagcaccactggaaacctcttcagcctgacccaggagggcgcccccctgtgccgcatcatcgccaaggagggcggcgtggtggccctcttcaaggtgtgccggcaggacagcttccgctgcctgtacccccaggccctgcggaccctggccagcatctgctgcgtggaggagggcgtgcaccagctggagaagtag

SEQ ID NO: 98052 - DNA, 927 bp, Artificial Sequence
  derived and/or modified sequence
atgatggccctgcccggcggccggcacctggacagcgtgaccctgcccggacagagactgcacctgatgcaggtcgattctgttcagagatggatggaagacctgaagctgatgacagagtgtgaatgcatgtgcgtcctccaggcaaaaccgatttcacttgaggaagatgcccagggggacttaatactggccggaggaccgggcccaggggatcccctgcagttactactcaagcgcggatgggtcatatccactgaactgcggcgaattggccagaagctggcgcaagacagatgggctcgggtacatagcatgagcgttcgtctcacctgccacgctagatccatggtctccgagtattcagccgtgtctaggaactcacttaaagagatgggggagatcgaaaaacttttaatggagaaatgctctgaactgtcggcggtgaccgagagatgtctacaggtggagaacgagcacgtgctcaagtccatgaaggcgtgcgtttctgagacacttagcatgctgggacagcattttgggcaactgctcgaactggccctaactagagaggtgcaggtggaatctcatagcgtcactagattagagtgtagcggcgccatttctgctcaatgcaacctgagactgttgggtagctctgactcacctgcttctgcaagtcaggccctcgtgcgcaaaatcgatgcctctgataatatttacaccactgaatccactacaggcaacctgtttagcttgactcaggaaggggcgcctctatgtcggatcattgccaaggagggcggcgttgtggccttatttaaagtctgtcggcaggattcttttcgctgtctatatccccaggcgctaagaacgctagcctctatttgttgtgtggaagaaggcgtccaccagttggagaagtag

SEQ ID NO: 98053 - DNA, 927 bp, Artificial Sequence
  derived and/or modified sequence
atgatggccctgcccggaggaagacaccttgattctgtgaccttgccaggccagagactccacctgatgcaggtggattctgttcaacgctggatggaagatttaaaactaatgacagagtgcgagtgcatgtgcgtactacaggctaagcccataagccttgaggaggacgcccaaggtgatctgattctggccggaggccctggtccaggggaccctttgcagctcctgctaaagcgtggctgggtgatctcgaccgagcttagacggattgggcagaagctcgcgcaggaccgttgggctagggtgcatagcatgtccgttcgcctgacctgccatgcccgttccatggtgagcgaatactccgcagtgtcgcggaacagcctcaaagagatgggagaaatcgagaaactgctgatggagaaatgtagtgagctgtcagcagtcaccgaacggtgtctgcaggtagagaatgaacacgtgctgaaaagcatgaaagcgtgcgtctccgagacactgagcatgctgggccagcacttcgggcagctgctggagctggccttgactagggaggtgcaagttgagagccattccgtgactagactcgagtgttctggagccatcagcgcacagtgtaatctccgtctgctagggagtagtgatagtcccgcttctgcaagtcaggcccttgtgagaaaaatcgacgctagcgacaacatatacactaccgagtcaaccactggaaaccttttcagtctgacacaggagggtgcacctctatgtaggattattgccaaagaggggggtgtggttgctctgtttaaagtctgccggcaggacagcttccgctgtctgtacccccaggctctgcggaccctagcttcaatctgttgtgtggaggagggcgtgcaccagctcgagaagtag

SEQ ID NO: 98054 - DNA, 927 bp, Artificial Sequence
  derived and/or modified sequence
atgatggccctgcccggcggcagacacctggacagcgtgaccctgcccggccagagactgcacctgatgcaggtggacagcgtgcagagatggatggaggacctgaagctgatgaccgagtgcgagtgcatgtgcgtgctgcaggccaagcccatcagcctggaggaggacgcccagggcgacctgatcctggccggcggccccggccccggcgaccccctgcagctgctgctgaagagaggctgggtgatcagcaccgagctgagaagaatcggccagaagctggcccaggacagatgggccagagtgcacagcatgagcgtgagactgacctgccacgccagaagcatggtgagcgagtacagcgccgtgagcagaaacagcctgaaggagatgggcgagatcgagaagctgctgatggagaagtgcagcgagctgagcgccgtgaccgagagatgcctgcaggtggagaacgagcacgtgctgaagagcatgaaggcctgcgtgagcgagaccctgagcatgctgggccagcacttcggccagctgctggagctggccctgaccagagaggtgcaggtggagagccacagcgtgaccagactggagtgcagcggcgccatcagcgcccagtgcaacctgagactgctgggcagcagcgacagccccgccagcgccagccaggccctggtgagaaagatcgacgccagcgacaacatctacaccaccgagagcaccaccggcaacctgttcagcctgacccaggagggcgcccccctgtgcagaatcatcgccaaggagggcggcgtggtggccctgttcaaggtgtgcagacaggacagcttcagatgcctgtacccccaggccctgagaaccctggccagcatctgctgcgtggaggagggcgtgcaccagctggagaagtag

SEQ ID NO: 98055 - protein, 490 aa, Artificial Sequence
  derived and/or modified sequence
MMALPGGRHLDSVTLPGQRLHLMQVDSVQRWMEDLKLMTECECMCVLQAKPISLEEDAQGDLILAGGPGPGDPLQLLLKRGWVISTELRRIGQKLAQDRWARVHSMSVRLTCHARSMVSEYSAVSRNSLKEMGEIEKLLMEKCSELSAVTERCLQVENEHVLKSMKACVSETLSMLGQHFGQLLELALTREVQALVRKIDASDNIYTTESTTGNLFSLTQEGAPLCRIIAKVDGVLCLADILTDNSHSEATRAEAAAVVAQVTSPHLPVTQHLSSFLESMEEIVTALVKLCQEASSGEVFLLASAALANITFFDTMACEMLLQLNAIRVLLEACSDKQRVDTPYTRDQIVTILANMSVLEQCASDIIQENGVQLIMGMLSEKPRSGTPAEVAACERVQQKAAVTLARLSRDPDVAREAVRLSCMSRLIELCRSPSERNSSDAVLVACLAALRRLAGVCPEGLQDSDFQQLVQPRLVDSFLLCSNMEESFV

SEQ ID NO: 98056 - DNA, 1473 bp, Artificial Sequence
  derived and/or modified sequence
atgatggcgttgccaggcggaaggcatctggactcagtaacgctgccaggacagagactgcacctcatgcaggtcgattcagtgcagcgctggatggaggaccttaagttaatgacggagtgtgaatgcatgtgtgtgctgcaggctaagcccattagcttggaggaggatgcccagggggacctgatcctggctggcggccccgggcccggcgacccactacagctgcttcttaaaagaggatgggtcatttccacagaacttagacgaattgggcagaagctggctcaggataggtgggctcgagtccactctatgtctgtcaggttaacatgccacgcacgctctatggtatccgagtactcggcagtgtctcgaaactctctgaaggagatgggagagatcgagaagctgcttatggagaagtgctcagaacttagtgccgtcaccgaaagatgtctgcaagtggagaacgagcatgtcctgaaatcgatgaaggcctgtgtgtcggaaactctgtctatgcttggacagcattttgggcagctcctggagttggccctgacccgggaggtgcaggccctggtaaggaaaattgatgcatcggacaacatctacacaacagagtcaactaccggcaaccttttctctttgacccaggaaggcgctcccctctgtcgcattatcgctaaggtggatggcgtgctgtgcctggccgacattctcacagataacagccattccgaagccacgagagccgaggccgccgctgttgtggctcaggtcacaagtccacacctgcccgtcacacagcacctgtcatctttcctagagtcaatggaggaaattgtgacggctcttgtgaaattgtgtcaggaggcctcctccggcgaagtgtttctcttggcatccgccgcgttggccaacattacattctttgatactatggcttgcgagatgctgctgcaacttaatgctattagagtgctgctggaggcttgtagcgataaacagcgggtagataccccttatacccgcgatcagattgtaactatattagcaaacatgagcgttttggaacagtgcgcatcagacataatacaggaaaacggtgtgcaactcatcatgggcatgctgtcggaaaagccacgcagtggcactcccgccgaagttgcagcttgtgagagagtgcagcagaaggccgccgtgacactggcaagactatcgagagaccccgacgtcgcacgcgaggccgtacgactgtcttgtatgtcacggcttattgagctatgccgctcccctagcgaaagaaacagctctgacgccgtcctggtcgcctgtcttgcagccctccgtagattagctggcgtgtgtcccgaaggactgcaggacagtgatttccagcagctggttcaacctcggttagtggactccttcctcctgtgcagcaatatggaagagagttttgtgtag

SEQ ID NO: 98057 - DNA, 1473 bp, Artificial Sequence
  derived and/or modified sequence
atgatggctctaccagggggtcgtcatctcgatagcgtgacactgccggggcagcgtctgcacctgatgcaagtcgactcagtgcagagatggatggaagatctcaagcttatgacagagtgcgagtgtatgtgcgtgctccaggctaagcctatttcactcgaggaggacgctcagggagacctcatactggctggtggacccgggccaggcgatcccctgcagctgctacttaagcgcggttgggtcatttcaacagaacttcggcgcattggacagaaacttgcacaagatcgttgggctagggtacactctatgtccgtccgcctgacatgtcatgccaggagcatggtgtcggaatattccgcggtgtcacggaacagcctgaaggaaatgggagagatcgagaagttgctaatggaaaaatgctccgagctgtccgccgtgacggagcgctgcctccaggtggaaaacgagcatgttctcaagagtatgaaggcgtgcgtgtccgagaccctttctatgctcgggcagcatttcggccaacttctggagctcgctctgacacgggaggtccaggcgctggtgcggaaaatcgatgcctcagacaatatctatactacagagtcaacgacgggcaatcttttctcgctgacccaggagggagctcctctgtgcagaatcatcgctaaagtggacggcgttctttgtctcgccgatatcttgaccgacaattctcactccgaagcgactcgggctgaggctgcggcagtcgtggctcaggtcacgagtccacatcttcctgttactcagcacctgtcgagtttcctcgaatcaatggaagaaatcgtgaccgcccttgtcaaactttgccaggaagcctcgtctggcgaggtgttcctgctagcaagcgccgccctcgccaatatcacttttttcgataccatggcatgtgaaatgctgcttcaactgaacgccatacgcgtgttactggaggcctgttctgataaacagcgcgtggataccccttatacacgtgatcaaatcgtgacaattctggcaaacatgtctgttctcgaacagtgtgcctcagatattatccaggagaatggagtacagctgatcatgggaatgttgtcagaaaaaccccgttccggtactccagccgaggttgccgcctgcgaacgggtacaacagaaggcggctgtgaccctcgcccgcctctctcgggaccccgatgtggcccgggaggccgttagattgagttgtatgtcacggctgatcgagttatgcagatctccatccgaacgcaacagctctgacgccgttttagtggcctgccttgcggcgctacggaggcttgcaggagtgtgtcccgaaggtctgcaggattcagatttccagcagttggtgcagcctcggttagtggacagttttctcctatgctcaaacatggaggagtcctttgtatag

SEQ ID NO: 98058 - DNA, 1473 bp, Artificial Sequence
  derived and/or modified sequence
atgatggccctgcccggcggccgccacctggacagcgtgaccctgcccggccagaggctgcacctgatgcaggtggacagcgtgcagcgctggatggaggacctgaagctgatgacagaatgtgagtgcatgtgtgtgctgcaggccaagcccatcagcctggaggaggatgcccagggcgacctgatcctggccggcggccctggccctggggaccccctgcagctgctgctgaagaggggctgggtgatcagcacagagctgcggagaattggccagaagctggcccaggaccgctgggcccgggtgcacagcatgtctgtgcggctgacctgccacgcccgctccatggtgtctgagtacagcgctgtgtccaggaacagcctgaaggagatgggagaaattgagaagctgctgatggagaagtgcagcgagctgtctgctgtgacagagcgctgcctgcaggtggagaatgagcacgtgctgaagtccatgaaggcctgtgtgtctgagaccctgtccatgctgggccagcacttcggccagctgctggagctggccctgacccgggaggtgcaggccctggtgaggaagattgatgccagtgacaacatctacaccacagagagcaccaccggcaacctcttcagcctgacccaggagggcgcccccctgtgccgcatcatcgccaaggtggatggagtgctgtgcctggccgacatcctgacagacaacagccacagcgaggccaccagggctgaggccgctgctgtggtggcccaggtgaccagcccccacctgcctgtgacccagcacctgagcagcttcctggagagcatggaggagatcgtgacagccctggtgaagctgtgccaggaggccagcagcggggaggtgttcctgctggccagcgctgccctggccaacatcaccttctttgacaccatggcctgtgagatgctgctgcagctgaatgccatccgggtgctgctggaggcctgcagcgacaagcagagggtggacaccccctacacccgggaccagatcgtgaccatcctggccaacatgtctgtgctggagcagtgtgccagtgacatcatccaggagaatggagtgcagctgatcatgggcatgctgtctgagaagcccaggagcggcaccccagctgaggtggccgcctgtgagcgggtgcagcagaaggctgctgtgaccctggcccggctgagccgggaccctgatgtggcccgggaggccgtgcggctgagctgcatgagccgcctcatcgagctgtgccgcagccccagcgagaggaacagcagtgatgctgtgctggtggcctgcctggccgccctgcggcggctggccggcgtgtgcccagagggcctgcaggacagcgacttccagcagctggtgcagccccggctggtggacagcttcctgctgtgcagcaacatggaggagagctttgtgtag

SEQ ID NO: 98059 - DNA, 1473 bp, Artificial Sequence
  derived and/or modified sequence
atgatggccctgcccggcggccggcacctggacagcgtgaccctgccgggacagcgcctccatctcatgcaggtggactcagttcagcgctggatggaggacctgaagctcatgactgagtgcgagtgcatgtgcgtgctgcaggccaagccaatatcacttgaagaagacgctcagggcgatttgattctggcaggtggacctgggcccggcgacccactgcagctgctgctcaaaagaggctgggtgatctccaccgaactgaggaggattggccagaaactggctcaggatcgctgggccagagtgcattcaatgtccgtgagattgacttgtcacgccagaagtatggtgtctgaatatagcgctgtctccaggaactccctgaaagaaatgggcgaaattgaaaaactgctcatggagaagtgctccgagctttcagcagtgaccgaaaggtgtctgcaggtggaaaacgagcacgttctaaaaagtatgaaagcttgcgtctcagagactttgagcatgctggggcagcattttggtcaattgcttgagctcgcgctaactcgtgaggtgcaggcgctcgtgaggaagattgatgcttccgacaatatttacactaccgagtccaccacgggcaatctcttctcactaacacaggagggcgccccattatgtcggataatcgctaaagtggacggtgtactgtgcctcgccgatatcttaacggataactcccacagcgaagccacaagagcagaagccgccgcggttgtcgcccaggtgacctctccgcatttaccagtgacccagcatctgagcagttttctggagagcatggaggagattgtgactgcgctggtcaagctgtgccaggaggctagttctggtgaagtatttctcctggcgtctgcagcgctagccaatattactttctttgataccatggcatgcgaaatgcttctgcaactgaatgctattcgggtattgctggaggcttgctctgacaaacagcgtgttgacacgccctacacccgagaccaaattgttacgatactggcaaacatgtccgtgctcgagcagtgcgcttctgacatcatccaggaaaatggagtgcaactgatcatggggatgctcagcgaaaaaccacggtcaggcacacccgccgaagtagcagcttgtgaacgagtgcaacagaaagcggctgtcacccttgcacgcctgtccagggatcctgacgtagcccgcgaagctgtgcgcctgtcttgcatgagccgcctgatcgagctttgtaggagcccctctgagcggaacagttccgatgccgttctggtggcatgcctggctgcattgaggaggctggctggcgtgtgtcctgagggactccaggactctgattttcagcagctggtgcagccaagactggtcgatagctttttgctgtgttccaacatggaagagagttttgtgtag

SEQ ID NO: 98060 - DNA, 1473 bp, Artificial Sequence
  derived and/or modified sequence
atgatggccctgcccggcggccggcacctggacagcgtgaccctgccaggccaaaggttacatctgatgcaagtcgactctgtacagcggtggatggaggatcttaaactgatgaccgagtgtgagtgtatgtgcgtcctgcaggcaaaaccgatctcgctcgaggaagacgcacagggcgacctgattcttgctggcggcccaggccccggagaccctctacagctgctcctgaaacgcggctgggtaatatcgacagaacttcgacgaatcggacagaagctcgcacaagatcgatgggcccgcgtccacagtatgagcgtgcgactgacttgccatgcgaggtccatggtgtcagagtacagtgcagtcagccgtaacagcctgaaagagatgggtgagatagagaaactgcttatggaaaaatgtagcgagctttcggccgtgaccgaacgctgtctgcaggtggagaacgagcatgtactgaaaagcatgaaagcttgtgtttctgagactctaagcatgctcggacagcactttggccagcttttagaattggccctcactagagaggtccaggctctggtgcggaagatcgacgcttcggataacatttatacaaccgagtctactacgggtaacttattttccctgactcaggagggagcgcccctatgtaggattatcgccaaagtggacggcgtgctttgccttgcggatatcctgacagataactcccattcagaggcaactagggcggaggcagccgcagtagttgctcaagtaacaagtccccatctgcctgtgactcagcatctgtctagtttcttggagtccatggaagagattgtgaccgcgcttgtgaagctctgccaggaggcaagcagtggggaggtgttcctcctggctagcgccgctctggcaaacatcacctttttcgacactatggcctgtgaaatgctgctacagttgaacgccatccgagtgttgctggaggcatgctccgacaaacaacgagtggacaccccttatacccgcgatcaaatcgtaaccatcctggctaatatgtcggtgctagaacaatgcgccagcgatataatccaggagaatggggtccagctgatcatggggatgttatctgagaagccgcgaagcgggactcctgcggaagttgcagcttgcgagagagtgcagcagaaagctgccgtcacgctggcacgattatccagggaccccgacgtggctagagaggcggtgcgcctgtcatgcatgtcgcgcctgatcgagctatgccggagcccttctgagcgcaattcctccgacgccgtgctagtggcgtgtctggcggccttgagacgtctggctggtgtttgccccgaagggctgcaagattctgactttcaacagctggtgcagcctcggctggtggactcatttctcctgtgttctaatatggaggaatcattcgtctag

SEQ ID NO: 98061 - DNA, 1473 bp, Artificial Sequence
  derived and/or modified sequence
atgatggcgttgccaggtggaagacacctcgactcggtgaccctcccagggcagaggctgcacctcatgcaggtggattccgtccagaggtggatggaggatctgaagcttatgacagaatgcgaatgcatgtgcgtgcttcaggccaaacccatcagtctggaggaagatgcccagggggacttaatcttagcagggggtcctggaccgggagatccactgcagctcttactgaaaaggggctgggtaattagcaccgagctgagaaggattggccaaaagctggcccaggatcggtgggctcgggtccacagcatgagtgtgcggctgacttgccacgctcgctctatggtaagcgagtactccgctgtgtccagaaattccctcaaagagatgggagaaatagaaaagctgctgatggagaagtgtagtgaactctctgcggtgaccgaacgctgcctgcaggttgaaaatgaacacgtcctgaagagcatgaaggcatgtgtcagcgagacactgtcaatgttagggcagcatttcggtcaactgctcgagctcgctttgactagagaagtgcaggcccttgtacgtaagattgatgcttctgataatatttacacaactgagtctacgaccggcaacctcttttcactgacacaagagggagctccgctgtgccgaattatcgcgaaggtcgatggagtactctgcctcgccgatattctcacagataactcccactctgaagccacgagagctgaagctgccgctgttgtggcgcaggttacctcacctcatctccccgtgacacagcacctttcctctttccttgagagcatggaagaaatcgtgactgccttagtaaagctctgtcaggaggctagctctggagaggtgttcttattggcttcggctgccctggccaatatcaccttcttcgacactatggcttgcgaaatgctcttgcaactgaacgctataagggtactacttgaggcatgttcagacaagcagcgagtggacaccccctacacccgcgatcagattgtaactattcttgcaaacatgagcgttctggaacagtgcgcatccgatataatccaggagaatggagtccaactcatcatgggcatgctctctgagaagccaagatcaggaacacccgctgaggtggccgcatgcgagcgggtacaacagaaggccgctgtgaccctggccaggctgtccagggacccagatgtggctcgagaggctgtgcgcttgagctgcatgtctaggctgattgaactgtgcagaagtccttccgagagaaactcctccgatgccgtccttgtcgcctgtctggcggcactgagacgcctggcaggggtgtgtcctgaaggtttgcaagacagcgacttccagcaactggtccagccacggttagtggactccttcctactgtgttccaatatggaggaaagcttcgtgtag

SEQ ID NO: 98062 - DNA, 1473 bp, Artificial Sequence
  derived and/or modified sequence
atgatggccctgcctggaggacgtcaccttgatagcgtgacccttccagggcagcggttgcacctgatgcaggttgatagcgtccagagatggatggaagacctgaaactaatgaccgaatgcgaatgtatgtgcgtgctgcaggcaaaaccaatctcccttgaggaagatgcccagggagatctaattctggccggaggtcctgggcctggagaccctttacaactgctgctgaagcggggttgggtcatcagcactgagctccggagaatcgggcaaaagcttgcccaggatcgctgggccagagtccactccatgtccgttcggctcacatgccacgccaggagcatggttagcgaatactctgctgtgtcaagaaactccctgaaagagatgggcgaaatagagaaacttctcatggaaaagtgtagcgaactaagcgcagtaacagagcggtgtctccaagttgagaatgaacacgtcctcaaaagcatgaaagcgtgcgttagcgagaccctgagcatgcttgggcaacacttcggccaactgctcgagctggcgctcacacgcgaggtacaggccctggtgcgaaagattgacgctagtgataatatttacaccacagaatctactacgggcaatctgttctccctgacccaagagggtgcccctctgtgtagaatcatcgctaaggttgatggcgtgctatgcctggctgacatcctgactgacaactctcactctgaggccacccgcgcagaggccgctgctgtcgtggctcaggtcactagtcctcacctgcccgtgactcagcatctgtctagttttctcgagtctatggaggaaatcgtcacagcattggtcaaattatgtcaagaagcatcctcgggagaggtgtttttgctagcctccgccgcactcgccaatattacattctttgacaccatggcttgcgaaatgctgttgcagctgaacgcaatcagagtgctgctcgaggcgtgcagtgataagcagcgagtcgatactccatacacacgggaccaaattgtgactattctggcaaacatgtctgtgcttgaacagtgcgcctctgacataatccaggagaacggagtgcagcttattatgggaatgctcagcgagaaaccacgctctggaaccccagccgaggtggccgcttgcgaaagggtgcaacagaaggccgctgtaactcttgcaagattatcacgagaccctgatgttgcacgggaagcagtccgactgagctgtatgagccgtctgatagagctgtgccggtctccctctgagaggaattcaagtgacgcagttttagtcgcctgtcttgccgctctacggagactggccggagtctgtcccgagggactgcaagactccgacttccaacagctggttcagcctcgtcttgtggactccttcctgttgtgctccaatatggaagaatcctttgtgtag

SEQ ID NO: 98063 - DNA, 1473 bp, Artificial Sequence
  derived and/or modified sequence
atgatggccctgcccggcggcagacacctggacagcgtgaccctgcccggccagagactgcacctgatgcaggtggacagcgtgcagagatggatggaggacctgaagctgatgaccgagtgcgagtgcatgtgcgtgctgcaggccaagcccatcagcctggaggaggacgcccagggcgacctgatcctggccggcggccccggccccggcgaccccctgcagctgctgctgaagagaggctgggtgatcagcaccgagctgagaagaatcggccagaagctggcccaggacagatgggccagagtgcacagcatgagcgtgagactgacctgccacgccagaagcatggtgagcgagtacagcgccgtgagcagaaacagcctgaaggagatgggcgagatcgagaagctgctgatggagaagtgcagcgagctgagcgccgtgaccgagagatgcctgcaggtggagaacgagcacgtgctgaagagcatgaaggcctgcgtgagcgagaccctgagcatgctgggccagcacttcggccagctgctggagctggccctgaccagagaggtgcaggccctggtgagaaagatcgacgccagcgacaacatctacaccaccgagagcaccaccggcaacctgttcagcctgacccaggagggcgcccccctgtgcagaatcatcgccaaggtggacggcgtgctgtgcctggccgacatcctgaccgacaacagccacagcgaggccaccagagccgaggccgccgccgtggtggcccaggtgaccagcccccacctgcccgtgacccagcacctgagcagcttcctggagagcatggaggagatcgtgaccgccctggtgaagctgtgccaggaggccagcagcggcgaggtgttcctgctggccagcgccgccctggccaacatcaccttcttcgacaccatggcctgcgagatgctgctgcagctgaacgccatcagagtgctgctggaggcctgcagcgacaagcagagagtggacaccccctacaccagagaccagatcgtgaccatcctggccaacatgagcgtgctggagcagtgcgccagcgacatcatccaggagaacggcgtgcagctgatcatgggcatgctgagcgagaagcccagaagcggcacccccgccgaggtggccgcctgcgagagagtgcagcagaaggccgccgtgaccctggccagactgagcagagaccccgacgtggccagagaggccgtgagactgagctgcatgagcagactgatcgagctgtgcagaagccccagcgagagaaacagcagcgacgccgtgctggtggcctgcctggccgccctgagaagactggccggcgtgtgccccgagggcctgcaggacagcgacttccagcagctggtgcagcccagactggtggacagcttcctgctgtgcagcaacatggaggagagcttcgtgtag

SEQ ID NO: 98064 - DNA, 366 bp, Artificial Sequence
  derived and/or modified sequence
atggttccattcaatgatctttatagtggaccggatactttctcggaatttatatccgcatcgcatagcgccgttccattcaggggccctccattgctgctgccccccctgcgctggggccctgtcggagcaagggggatccacggaaggcacgaacccatccatcatccacagtgcaaacgcccaagggcccgcgggaggagagcacatccattcggcgtccgggcccgatctcccgaggtggctctaagcctagccgcccgttgggttctggacgtgggcttcgaccaccttgccgatgggaacggactctcacaaagcgccccattcttctgcccaccacacgtgacagaaatgctcctgtag

SEQ ID NO: 98065 - protein, 183 aa, Artificial Sequence
  derived and/or modified sequence
MSQKPAKEGPRLSKNQKYSEHFSIHCCPPFTFLNSKKEIVDRKYSICKSGCFYQKKEEDWICCACQKTRTSRRAKSPQRPKQQPAAPPAVVRAPAKPRSPPRSERQPRSPPRSERQPRSPPRSERQPRSPPRSERQPRPRPEVRPPPAKQRPPQKSKQQPRSSPLRGPGASRGGSPVKASRFW

SEQ ID NO: 98066 - protein, 58 aa, Artificial Sequence
  derived and/or modified sequence
MSQKPAKEGPRLSKNQKYSEHFSIHCCPPFTFLNSKKEIVDRKYSICKSGCFYQKKEE

SEQ ID NO: 98067 - DNA, 726 bp, Artificial Sequence
  derived and/or modified sequence
atggcccccgccaccgacaccgcctggctgcccccccaccccgagattcaattgcgactattgtgccccggcgagacttacggaaagctgatgggcgggtctccctcagccggcccaactacccagagccagccccacgccctgcggcctgggctacgagggcgcggcgggtggtggccacagcccttttggattcactctccacccctgacgcatagcgtcggcacgttcatatgccttgacggactggtttgtgcactgaccgcccccgggctcggagttggccttacacccgccccctggagaccacctggccagtcaagaatgctggagggccatggcccgtggcccacccccggtagccgacccgggccaacatgtgtttgtctgctgacgccggcaagcagcagcctccggccatgtctctcagaccgcggaacatgtcccggggctccacaaggtgccgtcggtacctgtcgcgcctctccccagtctccatgccaccgccatccatctctgcgatccggcctcgagtggacccagccgccggaccaggatcagggtctgttaacccccgggtctccacctctggtgtctggtgtcacccagaccccatggacctcgccattctgcccacctcgacccactccctgggtaggcgctgcctttacagcagctaatccctgtccccccgctcctaccgccagttcagtcactggcctgtag

SEQ ID NO: 98068 - DNA, 552 bp, Artificial Sequence
  derived and/or modified sequence
atgagccagaagcccgccaaggagggccccagactgagcaagaaccagaagtacagcgagcacttcagcatccactgctgcccccccttcaccttcctgaacagcaagaaggagatcgtggacagaaagtacagcatctgcaagagcggctgcttctaccagaagaaggaggaggactggatctgctgcgcctgccagaagaccagaaccagcagaagagccaagagcccccagagacccaagcagcagcccgccgccccccccgccgtggtgagagcccccgccaagcccagaagcccccccagaagcgagagacagcccagaagcccccccagaagcgagagacagcccagaagcccccccagaagcgagagacagcccagaagcccccccagaagcgagagacagcccagacccagacccgaggtgagacccccccccgccaagcagagacccccccagaagagcaagcagcagcccagaagcagccccctgagaggccccggcgccagcagaggcggcagccccgtgaaggccagcagattctggtag

SEQ ID NO: 98069 - protein, 241 aa, Artificial Sequence
  derived and/or modified sequence
MGAVMGTFSSLQTKQRRPSKDKIEDELEMTMVCHRPEGLEQLEAQTNFTKRELQVLYRGFKNECPSGVVNEDTFKQIYAQFFPHGALPCLEGSPCVEFLPPSPALLFCLVDASTYAHYLFNAFDTTQTGSVKFEDFVTALSILLRGTVHEKLRWTFNLYDINKDGYINKEEMMDIVKAIYDMMGKYTYPVLKEDTPRQHVDVFFQKMDKNKDGIVTLDEFLESCQEDDNIMRSLQLFQNVM

SEQ ID NO: 98070 - DNA, 726 bp, Artificial Sequence
  derived and/or modified sequence
atgggtgccgtcatgggcacattctcaagcctgcaaacaaagcagcggagacctagcaaggataaaatcgaagacgaactcgagatgaccatggtttgtcacaggccagaaggactcgaacagctggaggcacagaccaacttcaccaagagggagcttcaggtcctttaccggggattcaaaaatgaatgcccatccggcgtggtcaacgaggatacttttaagcagatctatgcacaattctttccacatggggctctgccttgccttgagggctccccttgtgtagagttcctacctccatcccctgctctgctgttctgcctggttgatgcttccacttatgcccattatctatttaacgcttttgacacgacacagactggaagcgtgaagtttgaggacttcgtgaccgctctgtccattctgctgcgaggcactgtccacgagaagctcagatggacatttaacctgtacgacattaacaaggacggctacattaacaaagaagaaatgatggacatcgtgaaggctatttacgacatgatgggtaaatacacttatcctgttctcaaagaggacactccacggcagcacgtggacgttttttttcagaaaatggacaagaacaaggatggcatcgtcactctggatgaatttctggaatcatgtcaggaagacgacaatatcatgaggagcctgcaattgttccaaaacgtcatgtag

SEQ ID NO: 98071 - DNA, 726 bp, Artificial Sequence
  derived and/or modified sequence
atgggggccgtcatgggcaccttctcatctctgcaaaccaaacaaaggcgaccctcgaaagataagattgaagatgagctggagatgaccatggtttgccatcggcccgagggactggagcagctcgaggcccagaccaacttcaccaagagggagctgcaggtcctttatcgaggcttcaaaaatgagtgccccagtggtgtggtcaacgaagacacattcaagcagatctatgctcagtttttccctcatggagccctgccttgtttggaaggttctccctgtgtggaattcctgcccccatcacctgccctccttttctgccttgtagatgccagcacgtatgcccattacctcttcaatgccttcgacaccactcagacaggctccgtgaagttcgaggactttgtaaccgctctgtcgattttattgagaggaactgtccacgagaaactaaggtggacatttaatttgtatgacatcaacaaggacggatacataaacaaagaggagatgatggacattgtcaaagccatctatgacatgatggggaaatacacatatcctgtgctcaaagaggacactccaaggcagcatgtggacgtcttcttccagaaaatggacaaaaataaagatggcatcgtaactttagatgaatttcttgaatcatgtcaggaggacgacaacatcatgaggtctctccagctgtttcaaaatgtcatgtaa

SEQ ID NO: 98072 - DNA, 726 bp, Artificial Sequence
  derived and/or modified sequence
atgggggccgtgatgggcacattcagttccctgcagaccaagcagagacgcccgtctaaggataaaatagaggatgagcttgagatgacaatggtgtgccatcgcccggaggggctcgaacagctagaggcacaaactaatttcactaaacgggagctgcaggtcctctatcggggcttcaagaacgagtgcccttccggagtggttaatgaagacacttttaaacagatctatgctcagtttttcccacacggtgctctaccgtgcctggagggctctccctgtgttgaattcttgccaccatctccagccttactcttttgcctcgtcgacgccagtacctatgcacactatttgttcaacgccttcgacacaactcagacaggctccgtcaagtttgaggacttcgtgaccgccctatcgattttacttcgcggcactgttcatgagaaactcaggtggacattcaacctgtatgatattaacaaggatggatatatcaataaggaagagatgatggatatcgtaaaagctatttacgacatgatggggaaatacacttacccagtactgaaggaagatactcccaggcagcacgtagacgtgttttttcaaaaaatggataaaaataaggacggaatagtcaccctggacgaatttctagaatcatgtcaagaagatgataacatcatgcgatcactgcaattatttcagaacgtcatgtag

SEQ ID NO: 98073 - DNA, 726 bp, Artificial Sequence
  derived and/or modified sequence
atgggagctgttatgggtactttttctagtctgcagaccaagcagaggcggccatcaaaagacaaaatcgaagacgagctcgagatgacgatggtgtgtcacaggcctgaagggctggagcaacttgaagcacagacaaattttaccaagagggagttgcaggttctatatcgcggcttcaagaacgagtgtccctccggggtggttaatgaagacacttttaagcagatctacgcccaatttttcccacacggtgcattgccttgtctggaaggctccccttgcgtggaattccttcccccatctccagccttactcttttgcctcgtcgacgccagtacctatgcacactatttgttcaacgccttcgacacaactcagacaggctccgtcaagtttgaggacttcgtgaccgccctatcgattttacttcgcggcactgttcatgagaaactcaggtggacattcaacctgtatgatattaacaaggatggatatatcaataaggaagagatgatggatatcgtaaaagctatttacgacatgatggggaaatacacttacccagtactgaaggaagatactcccaggcagcacgtagatgtattcttccagaagatggacaaaaacaaggacgggattgtgaccttagatgaatttctcgagagctgccaagaagacgataatatcatgagatcactgcaactctttcagaatgtgatgtag

SEQ ID NO: 98074 - DNA, 726 bp, Artificial Sequence
  derived and/or modified sequence
atgggcgccgtgatgggcaccttcagcagcctgcagaccaagcagagaagacccagcaaggacaagatcgaggacgagctggagatgaccatggtgtgccacagacccgagggcctggagcagctggaggcccagaccaacttcaccaagagagagctgcaggtgctgtacagaggcttcaagaacgagtgccccagcggcgtggtgaacgaggacaccttcaagcagatctacgcccagttcttcccccacggcgccctgccctgcctggagggcagcccctgcgtggagttcctgccccccagccccgccctgctgttctgcctggtggacgccagcacctacgcccactacctgttcaacgccttcgacaccacccagaccggcagcgtgaagttcgaggacttcgtgaccgccctgagcatcctgctgagaggcaccgtgcacgagaagctgagatggaccttcaacctgtacgacatcaacaaggacggctacatcaacaaggaggagatgatggacatcgtgaaggccatctacgacatgatgggcaagtacacctaccccgtgctgaaggaggacacccccagacagcacgtggacgtgttcttccagaagatggacaagaacaaggacggcatcgtgaccctggacgagttcctggagagctgccaggaggacgacaacatcatgagaagcctgcagctgttccagaacgtgatgtag

SEQ ID NO: 98075 - DNA, 726 bp, Artificial Sequence
  derived and/or modified sequence
atgggggcagtgatggggacgttcagctcccttcagactaaacagcgtcgcccaagcaaggataagattgaagacgaactagaaatgactatggtgtgccatcgtccagaaggactggagcagctcgaggcccagacgaactttacaaagagggaactccaagttttgtacaggggctttaagaacgaatgtcctagcggcgttgtcaatgaggatactttcaagcagatttatgcccagttcttccctcatggcgcgctgccatgtctggaaggcagtccctgcgttgagtttctgcccccatccccggcattgctcttttgcttggtggacgcttccacatatgcccactatctgtttaacgccttcgatacaacccagacagggtcagtgaaattcgaggattttgtgaccgcgctgtcaatcctcttacgcgggaccgttcatgaaaaattgcgatggacattcaacctgtacgatatcaacaaggacggctacatcaataaggaggagatgatggacatcgttaaggcaatctacgatatgatggggaaatatacataccctgtgttaaaagaggacactccacggcagcacgtcgacgtattcttccaaaaaatggataaaaacaaggatgggattgttaccttagacgagttcctggaaagttgccaagaggatgacaatatcatgcgatctctgcaacttttccagaacgtgatgtag

SEQ ID NO: 98076 - DNA, 726 bp, Artificial Sequence
  derived and/or modified sequence
atgggcgctgtgatgggcaccttcagcagcctgcagaccaagcagaggcggcccagcaaggacaagattgaagatgagctggagatgaccatggtgtgccacaggcctgagggcctggagcagctggaggcccagaccaacttcaccaagcgggagctgcaggtgctgtaccggggcttcaagaatgaatgtcccagcggcgtggtgaatgaagacaccttcaagcagatctatgcccagttcttcccccacggggccctgccctgcctggagggcagcccctgtgtggagttcctgccccccagccctgccctgctcttctgcctggtggatgccagcacctacgcccactacctgttcaatgcctttgacaccacccagacaggctctgtgaagtttgaggactttgtgacagccctgagcatcctgctgcggggcaccgtgcatgagaagctgcgctggaccttcaacctgtatgacatcaacaaggatggctacatcaacaaggaggagatgatggacatcgtgaaggccatctatgacatgatgggcaagtacacctaccctgtgctgaaggaggacaccccccggcagcacgtggatgtgttcttccagaagatggacaagaacaaggatggcatcgtgaccctggatgagttcctggagagctgccaggaggatgacaacatcatgaggagcctgcagctgttccagaatgtgatgtag

SEQ ID NO: 98077 - DNA, 726 bp, Artificial Sequence
  derived and/or modified sequence
atgggcgccgtgatgggcaccttcagcagcctgcagaccaagcagcggcgcccctccaaggacaagattgaggatgaattggagatgactatggtttgccacaggcccgagggtctagagcaactggaggcgcagacgaactttaccaaaagagagttgcaagtcctatacagaggatttaaaaatgagtgtcctagcggtgtggtgaacgaagatacttttaagcagatctacgctcagttctttccacacggtgcgcttccctgcctggagggcagtccatgcgtcgaatttctgccacccagccctgccctcctattctgcttggttgacgcttccacttacgctcactacctgtttaatgcattcgatactacacagaccggaagcgttaagtttgaagatttcgtgaccgccttgtccatccttcttagaggcactgtacatgaaaagctgcgctggacctttaacctgtacgacattaacaaagatggatacatcaacaaagaggagatgatggatatagtcaaggcgatttacgacatgatgggtaagtatacataccccgtactgaaggaagacacccccagacaacatgtcgatgtctttttccagaagatggacaagaacaaagatggaattgtgacactcgacgagtttctggaatcatgtcaggaagatgataatattatgaggagcctacagctcttccagaatgttatgtag

SEQ ID NO: 98078 - RNA, 726 nt, Artificial Sequence
  derived and/or modified sequence
augggggccgugaugggcacauucaguucccugcagaccaagcagagacgcccgucuaaggauaaaauagaggaugagcuugagaugacaauggugugccaucgcccggaggggcucgaacagcuagaggcacaaacuaauuucacuaaacgggagcugcagguccucuaucggggcuucaagaacgagugcccuuccggagugguuaaugaagacacuuuuaaacagaucuaugcucaguuuuucccacacggugcucuaccgugccuggagggcucucccuguguugaauucuugccaccaucuccagccuuacucuuuugccucgucgacgccaguaccuaugcacacuauuuguucaacgccuucgacacaacucagacaggcuccgucaaguuugaggacuucgugaccgcccuaucgauuuuacuucgcggcacuguucaugagaaacucagguggacauucaaccuguaugauauuaacaaggauggauauaucaauaaggaagagaugauggauaucguaaaagcuauuuacgacaugauggggaaauacacuuacccaguacugaaggaagauacucccaggcagcacguagacguguuuuuucaaaaaauggauaaaaauaaggacggaauagucacccuggacgaauuucuagaaucaugucaagaagaugauaacaucaugcgaucacugcaauuauuucagaacgucauguag

SEQ ID NO: 98079 - RNA, 726 nt, Artificial Sequence
  derived and/or modified sequence
augggagcuguuauggguacuuuuucuagucugcagaccaagcagaggcggccaucaaaagacaaaaucgaagacgagcucgagaugacgauggugugucacaggccugaagggcuggagcaacuugaagcacagacaaauuuuaccaagagggaguugcagguucuauaucgcggcuucaagaacgagugucccuccggggugguuaaugaagacacuuuuaagcagaucuacgcccaauuuuucccacacggugcauugccuugucuggaaggcuccccuugcguggaauuccuucccccaucuccagccuuacucuuuugccucgucgacgccaguaccuaugcacacuauuuguucaacgccuucgacacaacucagacaggcuccgucaaguuugaggacuucgugaccgcccuaucgauuuuacuucgcggcacuguucaugagaaacucagguggacauucaaccuguaugauauuaacaaggauggauauaucaauaaggaagagaugauggauaucguaaaagcuauuuacgacaugauggggaaauacacuuacccaguacugaaggaagauacucccaggcagcacguagauguauucuuccagaagauggacaaaaacaaggacgggauugugaccuuagaugaauuucucgagagcugccaagaagacgauaauaucaugagaucacugcaacucuuucagaaugugauguag

SEQ ID NO: 98080 - DNA, 567 bp, Artificial Sequence
  derived and/or modified sequence
atgacaatggtttgccaccggccagagggactggaacaacttgaagcccaaactaatttcacaaaaagggaactccaagtcctctatcgtggtttcaaaaacgaatgcccgagcggagtggtgaacgaagatacttttaaacaaatctacgcccagttcttcccccacggagacgctagcacatacgcccactatcttttcaacgcctttgacaccacccaaaccggatcggtgaagttcgaggattttgtaactgctttatccattctcctgcgcggtactgtgcatgagaaactgaggtggacttttaacttatacgatattaataaagatggttacatcaacaaggaagagatgatggatatcgtgaaggccatttacgacatgatgggcaagtacacctacccagtcttgaaagaagataccccgagacagcacgtggacgtcttcttccagaaaatggacaagaacaaggatgggatagtgacactggacgaatttcttgaaagctgtcaggaggatgataacattatgcgaagcctacagctttttcagaatgtgatgtag

SEQ ID NO: 98081 - DNA, 567 bp, Artificial Sequence
  derived and/or modified sequence
atgacaatggtctgccatcgaccagagggattagagcagctcgaagcgcagacgaattttaccaaaagagaactgcaggtgctttaccgcggctttaagaacgagtgcccttccggagttgtaaatgaggatacattcaagcagatatatgcgcagttctttcctcacggagatgcatcaacatatgcccactatctatttaacgcattcgacaccacacagacaggatcagtgaaattcgaggattttgtgactgccctgagtattttgttacgaggtaccgtacatgagaaactacggtggacgtttaacttgtatgatattaataaagacggctatattaataaggaggaaatgatggacattgtcaaagctatttatgatatgatggggaagtatacgtatcccgttctgaaggaggacacccctcgacagcacgtcgacgtattcttccagaaaatggacaaaaataaagacggcatagtgaccctggacgagtttttagaaagttgtcaagaagatgacaatataatgaggtccttgcagttgttccaaaacgtgatgtag

SEQ ID NO: 98082 - DNA, 567 bp, Artificial Sequence
  derived and/or modified sequence
atgacaatggtctgccatcgaccagagggattagagcagctcgaagcgcagacgaattttaccaaaagagaactgcaggtgctttaccgcggctttaagaacgagtgcccttccggagttgtaaatgaggatacattcaagcagatatatgcgcagttctttcctcacggagatgcatcaacatatgcccactatctatttaacgcattcgacaccacacagacaggatcagtgaaattcgaggattttgtgactgccctgagtattttgttacgaggtaccgtacatgagaaactacggtggacttttaacctctacgacatcaacaaagatggatacatcaacaaagaggagatgatggatatcgtgaaggctatatatgatatgatgggaaagtatacatatccagtgttgaaagaagacacaccccgccaacatgtcgacgtgttctttcagaagatggacaagaacaaggatggtatagtgaccttggacgaatttcttgaatcctgccaggaggatgataatattatgcggagtttgcagctctttcagaacgtaatgtag

SEQ ID NO: 98083 - DNA, 567 bp, Artificial Sequence
  derived and/or modified sequence
atgaccatggtgtgccacagacccgagggcctggagcagctggaggcccagaccaacttcaccaagagagagctgcaggtgctgtacagaggcttcaagaacgagtgccccagcggcgtggtgaacgaggacaccttcaagcagatctacgcccagttcttcccccacggcgacgccagcacctacgcccactacctgttcaacgccttcgacaccacccagaccggcagcgtgaagttcgaggacttcgtgaccgccctgagcatcctgctgagaggcaccgtgcacgagaagctgagatggaccttcaacctgtacgacatcaacaaggacggctacatcaacaaggaggagatgatggacatcgtgaaggccatctacgacatgatgggcaagtacacctaccccgtgctgaaggaggacacccccagacagcacgtggacgtgttcttccagaagatggacaagaacaaggacggcatcgtgaccctggacgagttcctggagagctgccaggaggacgacaacatcatgagaagcctgcagctgttccagaacgtgatgtag

SEQ ID NO: 98084 - DNA, 567 bp, Artificial Sequence
  derived and/or modified sequence
atgaccatggtgtgccacagacccgaaggcctggaacagctcgaagcccagacaaactttacaaaaagggagttgcaagttctgtacaggggattcaaaaacgagtgccccagtggggtggtgaacgaggacacttttaaacaaatatacgcacagttcttcccgcacggagatgcaagcacttacgcccattatctctttaatgcattcgataccacacaaactggctcagtgaaattcgaggactttgtgaccgccctgtcaattttgctacgtggtactgtccatgaaaagctccgttggacctttaacctgtatgacattaataaagatggatatatcaacaaagaagagatgatggacatagtgaaggcaatatacgacatgatgggaaagtatacatatcccgtgttgaaagaggatacccccagacagcacgtagacgtgttttttcagaaaatggataaaaacaaggacgggatcgttactttggatgagttcctcgagagctgccaggaagacgataatataatgcgcagcctgcaactgttccagaacgtcatgtag

SEQ ID NO: 98085 - DNA, 567 bp, Artificial Sequence
  derived and/or modified sequence
atgaccatggtgtgccacaggcctgagggcctggagcagctggaggcccagaccaacttcaccaagcgggagctgcaggtgctgtaccggggcttcaagaatgaatgtcccagcggcgtggtgaatgaagacaccttcaagcagatctatgcccagttcttcccccatggagatgccagcacctacgcccactacctgttcaatgcctttgacaccacccagacaggctctgtgaagtttgaagattttgtgacagccctgagcatcctgctgcggggcaccgtgcatgagaagctgcgctggaccttcaacctgtatgacatcaacaaggatggctacatcaacaaggaggagatgatggacatcgtgaaggccatctatgacatgatgggcaagtacacctaccctgtgctgaaggaggacaccccccggcagcacgtggatgtgttcttccagaagatggacaagaacaaggatggcatcgtgaccctggatgagttcctggagagctgccaggaggatgacaacatcatgaggagcctgcagctgttccagaatgtgatgtag

SEQ ID NO: 98086 - DNA, 567 bp, Artificial Sequence
  derived and/or modified sequence
atgaccatggtgtgccaccggcccgagggcctggagcagctggaggctcagaccaacttcacgaagagagagttgcaggtcctttacagaggttttaaaaacgagtgtccgagtggagttgtcaacgaggacacatttaaacagatatacgcccagttttttccacacggcgacgcgtctacctacgctcactatttgttcaatgcattcgacacgacccaaaccggatcggtgaaatttgaagattttgtgaccgcactgtcaatcctgttgagggggacagttcatgagaagctacggtggactttcaatctgtatgacataaacaaagatggctacattaataaggaggagatgatggacattgttaaggcgatctacgatatgatgggcaaatacacatatcccgtgttgaaggaggacaccccaagacagcacgtcgacgtatttttccagaagatggataaaaacaaagatggaatcgtgaccctggacgagttccttgagtcctgccaggaagatgacaacattatgcgtagccttcaactgttccagaatgtgatgtag

SEQ ID NO: 98087 - RNA, 567 nt, Artificial Sequence
  derived and/or modified sequence
augacaauggucugccaucgaccagagggauuagagcagcucgaagcgcagacgaauuuuaccaaaagagaacugcaggugcuuuaccgcggcuuuaagaacgagugcccuuccggaguuguaaaugaggauacauucaagcagauauaugcgcaguucuuuccucacggagaugcaucaacauaugcccacuaucuauuuaacgcauucgacaccacacagacaggaucagugaaauucgaggauuuugugacugcccugaguauuuuguuacgagguaccguacaugagaaacuacgguggacguuuaacuuguaugauauuaauaaagacggcuauauuaauaaggaggaaaugauggacauugucaaagcuauuuaugauaugauggggaaguauacguaucccguucugaaggaggacaccccucgacagcacgucgacguauucuuccagaaaauggacaaaaauaaagacggcauagugacccuggacgaguuuuuagaaaguugucaagaagaugacaauauaaugagguccuugcaguuguuccaaaacgugauguag

SEQ ID NO: 98088 - RNA, 567 nt, Artificial Sequence
  derived and/or modified sequence
augacaauggucugccaucgaccagagggauuagagcagcucgaagcgcagacgaauuuuaccaaaagagaacugcaggugcuuuaccgcggcuuuaagaacgagugcccuuccggaguuguaaaugaggauacauucaagcagauauaugcgcaguucuuuccucacggagaugcaucaacauaugcccacuaucuauuuaacgcauucgacaccacacagacaggaucagugaaauucgaggauuuugugacugcccugaguauuuuguuacgagguaccguacaugagaaacuacgguggacuuuuaaccucuacgacaucaacaaagauggauacaucaacaaagaggagaugauggauaucgugaaggcuauauaugauaugaugggaaaguauacauauccaguguugaaagaagacacaccccgccaacaugucgacguguucuuucagaagauggacaagaacaaggaugguauagugaccuuggacgaauuucuugaauccugccaggaggaugauaauauuaugcggaguuugcagcucuuucagaacguaauguag

SEQ ID NO: 98089 - DNA, 816 bp, Artificial Sequence
  derived and/or modified sequence
atgagacagctgcaccccgaggccatcgccgccatccagagcaaggccctgttcagcaaggccgaggagcagctgctgagcaaggtgggcagcaccagccagcccaccctggagaccttccaggacctgctgcacagacaccccgacgccttctacctggccagaaccgccaaggccctgcaggcccactggcagctgatgaagcagtactacctgctggaggaccagaccgtgcagcccctgcccaagggcgaccaggtgctgaacttcagcgacgccgaggacctgatcgacgacagcaagctgaaggacatgagagacgaggtgctggagcacgagctgatggtggccgacagaagacagaagagagagatcagacagctggagcaggagctgcacaagtggcaggtgctggtggacagcatcaccggcatgagcagccccgacttcgacaaccagaccctggccgtgctgagaggcagaatggtgagatacctgatgagaagcagagagatcaccctgggcagagccaccaaggacaaccagatcgacgtggacctgagcctggagggccccgcctggaagatcagcagaaagcagggcgtgatcaagctgaagaacaacggcgacttcttcatcgccaacgagggcagaagacccatctacatcgacggcagacccgtgctgtgcggcagcaagtggagactgagcaacaacagcgtggtggagatcgccagcctgagattcgtgttcctgatcaaccaggacctgatcgccctgatcagagccgaggccgccaagatcaccccccagtag

SEQ ID NO: 98090 - DNA, 816 bp, Artificial Sequence
  derived and/or modified sequence
atgcgccagctccacccagaagccatcgcggctatacagtctaaggctctattttccaaagccgaggagcagttgctcagcaaggttggatcaacttcacagccaaccctggaaacttttcaggatcttctgcatcgtcaccccgacgccttttatctggcgcgaactgctaaggctcttcaggcccattggcagttgatgaagcagtactatctgcttgaggatcagactgtacagccattgccgaagggtgatcaggttttgaatttttctgatgcagaggacctcatcgacgattcaaagctgaaggacatgagagatgaagtacttgagcacgaattgatggtagccgacagaagacagaagcgcgagattcgacagttggagcaggagctgcataaatggcaggtcctggtggattccatcactgggatgagtagtcctgactttgacaaccagaccctcgccgtcctcagagggcggatggtccgttatttaatgcgatcgagagagattactctgggccgcgccactaaagacaaccagattgatgtagatctgtcactcgagggccctgcatggaagatttcacggaagcagggagtcatcaagctcaagaacaacggtgacttttttatcgctaacgagggacgccgacctatttatattgacggcaggcctgtgctctgtggctccaagtggcggttgagtaataattccgtggttgagattgccagtttaaggttcgtgtttctgatcaatcaggacctgatcgccctcatccgcgcggaagctgctaaaattacaccccagtag

SEQ ID NO: 98091 - DNA, 816 bp, Artificial Sequence
  derived and/or modified sequence
atgaggcagctgcaccctgaggccatcgccgccatccagagcaaggccctcttcagcaaggccgaggagcagctgctgagcaaggtgggcagcaccagccagcccaccctggagaccttccaggacctgctgcaccgccacccagatgccttctacctggccaggacagccaaggccctgcaggcccactggcagctgatgaagcagtactacctgctggaggaccagacagtgcagcccctgcccaagggggaccaggtgctgaacttcagtgatgctgaggacctgattgatgacagcaagctgaaggacatgagagatgaggtgctggagcacgagctgatggtggccgaccggcggcagaagcgggagatccggcagctggagcaggagctgcacaagtggcaggtgctggtggacagcatcaccggcatgagcagcccagactttgacaaccagaccctggccgtgctgcggggccgcatggtgcgctacctgatgaggagccgggagatcaccctgggccgggccaccaaggacaaccagattgatgtggacctgagcctggagggccctgcctggaagatcagcaggaagcagggcgtcatcaagctgaagaacaacggggacttcttcatcgccaatgaaggccggcggcccatctacattgatggccggcctgtgctgtgtggcagcaagtggaggctgagcaacaacagcgtggtggagatcgccagcctgcgctttgtgttcctgatcaaccaggacctgattgccctgatccgggcagaggccgccaagatcaccccccagtag

SEQ ID NO: 98092 - DNA, 816 bp, Artificial Sequence
  derived and/or modified sequence
atgcggcagctgcaccccgaggccatcgccgccatccagagcaaggccctgttctctaaagccgaggaacagctactctccaaggtgggctcaaccagtcagccaacgctggaaacatttcaggatttattgcaccgccatcccgatgctttctatctggcgcgcacagcaaaagcgcttcaggcccattggcaactgatgaagcagtactacttgttggaggatcagacagttcagcccctgcctaaaggcgatcaggtactgaactttagtgatgccgaagaccttattgatgactcgaagttgaaggatatgcgtgacgaggtcctggaacatgaattgatggtagccgaccgccggcagaaacgggaaataaggcagttggaacaagagctgcacaagtggcaggtgctggtagactcaatcaccgggatgtcctctcctgattttgacaaccagacacttgctgtcctgagagggaggatggtgcgctatctgatgcggagccgggaaatcaccctaggaagggctaccaaggacaaccagatcgatgtagacctctctcttgaaggtcctgcctggaagatctcccgaaagcagggcgtgataaagctcaaaaacaatggggacttttttattgcaaatgaagggcgtcggcccatctacatcgacggtagacctgtgctgtgtgggtcgaagtggcggctgtcaaacaatagcgtagtcgagattgcctcattgcgctttgttttcttgatcaatcaagacttgatcgctctgatccgggccgaagcagctaaaatcaccccacaatag

SEQ ID NO: 98093 - DNA, 816 bp, Artificial Sequence
  derived and/or modified sequence
atgagacaactgcatcctgaagccattgcagcaattcagtcaaaggctctattcagcaaagcggaggaacaactgctatctaaggtgggctcaacgtcgcagcccacccttgagacgttccaagatctactacaccgccacccagacgctttctacctcgcacgaaccgccaaagccctgcaggcgcactggcaactgatgaaacagtactatctactggaggaccaaactgtgcaacccctgccgaagggtgaccaggtcctcaactttagtgacgcagaggatttaatcgatgattccaaattaaaagatatgagagacgaagttctggaacatgagctgatggtcgcggaccggaggcagaaacgtgaaattaggcagctggagcaggaattgcacaagtggcaggtgctggtggattccataacaggtatgtcgtccccggacttcgacaaccagactttagcagtgctgcgtggacggatggtgcgatatctaatgcggtcccgagagattaccttaggccgagcgactaaagataatcagatagacgtcgatttatcattggaagggccagcgtggaaaatcagtcggaagcagggagtgattaaattgaaaaacaatggggatttcttcattgctaacgaggggcgtaggcccatttatatagatgggaggccagttctgtgcggatcgaagtggaggttatctaacaattctgtggtggaaattgcctctctccgttttgtgttccttattaatcaggatctaatcgctctgatccgggcagaagctgctaaaataactccccaatag

SEQ ID NO: 98094 - protein, 195 aa, Artificial Sequence
  derived and/or modified sequence
MAALKSWLSRSVTSFFRYRQCLCVPVVANFKKRCFSELIRPWHKTVTIGFGVTLCAVPIAQAVYTLTSLYRQYTSLLGKMNSEEEDEVWQVIIGARAEMTSKHQEYLKLETTWMTAVGLSEMAAEAAYQTGADQASITARNHIQLVKLQVEEVHQLSRKAETKLAEAQIEELRQKTQEEGEERAESEQEAYLRED

SEQ ID NO: 98095 - DNA, 588 bp, Artificial Sequence
  derived and/or modified sequence
atggccgccctgaagagctggctgagcagaagcgtgaccagcttcttcagatacagacagtgcctgtgcgtgcccgtggtggccaacttcaagaagagatgcttcagcgagctgatcagaccctggcacaagaccgtgaccatcggcttcggcgtgaccctgtgcgccgtgcccatcgcccaggccgtgtacaccctgaccagcctgtacagacagtacaccagcctgctgggcaagatgaacagcgaggaggaggacgaggtgtggcaggtgatcatcggcgccagagccgagatgaccagcaagcaccaggagtacctgaagctggagaccacctggatgaccgccgtgggcctgagcgagatggccgccgaggccgcctaccagaccggcgccgaccaggccagcatcaccgccagaaaccacatccagctggtgaagctgcaggtggaggaggtgcaccagctgagcagaaaggccgagaccaagctggccgaggcccagatcgaggagctgagacagaagacccaggaggagggcgaggagagagccgagagcgagcaggaggcctacctgagagaggactag

SEQ ID NO: 98096 - DNA, 1338 bp, Artificial Sequence
  derived and/or modified sequence
acttccggcgtgtgcgtctggcgtccgcgcgctgcacaatggcggctctgaagagttggctgtcgcgcagcgtaacttcattcttcaggtacagacagtgtttgtgtgttcctgttgtggctaactttaagaagcggtgtttctcagaattgataagaccatggcacaaaactgtgacgattggctttggagtaaccctgtgtgcggttcctattgcacaggctgtttataccttaacttctctttaccgacaatatacaagtttacttgggaaaatgaattcagaggaggaagatgaagtgtggcaggtgatcataggagccagagctgagatgacttcaaaacaccaagagtacttgaagctggaaaccacttggatgactgcagttggtctttcagagatggcagcagaagctgcatatcaaactggcgcagatcaggcctctataaccgccaggaatcacattcagctggtgaaactgcaggtggaagaggtgcaccagctctcccggaaagcagaaaccaagctggcagaagcacagatagaagagctccgtcagaaaacacaggaggaaggggaggagcgggctgagtcggagcaggaggcctacctgcgtgaggattgagggcctgagcacactgccctgtctccccactcagtggggaaagcaggggcagatgccaccctgcccagggttggcatgactgtctgtgcaccgagaagaggcggcagatcctgccctggccaatcaggcgagacgcctttgtgagctgtgagtgcctcctgtggtctcaggcttgcgctggacctggttcttagcccttgggcactgcaccctgtttaacatttcaccccactctgtacagctgctcttacccattttttttacctcacacccaaagcattttgcctacctgggtcagagagaggagtcctttttgtcatgcccttaagttcagcaactgtttaacctgttttcagtcttatttacgtcgtcaaaaatgatttagtacttgttccctctgttgggatgccagttgtggcagggggaggggaacctgtccagtttgtacgatttctttgtatgtatttctgatgtgttctctgatctgcccccactgtcctgtgaggacagctgaggccaaggagtgaaaaacctattactactaagagaaggggtgcagagtgtttacctggtgctctcaacaggacttaacatcaacaggacttaacacaggcctcttgttccttcctttctttccgtttctctattgtatccaaaggagaagagtgtaagattttgtttgcatctgaaagagaaaatgcgtctctcctgg

SEQ ID NO: 98097 - DNA, 2111 bp, Artificial Sequence
  derived and/or modified sequence
acgcggaggttgtaattggtctctagaccacacctagttgttgagtgccgctgcttgaaaatctcagttctgccgagatcgcagaatacacacaagctacctttgggcaccagagcagacagaaccgcggagcttcagggtggaagattcgtggaaactttgccaaggccaggacctcgtgtgttcccgtccgcccctctgggacggcgccagcccggcaggccgccgaccgtcctggggctcccgcgcagcgcgatgccggcctcgtccaccgtccacgtgctgcagctgctgcgggagctgctcgccttcgtgctcctcagctacacggtgctcatcggggcgctgctgctggccggctggaccacttacttcctggtgctgaagtgacagcgccgtcgccgcgcccggccccgcctcccgcccggccccgcctcccgcccggccccgcctccctaactcaccaggaaattcccttcaagccctggcccgaactgagtccccgcccacccgccagcgtcacggcgcccgactcagctccgcgccggacccacctccgcgccctcaggccctgcatatgccccgccccgcgcggaagttccggcggttggttgccttgcgcggccgttacagcctttgccctaagcctcgccccctttccccctgcctgcccaatcccgactgcttccttgggtgggggcgtggctatggggcgaggcgctctcaggtggaggccgtgccccgctccgcgctcacgaagctgcgtcacttccggcgtgtgcgtctggcgtccgcgcgctgcacaatggcggctctgaagagttggctgtcgcgcagcgtaacttcattcttcaggtacagacagtgtttgtgtgttcctgttgtggctaactttaagaagcggtgtttctcagaattgataagaccatggcacaaaactgtgacgattggctttggagtaaccctgtgtgcggttcctattgcacaggctgtttataccttaacttctctttaccgacaatatacaagtttacttgggaaaatgaattcagaggaggaagatgaagtgtggcaggtgatcataggagccagagctgagatgacttcaaaacaccaagagtacttgaagctggaaaccacttggatgactgcagttggtctttcagagatggcagcagaagctgcatatcaaactggcgcagatcaggcctctataaccgccaggaatcacattcagctggtgaaactgcaggtggaagaggtgcaccagctctcccggaaagcagaaaccaagctggcagaagcacagatagaagagctccgtcagaaaacacaggaggaaggggaggagcgggctgagtcggagcaggaggcctacctgcgtgaggattgagggcctgagcacactgccctgtctccccactcagtggggaaagcaggggcagatgccaccctgcccagggttggcatgactgtctgtgcaccgagaagaggcggcagatcctgccctggccaatcaggcgagacgcctttgtgagctgtgagtgcctcctgtggtctcaggcttgcgctggacctggttcttagcccttgggcactgcaccctgtttaacatttcaccccactctgtacagctgctcttacccattttttttacctcacacccaaagcattttgcctacctgggtcagagagaggagtcctttttgtcatgcccttaagttcagcaactgtttaacctgttttcagtcttatttacgtcgtcaaaaatgatttagtacttgttccctctgttgggatgccagttgtggcagggggaggggaacctgtccagtttgtacgatttctttgtatgtatttctgatgtgttctctgatctgcccccactgtcctgtgaggacagctgaggccaaggagtgaaaaacctattactactaagagaaggggtgcagagtgtttacctggtgctctcaacaggacttaacatcaacaggacttaacacaggcctcttgttccttcctttctttccgtttctctattgtatccaaaggagaagagtgtaagattttgtttgcatctgaaagagaaaatgcgtctctcctggggtcct

SEQ ID NO: 98098 - DNA, 588 bp, Artificial Sequence
  derived and/or modified sequence
atggcagctctaaagagttggttgtccaggtctgtcacttccttcttcaggtaccgacagtgcctttgtgtccctgtagttgcaaatttcaaaaagcgttgcttttctgagctgattagaccatggcacaaaacagtaacaattggattcggcgtcacgctctgcgcggtccccatcgcacaggccgtttatactctgacttctttgtatcgccaatacacgtctcttctcggcaaaatgaactctgaggaggaggacgaagtctggcaggtgatcatcggtgcacgcgccgagatgacatccaagcatcaggagtatctcaagctcgagaccacttggatgaccgctgtgggattatcagaaatggccgccgaggcggcataccagacaggggccgatcaggccagcatcactgctcgaaaccacatccagctggtaaagcttcaggtcgaggaagtccatcagttgtctcgcaaggccgaaacaaaacttgctgaggctcaaatcgaggaactccgtcagaaaacccaggaagagggcgaagagagagctgaaagtgaacaggaagcctaccttagggaggactag

SEQ ID NO: 98099 - DNA, 588 bp, Artificial Sequence
  derived and/or modified sequence
atggccgccttaaagagttggttgtccaggtctgtgaccagtttctttcggtatcgccagtgcctttgcgttcccgttgtggccaattttaaaaaaaggtgtttcagtgaattgatacgcccctggcacaagacggttacgatcggatttggcgtgacgctgtgcgctgtgccgatcgcccaggcagtgtacaccctcacatcgctgtaccggcagtatacttcattattaggcaaaatgaattctgaggaagaagacgaggtctggcaagtcatcattggcgccagagcagagatgaccagcaagcaccaggaatatctaaaattagagaccacttggatgacagcggtaggtttatcagaaatggcagccgaagccgcataccagactggtgccgatcaggcctccattaccgcccggaaccacatacagcttgtgaagcttcaagtcgaggaagtgcaccagctcagcaggaaagctgaaaccaagttagcagaagcccagatcgaagagttacgccagaagacacaggaagagggcgaagaaagagcggaatctgagcaagaagcctacctcagggaggattag

SEQ ID NO: 98100 - DNA, 588 bp, Artificial Sequence
  derived and/or modified sequence
atggccgccctgaagtcctggctgagccgctctgtgaccagcttcttccgctaccggcagtgcctgtgtgtgcctgtggtggccaacttcaagaagcgctgcttcagcgagctgatccggccctggcacaagacagtgaccatcggcttcggcgtgaccctgtgtgctgtgcccatcgcccaggccgtgtacaccctgaccagcctgtaccggcagtacaccagcctgctgggcaagatgaacagcgaggaggaggatgaggtgtggcaggtgatcattggagcccgggcagagatgaccagcaagcaccaggagtacctgaagctggagaccacctggatgacagctgtgggcctgtctgagatggctgctgaggccgcctaccagacaggagctgaccaggccagcatcacagccaggaaccacatccagctggtgaagctgcaggtggaggaggtgcaccagctgagcaggaaggccgagaccaagctggccgaggcccagatcgaggagctgcggcagaagacccaggaggagggggaggagcgggcagagagcgagcaggaggcctacctgcgggaggactag

SEQ ID NO: 98101 - DNA, 588 bp, Artificial Sequence
  derived and/or modified sequence
atggccgccctgaagagctggctgagccggagcgtgaccagcttctttcggtatcggcagtgtctgtgcgttcctgttgtggctaattttaagaagaggtgcttttcagaactgattagaccttggcataaaaccgtgacgattggattcggggtcacgctttgcgcggtgcctatagctcaagccgtgtacaccctcacctccctgtaccggcagtacacgagcctgttgggaaaaatgaatagcgaggaggaagacgaagtgtggcaagtcatcatcggcgcacgagcagaaatgacctctaagcaccaagagtaccttaagttagagacaacatggatgaccgcggttggcctttcagagatggctgccgaggcggcctaccaaacaggagcagatcaggccagtatcacagctcggaaccatattcagctggtgaagcttcaggtggaagaagtccaccaactgtcacggaaagccgagaccaagctggctgaagctcagattgaagaactgaggcagaagacccaggaggagggggaggaacgcgccgagtcagagcaggaagcatacctgcgcgaggactag

SEQ ID NO: 98102 - DNA, 588 bp, Artificial Sequence
  derived and/or modified sequence
atggccgccctgaagagctggctgagccggagcgtgaccagcttcttcagataccggcagtgtctttgcgtgccagtggtagcaaatttcaaaaaaaggtgcttcagcgagctgatccgcccctggcacaagacagttactatcggcttcggcgttacactctgcgcagttcccattgcccaggcagtatataccctgacctcactctaccggcagtacactagtctactgggcaaaatgaatagcgaggaagaagacgaggtctggcaggtgatcatcggggcaagagcagagatgacatccaaacatcaggagtaccttaaactcgaaaccacttggatgactgcagtgggcctgtcagagatggcggcagaagccgcatatcagaccggagctgaccaggcttctataaccgcccggaaccacatccagctcgtgaaactccaggtcgaggaagtgcaccaactaagccgtaaggctgagactaaattagccgaagcacaaatagaggaactaaggcagaagacacaggaagaaggcgaagagagagccgagagtgagcaggaagcctacttgagggaggactag

SEQ ID NO: 98103 - DNA, 588 bp, Artificial Sequence
  derived and/or modified sequence
atggccgcactcaaaagctggctgagtaggtctgtgacgtcattctttaggtacagacagtgtctgtgtgtgccggtggtggcaaattttaaaaagaggtgcttctccgagttaatccggccttggcataaaactgtgacaatcggattcggtgttacattatgtgctgtcccgattgcgcaggccgtctacactctcacttctctttacaggcagtatacttccctcctgggaaagatgaattcagaggaggaagatgaagtgtggcaagtcattattggggctagggcagagatgactagtaagcaccaagagtacctcaaactggagaccacatggatgacagctgtgggcttaagtgagatggccgctgaggccgcataccagaccggagctgatcaggcttccatcactgctagaaaccatatccagctggtcaaactccaagttgaagaggttcaccagctctccagaaaggccgagactaagctagcagaagcgcagattgaggagcttagacagaaaacccaggaggaaggggaagaaagggccgagtctgagcaagaggcttatcttcgcgaggactag

SEQ ID NO: 98104 - DNA, 588 bp, Artificial Sequence
  derived and/or modified sequence
atggctgccctaaagtcctggctgtctagatctgtaacaagcttctttcgctatagacagtgcctttgtgtgcccgtggtggccaacttcaaaaagcgctgcttctccgagcttattaggccctggcacaagaccgttactattggcttcggagtgactttatgcgccgtccctattgcacaggcagtttacacgttgaccagcctgtatcggcagtacacaagccttctgggaaaaatgaatagcgaagaggaggatgaagtctggcaggtgatcattggtgcaagggcagagatgacaagtaaacaccaggagtacttgaagctcgagaccacatggatgactgccgtgggcttgagtgaaatggccgcagaagccgcatatcagaccggggcagatcaggcgagcatcaccgcccgaaaccacatccagcttgttaagctacaggtcgaggaggttcatcaactgagccgtaaagcagaaacaaagctcgcagaagctcagattgaggaactgcggcaaaaaacccaagaagagggcgaggagcgggcagaatctgagcaggaagcttatctgcgggaagactag

SEQ ID NO: 98105 - DNA, 585 bp, Artificial Sequence
  derived and/or modified sequence
atggccgccctgaagagctggctgagccgcagcgtgaccagcttcttccgctaccgccagtgcctgtgcgtgcccgtggtggccaacttcaagaagcgctgcttcagcgagctgatccgcccctggcacaagaccgtgaccatcggcttcggcgtgaccctgtgcgccgtgcccatcgcccaggccgtgtacaccctgaccagcctgtaccgccagtacaccagcctgctgggcaagatgaacagcgaggaggaggacgaggtgtggcaggtgatcatcggcgcccgcgccgagatgaccagcaagcaccaggagtacctgaagctggagaccacctggatgaccgccgtgggcctgagcgagatggccgccgaggccgcctaccagaccggcgccgaccaggccagcatcaccgcccgcaaccacatccagctggtgaagctgcaggtggaggaggtgcaccagctgagccgcaaggccgagaccaagctggccgaggcccagatcgaggagctgcgccagaagacccaggaggagggcgaggagcgcgccgagagcgagcaggaggcctacctgcgcgaggac

SEQ ID NO: 98106 - protein, 894 aa, Artificial Sequence
  derived and/or modified sequence
MNQIEPGVQYNYVYDEDEYMIQEEEWDRDLLLDPAWEKQQRKTFTAWCNSHLRKAGTQIENIEEDFRNGLKLMLLLEVISGERLPKPDRGKMRFHKIANVNKALDYIASKGVKLVSIGAEEIVDGNVKMTLGMIWTIILRFAIQDISVEETSAKEGLLLWCQRKTAPYRNVNIQNFHTSWKDGLGLCALIHRHRPDLIDYSKLNKDDPIGNINLAMEIAEKHLDIPKMLDAEDLVYTARPDERAIMTYVSCYYHAFAGAQKAETAANRICKVLAVNQENERLMEEYERLASELLEWIRRTIPWLENRTPEKTMQAMQKKLEDFRDYRRKHKPPKVQEKCQLEINFNTLQTKLRISNRPAFMPSEGKMVSDIAGAWQRLEQAEKGYEEWLLNEIRRLERLEHLAEKFRQKASTHETWAYGKEQILLQKDYESASLTEVRALLRKHEAFESDLAAHQDRVEQIAAIAQELNELDYHDAVNVNDRCQKICDQWDRLGTLTQKRREALERMEKLLETIDQLHLEFAKRAAPFNNWMEGAMEDLQDMFIVHSIEEIQSLITAHEQFKATLPEADGERQSIMAIQNEVEKVIQSYNIRISSSNPYSTVTMDELRTKWDKVKQLVPIRDQSLQEELARQHANERLRRQFAAQANAIGPWIQNKMEEIARSSIQITGALEDQMNQLKQYEHNIINYKNNIDKLEGDHQLIQEALVFDNKHTNYTMEHIRVGWELLLTTIARTINEVETQILTRDAKGITQEQMNEFRASFNHFDRRKNGLMDHEDFRACLISMGYDLGEAEFARIMTLVDPNGQGTVTFQSFIDFMTRETADTDTAEQVIASFRILASDKPYILAEELRRELPPDQAQYCIKRMPAYSGPGSVPGALDYAAFSSALYGESDL

SEQ ID NO: 98107 - DNA, 2685 bp, Artificial Sequence
  derived and/or modified sequence
atgaatcagatagaacccggggtccagtacaactacgtgtacgacgaggatgaatatatgatacaggaagaagagtgggaccgcgacctcctgctggaccccgcctgggaaaaacaacagcggaaaacctttacagcctggtgcaactcgcacctacggaaagctggtacccagatcgagaatatcgaagaggatttccggaacgggttgaaattgatgctacttctggaagtgatatctggcgagaggctgccaaagcccgacaggggtaaaatgcggttccataagattgccaacgtaaataaagctctcgactatatagcctctaagggggtgaaattggtctccatcggcgcggaagagattgtggacggtaacgtgaaaatgaccctcgggatgatatggacaattatcctgagatttgccattcaggatatctcagtggaggaaacgtctgcaaaggaaggcctgctgttatggtgccaaagaaagaccgctccctaccgcaacgttaatatccagaattttcatacctcttggaaggacggtctggggctctgcgccttgattcatagacaccgtcctgatttgatcgactactcgaagctgaacaaggacgaccctatcggcaacatcaatttagccatggaaattgcagaaaagcacctcgatatcccaaagatgctggatgccgaggacctcgtgtataccgcgagaccggacgagagggctatcatgacttatgtgagttgttactaccacgctttcgccggggcccagaaggcagagaccgctgctaacagaatctgtaaagttctcgccgtgaatcaggaaaatgaacggttgatggaagaatacgaaagactggccagcgagttgctggagtggatccgaagaaccattccttggctggagaacaggacccctgaaaagactatgcaggctatgcagaaaaagctggaggatttcagggattaccggcggaagcataaacctccaaaggtgcaggagaagtgccagctagagattaatttcaacacgctgcagacaaaactgagaatctccaaccgccctgcattcatgccctcggaaggcaagatggtgtccgatatagcaggtgcctggcaaagactggaacaggccgagaaaggatatgaggagtggctgctgaacgagatccgaaggctcgagcgattggaacatttggcggagaagtttagacaaaaggcgagtacgcatgagacctgggcctacgggaaggaacagatactgcttcagaaggactacgagtcagctagcttgacagaagttcgtgcgcttctgagaaagcatgaggcatttgagtctgatttggccgcccaccaggaccgggttgaacagattgctgctattgcccaggagttgaacgaactggattatcacgacgctgtgaatgtaaatgacaggtgtcagaagatatgcgaccagtgggataggctcgggaccctaacccagaagcggcgcgaggccctggagagaatggaaaagttgctagagactattgaccagctccacctggaatttgcaaaaagggcagctccttttaataactggatggaaggcgccatggaagacctccaggatatgttcattgtgcactccattgaggagatccagtctctgattactgcccacgaacagtttaaagccacgttgccagaggctgacggcgaacggcagagcataatggctattcaaaatgaggttgaaaaggtaatacaatcatacaacatccgcatatccagctcaaacccctattctactgtgacaatggatgagttgcgcactaagtgggataaagtgaagcagctggtgcctatcagagatcagagcctgcaggaggagttagccaggcaacatgccaatgaaagactcagacgacagttcgcagcgcaggctaatgccatcggtccttggatacaaaacaagatggaggaaatcgcacgcagttccatacagattacgggcgctctcgaagatcaaatgaatcagctgaagcagtatgagcacaatattatcaactacaaaaacaatattgacaagctggaaggtgatcatcagttaatccaggaagcattggtgtttgacaacaaacataccaattatacaatggagcacatacgtgttgggtgggagctgctcctgaccactattgccagaaccataaacgaggtggagacccaaatattaacaagagacgcaaagggcattacacaagaacagatgaatgaattccgcgcttcttttaatcattttgatagacggaaaaatggactgatggaccacgaagactttcgggcttgtctaatctccatgggatacgatctcggcgaagctgagtttgcgaggatcatgaccttggttgatccaaacggacaggggaccgtgacatttcaatccttcatcgactttatgacaagggaaacagctgacacggatacggcagagcaggtcattgcttcctttaggatactagcctcagacaagccatacattctggcggaagaacttcggagagagctgcctcctgaccaagcccagtactgcattaaaaggatgcccgcatatagcggtccaggctccgtgcccggggccctggactacgctgcgttctcgtcggcgttatatggcgagtcagatctgtag

SEQ ID NO: 98108 - DNA, 2685 bp, Artificial Sequence
  derived and/or modified sequence
atgaaccagatcgagcccggggtgcagtacaactacgtgtatgatgaagatgagtacatgatccaggaggaggagtgggaccgggacctgctgctggaccctgcctgggagaagcagcagaggaagaccttcaccgcctggtgcaacagccacctgaggaaggccggcacccagatcgagaacatcgaggaggacttcagaaatggcctgaagctgatgctgctgctggaggtgatcagcggggagcggctgcccaagccagaccggggcaagatgaggttccacaagatcgccaacgtgaacaaggccctggactacatcgccagcaagggcgtgaagctggtgtccattggagctgaggagatcgtggatggaaatgtgaagatgaccctgggcatgatctggaccatcatcctgcgctttgccatccaggacatctctgtggaggagaccagcgccaaggagggcctgctgctgtggtgccagaggaagacagccccctacagaaatgtgaacatccagaacttccacacctcctggaaggatggcctgggcctgtgtgccctgatccaccgccacaggccagacctgattgactacagcaagctgaacaaggatgaccccatcggcaacatcaacctggccatggagattgctgagaagcacctggacatccccaagatgctggatgctgaggacctggtgtacacagcccggccagatgagcgggccatcatgacctacgtgtcctgctactaccacgcctttgctggggcccagaaggccgagacagctgccaaccgcatctgcaaggtgctggccgtgaaccaggagaatgaaaggctgatggaggagtatgaaaggctggccagcgagctgctggagtggatccggaggaccatcccctggctggagaacagaacacctgagaagaccatgcaggccatgcagaagaagctggaggacttccgggactacagaaggaagcacaagccacccaaggtgcaggagaagtgccagctggagatcaacttcaacaccctgcagaccaagctgcgcatcagcaacagacctgccttcatgcccagcgagggcaagatggtgtctgacattgctggggcctggcagaggctggagcaggccgagaagggctatgaggagtggctgctgaatgagatccggcggctggagcggctggagcacctggccgagaagttccggcagaaggccagcacccatgagacctgggcctacggcaaggagcagatcctgctgcagaaggactatgaaagtgccagcctgacagaggtgcgggccctgctgaggaagcatgaggcctttgaaagtgacctggccgcccaccaggacagagtggagcagattgctgccatcgcccaggagctgaatgagctggactaccatgatgctgtgaatgtgaatgaccgctgccagaagatctgtgaccagtgggaccggctgggcaccctgacccagaagaggcgggaggccctggagaggatggagaagctgctggagaccatcgaccagctgcacctggagtttgccaagagagctgcccccttcaacaactggatggagggcgccatggaggacctgcaggacatgttcatcgtgcacagcattgaggagatccagagcctcatcacagcccacgagcagttcaaggccaccctgcctgaggctgatggagagcggcagagcatcatggccatccagaatgaggtggagaaggtgatccagagctacaacatccgcatcagcagcagcaacccctacagcacagtgaccatggatgagctgcggaccaagtgggacaaggtgaagcagctggtgcccatccgggaccagagcctgcaggaggagctggcccggcagcacgccaatgaaaggctgcggcggcagtttgctgcccaggccaatgccatcggcccctggatccagaacaagatggaggagatcgcccggagcagcatccagatcaccggggccctggaggaccagatgaaccagctgaagcagtatgagcacaacatcatcaactacaagaacaacatcgacaagctggagggggaccaccagctgatccaggaggccctggtgtttgacaacaagcacaccaactacaccatggagcacatccgggtgggctgggagctgctgctgaccaccatcgcccggaccatcaatgaggtggagacccagatcctgaccagagatgccaagggcatcacccaggagcagatgaatgagttccgggccagcttcaaccactttgacaggaggaagaatggcctgatggaccacgaggacttccgggcctgcctgatctccatgggctatgacctgggggaggccgagtttgcccgcatcatgaccctggtggaccccaacggccagggcaccgtgaccttccagagcttcatcgacttcatgacccgggagacagctgacacagacacagctgagcaggtgattgccagcttccgcatcctggccagtgacaagccctacatcctggccgaggagctgcggcgggagctgcccccagaccaggcccagtactgcatcaagaggatgcctgcctacagcggccctggctctgtgcctggggccctggactatgctgccttcagcagcgccctgtatggagagagtgacctgtag

SEQ ID NO: 98109 - DNA, 2685 bp, Artificial Sequence
  derived and/or modified sequence
atgaaccagatcgagcccggcgtgcagtacaactacgtgtacgacgaggatgagtatatgatacaggaagaggaatgggatagggatctactcctggacccagcttgggaaaaacagcagcggaaaacattcaccgcctggtgcaactcccacctgagaaaagccggaacccaaatcgagaacatcgaggaggacttcagaaacggtctcaaacttatgctcctccttgaagttatcagtggggaacggctacccaagcccgaccgtggcaaaatgaggttccataagattgccaacgtgaacaaagcattggattatatagctagcaaaggtgtcaagttggtgtctataggggccgaggaaatcgtggacggcaatgtgaagatgacgcttggtatgatctggaccatcatcttacgcttcgctatccaggatatcagcgtggaggagacctcagctaaggaagggctgctgttgtggtgtcagaggaagacagctccttaccgaaatgtgaacatccaaaatttccatactagctggaaggatggattgggcctatgcgctttgatacaccggcatagaccagacttgattgactactcgaaactgaacaaagatgatccgattggcaacatcaacctggccatggaaattgccgagaagcatctagacatacctaagatgctcgacgccgaagatttagtgtacactgcacgccctgacgaacgggccatcatgacatacgtgtcctgctactaccatgctttcgctggggctcagaaagctgaaacagcggctaatagaatctgtaaggtgctggcagtgaatcaagagaacgagaggctgatggaggaatacgaaagactggcctctgagcttttagagtggatcaggagaacaattccgtggctcgaaaatagaacacctgagaaaaccatgcaggccatgcagaaaaagctcgaggattttagagactaccggcgcaagcacaagcccccaaaagtgcaggaaaagtgccagctggaaatcaatttcaacaccctgcaaacaaagctgagaatttccaacagacccgcgtttatgccaagcgaggggaagatggtaagtgacatagctggggcatggcagcggctggaacaggctgagaagggatacgaggaatggttgctgaatgaaatacggcggctggaaagattggagcatctcgctgagaagtttaggcagaaggcatcaactcatgaaacgtgggcctatggtaaggagcagattctgcttcagaaagactacgagtccgcaagtttgacagaagtgcgggcattgcttcgcaagcacgaggcctttgagtcagatctcgccgcccatcaggacagagtcgagcagattgcggcaattgcgcaagagttgaacgagttggattaccacgacgctgtgaacgtcaatgaccggtgccagaagatctgcgatcaatgggatcgactgggcacccttacacaaaaacgccgcgaagctcttgaacgaatggaaaagctcctcgaaactatagaccagctccacctggagttcgccaagcgggctgctcctttcaataactggatggagggggcaatggaagatttgcaggacatgttcattgttcacagcatcgaggagatacaatcactcataactgctcatgaacaatttaaagccactctaccggaggccgacggtgagcgccaaagcataatggccattcagaacgaggtcgaaaaggtaattcaatcctataacatccggatttctagttctaacccctacagtactgtcaccatggatgagctccggaccaaatgggacaaggtgaagcaactcgtgccaatacgagatcagagtctccaggaagaattggcacggcagcacgcaaacgaacggttgagaagacaatttgccgcacaggccaacgctattgggccctggattcagaacaagatggaagaaatcgcccgctcctctatccagattaccggagccctggaggaccagatgaaccaactgaagcagtacgagcataatattattaattataagaacaacatagacaagcttgagggagaccaccagctcattcaggaggctctggtgttcgataacaagcacaccaattacaccatggagcacatccgcgtcggatgggagcttctactcacgacaatcgcacggactattaatgaagtcgaaacccagattctcacccgggatgccaagggaataacccaggaacaaatgaatgagttccgggcctctttcaatcattttgatcgcagaaagaatgggctgatggaccacgaggactttagagcctgtctgatttctatggggtacgacctgggagaggcagaatttgctcgaatcatgacactggtcgaccctaacggacaagggacagttaccttccagagctttatcgatttcatgacaagagaaaccgccgatacagacactgccgaacaggtgatagcaagtttccgcattcttgcctccgataagccctatattttggctgaagagcttcgtagagaacttccacccgaccaggcccagtactgtatcaaacggatgcctgcttacagcggcccaggttcggtccccggcgccttggactacgccgctttctcttcagcactgtacggtgagtcagatctgtag

SEQ ID NO: 98110 - DNA, 2685 bp, Artificial Sequence
  derived and/or modified sequence
atgaatcaaatcgaaccaggagtccaatataactatgtgtacgatgaggatgaatacatgattcaggaagaggagtgggatcgagatctgctcctcgaccccgcatgggaaaaacagcaacggaaaacattcacagcctggtgcaattcccacttaagaaaagccggtacccagattgaaaatattgaggaggatttcagaaacgggcttaagctcatgctcttactggaggttatcagcggcgagcgtctgcccaagccggatcggggaaagatgagatttcataagattgcaaacgtgaataaagcattagattatattgcttctaagggagtgaagctggtatctatcggcgcagaggagattgtggatggaaacgtgaaaatgacccttggaatgatttggacaattatcctccggttcgccatccaggatatttccgtggaggagaccagtgcaaaagaaggtttgttgctttggtgccagcgcaaaactgctccctatagaaatgtgaatatccagaactttcatacttcatggaaagacgggctaggcctatgcgcattaatccaccgccaccgtcctgatttaattgactactcaaagttaaacaaggacgatcctatcggaaatattaacctagctatggagatagctgagaaacacctcgacattccgaagatgcttgacgcggaggacttagtgtacacagcacggcctgatgaaagagcgattatgacttacgtgagctgttactatcatgcctttgccggtgcccagaaagctgaaacggctgccaatagaatttgtaaggtgctcgccgtaaatcaagagaacgagcgactcatggaggaatatgagcgtctcgccagcgaactccttgagtggatccggagaaccatcccatggctagagaacagaacgccagagaaaaccatgcaagcaatgcagaaaaagttagaagactttagagactacaggagaaagcacaagccgccaaaagtacaagagaagtgtcagttagaaattaactttaatactttgcagaccaagttgcggatatccaaccgtcccgctttcatgccatcagagggcaagatggtcagtgacatagccggagcatggcagcgcttggaacaagcagaaaaggggtacgaggaatggctgctgaatgagatccgcaggttggagagattagagcacctcgctgaaaagttcaggcagaaggctagcactcacgaaacatgggcttacggcaaagaacagattcttcttcagaaggattatgagtcagccagtctgacagaggtccgggctctgctcaggaagcatgaagcgttcgagtccgacctggccgcacatcaggaccgagtggagcagatcgcggctatcgctcaggagctcaacgaactggattaccatgatgctgtcaacgtaaatgatcggtgccagaagatttgcgatcagtgggacaggttgggtaccctgactcagaagaggcgcgaagctctcgagaggatggaaaagctactcgaaacaattgatcagcttcatcttgagtttgccaagcgcgcagccccatttaataactggatggagggagccatggaggacctgcaggacatgttcatcgtgcattctatcgaggagatccagtcgttgataaccgctcatgaacaattcaaggccacattacccgaagcggacggtgagcgccagtcaattatggctatccagaacgaagtagaaaaagtcattcaatcatacaacatccgaatttcgtcaagcaatccgtatagcactgtaactatggacgagctccgcacaaagtgggacaaggttaaacagctggtcccaatccgtgatcagtccttgcaggaggagctcgctaggcagcacgccaacgagagactgaggcgacagttcgccgctcaggccaatgccatcggcccatggattcagaacaagatggaggagatcgctcgctcatccattcaaatcacgggggctctagaagaccaaatgaaccagttgaagcaatatgagcacaacatcattaactataagaacaacatagataaactcgaaggcgaccaccagcttattcaggaagctctggtattcgacaataagcataccaattatactatggagcacattagggtgggctgggagctgttactgacaactatcgccaggaccataaatgaagtcgaaacgcagatcctcacgagagatgcaaaaggaatcacacaggagcagatgaatgaatttcgtgcctcttttaatcacttcgacagaaggaaaaatggtctgatggaccacgaggattttagggcatgcctgatctctatggggtacgacctgggcgaagccgagtttgcccgtatcatgacattggtggaccctaatggccaggggactgtgacatttcagtccttcattgactttatgacacgcgagaccgcagacaccgacacggcagaacaggttattgccagtttcagaattcttgcgtcagataagccatacatacttgctgaagaattgcggcgagaattacccccagatcaggcacagtattgcattaagagaatgcccgcatatagcggcccaggatctgtcccaggggcacttgactatgccgctttctcctccgccctgtacggggaaagcgatctttag

SEQ ID NO: 98111 - DNA, 2905 bp, Artificial Sequence
  derived and/or modified sequence
gacgggcggcgcggctattaagccgcgcggcagctgctcgcagccggagctggtgcttcgcccgagacccagcgcccaggcgtgtcgccccgagaggagccgcgcgaaggtcaccccgcgcccgccgcccgccgcccgccgcctccgtgggtccgtttgccagtcagcccgtgcgtccgagcccctcgcgccccgccgcagccccggccaaccgagcgccatgaaccagatagagcccggcgtgcagtacaactacgtgtacgacgaggatgagtacatgatccaggaggaggagtgggaccgcgacctgctcctggacccagcctgggagaagcagcagaggaagaccttcactgcctggtgtaactcccacctaaggaaagccggcacccagattgagaacatcgaggaagacttcaggaatggccttaagctcatgctgcttttggaagtcatctcaggggaaaggctgcccaaacctgaccggggaaaaatgcggttccacaaaattgctaatgtcaacaaagctttggattacatagccagcaaaggggtgaaactggtgtccattggcgctgaagaaattgttgatggcaacgtgaaaatgaccctgggtatgatctggaccatcatccttcgctttgctattcaggatatttcggttgaagaaacatctgccaaagaaggtctgctgctttggtgtcagaggaaaactgctccttatagaaatgtgaacattcagaacttccatactagctggaaagatggccttggactctgtgccctcatccaccgacaccggcctgacctcattgactactcaaagcttaacaaggatgaccccataggaaatattaacctggccatggaaatcgctgagaagcacctggatattcctaaaatgttggatgctgaagatttagtatacactgccagacccgatgaaagagccataatgacttatgtttcctgttactatcatgcttttgctggtgcacagaaggccgagacagcggctaacaggatatgtaaggttcttgctgtgaatcaagagaatgagaggctgatggaagaatatgagaggctagcgagtgagcttttggaatggattcgtcgcacgatcccctggctggagaaccggactcccgagaagaccatgcaagccatgcagaagaagctggaggacttccgggattaccgccggaagcacaagccacccaaggtgcaggagaaatgccagctggagatcaacttcaacacgctgcagaccaagctgcggatcagcaaccgtcctgccttcatgccctccgagggcaagatggtgtcggatattgctggtgcctggcagaggctggagcaggctgagaagggttacgaggagtggttgctcaatgagattcggagactggagcgcttggaacacctggctgagaagttcaggcagaaggcctcaacgcacgagacttgggcttatggcaaagagcagatcttgctgcagaaggattacgagtcggcgtcgctgacagaggtgcgggctctgctgcggaagcacgaggcgttcgagagcgacctggcagcgcaccaggaccgcgtggagcagatcgcagccatcgcgcaggagctcaatgaactggactatcacgacgctgtgaatgtcaatgatcggtgccagaaaatttgtgaccagtgggaccgactgggaacgcttactcagaagaggagagaagccctagagagaatggagaaattgctagaaaccattgatcagcttcacctggagtttgccaagagggctgctcctttcaacaattggatggagggcgctatggaggatctgcaagatatgttcattgtccacagcattgaggagatccagagtctgatcactgcgcatgagcagttcaaggccacgctgcccgaggcggacggagagcggcagtccatcatggccatccagaacgaggtggagaaggtgattcagagctacaacatcagaatcagctcaagcaacccgtacagcactgtcaccatggatgagctccggaccaagtgggacaaggtgaagcaactcgtgcccatccgcgatcaatccctgcaggaggagctggctcgccagcatgctaacgagcgtctgaggcgccagtttgctgcccaagccaatgccattgggccctggatccagaacaagatggaggagattgcccggagctccatccagatcacaggagccctggaagaccagatgaaccagctgaagcagtatgagcacaacatcatcaactataagaacaacatcgacaagctggagggagaccatcagctcatccaggaggcccttgtctttgacaacaagcacacgaactacacgatggagcacattcgtgttggatgggagctgctgctgacaaccatcgccagaaccatcaatgaggtggagactcagatcctgacgagagatgcgaagggcatcacccaggagcagatgaatgagttcagagcctccttcaaccactttgacaggaggaagaatggcctgatggatcatgaggatttcagagcctgcctgatttccatgggttatgacctgggtgaagccgaatttgcccgcattatgaccctggtagatcccaacgggcaaggcaccgtcaccttccaatccttcatcgacttcatgactagagagacggctgacaccgacactgccgagcaggtcatcgcctccttccggatcctggcttctgataagccatacatcctggcggaggagctgcgtcgggagctgcccccggatcaggcccagtactgcatcaagaggatgcccgcctactcgggcccaggcagtgtgcctggtgcactggattacgctgcgttctcttccgcactctacggggagagcgatctgtga

SEQ ID NO: 98112 - DNA, 1994 bp, Artificial Sequence
  derived and/or modified sequence
tattaacctggccatggaaatcgctgagaagcacctggatattcctaaaatgttggatgctgaagatttagtatacactgccagacccgatgaaagagccataatgacttatgtttcctgttactatcatgcttttgctggtgcacagaaggccgagacagcggctaacaggatatgtaaggttcttgctgtgaatcaagagaatgagaggctggagcaggctgagaagggttacgaggagtggttgctcaatgagattcggagactggagcgcttggaacacctggctgagaagttcaggcagaaggcctcaacgcacgagacttgggcttatggcaaagagcagatcttgctgcagaaggattacgagtcggcgtcgctgacagaggtgcgggctctgctgcggaagcacgaggcgttcgagagcgacctggcagcgcaccaggaccgcgtggagcagatcgcagccatcgcgcaggagctcaatgaactggactatcacgacgctgtgaatgtcaatgatcggtgccagaaaatttgtgaccagtgggaccgactgggaacgcttactcagaagaggagagaagccctagagagaatggagaaattgctagaaaccattgatcagcttcacctggagtttgccaagagggctgctcctttcaacaattggatggagggcgctatggaggatctgcaagatatgttcattgtccacagcattgaggagatccagagtctgatcactgcgcatgagcagttcaaggccacgctgcccgaggcggacggagagcggcagtccatcatggccatccagaacgaggtggagaaggtgattcagagctacaacatcagaatcagctcaagcaacccgtacagcactgtcaccatggatgagctccggaccaagtgggacaaggtgaagcaactcgtgcccatccgcgatcaatccctgcaggaggagctggctcgccagcatgctaacgagcgtctgaggcgccagtttgctgcccaagccaatgccattgggccctggatccagaacaagatggaggagattgcccggagctccatccagatcacaggagccctggaagaccagatgaaccagctgaagcagtatgagcacaacatcatcaactataagaacaacatcgacaagctggagggagaccatcagctcatccaggaggcccttgtctttgacaacaagcacacgaactacacgatggagcacattcgtgttggatgggagctgctgctgacaaccatcgccagaaccatcaatgaggtggagactcagatcctgacgagagatgcgaagggcatcacccaggagcagatgaatgagttcagagcctccttcaaccactttgacaggaggaagaatggcctgatggatcatgaggatttcagagcctgcctgatttccatgggttatgacctgggtgaagccgaatttgcccgcattatgaccctggtagatcccaacgggcaaggcaccgtcaccttccaatccttcatcgacttcatgactagagagacggctgacaccgacactgccgagcaggtcatcgcctccttccggatcctggcttctgataagccatacatcctggcggaggagctgcgtcgggagctgcccccggatcaggcccagtactgcatcaagaggatgcccgcctactcgggcccaggcagtgtgcctggtgcactggattacgctgcgttctcttccgcactctacggggagagcgatctgtgatgctgagcttctgtaatcactcatcccatcagaatgcaataaaagcggaagtcacagtttgtttcctggaaactttgacaagctttattaagttgagagagagagaggggaaaaaaaaaagcctttcgtagttcagtaattgccagcaatataacacggctaaaatgaagtttttacagtatatgacatagtgcgcttcataaataggtttatttctgagtttttagca

SEQ ID NO: 98113 - DNA, 2685 bp, Artificial Sequence
  derived and/or modified sequence
atgaaccagatcgagcccggcgtgcagtacaactacgtgtacgacgaggacgagtacatgatccaggaggaggagtgggacagagacctgctgctggaccccgcctgggagaagcagcagagaaagaccttcaccgcctggtgcaacagccacctgagaaaggccggcacccagatcgagaacatcgaggaggacttcagaaacggcctgaagctgatgctgctgctggaggtgatcagcggcgagagactgcccaagcccgacagaggcaagatgagattccacaagatcgccaacgtgaacaaggccctggactacatcgccagcaagggcgtgaagctggtgagcatcggcgccgaggagatcgtggacggcaacgtgaagatgaccctgggcatgatctggaccatcatcctgagattcgccatccaggacatcagcgtggaggagaccagcgccaaggagggcctgctgctgtggtgccagagaaagaccgccccctacagaaacgtgaacatccagaacttccacaccagctggaaggacggcctgggcctgtgcgccctgatccacagacacagacccgacctgatcgactacagcaagctgaacaaggacgaccccatcggcaacatcaacctggccatggagatcgccgagaagcacctggacatccccaagatgctggacgccgaggacctggtgtacaccgccagacccgacgagagagccatcatgacctacgtgagctgctactaccacgccttcgccggcgcccagaaggccgagaccgccgccaacagaatctgcaaggtgctggccgtgaaccaggagaacgagagactgatggaggagtacgagagactggccagcgagctgctggagtggatcagaagaaccatcccctggctggagaacagaacccccgagaagaccatgcaggccatgcagaagaagctggaggacttcagagactacagaagaaagcacaagccccccaaggtgcaggagaagtgccagctggagatcaacttcaacaccctgcagaccaagctgagaatcagcaacagacccgccttcatgcccagcgagggcaagatggtgagcgacatcgccggcgcctggcagagactggagcaggccgagaagggctacgaggagtggctgctgaacgagatcagaagactggagagactggagcacctggccgagaagttcagacagaaggccagcacccacgagacctgggcctacggcaaggagcagatcctgctgcagaaggactacgagagcgccagcctgaccgaggtgagagccctgctgagaaagcacgaggccttcgagagcgacctggccgcccaccaggacagagtggagcagatcgccgccatcgcccaggagctgaacgagctggactaccacgacgccgtgaacgtgaacgacagatgccagaagatctgcgaccagtgggacagactgggcaccctgacccagaagagaagagaggccctggagagaatggagaagctgctggagaccatcgaccagctgcacctggagttcgccaagagagccgcccccttcaacaactggatggagggcgccatggaggacctgcaggacatgttcatcgtgcacagcatcgaggagatccagagcctgatcaccgcccacgagcagttcaaggccaccctgcccgaggccgacggcgagagacagagcatcatggccatccagaacgaggtggagaaggtgatccagagctacaacatcagaatcagcagcagcaacccctacagcaccgtgaccatggacgagctgagaaccaagtgggacaaggtgaagcagctggtgcccatcagagaccagagcctgcaggaggagctggccagacagcacgccaacgagagactgagaagacagttcgccgcccaggccaacgccatcggcccctggatccagaacaagatggaggagatcgccagaagcagcatccagatcaccggcgccctggaggaccagatgaaccagctgaagcagtacgagcacaacatcatcaactacaagaacaacatcgacaagctggagggcgaccaccagctgatccaggaggccctggtgttcgacaacaagcacaccaactacaccatggagcacatcagagtgggctgggagctgctgctgaccaccatcgccagaaccatcaacgaggtggagacccagatcctgaccagagacgccaagggcatcacccaggagcagatgaacgagttcagagccagcttcaaccacttcgacagaagaaagaacggcctgatggaccacgaggacttcagagcctgcctgatcagcatgggctacgacctgggcgaggccgagttcgccagaatcatgaccctggtggaccccaacggccagggcaccgtgaccttccagagcttcatcgacttcatgaccagagagaccgccgacaccgacaccgccgagcaggtgatcgccagcttcagaatcctggccagcgacaagccctacatcctggccgaggagctgagaagagagctgccccccgaccaggcccagtactgcatcaagagaatgcccgcctacagcggccccggcagcgtgcccggcgccctggactacgccgccttcagcagcgccctgtacggcgagagcgacctgtag

SEQ ID NO: 98114 - protein, 663 aa, Artificial Sequence
  derived and/or modified sequence
STLSSVEGPPESSTCSYQEMRRSSVNSSAMAETAANRICKVLAVNQENERLMEEYERLASELLEWIRRTIPWLENRTPEKTMQAMQKKLEDFRDYRRKHKPPKVQEKCQLEINFNTLQTKLRISNRPAFMPSEGKMVSDIAGAWQRLEQAEKGYEEWLLNEIRRLERLEHLAEKFRQKASTHETWAYGKEQILLQKDYESASLTEVRALLRKHEAFESDLAAHQDRVEQIAAIAQELNELDYHDAVNVNDRCQKICDQWDRLGTLTQKRREALERMEKLLETIDQLHLEFAKRAAPFNNWMEGAMEDLQDMFIVHSIEEIQSLITAHEQFKATLPEADGERQSIMAIQNEVEKVIQSYNIRISSSNPYSTVTMDELRTKWDKVKQLVPIRDQSLQEELARQHANERLRRQFAAQANAIGPWIQNKMEEIARSSIQITGALEDQMNQLKQYEHNIINYKNNIDKLEGDHQLIQEALVFDNKHTNYTMEHIRVGWELLLTTIARTINEVETQILTRDAKGITQEQMNEFRASFNHFDRRKNGLMDHEDFRACLISMGYDLGEAEFARIMTLVDPNGQGTVTFQSFIDFMTRETADTDTAEQVIASFRILASDKPYILAEELRRELPPDQAQYCIKRMPAYSGPGSVPGALDYAAFSSALYGESDL

SEQ ID NO: 98115 - protein, 388 aa, Artificial Sequence
  derived and/or modified sequence
MEKLLETIDQLHLEFAKRAAPFNNWMEGAMEDLQDMFIVHSIEEIQSLITAHEQFKATLPEADGERQSIMAIQNEVEKVIQSYNIRISSSNPYSTVTMDELRTKWDKVKQLVPIRDQSLQEELARQHANERLRRQFAAQANAIGPWIQNKMEEIARSSIQITGALEDQMNQLKQYEHNIINYKNNIDKLEGDHQLIQEALVFDNKHTNYTMEHIRVGWELLLTTIARTINEVETQILTRDAKGITQEQMNEFRASFNHFDRRKNGLMDHEDFRACLISMGYDLGEAEFARIMTLVDPNGQGTVTFQSFIDFMTRETADTDTAEQVIASFRILASDKPYILAEELRRELPPDQAQYCIKRMPAYSGPGSVPGALDYAAFSSALYGESDL

SEQ ID NO: 98116 - DNA, 1992 bp, Artificial Sequence
  derived and/or modified sequence
agcaccctgtctagcgtggaaggaccaccggagtccagtacttgcagctatcaagagatgcgacgctcatctgtgaatagcagcgccatggctgagactgccgccaaccgcatttgcaaggtgctggcagtgaaccaggaaaatgagagactgatggaagagtatgaaaggctggctagcgagctgctggagtggatacggcgcaccatcccgtggctagagaataggactccggaaaaaactatgcaggcaatgcaaaagaaactcgaagatttcagggattacagaagaaagcataaaccaccaaaggttcaagaaaagtgtcagctggagatcaactttaatacgctgcagacaaaactccgtatctccaatcgtcctgctttcatgccctcagaagggaaaatggtatccgatattgcaggggcctggcaacgtctggagcaagctgagaaaggttatgaggagtggttactgaatgagatccgccggctggaacgcctcgagcatctggccgagaagttcaggcagaaagcatctacccacgaaacatgggcttacgggaaagagcagattctgctacagaaggactatgagtctgcctccctgactgaagttcgggcgttactgagaaaacatgaagcctttgagtccgatctagcagcccaccaggaccgggtggagcagattgctgcaatagcccaagaactgaacgagctagactatcacgatgcagttaacgtgaacgaccggtgccaaaagatctgcgatcagtgggatcgcctaggcaccctgacacagaagcgccgtgaggccctggagagaatggagaaactgttggaaactatagaccagctccatttagagtttgcaaagcgggccgcaccgttcaacaattggatggaaggtgccatggaagaccttcaggatatgttcatcgtacactccatcgaagagattcagtctctcattacagctcacgagcagttcaaggccactctgcccgaagccgacggggagaggcagagtatcatggccattcaaaacgaggtcgagaaagtgatccagtcttacaacattcgcattagctccagcaatccatacagcactgttactatggatgagctgagaacaaaatgggataaggtcaaacagctggtacccatccgcgatcaatctctgcaggaggagcttgcccgtcagcatgcaaatgagagactcagacgacagtttgctgcacaagccaacgctatcggcccctggatccagaacaaaatggaggaaatcgcaaggagctctatccaaattaccggagcactggaagaccaaatgaaccagctaaagcagtacgagcacaatataatcaactataagaacaatatagacaaattagaaggggatcaccagctcatccaggaagctctggtcttcgacaataaacacactaactacaccatggaacacatcagagtggggtgggaacttctcctcacgaccattgctcggaccatcaacgaggttgagacccagattctcacacgcgatgcaaaggggattacccaagagcagatgaacgagtttcgagcttcattcaaccatttcgaccgccgcaaaaatggtctgatggatcacgaagattttcgtgcctgtctgatttcaatgggatacgacctcggcgaggctgaatttgcccggatcatgacactcgttgatccaaacggccagggcacggtcacatttcaatctttcattgattttatgaccagggaaacagcagacacagatacagcagagcaagtgattgcaagctttcgtattctagcctctgacaagccctacatactggctgaagagctcaggcgggagttgcctccagaccaggctcagtactgcataaaaagaatgcccgcctattcgggccccggaagtgtgcccggagctctcgattacgctgcctttagctctgctctttacggcgaatctgacttgtag

SEQ ID NO: 98117 - DNA, 1167 bp, Artificial Sequence
  derived and/or modified sequence
atggaaaagctgctggagactatcgatcagctccatttagagttcgctaagcgggcagcccctttcaacaattggatggaaggggcaatggaggatttgcaggacatgtttatcgttcactctattgaagaaatccagtcattgataacagctcacgagcaattcaaggcaacattacccgaggctgacggtgaacggcaaagcattatggcaatccagaatgaagttgagaaggttatacagtcttacaacattcggataagctctagtaacccctacagcacagtgaccatggatgaactcaggaccaaatgggacaaggtgaagcagctggttcctatcagagatcaatccctgcaggaggagttagcccgccagcatgcaaacgagcgcctccggcggcagttcgcagcccaggcgaatgcaataggcccctggattcaaaacaaaatggaggaaatcgcacggagtagtatacaaataacgggagcactggaggaccaaatgaaccaactcaaacaatatgagcacaacatcatcaactataaaaataacattgataaattggaaggcgatcatcagctgatccaggaggctttggtgtttgacaacaagcacacgaattatacgatggagcacattagggtgggctgggagctgctattgaccactatcgcgagaacaatcaacgaggtggagacccagattcttacacgtgatgcgaagggtattacacaggagcagatgaatgaattccgggcttcctttaatcattttgatcggcggaaaaatggtctaatggaccacgaggattttcgcgcttgcctgatctctatgggatatgacctaggcgaagctgaatttgctcggatcatgacactggtcgaccccaacggacagggaaccgtgaccttccagagctttatagattttatgactagagagaccgctgatacggacacagcggaacaggttatcgcgtctttccgtatcctcgcgtctgataaaccatacattctggccgaggaattgaggcgcgagctgcccccggaccaggcccagtactgtatcaagcgcatgcccgcatactccgggcccggctcagttcccggcgcccttgattacgccgcctttagttcagcactctatggggaaagtgatctgtag

SEQ ID NO: 98118 - DNA, 1992 bp, Artificial Sequence
  derived and/or modified sequence
agcaccctgagctctgtggagggccccccagagagcagcacctgcagctaccaggagatgagaagaagctctgtgaacagcagcgccatggccgagacagctgccaaccgcatctgcaaggtgctggccgtgaaccaggagaatgaaaggctgatggaggagtatgagcggctggccagcgagctgctggagtggatccggaggaccatcccctggctggagaacagaacacctgagaagaccatgcaggccatgcagaagaagctggaggacttccgggactacagaaggaagcacaagccacccaaggtgcaggagaagtgccagctggagatcaacttcaacaccctgcagaccaagctgcgcatcagcaacagacctgccttcatgcccagcgagggcaagatggtgtctgacattgctggggcctggcagaggctggagcaggccgagaagggctatgaggagtggctgctgaatgagatccggcggctggagcggctggagcacctggccgagaagttccggcagaaggccagcacccatgagacctgggcctacggcaaggagcagatcctgctgcagaaggactatgagagcgccagcctgacagaggtgcgggccctgctgaggaagcatgaggcctttgaaagtgacctggccgcccaccaggacagagtggagcagattgctgccatcgcccaggagctgaatgagctggactaccatgatgctgtgaatgtgaatgaccgctgccagaagatctgtgaccagtgggaccggctgggcaccctgacccagaagagaagagaggccctggagaggatggagaagctgctggagaccatcgaccagctgcacctggagtttgccaagagagctgcccccttcaacaactggatggagggcgccatggaggacctgcaggacatgtttattgtgcacagcattgaggagatccagagcctcatcacagcccacgagcagttcaaggccaccctgcctgaggctgatggagagcggcagagcatcatggccatccagaatgaggtggagaaggtgatccagagctacaacatccgcatcagcagcagcaacccctacagcacagtgaccatggatgagctgcggaccaagtgggacaaggtgaagcagctggtgcccatccgggaccagagcctgcaggaggagctggcccggcagcacgccaatgaaaggctgcggcggcagtttgctgcccaggccaatgccatcggcccctggatccagaacaagatggaggagatcgcccggagcagcatccagatcactggagccctggaggaccagatgaaccagctgaagcagtatgagcacaacatcatcaactacaagaacaacatcgacaagctggagggggaccaccagctgatccaggaggccctggtgtttgacaacaagcacaccaactacaccatggagcacatccgggtgggctgggagctgctgctgaccaccatcgcccggaccatcaatgaggtggagacccagatcctgaccagagatgccaagggcatcacccaggagcagatgaatgagttccgggccagcttcaaccactttgacaggaggaagaatggcctgatggaccacgaggacttccgggcctgcctgatctccatgggctatgacctgggggaggccgagtttgcccgcatcatgaccctggtggaccccaacggccagggcaccgtgaccttccagagcttcatcgacttcatgacccgggagacagctgacacagacacagctgagcaggtgattgccagcttccgcatcctggccagtgacaagccctacatcctggccgaggagctgcggcgggagctgcccccagaccaggcccagtactgcatcaagaggatgcctgcctacagcggccctggctctgtgcctggggccctggactatgctgccttcagcagcgccctgtatggagagagtgacctgtag

SEQ ID NO: 98119 - DNA, 1167 bp, Artificial Sequence
  derived and/or modified sequence
atggagaagctgctggagaccatcgaccagctgcacctggagtttgccaagagagctgcccccttcaacaactggatggagggcgccatggaggacctgcaggacatgttcatcgtgcacagcattgaggagatccagagcctcatcacagcccacgagcagttcaaggccaccctgcctgaggctgatggagagcggcagagcatcatggccatccagaatgaggtggagaaggtgatccagagctacaacatccgcatcagcagcagcaacccctacagcacagtgaccatggatgagctgcggaccaagtgggacaaggtgaagcagctggtgcccatccgggaccagagcctgcaggaggagctggcccggcagcacgccaatgaaaggctgcggcggcagtttgctgcccaggccaatgccatcggcccctggatccagaacaagatggaggagatcgcccggagcagcatccagatcaccggggccctggaggaccagatgaaccagctgaagcagtatgagcacaacatcatcaactacaagaacaacatcgacaagctggagggggaccaccagctgatccaggaggccctggtgtttgacaacaagcacaccaactacaccatggagcacatccgggtgggctgggagctgctgctgaccaccatcgcccggaccatcaatgaggtggagacccagatcctgaccagagatgccaagggcatcacccaggagcagatgaatgagttccgggccagcttcaaccactttgacaggaggaagaatggcctgatggaccacgaggacttccgggcctgcctgatctccatgggctatgacctgggggaggccgagtttgcccgcatcatgaccctggtggaccccaacggccagggcaccgtgaccttccagagcttcatcgacttcatgacccgggagacagctgacacagacacagctgagcaggtgattgccagcttccgcatcctggccagtgacaagccctacatcctggccgaggagctgcggcgggagctgcccccagaccaggcccagtactgcatcaagaggatgcctgcctacagcggccctggctctgtgcctggggccctggactatgctgccttcagcagcgccctgtatggagagagtgacctgtag

SEQ ID NO: 98120 - DNA, 1992 bp, Artificial Sequence
  derived and/or modified sequence
agcaccctgagcagcgtggagggcccccccgagagcagcacctgctcttatcaggaaatgcggcggtcatcagtcaatagctccgctatggcggaaaccgctgccaatagaatctgcaaggtactcgccgtgaatcaggagaacgaacgactgatggaagagtatgagaggctggcctccgagctacttgaatggatacgtagaaccataccctggctggagaatcgcacgccggaaaaaactatgcaggctatgcagaaaaaattagaggatttcagggactatagacgcaagcataaaccccccaaggtgcaggaaaagtgtcagctggaaatcaatttcaatacactacagactaagttgcgtatctcaaatcgacctgccttcatgccaagcgaagggaagatggtgtccgacattgccggagcttggcagcgcctggaacaggcggagaaggggtatgaggaatggctgttaaacgagatccgccgtctggagcggctggagcatctcgcggagaagtttagacagaaagcctctactcacgaaacctgggcatacggtaaggaacaaatactgttgcaaaaggactatgagagcgcgtcactcactgaggtgcgtgcactcttgcggaaacacgaggcattcgagtctgatctggccgctcaccaggaccgggtggagcaaattgctgctatagcccaggaactcaatgaactagactaccatgacgctgtgaacgtgaatgaccggtgccaaaagatctgcgaccagtgggataggctgggcacccttacccaaaaacggcgcgaggctctggagcgcatggaaaagctcttagaaaccatcgaccagctacacctggaattcgccaaacgcgccgcaccctttaataactggatggagggcgctatggaagatctgcaggacatgtttatcgtgcattccatcgaggagatccagagccttatcacagctcacgagcagtttaaagcgactctaccggaagctgacggcgaacggcagtccattatggccatacagaatgaagtggagaaagtcatccagtcatataacatccgtatcagctcctccaacccatactcaacagtcactatggacgagctgcgaacgaagtgggacaaagtgaagcagcttgtccccatccgggatcagtctctccaagaagagcttgcccgacagcacgctaacgagcgcctgaggcgccagttcgcagcacaggcgaatgccataggcccctggatccagaacaagatggaggagatcgcaagatcctctattcagattacaggagctcttgaggatcagatgaaccaactcaagcagtacgaacacaatattattaactacaagaacaacattgataagctggaaggcgaccaccagctgatccaggaagctctggtgttcgataacaagcatacaaattataccatggagcatatccgagttggttgggaactgttgcttactaccattgctcgcaccatcaatgaggtagaaactcagattttaacacgcgacgctaagggcatcacccaagagcagatgaatgagttcagagcttcgttcaatcacttcgacaggcgcaagaacgggctgatggatcatgaagacttcagagcatgtctgattagtatgggatacgacctgggggaagctgagttcgcccggattatgaccctggttgatccaaatggccaggggacagtcactttccagtccttcattgatttcatgacccgggaaaccgcagataccgacacggccgagcaggtcattgccagctttcggattctcgcgagtgacaaaccatacatcctggcagaagagctcaggagggagctgcctccagaccaagcccaatactgcattaaacgaatgcctgcctatagcggaccaggatccgtgccaggagctcttgattacgccgcctttagtagtgcactctatggcgaaagtgatctgtag

SEQ ID NO: 98121 - DNA, 1167 bp, Artificial Sequence
  derived and/or modified sequence
atggagaagctgctggagaccatcgaccagctgcacctggagttcgctaagcgggcagcgccgttcaataattggatggaaggcgctatggaagacctccaggatatgtttatcgtccattccatagaggagatccagtccctcattacagctcatgagcagttcaaagcaaccttgcccgaggcagatggggagcggcagagcataatggctatacagaacgaggtggagaaggttatccaatcttacaacatccggatcagtagtagcaatccatatagcaccgtgaccatggacgagctaagaacaaagtgggataaggtcaagcaactggtccctattagggatcagtccctgcaagaggagctcgcccggcaacacgccaatgaaaggttgcgccgtcagttcgcagcacaggccaatgcgataggaccttggattcaaaataagatggaggagatagccaggtcttccatacagattacaggcgcacttgaggaccagatgaatcagttgaagcagtatgagcacaacatcattaattataagaacaatattgacaagctggagggggatcaccagctgattcaagaagccctggtcttcgataacaaacacacaaactacaccatggagcatattagagtggggtgggagctgttgttaaccaccatcgcccggacgattaacgaagttgaaacacagatcctgacccgcgacgcaaagggaattactcaggagcaaatgaatgagtttcgggcctctttcaaccactttgataggcgaaagaatggtctcatggaccatgaagattttcgcgcttgtttaataagcatgggatacgacctgggcgaggccgagtttgcccgtattatgacactagtggatcccaatggccagggtactgtgacctttcaatctttcatcgacttcatgactcgagagacagccgatactgacaccgcagaacaggtgattgctagctttaggatcctggctagcgacaagccatacatcttggctgaagagttgagaagagagttacctcctgaccaagctcagtactgtatcaaaaggatgcccgcctactcaggtccaggaagcgtccctggggctttggattacgcagctttctctagcgcgctttacggggagagcgacctctag

SEQ ID NO: 98122 - DNA, 1992 bp, Artificial Sequence
  derived and/or modified sequence
tcgaccctctcaagtgttgaagggcctccggaatcctctacctgctcttatcaggagatgcgtcggtcttccgtgaacagttccgcaatggccgagactgctgccaacaggatctgcaaggttctggccgtgaatcaggagaacgagcgcttgatggaagaatacgagaggcttgccagcgagctgctcgagtggatccggaggaccattccttggctggagaacagaacacctgagaagacaatgcaggctatgcagaagaagctggaggatttcagggactaccgcaggaaacataaaccaccgaaggtgcaggaaaagtgccagctggagatcaactttaacacgcttcaaactaaattgaggataagtaataggcccgcttttatgccctctgaggggaagatggtcagcgacatcgcaggggcttggcaacgattagagcaggctgagaaaggatacgaagaatggcttcttaacgagatacgtcggcttgagcgactggaacatctggcagagaagttcagacagaaagccagcacccacgaaacttgggcctatggtaaggagcagatcctgttacaaaaggactatgagagcgcttcactcaccgaagtgcgcgcacttcttagaaagcatgaagcctttgaatcagacctggcggcacatcaggacagggtggagcagattgctgcaatcgcacaggagctgaatgagctcgactaccacgacgcagtaaacgtgaacgatcggtgtcaaaagatctgtgaccaatgggaccggctgggaactctaacacagaagcgcagggaagcgctggagcgaatggaaaaattgcttgagaccatcgaccagctgcatctagaattcgccaaaagagcagcgccattcaacaactggatggaaggtgctatggaggaccttcaggatatgtttatcgtccattcaatcgaagagatccagtcccttatcacagcacacgaacagttcaaggccactctccctgaagctgacggagaaagacagagtattatggcaatccagaatgaagtcgaaaaagttatacaaagctacaacatccggattagtagttctaatccatattcaactgtaacaatggacgaactgaggactaaatgggataaggtcaaacagttggtgcctattcgtgatcagtctcttcaagaagaactcgcaagacagcacgctaacgaaaggcttcgcaggcagtttgccgctcaggccaatgccatcggaccatggattcaaaacaaaatggaagaaatagcacgttcttctatccagatcacaggagctttagaagaccagatgaatcagttgaaacagtacgagcataacattattaactacaagaacaacatcgataagctcgagggtgaccatcaactgattcaggaagccctggtctttgataacaagcacacaaactacacaatggagcatatccgcgtggggtgggagctgctccttacgactattgcacggaccatcaacgaggtggaaacccagatcctgacgagagatgccaaaggaattacccaggaacagatgaatgagttccgggcaagttttaatcactttgatcgaaggaaaaacggtttaatggaccatgaagattttcgggcttgcttgattagcatgggctacgacctcggagaagctgagtttgcgaggataatgacattggtcgatcctaacggacagggcacagttacatttcaaagcttcatcgacttcatgacccgcgaaactgcggacacggacacagccgagcaggtgattgcatctttccgcattttggcgtctgacaagccttacattctggcggaggagttaagaagggaattaccaccagaccaggcccaatactgtatcaagaggatgcccgcatactctggccctggttccgtgccaggagctttggattacgcggctttttcttcagcgctctacggcgagagcgacctgtag

SEQ ID NO: 98123 - DNA, 1167 bp, Artificial Sequence
  derived and/or modified sequence
atggagaagctgctggagacaattgaccagctgcacctggaatttgccaagagggcggctccttttaacaattggatggagggcgctatggaggatctgcaggatatgtttatcgtccactctattgaggagatccaatctctgattacagcacacgaacagtttaaagcaacactgcccgaagcggacggcgaacgccagtctatcatggccatccaaaacgaggtagaaaaggtaattcagtcctataatataagaatatccagcagcaacccttactcgacggtcacaatggatgaattaaggacgaagtgggacaaagtaaaacaattggttccaatcagagatcagtcactgcaggaagagttggcccgtcagcacgctaatgagagactccgcaggcaattcgctgcccaagccaacgccatcgggccatggatccagaacaagatggaagaaatagcgagaagcagtatccaaatcaccggggctcttgaagatcagatgaaccagctcaaacagtacgagcacaacatcatcaattataagaataacatagacaaactcgagggcgatcatcagttgatacaagaagctctagtctttgacaacaagcataccaattacactatggagcatataagggtggggtgggagcttctgctgacgacaattgcccgtacaatcaacgaagtcgaaacgcaaattctgactcgggatgccaaaggaattacccaagagcagatgaacgaatttcgcgcatcatttaaccactttgaccgtcggaaaaacggtcttatggaccatgaggatttccgtgcttgtctaattagtatgggatatgatctcggagaagccgagtttgccaggatcatgacactggtggatcctaacggacaaggcaccgtcactttccagtcatttattgatttcatgacacgagaaactgctgacactgatacagcggagcaggtcattgcaagctttcggatccttgctagtgataagccatatatcctggctgaggagctccgccgtgagctgccacccgatcaggcacagtactgcatcaagaggatgcctgcgtattctggccctggcagcgtccctggggcattggattatgctgctttctctagcgctctgtatggagagagcgatctgtag

SEQ ID NO: 98124 - DNA, 3631 bp, Artificial Sequence
  derived and/or modified sequence
agcacactcagctctgtggaaggacctccagaaagttctacatgttcatatcaggagatgaggaggtcttcagtgaattcaagtgcaatggccgagacagcggctaacaggatatgtaaggttcttgctgtgaatcaagagaatgagaggctgatggaagaatatgagaggctagcgagtgagcttttggaatggattcgtcgcacgatcccctggctggagaaccggactcccgagaagaccatgcaagccatgcagaagaagctggaggacttccgggattaccgccggaagcacaagccacccaaggtgcaggagaaatgccagctggagatcaacttcaacacgctgcagaccaagctgcggatcagcaaccgtcctgccttcatgccctccgagggcaagatggtgtcggatattgctggtgcctggcagaggctggagcaggctgagaagggttacgaggagtggttgctcaatgagattcggagactggagcgcttggaacacctggctgagaagttcaggcagaaggcctcaacgcacgagacttgggcttatggcaaagagcagatcttgctgcagaaggattacgagtcggcgtcgctgacagaggtgcgggctctgctgcggaagcacgaggcgttcgagagcgacctggcagcgcaccaggaccgcgtggagcagatcgcagccatcgcgcaggagctcaatgaactggactatcacgacgctgtgaatgtcaatgatcggtgccagaaaatttgtgaccagtgggaccgactgggaacgcttactcagaagaggagagaagccctagagagaatggagaaattgctagaaaccattgatcagcttcacctggagtttgccaagagggctgctcctttcaacaattggatggagggcgctatggaggatctgcaagatatgttcattgtccacagcattgaggagatccagagtctgatcactgcgcatgagcagttcaaggccacgctgcccgaggcggacggagagcggcagtccatcatggccatccagaacgaggtggagaaggtgattcagagctacaacatcagaatcagctcaagcaacccgtacagcactgtcaccatggatgagctccggaccaagtgggacaaggtgaagcaactcgtgcccatccgcgatcaatccctgcaggaggagctggctcgccagcatgctaacgagcgtctgaggcgccagtttgctgcccaagccaatgccattgggccctggatccagaacaagatggaggagattgcccggagctccatccagatcacaggagccctggaagaccagatgaaccagctgaagcagtatgagcacaacatcatcaactataagaacaacatcgacaagctggagggagaccatcagctcatccaggaggcccttgtctttgacaacaagcacacgaactacacgatggagcacattcgtgttggatgggagctgctgctgacaaccatcgccagaaccatcaatgaggtggagactcagatcctgacgagagatgcgaagggcatcacccaggagcagatgaatgagttcagagcctccttcaaccactttgacaggaggaagaatggcctgatggatcatgaggatttcagagcctgcctgatttccatgggttatgacctgggtgaagccgaatttgcccgcattatgaccctggtagatcccaacgggcaaggcaccgtcaccttccaatccttcatcgacttcatgactagagagacggctgacaccgacactgccgagcaggtcatcgcctccttccggatcctggcttctgataagccatacatcctggcggaggagctgcgtcgggagctgcccccggatcaggcccagtactgcatcaagaggatgcccgcctactcgggcccaggcagtgtgcctggtgcactggattacgctgcgttctcttccgcactctacggggagagcgatctgtgatgctgagcttctgtaatcactcatcccatcagaatgcaataaaagcggaagtcacagtttgtttcctggaaactttgacaagctttattaagttgagagagagagaggggaaaaaaaaaagcctttcgtagttcagtaattgccagcaatataacacggctaaaatgaagtttttacagtatatgacatagtgcgcttcataaataggtttatttctgagtttttagcaaaatgtaatgaaatatcaggttgatttctttgattaaacagaacaaattacttgagtaataggaaattaggaggatctagggacagaaggaaagtgaaaaatgtgaaaatacaaaatacccaagatttaagaccggggggaaaaaaccacaaattggtaaataaaggtttgctatttgtaaaaaatttcatttatctctaatatgcttatgtgattgcccctaggggagtatatttgggattctaatgttttattttcatgcttatccaaagattactattgtatcttcaaatgaatttaatattgtgagatggaactgccggggattaaaaagactacccaaaagatttttggcacttacaatttttaaaatagtttatgtcatctcttcattatttagggctggatggtcaactcagtcagtgattttttgatgcttctcttatcctccagaatagagacctaaggacacgtggaagtcagtttaattgccagagagaaggatgcaatcactaggtaaaatgaggtttttaggattatttattgattccaggttcccatgctttttgttagagcttattagtacaggttctcaagagatgaccacataaaagtgctctgtttataaataagcaggtttctgtagtactgactggttcatcacaaggcaagtcagaaaccagtatccttctagctctccagtcaggacttccttatgcctctagttttatgaccggttaaggagaagccagagttagagtaggagaggactaattctcagcagcagtggaggtgagttctttcttttgcggaagctttacatatgttttgtgtagtaggaataactagatattttagctagtgtgcggtgtgtgttcacccctgggattggacagtgtatcctaacaagtcccatgtctggttctgtgtctaaaggcctgctccatgacacaggatgctacatgcactcctgctagcacatcttgatctgttgaatgttcattctttctttttgctcatactgctgtaggctataattcccccctgtttttccatcttgttgacagcttgtagagaataaagcaggaattctttttatatctgagtccttaatgatcaggaaatggattacaaacaaacaaaaacagttgcaaacagcaattaaagcattactagagaagcagtaacatgtctgttacctacagtctgtttgctcagatttttatagatttccaccaacagctggaaatgtaatatttccattccaagctgtctgacagcttgactcttcttcctacactgggccatttagaaccttcaacctttatgaatttcacttaatttgcttcattattaagtaattggtagtttccagattcctgaaatatttgaatccttgagtttaatgcc

SEQ ID NO: 98125 - DNA, 1992 bp, Artificial Sequence
  derived and/or modified sequence
agcaccctgagcagcgtggagggcccccccgagagcagcacctgcagctaccaggagatgagaagaagcagcgtgaacagcagcgccatggccgagaccgccgccaacagaatctgcaaggtgctggccgtgaaccaggagaacgagagactgatggaggagtacgagagactggccagcgagctgctggagtggatcagaagaaccatcccctggctggagaacagaacccccgagaagaccatgcaggccatgcagaagaagctggaggacttcagagactacagaagaaagcacaagccccccaaggtgcaggagaagtgccagctggagatcaacttcaacaccctgcagaccaagctgagaatcagcaacagacccgccttcatgcccagcgagggcaagatggtgagcgacatcgccggcgcctggcagagactggagcaggccgagaagggctacgaggagtggctgctgaacgagatcagaagactggagagactggagcacctggccgagaagttcagacagaaggccagcacccacgagacctgggcctacggcaaggagcagatcctgctgcagaaggactacgagagcgccagcctgaccgaggtgagagccctgctgagaaagcacgaggccttcgagagcgacctggccgcccaccaggacagagtggagcagatcgccgccatcgcccaggagctgaacgagctggactaccacgacgccgtgaacgtgaacgacagatgccagaagatctgcgaccagtgggacagactgggcaccctgacccagaagagaagagaggccctggagagaatggagaagctgctggagaccatcgaccagctgcacctggagttcgccaagagagccgcccccttcaacaactggatggagggcgccatggaggacctgcaggacatgttcatcgtgcacagcatcgaggagatccagagcctgatcaccgcccacgagcagttcaaggccaccctgcccgaggccgacggcgagagacagagcatcatggccatccagaacgaggtggagaaggtgatccagagctacaacatcagaatcagcagcagcaacccctacagcaccgtgaccatggacgagctgagaaccaagtgggacaaggtgaagcagctggtgcccatcagagaccagagcctgcaggaggagctggccagacagcacgccaacgagagactgagaagacagttcgccgcccaggccaacgccatcggcccctggatccagaacaagatggaggagatcgccagaagcagcatccagatcaccggcgccctggaggaccagatgaaccagctgaagcagtacgagcacaacatcatcaactacaagaacaacatcgacaagctggagggcgaccaccagctgatccaggaggccctggtgttcgacaacaagcacaccaactacaccatggagcacatcagagtgggctgggagctgctgctgaccaccatcgccagaaccatcaacgaggtggagacccagatcctgaccagagacgccaagggcatcacccaggagcagatgaacgagttcagagccagcttcaaccacttcgacagaagaaagaacggcctgatggaccacgaggacttcagagcctgcctgatcagcatgggctacgacctgggcgaggccgagttcgccagaatcatgaccctggtggaccccaacggccagggcaccgtgaccttccagagcttcatcgacttcatgaccagagagaccgccgacaccgacaccgccgagcaggtgatcgccagcttcagaatcctggccagcgacaagccctacatcctggccgaggagctgagaagagagctgccccccgaccaggcccagtactgcatcaagagaatgcccgcctacagcggccccggcagcgtgcccggcgccctggactacgccgccttcagcagcgccctgtacggcgagagcgacctgtag

SEQ ID NO: 98126 - DNA, 1167 bp, Artificial Sequence
  derived and/or modified sequence
atggagaagctgctggagaccatcgaccagctgcacctggagttcgccaagagagccgcccccttcaacaactggatggagggcgccatggaggacctgcaggacatgttcatcgtgcacagcatcgaggagatccagagcctgatcaccgcccacgagcagttcaaggccaccctgcccgaggccgacggcgagagacagagcatcatggccatccagaacgaggtggagaaggtgatccagagctacaacatcagaatcagcagcagcaacccctacagcaccgtgaccatggacgagctgagaaccaagtgggacaaggtgaagcagctggtgcccatcagagaccagagcctgcaggaggagctggccagacagcacgccaacgagagactgagaagacagttcgccgcccaggccaacgccatcggcccctggatccagaacaagatggaggagatcgccagaagcagcatccagatcaccggcgccctggaggaccagatgaaccagctgaagcagtacgagcacaacatcatcaactacaagaacaacatcgacaagctggagggcgaccaccagctgatccaggaggccctggtgttcgacaacaagcacaccaactacaccatggagcacatcagagtgggctgggagctgctgctgaccaccatcgccagaaccatcaacgaggtggagacccagatcctgaccagagacgccaagggcatcacccaggagcagatgaacgagttcagagccagcttcaaccacttcgacagaagaaagaacggcctgatggaccacgaggacttcagagcctgcctgatcagcatgggctacgacctgggcgaggccgagttcgccagaatcatgaccctggtggaccccaacggccagggcaccgtgaccttccagagcttcatcgacttcatgaccagagagaccgccgacaccgacaccgccgagcaggtgatcgccagcttcagaatcctggccagcgacaagccctacatcctggccgaggagctgagaagagagctgccccccgaccaggcccagtactgcatcaagagaatgcccgcctacagcggccccggcagcgtgcccggcgccctggactacgccgccttcagcagcgccctgtacggcgagagcgacctgtag

SEQ ID NO: 98127 - protein, 508 aa, Artificial Sequence
  derived and/or modified sequence
MGSCCSCPDKDTVPDNHRNKFKVINVDDDGNELGSGIMELTDTELILYTRKRDSVKWHYLCLRRYGYDSNLFSFESGRRCQTGQGIFAFKCARAEELFNMLQEIMQNNSINVVEEPVVERNNHQTELEVPRTPRTPTTPGFAAQNLPNGYPRYPSFGDASSHPSSRHPSVGSARLPSVGEESTHPLLVAEEQVHTYVNTTGVQEERKNRTSVHVPLEARVSNAESSTPKEEPSSIEDRDPQILLEPEGVKFVLGPTPVQKQLMEKEKLEQLGRDQVSGSGANNTEWDTGYDSDERRDAPSVNKLVYENINGLSIPSASGVRRGRLTSTSTSDTQNINNSAQRRTALLNYENLPSLPPVWEARKLSRDEDDNLGPKTPSLNGYHNNLDPMHNYVNTENVTVPASAHKIEYSRRRDCTPTVFNFDIRRPSLEHRQLNYIQVDLEGGSDSDNPQTPKTPTTPLPQTPTRRTELYAVIDIERTAAMSNLQKALPRDDGTSRKTRHNSTDLPM

SEQ ID NO: 98128 - protein, 36 aa, Artificial Sequence
  derived and/or modified sequence
MGSCCSCPDKDTVPDNHRNKFKVINVDDDGNELGSG

SEQ ID NO: 98129 - protein, 40 aa, Artificial Sequence
  derived and/or modified sequence
MGSCCSCPDKDTVPDNHRNKFKVINVDDDGNELGSGIMEL

SEQ ID NO: 98130 - protein, 33 aa, Artificial Sequence
  derived and/or modified sequence
MGSCCSCPDKDTVPDNHRNKFKVINVDDDGNEL

SEQ ID NO: 98131 - protein, 12 aa, Artificial Sequence
  derived and/or modified sequence
MGSCCSCPDKDT

SEQ ID NO: 98132 - protein, 91 aa, Artificial Sequence
  derived and/or modified sequence
MGSCCSCPDKDTVPDNHRNKFKVINVDDDGNELGSGIMELTDTELILYTRKRDSVKWHYLCLRRYGYDSNLFSFESGRRCQTGQGIFAFKC

SEQ ID NO: 98133 - protein, 183 aa, Artificial Sequence
  derived and/or modified sequence
MGSCCSCPDKDTVPDNHRNKFKVINVDDDGNELGSGIMELTDTELILYTRKRDSVKWHYLCLRRYGYDSNLFSFESGRRCQTGQGIFAFKCARAEELFNMLQEIMQNNSINVVEEPVVERNNHQTELEVPRTPRTPTTPGFAAQNLPNGYPRYPSFGDASSHPSSRHPSVGSARLPSVGEEST

SEQ ID NO: 98134 - DNA, 1527 bp, Artificial Sequence
  derived and/or modified sequence
atgggcagctgctgcagctgccccgacaaggacaccgtgcccgacaaccacagaaacaagttcaaggtgatcaacgtggacgacgacggcaacgagctgggcagcggcatcatggagctgaccgacaccgagctgatcctgtacaccagaaagagagacagcgtgaagtggcactacctgtgcctgagaagatacggctacgacagcaacctgttcagcttcgagagcggcagaagatgccagaccggccagggcatcttcgccttcaagtgcgccagagccgaggagctgttcaacatgctgcaggagatcatgcagaacaacagcatcaacgtggtggaggagcccgtggtggagagaaacaaccaccagaccgagctggaggtgcccagaacccccagaacccccaccacccccggcttcgccgcccagaacctgcccaacggctaccccagataccccagcttcggcgacgccagcagccaccccagcagcagacaccccagcgtgggcagcgccagactgcccagcgtgggcgaggagagcacccaccccctgctggtggccgaggagcaggtgcacacctacgtgaacaccaccggcgtgcaggaggagagaaagaacagaaccagcgtgcacgtgcccctggaggccagagtgagcaacgccgagagcagcacccccaaggaggagcccagcagcatcgaggacagagacccccagatcctgctggagcccgagggcgtgaagttcgtgctgggccccacccccgtgcagaagcagctgatggagaaggagaagctggagcagctgggcagagaccaggtgagcggcagcggcgccaacaacaccgagtgggacaccggctacgacagcgacgagagaagagacgcccccagcgtgaacaagctggtgtacgagaacatcaacggcctgagcatccccagcgccagcggcgtgagaagaggcagactgaccagcaccagcaccagcgacacccagaacatcaacaacagcgcccagagaagaaccgccctgctgaactacgagaacctgcccagcctgccccccgtgtgggaggccagaaagctgagcagagacgaggacgacaacctgggccccaagacccccagcctgaacggctaccacaacaacctggaccccatgcacaactacgtgaacaccgagaacgtgaccgtgcccgccagcgcccacaagatcgagtacagcagaagaagagactgcacccccaccgtgttcaacttcgacatcagaagacccagcctggagcacagacagctgaactacatccaggtggacctggagggcggcagcgacagcgacaacccccagacccccaagacccccaccacccccctgccccagacccccaccagaagaaccgagctgtacgccgtgatcgacatcgagagaaccgccgccatgagcaacctgcagaaggccctgcccagagacgacggcaccagcagaaagaccagacacaacagcaccgacctgcccatgtag

SEQ ID NO: 98135 - DNA, 111 bp, Artificial Sequence
  derived and/or modified sequence
atgggcagctgctgcagctgccccgacaaggacaccgtgcccgacaaccacagaaacaagttcaaggtgatcaacgtggacgacgacggcaacgagctgggcagcggctag

SEQ ID NO: 98136 - DNA, 123 bp, Artificial Sequence
  derived and/or modified sequence
atgggcagctgctgcagctgccccgacaaggacaccgtgcccgacaaccacagaaacaagttcaaggtgatcaacgtggacgacgacggcaacgagctgggcagcggcatcatggagctgtag

SEQ ID NO: 98137 - DNA, 102 bp, Artificial Sequence
  derived and/or modified sequence
atgggcagctgctgcagctgccccgacaaggacaccgtgcccgacaaccacagaaacaagttcaaggtgatcaacgtggacgacgacggcaacgagctgtag

SEQ ID NO: 98138 - DNA, 33 bp, Artificial Sequence
  derived and/or modified sequence
atgggcagctgctgcagctgccccgacaagtag

SEQ ID NO: 98139 - DNA, 39 bp, Artificial Sequence
  derived and/or modified sequence
atgggcagctgctgcagctgccccgacaaggacacctag

SEQ ID NO: 98140 - DNA, 276 bp, Artificial Sequence
  derived and/or modified sequence
atgggcagctgctgcagctgccccgacaaggacaccgtgcccgacaaccacagaaacaagttcaaggtgatcaacgtggacgacgacggcaacgagctgggcagcggcatcatggagctgaccgacaccgagctgatcctgtacaccagaaagagagacagcgtgaagtggcactacctgtgcctgagaagatacggctacgacagcaacctgttcagcttcgagagcggcagaagatgccagaccggccagggcatcttcgccttcaagtgctag

SEQ ID NO: 98141 - DNA, 552 bp, Artificial Sequence
  derived and/or modified sequence
atgggcagctgctgcagctgccccgacaaggacaccgtgcccgacaaccacagaaacaagttcaaggtgatcaacgtggacgacgacggcaacgagctgggcagcggcatcatggagctgaccgacaccgagctgatcctgtacaccagaaagagagacagcgtgaagtggcactacctgtgcctgagaagatacggctacgacagcaacctgttcagcttcgagagcggcagaagatgccagaccggccagggcatcttcgccttcaagtgcgccagagccgaggagctgttcaacatgctgcaggagatcatgcagaacaacagcatcaacgtggtggaggagcccgtggtggagagaaacaaccaccagaccgagctggaggtgcccagaacccccagaacccccaccacccccggcttcgccgcccagaacctgcccaacggctaccccagataccccagcttcggcgacgccagcagccaccccagcagcagacaccccagcgtgggcagcgccagactgcccagcgtgggcgaggagagcacctag

SEQ ID NO: 98142 - DNA, 6861 bp, Artificial Sequence
  derived and/or modified sequence
aaaacccttccctcccccgctcccccggaagtgcttttccaagattcgggccggagagaggccttgtaggcacagcggctgagactcgatctgctccaagtaggggctccagcgcgggtcggagtctgggggttcgcgcccgccgacccgcgccctgctccctctcagcacctgggcggacgaaatgaccattaagaagtagatgcccagatgcaaaagtgatgaaacagtccatttgtcataaagtaagatgcagctgtggcatgtcaaccagcttggaacaaaattgtatctgtttttctcagaagagaattccacaaggagattttcttctttctaccatcatcaagatcaagcaggcaagtttacttgctgtcatcttctgcaaggttaaatcagcaaacaaagaaaacatggtattttgaaatatgattaaactcctgatgctgcagcagaggctaagaatattaatggccagatctagtgcacacatggtcttctgaagaagccatgggtagctgttgtagctgtccagataaagacactgtcccagataaccatcggaacaagtttaaggtcattaatgtggatgatgatgggaatgagttaggttctggcataatggaacttacagacacagaactgattttatacacccgcaaacgtgactcagtaaaatggcactacctctgcctgcgacgctatggctatgactcgaatctcttttcttttgaaagtggtcgaaggtgtcaaactggacaaggaatctttgcctttaagtgtgcccgtgcagaagaattatttaacatgttgcaagagattatgcaaaataatagtataaatgtggtggaagagccagttgtagaaagaaataatcatcagacagaattggaagtccctagaacacctcgaacacctacaactccaggatttgctgctcagaacttacctaatggatatccccgatatccctcatttggagatgcttcatcccatccgtcaagcagacatccttctgtgggaagtgctcgcctgccttcagtaggggaagaatctacacatcctttgcttgtggctgaggaacaagtacatacctatgtcaacactacaggtgtgcaagaagagcggaaaaaccgcacaagtgtgcatgttccattggaggcgagggtttctaacgctgaaagcagcacaccaaaagaagaaccaagtagtattgaggacagggatcctcagattcttcttgaacctgaaggagtcaaatttgttttagggccaacccctgttcaaaagcagttaatggaaaaagagaaactggagcaacttggaagagatcaagttagtggaagtggagcaaataacacagaatgggacactggctatgacagtgatgaacgaagagatgcaccctctgttaacaaactggtgtatgaaaatataaatgggctatctatccctagtgcctcaggggtcaggagaggtcgtctgacatccaccagtacctcagatacccagaatatcaacaactcagctcagagaagaactgcattattaaactatgaaaatctaccatctttgcctcctgtttgggaagcccgcaagctaagtagggatgaagatgacaatttaggaccaaagaccccatctctaaatggctaccataataatctagatccaatgcataactatgtaaatacagagaatgtaacagtgccagcaagtgctcacaaaatagaatattcaaggcgtcgggactgtacaccaacagtctttaactttgatatcagacgcccaagtttagaacacaggcagcttaattacatacaggttgacttggaaggtggcagtgactctgacaaccctcagactccaaaaacgcctacaactccccttccacaaacccctaccaggcgcacagagctgtatgccgtgatagacatcgagagaactgctgctatgtcaaatttgcagaaagcactgccacgagatgatggtacatctaggaaaactagacacaatagtactgatctgcccatgtgagcctggaaagcattgtgttgtttgcacctttgtgaagtttttaaaaatgaagatgcaagtgcttcattttcatttctaaacactaactccttttatagactgataaaatttttttctgaatatttcatgtgcatctttaactaaagggaattaatgtagagcaggtactccttaaagaacactaatttcattatatactactcgttgtacagcagcattcccgttttcacagtgcctatttaaaatgagagttgaagtaaatgacatgctggttgatttttatcaatattctggacttaacgcatacctttcatgtctaagtcatggttggcttttaaaactttttataaagcctcttgacaatgtacattgctaacaggtaactataggctttgaaagtaatgctcgtagattcagtgttcacagtatgtggcctccagcatgtaacatgaggaatcctttatttcattaattaatggctttttgacttgagccaaaacatatgtaaaggaaacagaagtaccgcacctcctcttacaccagtcagctcctttgccttcagtgttactagaaagcggcctgtgtccatgagtgtgctttgctgttggtgcactgaaaggcaggaaggagacaagattttctatttactcatctcatgatgtcatttgaagggcatgtccagatatcttaaaattataataggctcaagaatcagtctcaggtcactttacccaaaaacatttgaaaatctgaaccacaatctcctgaaagtttttctcctatagattgttgacaacacattgttttctggaggcatttgtgccattaggtttccatttatcttcagtttttttctttggtgtttgggatgtcttattttgttgccttatgtccttttcaatttaaaatgtttgagtttgtatatagttttgaaattggattatgtgttcattgttgtttagtttgcatttttgtcaaattatggttttgaaggttcatttggaacttactgttagtctgtaacagggttgcccttgtccagtatttatttataagctgtttacttttcaagttgataaaaacattctccaattctaaatttgcttgtgtccataggtgatctctttagcaaactgagaaaaaaaggaagctacttttaacatgcaaagttccctcaaggtgtaccgtgttgtctctgtgggcactcttccccagcactttagcagtaattcccccagctacacgctgcagttgtactctgcccactctagtgttcctcagctctgctgtccttttacttgtagctggatctttgattatccttcgatttccatgaaatattaatattgttgccagcatagcaggtacagtggaagtcttgtagcagtgagattgtatcataatttaggatttaaaatgaattaaagtttatataaactgaagagtctccatatgtcaaactcttggaaaatcaaagatgttccaatttcctaaacactagagaatacgagagaaggtagagtggaaaaggttaggtaaccttgcaaaatattttactattttctctaaatatgaggaagtttgagattatgatctggatctaccagatataactaaggttaatttagcatgaaaaagttttagtcatattggcatccaacctattcagtaaccgaatcataggacaatgatggattaggagaacaatagagtgggatcattataaagaaaataaattattaaaggtgtctttatcgttttagtgccatttttagtgtctttactataaatcaatatcagtgtattttatcattctatgtgcatagcagaattttcttttctcccttttgttcccctgtgaacttggtgcttattaaagtgctcactgttctcttaaaagagagcagtggtataggtgtgcagtttccatgatgcaggttccatttttaatatattgttccacttatcctttcttctgagtaaattgctaattgtgccaaatttatgtaatagtttttgtaatgtggaataagaattatgatggaaccattgcacatttttttctgaaacagccagtcaaggcagaacattaatctccaaatgcaagggctgatctatttattcattttggaggttgggtactttattctttctttccgtcatccttttcattgtttcccccggattctaattagtttttattttttttagataactccaatataatcattacagtttatgctttaaatactatgtgctttaaaaaggaaaatgggaccaatttgtctgctaagaatttgattttaggtactataagagtattaggaaaatatatacaactggtgttaatttctagatattttctagaaatcacttgtgttcctatttaataaaaggtaatttagaatactacttgtcctttgcagtagtttagtaatgggcattaagctgtgtcctcgaaggatgtacctattactaggtgcattttagaatgaaatattgatattttattagcatataattgtggccatatatctcagattttctgaggcagatctaattttagataattctgttggtagaccatgtgatccttctttttggttttggaaatataatcattgttaatgttttccctccaaatagaatactgttttatccatacaaatcataacagcatctatcccatgctagggttggaaactgatattggtattacttgtgttttttcttagtgtgttttatttcccagtttcatcttcttctaaaaatgaaaatatggtgccttccctccctccaggaagactggcaaatatttccttttatttactgctgctgtggagtgatgagatatgcactttactctttaagattcagcaaaaagcttttcacttctcagtatatccagaatacatcatatctgggacttaggaaaatttgccaagcaatctttgtttttatagatactaatgttgaccctctccagcgttcaatgttataaatagaacaagtcaagctagtgtttatctcctccccctccccaaaactgtggcacagcatataaaaatgtacctcaataatgttctattaaaaatgggacaggggccttatgttttcataatttcccaacaatgtgccgccatatttttgcctcaaggtaaaggttttaacagatgaaaaagtacttcccaattcccccgtgctattcctaacctataatgcccaaatgttttgtgcaatgtgtagtgtgtgtgtataaatacatatattcttgaaatagacataccatcagagacatcattcacaagtaactgatgtattggcatctcattcatatttctgatgtgtgaggtatatggtactaattaccttttccttgatgtttgccaaatttgaataaaggcattggtacgaaattacagaatgtaaagaaaatgtttttggcttgaaaaattaacatattttatgacgtaccacagtatactctgcccaaaccagcaccctatctatctttcctgttctttacatccctgttccccatccctacttcctcatttttggtataacacagttcttttgtagcatcattataattgcagttctatggcaattggacagttatagcatggaaacagactggtataagtagtacagtagtcaccagtgtgccacatttgcattagtaatgcaaaatatacattttataaaggacaaactttgtgttatgttttattttcattacattgtataatattgtaagactattgtatgtcctaatttgcattataaatgtttttttcctacgtaaaggcataaatatagcaactttgtataaaggtagcttattagatttttaattttttcttttataaaaaattgtccaacagtgggactaccattgccaaattgtatatgaaatatgaattttacccccatggttaatttcttttataaacattccatatttctctaataaaaagacataagtgatactgtactatgcatacattgtatcttaatgctgtttcagatcagcattttaaattttggtttgcatttttaatattggcaaaacgtaaccactgttaattaaaataaaaccttgttgtatatgtaacaacataattttccctctatcccttcccaccctttgttctctatttctccctatcagtgccaacttcatacattttgtagcatggcaataaaatataacttttacactgaggccgagtgtggctttttggaggaagtggggatgggacgattgccctctagttgtcctttgcatatgactgttttttgccatataagccatgtcatcaggcatgaaaagttttctcatatatgatgtaaacttgcttttaaggacaagtgtgaatgtgctttttaagcttaatttttgtcatgacaactaattttttttatctttggagaagtcagagttctttacaatcaaacgtttattaactggagtacttagaataagctagtaattgaatttagttcaagggctaagcaacacatttttaaatccttatttattgtagagtattagtatactgtcctacaaattatgtaaaatatggtttaatattagatgactttggattttgcaatgccttactgttgtcattctagcataaatatccataatgaggtactcaagttgatactggaagctgagctgatcatacactgacctgaagcattcatgaaaagctgctttattgaataaagtctgattggagttcttttcatgctcactttccccttattgctgaaagtagattgcaataaaaccccaataaaacgtttggtcgg

SEQ ID NO: 98143 - DNA, 6653 bp, Artificial Sequence
  derived and/or modified sequence
tattcaagagtaacattcttaataacttaacctatatttcagaaatgaccattaagaagtagatgcccagatgcaaaagtgatgaaacagtccatttgtcataaagtaagatgcagctgtggcatgtcaaccagcttggaacaaaattgtatctgtttttctcagaagagaattccacaaggttaaatcagcaaacaaagaaaacatggtattttgaaatatgattaaactcctgatgctgcagcagaggctaagaatattaatggccagatctagtgcacacatggtcttctgaagaagccatgggtagctgttgtagctgtccagataaagacactgtcccagataaccatcggaacaagtttaaggtcattaatgtggatgatgatgggaatgagttaggttctggcataatggaacttacagacacagaactgattttatacacccgcaaacgtgactcagtaaaatggcactacctctgcctgcgacgctatggctatgactcgaatctcttttcttttgaaagtggtcgaaggtgtcaaactggacaaggaatctttgcctttaagtgtgcccgtgcagaagaattatttaacatgttgcaagagattatgcaaaataatagtataaatgtggtggaagagccagttgtagaaagaaataatcatcagacagaattggaagtccctagaacacctcgaacacctacaactccaggatttgctgctcagaacttacctaatggatatccccgatatccctcatttggagatgcttcatcccatccgtcaagcagacatccttctgtgggaagtgctcgcctgccttcagtaggggaagaatctacacatcctttgcttgtggctgaggaacaagtacatacctatgtcaacactacaggtgtgcaagaagagcggaaaaaccgcacaagtgtgcatgttccattggaggcgagggtttctaacgctgaaagcagcacaccaaaagaagaaccaagtagtattgaggacagggatcctcagattcttcttgaacctgaaggagtcaaatttgttttagggccaacccctgttcaaaagcagttaatggaaaaagagaaactggagcaacttggaagagatcaagttagtggaagtggagcaaataacacagaatgggacactggctatgacagtgatgaacgaagagatgcaccctctgttaacaaactggtgtatgaaaatataaatgggctatctatccctagtgcctcaggggtcaggagaggtcgtctgacatccaccagtacctcagatacccagaatatcaacaactcagctcagagaagaactgcattattaaactatgaaaatctaccatctttgcctcctgtttgggaagcccgcaagctaagtagggatgaagatgacaatttaggaccaaagaccccatctctaaatggctaccataataatctagatccaatgcataactatgtaaatacagagaatgtaacagtgccagcaagtgctcacaaaatagaatattcaaggcgtcgggactgtacaccaacagtctttaactttgatatcagacgcccaagtttagaacacaggcagcttaattacatacaggttgacttggaaggtggcagtgactctgacaaccctcagactccaaaaacgcctacaactccccttccacaaacccctaccaggcgcacagagctgtatgccgtgatagacatcgagagaactgctgctatgtcaaatttgcagaaagcactgccacgagatgatggtacatctaggaaaactagacacaatagtactgatctgcccatgtgagcctggaaagcattgtgttgtttgcacctttgtgaagtttttaaaaatgaagatgcaagtgcttcattttcatttctaaacactaactccttttatagactgataaaatttttttctgaatatttcatgtgcatctttaactaaagggaattaatgtagagcaggtactccttaaagaacactaatttcattatatactactcgttgtacagcagcattcccgttttcacagtgcctatttaaaatgagagttgaagtaaatgacatgctggttgatttttatcaatattctggacttaacgcatacctttcatgtctaagtcatggttggcttttaaaactttttataaagcctcttgacaatgtacattgctaacaggtaactataggctttgaaagtaatgctcgtagattcagtgttcacagtatgtggcctccagcatgtaacatgaggaatcctttatttcattaattaatggctttttgacttgagccaaaacatatgtaaaggaaacagaagtaccgcacctcctcttacaccagtcagctcctttgccttcagtgttactagaaagcggcctgtgtccatgagtgtgctttgctgttggtgcactgaaaggcaggaaggagacaagattttctatttactcatctcatgatgtcatttgaagggcatgtccagatatcttaaaattataataggctcaagaatcagtctcaggtcactttacccaaaaacatttgaaaatctgaaccacaatctcctgaaagtttttctcctatagattgttgacaacacattgttttctggaggcatttgtgccattaggtttccatttatcttcagtttttttctttggtgtttgggatgtcttattttgttgccttatgtccttttcaatttaaaatgtttgagtttgtatatagttttgaaattggattatgtgttcattgttgtttagtttgcatttttgtcaaattatggttttgaaggttcatttggaacttactgttagtctgtaacagggttgcccttgtccagtatttatttataagctgtttacttttcaagttgataaaaacattctccaattctaaatttgcttgtgtccataggtgatctctttagcaaactgagaaaaaaaggaagctacttttaacatgcaaagttccctcaaggtgtaccgtgttgtctctgtgggcactcttccccagcactttagcagtaattcccccagctacacgctgcagttgtactctgcccactctagtgttcctcagctctgctgtccttttacttgtagctggatctttgattatccttcgatttccatgaaatattaatattgttgccagcatagcaggtacagtggaagtcttgtagcagtgagattgtatcataatttaggatttaaaatgaattaaagtttatataaactgaagagtctccatatgtcaaactcttggaaaatcaaagatgttccaatttcctaaacactagagaatacgagagaaggtagagtggaaaaggttaggtaaccttgcaaaatattttactattttctctaaatatgaggaagtttgagattatgatctggatctaccagatataactaaggttaatttagcatgaaaaagttttagtcatattggcatccaacctattcagtaaccgaatcataggacaatgatggattaggagaacaatagagtgggatcattataaagaaaataaattattaaaggtgtctttatcgttttagtgccatttttagtgtctttactataaatcaatatcagtgtattttatcattctatgtgcatagcagaattttcttttctcccttttgttcccctgtgaacttggtgcttattaaagtgctcactgttctcttaaaagagagcagtggtataggtgtgcagtttccatgatgcaggttccatttttaatatattgttccacttatcctttcttctgagtaaattgctaattgtgccaaatttatgtaatagtttttgtaatgtggaataagaattatgatggaaccattgcacatttttttctgaaacagccagtcaaggcagaacattaatctccaaatgcaagggctgatctatttattcattttggaggttgggtactttattctttctttccgtcatccttttcattgtttcccccggattctaattagtttttattttttttagataactccaatataatcattacagtttatgctttaaatactatgtgctttaaaaaggaaaatgggaccaatttgtctgctaagaatttgattttaggtactataagagtattaggaaaatatatacaactggtgttaatttctagatattttctagaaatcacttgtgttcctatttaataaaaggtaatttagaatactacttgtcctttgcagtagtttagtaatgggcattaagctgtgtcctcgaaggatgtacctattactaggtgcattttagaatgaaatattgatattttattagcatataattgtggccatatatctcagattttctgaggcagatctaattttagataattctgttggtagaccatgtgatccttctttttggttttggaaatataatcattgttaatgttttccctccaaatagaatactgttttatccatacaaatcataacagcatctatcccatgctagggttggaaactgatattggtattacttgtgttttttcttagtgtgttttatttcccagtttcatcttcttctaaaaatgaaaatatggtgccttccctccctccaggaagactggcaaatatttccttttatttactgctgctgtggagtgatgagatatgcactttactctttaagattcagcaaaaagcttttcacttctcagtatatccagaatacatcatatctgggacttaggaaaatttgccaagcaatctttgtttttatagatactaatgttgaccctctccagcgttcaatgttataaatagaacaagtcaagctagtgtttatctcctccccctccccaaaactgtggcacagcatataaaaatgtacctcaataatgttctattaaaaatgggacaggggccttatgttttcataatttcccaacaatgtgccgccatatttttgcctcaaggtaaaggttttaacagatgaaaaagtacttcccaattcccccgtgctattcctaacctataatgcccaaatgttttgtgcaatgtgtagtgtgtgtgtataaatacatatattcttgaaatagacataccatcagagacatcattcacaagtaactgatgtattggcatctcattcatatttctgatgtgtgaggtatatggtactaattaccttttccttgatgtttgccaaatttgaataaaggcattggtacgaaattacagaatgtaaagaaaatgtttttggcttgaaaaattaacatattttatgacgtaccacagtatactctgcccaaaccagcaccctatctatctttcctgttctttacatccctgttccccatccctacttcctcatttttggtataacacagttcttttgtagcatcattataattgcagttctatggcaattggacagttatagcatggaaacagactggtataagtagtacagtagtcaccagtgtgccacatttgcattagtaatgcaaaatatacattttataaaggacaaactttgtgttatgttttattttcattacattgtataatattgtaagactattgtatgtcctaatttgcattataaatgtttttttcctacgtaaaggcataaatatagcaactttgtataaaggtagcttattagatttttaattttttcttttataaaaaattgtccaacagtgggactaccattgccaaattgtatatgaaatatgaattttacccccatggttaatttcttttataaacattccatatttctctaataaaaagacataagtgatactgtactatgcatacattgtatcttaatgctgtttcagatcagcattttaaattttggtttgcatttttaatattggcaaaacgtaaccactgttaattaaaataaaaccttgttgtatatgtaacaacataattttccctctatcccttcccaccctttgttctctatttctccctatcagtgccaacttcatacattttgtagcatggcaataaaatataacttttacactgaggccgagtgtggctttttggaggaagtggggatgggacgattgccctctagttgtcctttgcatatgactgttttttgccatataagccatgtcatcaggcatgaaaagttttctcatatatgatgtaaacttgcttttaaggacaagtgtgaatgtgctttttaagcttaatttttgtcatgacaactaattttttttatctttggagaagtcagagttctttacaatcaaacgtttattaactggagtacttagaataagctagtaattgaatttagttcaagggctaagcaacacatttttaaatccttatttattgtagagtattagtatactgtcctacaaattatgtaaaatatggtttaatattagatgactttggattttgcaatgccttactgttgtcattctagcataaatatccataatgaggtactcaagttgatactggaagctgagctgatcatacactgacctgaagcattcatgaaaagctgctttattgaataaagtctgattggagttcttttcatgctcactttccccttattgctgaaagtagattgcaataaaaccccaataaaacgtttggtcgg

SEQ ID NO: 98144 - DNA, 611 bp, Artificial Sequence
  derived and/or modified sequence
aaaacccttccctcccccgctcccccggaagtgcttttccaagattcgggccggagagaggccttgtaggcacagcggctgagactcgatctgctccaagtaggggctccagcgcgggtcggagtctgggggttcgcgcccgccgacccgcgccctgctccctctcagcacctgggcggacgctcctggcaaccactatttgagtttctgcctctacaaatttgactattctaggtacttcataaatgaccattaagaagtagatgcccagatgcaaaagtgatgaaacagtccatttgtcataaagtaagatgcagctgtggcatgtcaaccagcttggaacaaaattgtatctgtttttctcagaagagaattccacaaggttaaatcagcaaacaaagaaaacatggtattttgaaatatgattaaactcctgatgctgcagcagaggctaagaatattaatggccagatctagtgcacacatggtcttctgaagaagccatgggtagctgttgtagctgtccagataaagacactgtcccagataaccatcggaacaagtttaaggtcattaatgtggatgatgatgggaatgagttaggttctggc

SEQ ID NO: 98145 - DNA, 597 bp, Artificial Sequence
  derived and/or modified sequence
ttttccaagattcgggccggagagaggccttgtaggcacagcggctgagactcgatctgctccaagtaggggctccagcgcgggtcggagtctgggggttcgcgcccgccgacccgcgccctgctccctctcagcacctgggcggacgaaatgaccattaagaagtagatgcccagatgcaaaagtgatgaaacagtccatttgtcataaagtaagatgcagctgtggcatgtcaaccagcttggaacaaaattgtatctgtttttctcagaagagaattccacaaggagattttcttctttctaccatcatcaagatcaagcaggcaagtttacttgctgtcatcttctgcaaggttaaatcagcaaacaaagaaaacatggtattttgaaatatgattaaactcctgatgctgcagcagaggctaagaatattaatggccagatctagtgcacacatggtcttctgaagaagccatgggtagctgttgtagctgtccagataaagacactgtcccagataaccatcggaacaagtttaaggtcattaatgtggatgatgatgggaatgagttaggttctggcataatggaactta

SEQ ID NO: 98146 - DNA, 584 bp, Artificial Sequence
  derived and/or modified sequence
acagcggctgagactcgatctgctccaagtaggggctccagcgcgggtcggagtctgggggttcgcgcccgccgacccgcgccctgctccctctcagcacctgggcggacggtacccaggctgaagtgcagtgtcacaatcatagctcaccacggtcttgaactcctgggctcaagcgatcattctgactcagcctcccaagtaggtaggaccacaggtgtacagaaatgaccattaagaagtagatgcccagatgcaaaagtgatgaaacagtccatttgtcataaagtaagatgcagctgtggcatgtcaaccagcttggaacaaaattgtatctgtttttctcagaagagaattccacaaggttaaatcagcaaacaaagaaaacatggtattttgaaatatgattaaactcctgatgctgcagcagaggctaagaatattaatggccagatctagtgcacacatggtcttctgaagaagccatgggtagctgttgtagctgtccagataaagacactgtcccagataaccatcggaacaagtttaaggtcattaatgtggatgatgatgggaatgagtta

SEQ ID NO: 98147 - DNA, 1952 bp, Artificial Sequence
  derived and/or modified sequence
ggaagtgcttttccaagattcgggccggagagaggccttgtaggcacagcggctgagactcgatctgctccaagtaggggctccagcgcgggtcggagtctgggggttcgcgcccgccgacccgcgccctgctccctctcagcacctgggcggacgaaatgaccattaagaagtagatgcccagatgcaaaagtgatgaaacagtccatttgtcataaagtaagatgcagctgtggcatgtcaaccagcttggaacaaaattgtatctgtttttctcagaagagaattccacaaggttaaatcagcaaacaaagaaaacatggtattttgaaatatgattaaactcctgatgctgcagcagaggctaagaatattaatggccagatctagtgcacacatggtcttctgaagaagccatgggtagctgttgtagctgtccagataaagacactgtcccagataaccatcggaacaagtttaaggtcattaatgtggatgatgatgggaatgagttaggttctggcataatggaacttacagacacagaactgattttatacacccgcaaacgtgactcagtaaaatggcactacctctgcctgcgacgctatggctatgactcgaatctcttttcttttgaaagtggtcgaaggtgtcaaactggacaaggaatctttgcctttaagtgtgcccgtgcagaagaattatttaacatgttgcaagagattatgcaaaataatagtataaatgtggtggaagagccagttgtagaaagaaataatcatcagacagaattggaagtccctagaacacctcgaacacctacaactccaggatttgctgctcagaacttacctaatggatatccccgatatccctcatttggagatgcttcatcccatccgtcaagcagacatccttctgtgggaagtgctcgcctgccttcagtaggggaagaatctacacatcctttgcttgtggctgaggaacaagtacatacctatgtcaacactacaggtgtgcaagaagagcggaaaaaccgcacaagtgtgcatgttccattggaggcgagggtttctaacgctgaaagcagcacaccaaaagaagaaccaagtagtattgaggacagggatcctcagattcttcttgaacctgaaggagtcaaatttgttttagggccaacccctgttcaaaagcagttaatggaaaaagagaaactggagcaacttggaagagatcaagttagtggaagtggagcaaataacacagaatgggacactggctatgacagtgatgaacgaagagatgcaccctctgttaacaaactggtgtatgaaaatataaatgggctatctatccctagtgcctcaggggtcaggagaggtcgtctgacatccaccagtacctcagatacccagaatatcaacaactcagctcagagaagaactgcattattaaactatgaaaatctaccatctttgcctcctgtttgggaagcccgcaagctaagtagggatgaagatgacaatttaggaccaaagaccccatctctaaatggctaccataataatctagatccaatgcataactatgtaaatacagagaatgtaacagtgccagcaagtgctcacaaaatagaatattcaaggcgtcgggactgtacaccaacagtctttaactttgatatcagacgcccaagtttagaacacaggcagcttaattacatacaggttgacttggaaggtggcagtgactctgacaaccctcagactccaaaaacgcctacaactccccttccacaaacccctaccaggcgcacagagctgtatgccgtgatagacatcgagagaactgctgctatgtcaaatttgcagaaagcactgccacgagatgatggtacatctaggaaaactagacacaatagtactgatctgcccatgtgagcctggaaa

SEQ ID NO: 98148 - DNA, 545 bp, Artificial Sequence
  derived and/or modified sequence
agtgcttttccaagattcgggccggagagaggccttgtaggcacagcggctgagactcgatctgctccaagtaggggctccagcgcgggtcggagtctgggggttcgcgcccgccgacccgcgccctgctccctctcagcacctgggcggacgattgaaggtttgtggcaaccctgtattcagaattctgtatcagtgccatttttccagccagcgtgtgcttacttcatgtctctgggtcacattttgaaatgaccattaagaagtagatgcccagatgcaaaagtgatgaaacagtccatttgtcataaagtaagatgcagctgtggcatgtcaaccagcttggaacaaaattgtatctgtttttctcagaagagaattccacaaggttaaatcagcaaacaaagaaaacatggtattttgaaatatgattaaactcctgatgctgcagcagaggctaagaatattaatggccagatctagtgcacacatggtcttctgaagaagccatgggtagctgttgtagctgtccagataaagacact

SEQ ID NO: 98149 - DNA, 6600 bp, Artificial Sequence
  derived and/or modified sequence
gaggccttgtaggcacagcggctgagactcgatctgctccaagtaggggctccagcgcgggtcggagtctgggggttcgcgcccgccgacccgcgccctgctccctctcagcacctgggcggacggttaaatcagcaaacaaagaaaacatggtattttgaaatatgattaaactcctgatgctgcagcagaggctaagaatattaatggccagatctagtgcacacatggtcttctgaagaagccatgggtagctgttgtagctgtccagataaagacactgtcccagataaccatcggaacaagtttaaggtcattaatgtggatgatgatgggaatgagttaggttctggcataatggaacttacagacacagaactgattttatacacccgcaaacgtgactcagtaaaatggcactacctctgcctgcgacgctatggctatgactcgaatctcttttcttttgaaagtggtcgaaggtgtcaaactggacaaggaatctttgcctttaagtgtgcccgtgcagaagaattatttaacatgttgcaagagattatgcaaaataatagtataaatgtggtggaagagccagttgtagaaagaaataatcatcagacagaattggaagtccctagaacacctcgaacacctacaactccaggatttgctgctcagaacttacctaatggatatccccgatatccctcatttggagatgcttcatcccatccgtcaagcagacatccttctgtgggaagtgctcgcctgccttcagtaggggaagaatctacacatcctttgcttgtggctgaggaacaagtacatacctatgtcaacactacaggtgtgcaagaagagcggaaaaaccgcacaagtgtgcatgttccattggaggcgagggtttctaacgctgaaagcagcacaccaaaagaagaaccaagtagtattgaggacagggatcctcagattcttcttgaacctgaaggagtcaaatttgttttagggccaacccctgttcaaaagcagttaatggaaaaagagaaactggagcaacttggaagagatcaagttagtggaagtggagcaaataacacagaatgggacactggctatgacagtgatgaacgaagagatgcaccctctgttaacaaactggtgtatgaaaatataaatgggctatctatccctagtgcctcaggggtcaggagaggtcgtctgacatccaccagtacctcagatacccagaatatcaacaactcagctcagagaagaactgcattattaaactatgaaaatctaccatctttgcctcctgtttgggaagcccgcaagctaagtagggatgaagatgacaatttaggaccaaagaccccatctctaaatggctaccataataatctagatccaatgcataactatgtaaatacagagaatgtaacagtgccagcaagtgctcacaaaatagaatattcaaggcgtcgggactgtacaccaacagtctttaactttgatatcagacgcccaagtttagaacacaggcagcttaattacatacaggttgacttggaaggtggcagtgactctgacaaccctcagactccaaaaacgcctacaactccccttccacaaacccctaccaggcgcacagagctgtatgccgtgatagacatcgagagaactgctgctatgtcaaatttgcagaaagcactgccacgagatgatggtacatctaggaaaactagacacaatagtactgatctgcccatgtgagcctggaaagcattgtgttgtttgcacctttgtgaagtttttaaaaatgaagatgcaagtgcttcattttcatttctaaacactaactccttttatagactgataaaatttttttctgaatatttcatgtgcatctttaactaaagggaattaatgtagagcaggtactccttaaagaacactaatttcattatatactactcgttgtacagcagcattcccgttttcacagtgcctatttaaaatgagagttgaagtaaatgacatgctggttgatttttatcaatattctggacttaacgcatacctttcatgtctaagtcatggttggcttttaaaactttttataaagcctcttgacaatgtacattgctaacaggtaactataggctttgaaagtaatgctcgtagattcagtgttcacagtatgtggcctccagcatgtaacatgaggaatcctttatttcattaattaatggctttttgacttgagccaaaacatatgtaaaggaaacagaagtaccgcacctcctcttacaccagtcagctcctttgccttcagtgttactagaaagcggcctgtgtccatgagtgtgctttgctgttggtgcactgaaaggcaggaaggagacaagattttctatttactcatctcatgatgtcatttgaagggcatgtccagatatcttaaaattataataggctcaagaatcagtctcaggtcactttacccaaaaacatttgaaaatctgaaccacaatctcctgaaagtttttctcctatagattgttgacaacacattgttttctggaggcatttgtgccattaggtttccatttatcttcagtttttttctttggtgtttgggatgtcttattttgttgccttatgtccttttcaatttaaaatgtttgagtttgtatatagttttgaaattggattatgtgttcattgttgtttagtttgcatttttgtcaaattatggttttgaaggttcatttggaacttactgttagtctgtaacagggttgcccttgtccagtatttatttataagctgtttacttttcaagttgataaaaacattctccaattctaaatttgcttgtgtccataggtgatctctttagcaaactgagaaaaaaaggaagctacttttaacatgcaaagttccctcaaggtgtaccgtgttgtctctgtgggcactcttccccagcactttagcagtaattcccccagctacacgctgcagttgtactctgcccactctagtgttcctcagctctgctgtccttttacttgtagctggatctttgattatccttcgatttccatgaaatattaatattgttgccagcatagcaggtacagtggaagtcttgtagcagtgagattgtatcataatttaggatttaaaatgaattaaagtttatataaactgaagagtctccatatgtcaaactcttggaaaatcaaagatgttccaatttcctaaacactagagaatacgagagaaggtagagtggaaaaggttaggtaaccttgcaaaatattttactattttctctaaatatgaggaagtttgagattatgatctggatctaccagatataactaaggttaatttagcatgaaaaagttttagtcatattggcatccaacctattcagtaaccgaatcataggacaatgatggattaggagaacaatagagtgggatcattataaagaaaataaattattaaaggtgtctttatcgttttagtgccatttttagtgtctttactataaatcaatatcagtgtattttatcattctatgtgcatagcagaattttcttttctcccttttgttcccctgtgaacttggtgcttattaaagtgctcactgttctcttaaaagagagcagtggtataggtgtgcagtttccatgatgcaggttccatttttaatatattgttccacttatcctttcttctgagtaaattgctaattgtgccaaatttatgtaatagtttttgtaatgtggaataagaattatgatggaaccattgcacatttttttctgaaacagccagtcaaggcagaacattaatctccaaatgcaagggctgatctatttattcattttggaggttgggtactttattctttctttccgtcatccttttcattgtttcccccggattctaattagtttttattttttttagataactccaatataatcattacagtttatgctttaaatactatgtgctttaaaaaggaaaatgggaccaatttgtctgctaagaatttgattttaggtactataagagtattaggaaaatatatacaactggtgttaatttctagatattttctagaaatcacttgtgttcctatttaataaaaggtaatttagaatactacttgtcctttgcagtagtttagtaatgggcattaagctgtgtcctcgaaggatgtacctattactaggtgcattttagaatgaaatattgatattttattagcatataattgtggccatatatctcagattttctgaggcagatctaattttagataattctgttggtagaccatgtgatccttctttttggttttggaaatataatcattgttaatgttttccctccaaatagaatactgttttatccatacaaatcataacagcatctatcccatgctagggttggaaactgatattggtattacttgtgttttttcttagtgtgttttatttcccagtttcatcttcttctaaaaatgaaaatatggtgccttccctccctccaggaagactggcaaatatttccttttatttactgctgctgtggagtgatgagatatgcactttactctttaagattcagcaaaaagcttttcacttctcagtatatccagaatacatcatatctgggacttaggaaaatttgccaagcaatctttgtttttatagatactaatgttgaccctctccagcgttcaatgttataaatagaacaagtcaagctagtgtttatctcctccccctccccaaaactgtggcacagcatataaaaatgtacctcaataatgttctattaaaaatgggacaggggccttatgttttcataatttcccaacaatgtgccgccatatttttgcctcaaggtaaaggttttaacagatgaaaaagtacttcccaattcccccgtgctattcctaacctataatgcccaaatgttttgtgcaatgtgtagtgtgtgtgtataaatacatatattcttgaaatagacataccatcagagacatcattcacaagtaactgatgtattggcatctcattcatatttctgatgtgtgaggtatatggtactaattaccttttccttgatgtttgccaaatttgaataaaggcattggtacgaaattacagaatgtaaagaaaatgtttttggcttgaaaaattaacatattttatgacgtaccacagtatactctgcccaaaccagcaccctatctatctttcctgttctttacatccctgttccccatccctacttcctcatttttggtataacacagttcttttgtagcatcattataattgcagttctatggcaattggacagttatagcatggaaacagactggtataagtagtacagtagtcaccagtgtgccacatttgcattagtaatgcaaaatatacattttataaaggacaaactttgtgttatgttttattttcattacattgtataatattgtaagactattgtatgtcctaatttgcattataaatgtttttttcctacgtaaaggcataaatatagcaactttgtataaaggtagcttattagatttttaattttttcttttataaaaaattgtccaacagtgggactaccattgccaaattgtatatgaaatatgaattttacccccatggttaatttcttttataaacattccatatttctctaataaaaagacataagtgatactgtactatgcatacattgtatcttaatgctgtttcagatcagcattttaaattttggtttgcatttttaatattggcaaaacgtaaccactgttaattaaaataaaaccttgttgtatatgtaacaacataattttccctctatcccttcccaccctttgttctctatttctccctatcagtgccaacttcatacattttgtagcatggcaataaaatataacttttacactgaggccgagtgtggctttttggaggaagtggggatgggacgattgccctctagttgtcctttgcatatgactgttttttgccatataagccatgtcatcaggcatgaaaagttttctcatatatgatgtaaacttgcttttaaggacaagtgtgaatgtgctttttaagcttaatttttgtcatgacaactaattttttttatctttggagaagtcagagttctttacaatcaaacgtttattaactggagtacttagaataagctagtaattgaatttagttcaagggctaagcaacacatttttaaatccttatttattgtagagtattagtatactgtcctacaaattatgtaaaatatggtttaatattagatgactttggattttgcaatgccttactgttgtcattctagcataaatatccataatgaggtactcaagttgatactggaagctgagctgatcatacactgacctgaagcattcatgaaaagctgctttattgaataaagtctgattggagttcttttcatgctcactttccccttattgctgaaagtagattgcaataaaaccccaataaaacgtttggtcggata

SEQ ID NO: 98150 - DNA, 781 bp, Artificial Sequence
  derived and/or modified sequence
ggccttgtaggcacagcggctgagactcgatctgctccaagtaggggctccagcgcgggtcggagtctgggggttcgcgcccgccgacccgcgccctgctccctctcagcacctgggcggacgaaatgaccattaagaagtagatgcccagatgcaaaagtgatgaaacagtccatttgtcataaagtaagatgcagctgtggcatgtcaaccagcttggaacaaaattgtatctgtttttctcagaagagaattccacaaggagattttcttctttctaccatcatcaagatcaagcaggcaagtttacttgctgtcatcttctgcaagatacgtaccaagattaacaatgactccaggatagagttatgaccaacactactaaaggttaaatcagcaaacaaagaaaacatggtattttgaaatatgattaaactcctgatgctgcagcagaggctaagaatattaatggccagatctagtgcacacatggtcttctgaagaagccatgggtagctgttgtagctgtccagataaagacactgtcccagataaccatcggaacaagtttaaggtcattaatgtggatgatgatgggaatgagttaggttctggcataatggaacttacagacacagaactgattttatacacccgcaaacgtgactcagtaaaatggcactacctctgcctgcgacgctatggctatgactcgaatctcttttcttttgaaagtggtcgaaggtgtcaaactggacaaggaatctttgcctttaagtgt

SEQ ID NO: 98151 - DNA, 704 bp, Artificial Sequence
  derived and/or modified sequence
agaaattctcaatgtttttcttctgtttttaggttaaatcagcaaacaaagaaaacatggtattttgaaatatgattaaactcctgatgctgcagcagaggctaagaatattaatggccagatctagtgcacacatggtcttctgaagaagccatgggtagctgttgtagctgtccagataaagacactgtcccagataaccatcggaacaagtttaaggtcattaatgtggatgatgatgggaatgagttaggttctggcataatggaacttacagacacagaactgattttatacacccgcaaacgtgactcagtaaaatggcactacctctgcctgcgacgctatggctatgactcgaatctcttttcttttgaaagtggtcgaaggtgtcaaactggacaaggaatctttgcctttaagtgtgcccgtgcagaagaattatttaacatgttgcaagagattatgcaaaataatagtataaatgtggtggaagagccagttgtagaaagaaataatcatcagacagaattggaagtccctagaacacctcgaacacctacaactccaggatttgctgctcagaacttacctaatggatatccccgatatccctcatttggagatgcttcatcccatccgtcaagcagacatccttctgtgggaagtgctcgcctgccttcagtaggggaagaatctacaca

SEQ ID NO: 98152 - DNA, 1527 bp, Artificial Sequence
  derived and/or modified sequence
atgggaagttgctgttcctgtccagacaaggacacagtgccggacaaccacagaaataagttcaaagtgatcaatgttgatgacgacgggaacgagcttgggagcggaatcatggagctgacagataccgaactgatcctttatacacgtaaaagagattctgtgaaatggcactacctctgtctcaggaggtacggttacgactctaacctgttcagcttcgagtctggaaggagatgccaaactggccagggaatctttgcatttaagtgcgccagagcggaggaattattcaacatgttgcaggagatcatgcagaataactctatcaacgtagtcgaggagccagtggtggagcggaataatcaccagaccgaactggaggttccccggaccccacggacaccgaccacacctggcttcgccgcccagaacctgcccaacggctatcctaggtacccaagctttggggatgcctcgagccatccatcaagtagacatccatcggtcggctctgccaggttgccaagcgtgggcgaagagagcactcaccctctgttggtcgcagaagaacaagtgcacacctacgttaatacaactggggtgcaggaagaacgaaagaatcgcacaagcgtccatgtgccactggaagcacgggtgagtaatgctgaaagcagtacgcccaaagaagagcctagctcaatcgaggacagggatcctcagatcctgttggagccggagggagtaaagttcgtcctcggaccaacacctgtgcagaaacaacttatggaaaaagagaaactcgagcaactgggaagggatcaggttagcgggagtggcgcgaataatacagagtgggataccggatacgattcagatgagaggcgggacgccccgtccgtgaataaactcgtctacgaaaacatcaatgggctgtccatcccctccgcttccggcgtgcgccgaggacggcttaccagtacatctacctctgatacccaaaatatcaataatagcgctcaaagaaggacagccctcctgaattatgagaaccttcctagtctccctcccgtttgggaggccagaaagctcagccgagacgaggatgacaatctcggccctaaaaccccttctttgaacggctaccacaacaaccttgatccaatgcataattatgtcaatactgagaatgttacagtgccagcttccgcccacaagattgaatactcaaggcgacgggattgcacccctactgtgttcaatttcgacatacgcagaccctctttggagcataggcaactgaactacatccaggtggacctagaaggcggcagcgatagcgacaatccccaaacacccaagacacccacaaccccgctgcctcagacgccaacccggcgaaccgagctgtatgctgtcatcgacattgaaaggactgctgccatgtccaatctgcaaaaggccctcccacgcgacgacgggacaagccgcaaaacgagacacaatagcacagacctccccatgtag

SEQ ID NO: 98153 - DNA, 1527 bp, Artificial Sequence
  derived and/or modified sequence
atgggttcctgttgttcgtgcccagataaagacaccgtgcccgacaaccatcggaataaatttaaagtcatcaatgtggacgacgatgggaacgagctaggctccggcatcatggaactcacagatactgaattgatcctgtacacccgcaagagagactctgtgaagtggcactacctttgtctgcggcggtacggctacgattccaacctctttagcttcgagagcgggagaaggtgccagactggtcagggtatcttcgcctttaagtgcgccagagccgaagaactgttcaacatgctgcaagagattatgcagaataattcgatcaacgtcgtcgaggagcctgttgtcgagaggaacaatcaccaaaccgaactagaggtcccacgaacacctcgtacacccaccacaccgggtttcgcagctcaaaatctacccaacggatatcctagatacccttcatttggagatgcgtctagtcatccgagctcgaggcatccttctgttggcagcgccaggctgcctagtgtgggggaagagagtactcatcctcttctggtggccgaagagcaggtccatacctacgtcaataccacaggagtgcaagaggaacggaagaatcggactagcgtccatgtgccattagaagcccgcgttagcaacgcagaatcatctaccccaaaggaggaaccctcctcgattgaggaccgcgatccgcagatcttgctagaacccgagggcgtgaaatttgttttggggccgacccctgttcagaagcagctgatggagaaggaaaagctggaacaattgggacgggaccaggtgagtgggagcggtgccaacaacactgaatgggacacaggatacgattcggacgaacgaagggatgccccttccgtgaacaagcttgtgtatgaaaatatcaacggactgagcattccatctgcctccggcgtgcgcaggggccggcttacttcaacaagtaccagcgatacccaaaacattaacaactcggcacaacgtcgcacggcactgctgaactacgaaaatcttccatcccttccccccgtgtgggaggccaggaaactgtccagggacgaggacgataacctaggccctaagaccccatccttgaacggctatcacaacaatcttgacccaatgcataactatgtgaataccgaaaacgttactgttccagcaagcgcacacaaaatcgagtactcaagaaggcgcgattgcacccccacggtgttcaatttcgacatcagaaggccgtctctggagcaccggcaactgaattacattcaggtggacctagaaggcgggtctgattcagacaacccacaaacccctaagacccccacaacaccactgccacagactcccactaggcgcactgagctgtacgctgtcattgatatcgagcggactgcggcaatgagcaatttgcagaaagcactgcctagggatgacggcacatctcgcaaaaccaggcacaactctactgatttaccaatgtag

SEQ ID NO: 98154 - DNA, 111 bp, Artificial Sequence
  derived and/or modified sequence
atggggtcttgctgctcctgcccagacaaagatactgtgcctgataaccatagaaataaattcaaggtgatcaatgtggacgacgatggaaatgaactggggtctggatag

SEQ ID NO: 98155 - DNA, 123 bp, Artificial Sequence
  derived and/or modified sequence
atgggctcttgctgctcttgtccagacaaggacactgtgccagataaccacagaaataagttcaaagtgattaatgtagatgatgacgggaatgagctgggctcaggcattatggaactctag

SEQ ID NO: 98156 - DNA, 102 bp, Artificial Sequence
  derived and/or modified sequence
atgggaagttgctgttcgtgccctgacaaggatactgtgcctgataatcatcgtaataagtttaaagtgatcaacgtggatgatgacgggaatgagttgtag

SEQ ID NO: 98157 - DNA, 1527 bp, Artificial Sequence
  derived and/or modified sequence
atgggctcctgttgctcctgccctgacaaggatacagttcctgataatcaccgaaacaagtttaaggtgattaatgtggatgatgacggaaacgagctcggcagcggtattatggagcttactgatacagagctcatactgtacacccggaaacgtgactctgtaaagtggcattacctgtgcctccggcgttacggttacgactccaacctattctcttttgaatctggacgtagatgccagacggggcaaggtatattcgctttcaaatgtgcgagagccgaagagttgtttaacatgctgcaggagattatgcaaaacaactcaatcaacgtggttgaagagcctgttgttgaacgcaacaaccatcagactgagcttgaggtaccgcgaactccacgtacaccaacaacaccaggattcgccgcacagaacctaccaaatgggtaccctcggtacccctcatttggtgacgcctcgtctcacccctcttctcgtcacccctcagtcgggtcagcccggctgccttcagtaggggaagagagcacgcatcccctgctggttgccgaagagcaagtacacacgtatgtgaacaccacaggtgtgcaggaggagcgaaagaacagaacatccgtgcacgtccccctggaggctagggtcagcaacgccgagagcagcactccaaaggaggaacctagcagtatcgaggaccgcgatccgcaaatcctcctggagcctgagggagtcaagttcgtcctcggacctaccccagttcagaaacagttaatggagaaagagaaactggaacagctcgggagagatcaagtgtctggctcgggagccaacaacaccgagtgggacactggatacgactcggatgaacgtagagacgcacccagcgtgaataagctggtttacgagaacatcaatgggctctctatcccttcagcttcaggtgttcgtcggggccggctgacatcaacttccactagcgacactcaaaatattaacaacagcgctcaaagacgaacagcactgctcaactacgagaatctaccttcacttccccctgtttgggaggccaggaagctgtctagagatgaggatgacaacctgggccccaaaaccccgtccctgaacggctatcacaacaacctggaccctatgcataactacgtaaacacggaaaacgtgactgtacccgcgtccgctcacaagatcgagtacagcaggcgccgtgattgtacaccaactgtgtttaactttgacatccggcgaccaagcctagaacaccggcagctgaactacatccaggtggatctcgagggaggcagcgacagcgacaatccccagacgccaaaaactcccaccacgccacttccacagaccccaacacggagaacagagctgtacgccgtcatagatatcgaaagaaccgccgccatgtcaaacctgcaaaaagcactgccacgcgacgatggcacctcaaggaaaacccggcataatagcaccgacctccctatgtag

SEQ ID NO: 98158 - DNA, 33 bp, Artificial Sequence
  derived and/or modified sequence
atggggtcctgttgcagttgtccagataaatag

SEQ ID NO: 98159 - DNA, 39 bp, Artificial Sequence
  derived and/or modified sequence
atgggctcatgttgttcttgcccagataaagacacatag

SEQ ID NO: 98160 - DNA, 1527 bp, Artificial Sequence
  derived and/or modified sequence
atgggtagctgctgttcatgcccagacaaagacacggtgcccgacaaccacagaaacaagtttaaggttatcaatgttgacgatgacggcaacgagctcgggtcaggcatcatggaactgacagatacagaactgatcctgtatacccgtaagcgggacagcgtaaagtggcactatctgtgccttcgccggtatggatacgattcaaacctgttctcctttgaatccggtcgaagatgccaaactggtcaggggatttttgccttcaagtgtgccagggcagaggaactattcaatatgctccaggagatcatgcaaaataattcaataaatgttgtggaggagcccgtagtcgaaagaaacaatcatcagaccgagcttgaggtccctaggacacctaggacccctactacccccggcttcgccgctcaaaatctgccgaacgggtatccaaggtatccctcattcggcgacgcctcctcgcacccctccagccgtcatccctcagttggaagtgccagactgccatctgtgggcgaagaaagtacccacccgctgctcgtagctgaagaacaagtgcacacctacgttaacacaaccggtgtgcaggaagagaggaaaaaccggacgtctgtgcacgtgcctctggaagcgcgggtctccaatgcagagtctagcacccctaaggaggagccttcttctattgaggaccgcgacccacagatactcttagagcctgaaggcgtcaaattcgtacttggccccacccccgtgcagaagcaattgatggagaaggaaaagctggagcaactggggagagaccaggtgagtggctcaggggctaacaacaccgaatgggacaccggatacgattcagatgagcgccgtgacgctccatcagtcaacaagctggtatacgagaatatcaatggcctatcaattccttcagctagcggcgttaggcggggccgtctgacaagcacctccacttcagatacacagaacattaataattcagcgcagagacgcaccgctcttctgaactacgagaatctaccttccctcccgccagtgtgggaagcacgcaagctctcccgtgacgaggacgacaatttgggccccaagaccccttccctgaatgggtaccacaacaacctggatcccatgcacaactatgtgaacaccgagaatgtcactgtacccgccagtgctcacaagattgaatactctcggaggcgggattgtaccccgaccgtgttcaacttcgatatacgccgcccctctctagagcaccggcagctgaactatattcaggtggatctcgagggaggtagcgattccgacaacccccagacccctaaaacacccactactccactcccccagacgcctacgcgcaggactgaactgtacgccgttattgacattgagagaactgccgcaatgtcaaacctgcagaaggccctccccagggacgatggaacttcgcgaaaaactcgtcataacagcacggaccttcctatgtag

SEQ ID NO: 98161 - DNA, 276 bp, Artificial Sequence
  derived and/or modified sequence
atgggcagttgttgctcatgtccagacaaggataccgtgcccgacaatcaccgaaataaatttaaggtgattaatgtggatgacgacggcaacgagctggggtccggtattatggaattaactgatacagagctaatcctgtatacacgtaaaagggacagtgtgaagtggcactacttgtgtctgcgccgatacggatatgattccaatcttttttcttttgaaagtggtcggcggtgccagactggacagggcatcttcgccttcaagtgctag

SEQ ID NO: 98162 - DNA, 552 bp, Artificial Sequence
  derived and/or modified sequence
atgggaagctgctgctcctgcccagacaaggataccgttcctgacaatcaccgaaacaagttcaaggtcatcaatgtggatgatgatggaaatgagctggggagtggaatcatggagctcactgacacagagctcattctatatactagaaagagagatagcgtcaaatggcattatctttgcctgcgccgctacggatacgactctaatctgttctcttttgagtcaggtaggcggtgtcagacgggccaaggtattttcgcctttaaatgcgcccgcgctgaagaactcttcaatatgctgcaggaaattatgcagaataattccatcaacgttgtggaagagccggtcgtcgaacgtaataatcaccagactgaactggaagttcctcgcacacccagaacgcctacaacaccaggatttgctgcccaaaacctgcccaatggctatcctaggtatccttcgttcggtgacgcaagctcccatccatctagcagacacccaagtgtggggtctgcacgccttccatccgtgggcgaagagtctacatag

SEQ ID NO: 98163 - DNA, 1527 bp, Artificial Sequence
  derived and/or modified sequence
atgggcagctgctgcagctgcccagacaaggacacagtgcctgacaaccacaggaacaagttcaaggtgatcaacgtggatgatgatggaaatgagctgggcagcggcatcatggagctgacagacacagagctgatcctgtacaccaggaagagggacagcgtgaagtggcactacctgtgcctgcggcgctatggctatgacagcaacctcttctcctttgagagcggccgccgctgccagacaggccagggcatctttgccttcaagtgtgcccgggcagaggagctgttcaacatgctgcaggagatcatgcagaacaacagcatcaacgtggtggaggagcctgtggtggagaggaacaaccaccagacagagctggaggtgcccaggacccccaggacccccaccaccccaggctttgctgcccagaacctgcccaacggctacccccgctaccccagctttggagatgccagcagccaccccagcagccgccaccccagcgtgggcagcgcccggctgcccagcgtgggggaggagagcacccaccccctgctggtggccgaggagcaggtgcacacctacgtgaacaccaccggggtgcaggaggagaggaagaacagaacatctgtgcacgtgcccctggaggcccgggtgtccaatgctgagagcagcacccccaaggaggagcccagcagcattgaggaccgggacccccagatcctgctggagcctgagggcgtgaagtttgtgctgggccccacccctgtgcagaagcagctgatggagaaggagaagctggagcagctgggccgggaccaggtgtctggcagcggggccaacaacacagagtgggacaccggctatgacagtgatgaaagaagagatgcccccagcgtgaacaagctggtgtatgagaacatcaatggcctgagcatccccagcgccagcggcgtgagaagaggccgcctgaccagcaccagcaccagtgacacccagaacatcaacaacagcgcccagaggagaacagccctgctgaactatgagaacctgcccagcctgccccctgtgtgggaggccaggaagctgagcagagatgaagatgacaacctgggccccaagacccccagcctgaatggctaccacaacaacctggaccccatgcacaactacgtgaacacagaaaatgtgacagtgcctgccagcgcccacaagattgagtacagcagaagaagagactgcacccccaccgtcttcaactttgacatcagaagacccagcctggagcaccggcagctgaactacatccaggtggacctggagggcggcagtgacagcgacaacccccagacccccaagacccccaccacccccctgccccagacccccaccaggagaacagagctgtatgctgtgattgacatcgagaggacagctgccatgagcaacctgcagaaggccctgcccagagatgatggcaccagcaggaagaccaggcacaacagcacagacctgcccatgtag

SEQ ID NO: 98164 - DNA, 111 bp, Artificial Sequence
  derived and/or modified sequence
atgggcagctgctgcagctgcccagacaaggacacagtgcctgacaaccacaggaacaagttcaaggtgatcaacgtggatgatgatggaaatgagctgggcagcggctag

SEQ ID NO: 98165 - DNA, 123 bp, Artificial Sequence
  derived and/or modified sequence
atgggcagctgctgcagctgcccagacaaggacacagtgcctgacaaccacaggaacaagttcaaggtgatcaacgtggatgatgatggaaatgagctgggcagcggcatcatggagctgtag

SEQ ID NO: 98166 - DNA, 102 bp, Artificial Sequence
  derived and/or modified sequence
atgggcagctgctgcagctgcccagacaaggacacagtgcctgacaaccacaggaacaagttcaaggtgatcaacgtggatgatgatggaaatgagctgtag

SEQ ID NO: 98167 - DNA, 33 bp, Artificial Sequence
  derived and/or modified sequence
atgggcagctgctgcagctgcccagacaagtag

SEQ ID NO: 98168 - DNA, 39 bp, Artificial Sequence
  derived and/or modified sequence
atgggcagctgctgcagctgcccagacaaggacacctag

SEQ ID NO: 98169 - DNA, 276 bp, Artificial Sequence
  derived and/or modified sequence
atgggcagctgctgcagctgcccagacaaggacacagtgcctgacaaccacaggaacaagttcaaggtgatcaacgtggatgatgatggaaatgagctgggcagcggcatcatggagctgacagacacagagctgatcctgtacaccaggaagagggacagcgtgaagtggcactacctgtgcctgcggcgctatggctatgacagcaacctcttctcctttgagagcggccgccgctgccagacaggccagggcatctttgccttcaagtgctag

SEQ ID NO: 98170 - DNA, 552 bp, Artificial Sequence
  derived and/or modified sequence
atgggcagctgctgcagctgcccagacaaggacacagtgcctgacaaccacaggaacaagttcaaggtgatcaacgtggatgatgatggaaatgagctgggcagcggcatcatggagctgacagacacagagctgatcctgtacaccaggaagagggacagcgtgaagtggcactacctgtgcctgcggcgctatggctatgacagcaacctcttctcctttgagagcggccgccgctgccagacaggccagggcatctttgccttcaagtgtgcccgggcagaggagctgttcaacatgctgcaggagatcatgcagaacaacagcatcaacgtggtggaggagcctgtggtggagaggaacaaccaccagacagagctggaggtgcccaggacccccaggacccccaccaccccaggctttgctgcccagaacctgcccaacggctacccccgctaccccagctttggagatgccagcagccaccccagcagccgccaccccagcgtgggcagcgcccggctgcccagcgtgggggaggagagcacctag

SEQ ID NO: 98171 - DNA, 1527 bp, Artificial Sequence
  derived and/or modified sequence
atgggcagctgctgcagctgccccgacaaggacaccgtgcccgacaaccataggaacaagttcaaggtgattaatgtagatgatgatggaaacgagctcgggtcaggtattatggaactaactgatactgagcttatcctttatactaggaaacgtgattcagtgaaatggcattacctctgtctgcgccgctacggctatgactcaaacctcttttcgttcgaatccgggaggcggtgccagaccgggcaaggtattttcgcttttaaatgcgcaagagccgaagagttgttcaacatgctccaggaaatcatgcaaaataattccatcaacgtggttgaggagcccgtcgtcgaaagaaacaaccatcagacagagttggaggtcccacggacccctagaaccccgacaactcctggctttgccgctcagaacctgcccaacgggtacccgcgatatccctccttcggggatgcatcaagccaccccagttcacgtcacccttcagtcggcagcgcccgcctgcccagtgtgggcgaggagtccacacatcctctgctcgtcgccgaggaacaggttcacacttatgtcaacaccacaggggttcaggaggagagaaagaataggacaagcgtccacgttccattagaggccagggtgtctaatgccgagagctcaacaccaaaggaagaaccctcatctatcgaggatagagatcctcagattttacttgaaccagagggcgtcaagtttgtcctcggtcccacaccagtccagaagcagctgatggagaaggagaagctcgagcagttgggaagggaccaggtgtcaggctcaggcgctaataataccgagtgggacactggctatgactcagacgaacgacgcgacgctcctagtgtgaacaaactggtgtacgagaatattaatggactttctattccaagcgcatctggcgtaaggagaggtcgcctcacatctacgtccacttcagatacacagaatattaataatagcgcacagcgcaggactgcactcctgaattacgagaacctgcccagtctcccacctgtgtgggaggctaggaagttgtctcgcgatgaagacgacaacctggggccaaaaaccccttccctgaacgggtatcataacaatctcgatcccatgcacaattatgtgaatactgagaatgtgaccgtccccgccagcgcccacaaaatagaatatagtagacggcgcgattgtacccccacggtctttaactttgacatccgaagaccttcactggagcaccgccagctcaactacatccaagtggatctcgagggaggatccgactcagataacccgcaaaccccaaagaccccaaccacccccctgccccaaacgcctacccggagaactgagttatacgccgttattgacatcgagcgaaccgccgcaatgtcaaatctgcagaaagccttgccacgagatgacggcacctcccgcaagacgcgtcacaactccactgatttaccgatgtag

SEQ ID NO: 98172 - DNA, 1527 bp, Artificial Sequence
  derived and/or modified sequence
atgggcagctgctgcagctgccccgacaaggacaccgtgcccgacaatcaccggaataagttcaaagtgattaatgtggacgatgatgggaacgagttaggcagtggcattatggagctcaccgatactgagcttatcctctatacccgaaaaagagactctgtcaaatggcattatctgtgtttaagacgctatggatacgatagtaacctgttctccttcgagtctggacgccggtgccagacaggacagggaatcttcgcgttcaaatgcgcacgagccgaagaattgttcaacatgctccaggagataatgcagaacaactcaatcaacgttgtggaggaacccgtggtggagcgaaacaaccaccaaacggaacttgaggtgcccaggacccctcgcaccccaaccacacccggatttgccgcacaaaacttgccgaacgggtatcctcgctatccgtccttcggcgatgcttcctcacacccatcgagtcgacacccttcagtgggatccgcccgccttccttccgtgggcgaggagagcacccatccactgctcgttgcggaagaacaggtgcatacttacgtgaatacaacgggcgtccaagaagaaagaaagaaccggacatccgttcacgtgcccttagaagcccgcgtgtccaatgcagagagcagtacccccaaagaggaaccgtccagcattgaggacagagacccacagatcctgctggagccagaaggcgttaagtttgtcctaggaccgacccccgtccaaaaacagctgatggaaaaggagaagctggaacagttggggcgcgatcaggtatcaggcagtggcgcaaacaacacagaatgggacacaggatacgacagtgacgagagacgtgatgcaccatccgtgaacaagcttgtttatgagaatatcaacggcctgagtatcccgtctgccagcggtgtaagaagggggagactgaccagtacaagcacatctgacactcagaacattaataactccgcccagcggcgtaccgctttgctgaattatgagaatcttccatcattaccccctgtctgggaagctcgaaagctgtcacgcgacgaggacgacaacctgggtccaaaaaccccatcgctcaacggttaccataacaatctggaccccatgcataattacgttaacaccgagaatgtaacagttcctgcatctgcccacaaaatcgaatattcccgtaggcgggattgtactccgactgtgtttaattttgatattaggcgaccctcactggagcatcgacagctgaattatatccaggtcgatctcgagggggggtccgatagcgataacccccagacacccaaaactcctaccacaccactccctcagacaccaactcggcggactgaactgtacgcggtgattgacatagaaaggaccgccgccatgtctaatttacagaaagccctgccccgtgatgatggaactagtaggaagacacggcataacagtacagatctacccatgtag

SEQ ID NO: 98173 - DNA, 111 bp, Artificial Sequence
  derived and/or modified sequence
atgggcagctgctgcagctgccccgacaaggacaccgtgcccgacaaccatcgcaataagttcaaggtaatcaatgttgatgatgatggcaatgagctgggatccggctag

SEQ ID NO: 98174 - DNA, 123 bp, Artificial Sequence
  derived and/or modified sequence
atgggcagctgctgcagctgccccgacaaggacaccgtgcccgacaaccaccggaacaaatttaaagtcatcaacgttgatgacgacggcaatgaacttggatctggcatcatggagttgtag

SEQ ID NO: 98175 - DNA, 102 bp, Artificial Sequence
  derived and/or modified sequence
atgggcagctgctgcagctgccccgacaaggacaccgtgcccgacaaccatcgcaataagttcaaggtcattaatgtggatgacgacgggaacgaactctag

SEQ ID NO: 98176 - DNA, 1527 bp, Artificial Sequence
  derived and/or modified sequence
atgggcagctgctgcagctgccccgacaaggacaccgtgcccgacaaccaccggaacaagttcaaagttataaacgtcgacgacgatggaaatgagcttggctctgggatcatggaactgactgacaccgaactgatcctgtacaccaggaagcgggatagcgtgaagtggcactatctttgtctgagacgatacggctacgactcgaatctgttctcattcgagtcaggaagaaggtgtcaaacgggacaggggatctttgccttcaaatgtgccagagctgaggagcttttcaacatgcttcaggaaatcatgcagaacaactccattaatgtagtggaagaacctgtggtggaaagaaataaccatcagactgaactagaggtgccaaggacgccacgaacacctactacccctggtttcgcagcacagaaccttcctaatggctatccacgctatccctcattcggtgacgctagttcccaccccagttccagacacccaagcgtgggctccgcaaggttaccctccgtgggggaggagtcgacccaccctcttttggtcgccgaggagcaagtccacacctacgttaacacgacaggggtgcaggaggagaggaagaaccgcacctccgtgcacgttccactggaggcccgggtttctaatgcagaaagtagcactcctaaggaggagccatcgtctatcgaagatcgagacccacagattctcctggaaccagagggtgttaagttcgtgttgggtccgacaccagtgcagaaacagttaatggagaaagagaagctggagcagttgggacgcgatcaggtgtccggaagcggtgccaataacaccgagtgggacactggatacgactccgatgagcggcgggatgcccccagcgttaacaaactggtatatgaaaatatcaatggtttgagcattccaagtgcctccggagtgcgacgcggacggctgacttccacgagcacatccgatactcagaacattaacaactcagcgcagagacgaaccgcactcctgaactacgagaacctgccatcactgccccctgtctgggaagcgagaaaactgagccgtgacgaagacgataacctggggcctaagactcctagccttaacgggtatcacaacaatttagatcctatgcacaattatgtgaacacggagaacgttacagtcccggcaagtgcccataaaatagaatactcccgccgacgcgattgcactccaacagtcttcaattttgatatacggcgcccctctcttgagcaccggcagctaaactatatccaggttgacttggaagggggatcagactctgacaacccccaaacaccaaagacacccacaactcctctgccacaaacacccacacgcaggactgagctttatgccgtcattgacattgaacggacggcagctatgtccaaccttcaaaaagcccttccccgggacgatgggactagccggaaaacccggcacaattctaccgacttgccaatgtag

SEQ ID NO: 98177 - DNA, 1527 bp, Artificial Sequence
  derived and/or modified sequence
atgggcagctgctgcagctgccccgacaaggacaccgtgcccgacaatcaccgtaataagttcaaggtcatcaatgtcgatgatgacggtaacgaactgggcagcggaatcatggagctcacagataccgagttgatcttgtacacccgtaagcgagattctgtgaagtggcattatctgtgcctgcgccggtacggctatgactcaaacctgtttagctttgagtcaggccgacggtgccagactgggcagggaattttcgctttcaagtgcgccagagccgaggaactattcaacatgcttcaggagatcatgcagaacaatagtatcaatgtcgttgaagagccagtagttgagcgcaacaaccatcaaacggaactcgaagtgccccgaacgccccggacacctacaacgccaggcttcgcagcgcagaacctgcccaacgggtatcctcggtacccaagcttcggtgatgcttcctcgcacccatccagccgacacccttcggtaggaagcgcccgcctcccatctgttggtgaggagagtacacaccctctgctcgtggcggaagagcaggttcacacctatgtaaatacaaccggggtgcaggaagagcggaagaaccggacttctgtccacgtgccactggaggctcgggtctccaatgctgagagctcaacccctaaagaggaaccctcttctatagaggacagggatcctcagatcctgctggagcctgagggagtcaagtttgtgttgggcccaacaccagtgcagaagcagctgatggaaaaggaaaaactggaacagctagggcgcgaccaagtgtcggggagtggcgcaaataacactgagtgggacaccggctacgactccgacgaacgacgggacgctccgagcgttaataagctggtctatgagaatatcaacggtctgtccataccaagtgcttccggggtgagacgtgggaggctcaccagcacctcaacctcagatacccagaatattaacaactccgcccagagaaggaccgcactgctgaactatgagaacctcccaagtctcccacccgtgtgggaggcacgcaagctgagtcgtgatgaggatgacaacctgggacccaaaaccccgtctcttaatgggtaccataataacttggacccgatgcacaattatgtgaacaccgaaaatgttactgtgcctgcctctgcgcataagatcgaatactcaagacggagagactgtacacccaccgtgttcaacttcgatattaggcgacccagcttggaacatcgccagttgaactatatccaggtggatcttgagggcggatccgactccgacaatccgcagacacccaaaacacccacaacaccgctgcctcagacaccaacccgcagaaccgagctctatgctgtcatcgatatcgaacgtaccgccgccatgagcaacctgcagaaagctctgccacgagacgacggaacatctcgcaagacacggcacaacagcacggacctgcccatgtag

SEQ ID NO: 98178 - DNA, 276 bp, Artificial Sequence
  derived and/or modified sequence
atgggcagctgctgcagctgccccgacaaggacaccgtgcccgacaaccatagaaataaatttaaggtgattaatgtcgacgacgatgggaatgagctcggaagcggtatcatggaactcaccgacaccgaattgattctatatacccgcaaaagggatagtgtaaagtggcactacctctgcttgaggcgctatgggtatgacagtaacctgttcagctttgaatctggtagaaggtgccagactggacagggcatctttgcctttaagtgttag

SEQ ID NO: 98179 - DNA, 552 bp, Artificial Sequence
  derived and/or modified sequence
atgggcagctgctgcagctgccccgacaaggacaccgtgcccgacaatcatcggaataaattcaaagtgatcaacgtcgacgacgatggcaatgagctggggtcaggtattatggagctgaccgacacagagttaatcctgtacacaaggaaaagggatagcgtgaagtggcattacctgtgcctccgacgctatggctatgatagcaacctgttttcattcgagtccgggcggcgctgccagacagggcaaggaatctttgccttcaagtgtgctcgtgctgaagaactgtttaacatgctgcaggaaatcatgcagaataactctatcaacgtggtcgaagaaccagtggtggaacgcaacaaccaccaaaccgaactcgaagtgcctagaactcctcgaacgccaactacccccggattcgcagctcagaatttgccaaatggataccctagataccctagctttggcgacgccagttcccaccctagttcccgccatccctccgttggatcggcccgcctccctagtgtaggtgaggaaagcacttag

SEQ ID NO: 98180 - DNA, 1527 bp, Artificial Sequence
  derived and/or modified sequence
atggggtcctgttgcagctgccccgacaaggacaccgtgccagacaaccataggaataagttcaaagtgataaatgtcgacgacgatgggaacgaactgggatctggtatcatggaactgactgatacagagctcattttgtacaccaggaagcgcgacagtgttaaatggcactatctgtgcttgagaaggtatggatatgattccaacctgttttccttcgagagcggcagacggtgtcagacaggacaggggatttttgctttcaaatgtgctcgggctgaggaattattcaatatgctacaggagatcatgcaaaacaattctattaatgttgtggaagaacctgttgtggagcgcaataaccaccagacggaattagaggtgcccaggactccgagaacgccgacaaccccgggatttgccgcacagaacctgcctaacggctatccacggtatccatcctttggagacgcctcctctcacccatcatcaagacatccgtcagtgggctccgccaggttgcctagtgttggcgaagaatcaacccatccactgctagtagccgaagagcaggtgcacacttatgtgaataccacaggcgtgcaggaagaaagaaaaaaccgcaccagtgtccatgtgcctctcgaagccagagtttcaaacgcagaatccagcacccctaaagaggaacctagtagcatcgaagatagggatcctcagattttgctggagccggagggcgtcaagtttgtgctgggccctactccggtacagaaacagctaatggagaaagagaaactcgaacagctcgggcgagaccaggtgagcgggagtggcgcaaacaataccgaatgggatacaggctatgacagtgatgagcggagggacgcccctagtgttaataagctggtatatgagaacattaatggcctgagtatcccatctgcctcaggcgtgcgacgagggagattgacttcaacttctacaagtgacacccagaacatcaataatagcgctcagaggcgcaccgcactgctgaattatgaaaatctccccagtcttccccctgtttgggaggctagaaagcttagccgggatgaggacgataatctcggccctaagaccccgtccttaaacgggtaccacaacaatctggaccctatgcacaactacgtgaatactgagaacgtgaccgtcccagccagcgcccacaagatcgagtacagtcggagacgcgactgcacaccaacagtcttcaactttgacatcaggcgaccatcactagagcatagacagctgaattatatccaagtcgatttggaaggagggtccgacagcgataacccacaaactccaaagaccccaactactcctttgccacagactcctactcgtcggaccgaactctacgctgtgattgatattgaaagaacagctgctatgagcaacctgcagaaagcgttacctagggacgacggcactagcagaaaaacaaggcacaatagtaccgacctcccgatgtag

SEQ ID NO: 98181 - DNA, 1527 bp, Artificial Sequence
  derived and/or modified sequence
atggggtcatgctgcagctgtccagataaagatacggttcctgacaatcatagaaacaagttcaaggtgattaatgtagatgatgatggcaatgaactgggatctggaatcatggagctgaccgataccgagctgattctgtacactcgcaaaagggactcagtgaaatggcattacctgtgccttaggagatacggttacgacagcaacctgttttccttcgaatccggcagaaggtgccagacaggccaaggcatatttgcattcaagtgcgccagggccgaggaactgtttaatatgttgcaggagattatgcagaataactccatcaacgtcgtggaagagcccgtcgtcgagagaaacaaccaccagaccgaactggaagttccccgtactccacggaccccaacaacccctggctttgccgcacagaatttaccaaacggatacccaagatacccttcctttggggacgcctcatcgcacccatctagccggcacccaagcgttgggtccgccaggttgcccagtgttggcgaggagagtactcaccctctgctcgtcgccgaggaacaggtccatacatacgtgaatacgacaggagtgcaggaggaacgtaagaaccgtacaagcgttcatgtgccgctcgaggcaagagtgagcaacgccgaaagctcaacccccaaggaggagccgtcttctattgaagatcgggacccccaaatcctgttggaacccgaaggcgtcaagtttgttcttggtcccacccccgtccagaagcagttaatggaaaaggaaaaactagaacagttgggtagagaccaggtctcagggtctggtgccaacaatacggagtgggatacagggtacgactctgacgagcggagggacgcgcctagcgtgaacaagctggtgtatgagaatattaatggactatccattccctcggcttccggagtgcggcgtggcagactgacctcaacttctacgagcgacacacagaacatcaacaatagcgctcaaagaaggaccgctttgttgaattatgaaaacctcccaagcctgcctccagtttgggaagcgcgtaagctatccagagacgaagatgacaacctggggcctaagactccatccctgaacggttaccacaataatcttgaccctatgcacaattacgtcaacacagagaatgtaactgttcccgcaagcgcccacaaaattgagtactcaaggcgacgggattgcacccccacggtcttcaactttgatatacgcagaccgagtctcgaacaccgacagctgaattacattcaagtggatctggaaggcggaagcgattccgataacccacagaccccgaagactccgacgacaccccttccacagactccgacacgtaggactgagctttacgccgttatcgacatcgaacgaaccgctgctatgtcaaacctccaaaaggcgctgcctcgagatgatggcacttcccgaaaaactcgccacaactccaccgatctgccaatgtag

SEQ ID NO: 98182 - DNA, 111 bp, Artificial Sequence
  derived and/or modified sequence
atggggtcttgctgcagctgtccagataaggatacagttcctgataaccaccgtaataagttcaaagtgataaatgtagacgacgatgggaacgagctcggcagtgggtag

SEQ ID NO: 98183 - DNA, 123 bp, Artificial Sequence
  derived and/or modified sequence
atggggtcctgctgctcttgcccagacaaggacaccgtgcccgacaaccacagaaataaattcaaagtgattaacgtggacgatgatggaaacgaattggggtctgggattatggagctgtag

SEQ ID NO: 98184 - DNA, 102 bp, Artificial Sequence
  derived and/or modified sequence
atgggcagctgctgcagttgtcctgataaggatactgttcccgacaatcacagaaacaagtttaaggttataaacgtggacgatgatggcaatgaactgtag

SEQ ID NO: 98185 - DNA, 1527 bp, Artificial Sequence
  derived and/or modified sequence
atgggatcttgttgctcctgccctgataaggacaccgtccctgataaccacaggaataagtttaaggtgatcaacgtggatgacgatgggaacgaattagggtctgggattatggagctgaccgatacggagttgatattgtatacacgcaagcgtgattcagtgaagtggcattacttatgtttgcgtcgctacgggtacgatagtaatctgttttctttcgaatccggcaggagatgtcagaccggccaaggtatctttgccttcaagtgtgccagggccgaagagctgttcaacatgttacaggaaattatgcagaacaatagtatcaacgtggtggaggaaccggtggtggaaaggaacaaccaccagacagagcttgaggtgcctcggacaccacgaacccccacaaccccgggttttgctgcacagaatttaccaaacggctatccacggtacccttcatttggagacgccagttcacatccttcctctagacatccctccgtaggtagtgcccgtctgccttctgtgggagaggaatcaacccatccccttctggtggccgaggagcaggtgcatacctatgttaacacaacgggtgttcaagaggagcggaagaatcgtacaagtgtgcatgtcccattggaggctagagtgagtaatgcggagagtagcacccccaaggaagagccatcctcaatcgaggatcgggacccacaaatcttacttgagcccgagggcgtcaagtttgttctcggcccaacaccggtgcagaagcagctgatggagaaagagaagctcgagcagctaggcagagaccaggtctctggttccggggctaataacaccgagtgggatactggatacgactcagatgagcggcgtgatgcccctagcgtgaataaattggtttacgagaatataaacggcctttctatcccatcagcctcgggtgtccgccgaggacgcctgacgagtaccagcacctccgacacacagaatattaataactcagcccagcggaggacagctctgctgaattatgagaatctcccaagcctgccacccgtctgggaggcacgtaagctctcgagggacgaggacgacaaccttgggccaaaaaccccgtcgctaaacgggtaccataacaatctcgacccaatgcacaactacgttaacactgagaatgtgaccgtgccagcatcggctcataaaatcgagtatagtaggaggcgcgactgtactccaacagtctttaactttgatatccggaggccaagcctggagcatcgacaactcaactatattcaggtggatctggaagggggaagcgactcggataatccccagaccccaaagacgcccacgaccccccttccccagactcccacaaggcgcaccgaattgtacgctgtaattgatatcgaaagaaccgccgcaatgtccaacctccaaaaggcgttgccgagggacgacggaacttcgagaaagacacgccacaattcaaccgatctgcctatgtag

SEQ ID NO: 98186 - DNA, 33 bp, Artificial Sequence
  derived and/or modified sequence
atgggcagctgctgcagttgtcctgacaagtag

SEQ ID NO: 98187 - DNA, 39 bp, Artificial Sequence
  derived and/or modified sequence
atgggaagttgttgcagttgccccgacaaggatacatag

SEQ ID NO: 98188 - DNA, 1527 bp, Artificial Sequence
  derived and/or modified sequence
atgggatcatgctgctcctgtcccgataaagatactgtgcctgacaaccaccggaacaaatttaaggtgatcaacgtagatgacgatggaaacgaactgggaagtggaatcatggagttaactgacacagaacttatcctctacactaggaagagggacagtgttaaatggcactatctgtgcttacgtcggtacggttatgactcaaatttattctcttttgaatcaggcaggagatgtcagacaggacaggggatctttgcctttaagtgtgcacgcgcagaggagctctttaatatgctacaggagattatgcaaaataatagcatcaatgtagtggaggagcctgtggtggagcgcaataatcatcagactgagctcgaggtgccacgcactccacgtacacctacaactcccggttttgctgcccaaaatctgccgaacggctaccccaggtatccatcttttggcgacgccagtagccacccatctagtagacatcccagtgtaggcagcgcacgtctcccatctgttggcgaggaatccacgcacccgcttcttgtggcggaggaacaggtgcatacctacgtcaataccacgggggtgcaagaggaaagaaagaatcggacaagtgttcacgtacccttagaggctcgagtgagcaacgccgaaagttccacccccaaggaggaacccagttctatcgaagatagagacccccagatactgctggagcctgagggtgtcaagtttgtgctgggccctaccccagtccaaaaacagctgatggagaaggagaaactggagcagttagggagggatcaggtgtcagggagtggagcaaacaataccgaatgggatacagggtacgacagcgacgagagacgtgacgcccctagcgttaacaagctggtgtacgagaacatcaacggcctgtcgataccttccgctagtggcgtccgaagagggcgtctgacatctaccagcacatccgatacacagaatataaacaactccgcgcagaggcgaaccgcacttctgaactacgagaaccttcccagcctcccgcctgtttgggaggctcgaaaactgtcacgcgacgaagacgacaacctgggacccaagaccccctccctcaacggctatcacaataacctggatccgatgcacaactatgttaataccgagaacgtgacggtcccggcttctgcacataagattgagtactccaggagacgcgactgcacccctacggtgttcaatttcgacatcagaaggccttccctagaacacagacaactcaactacatccaagtggatcttgagggaggctccgacagcgacaatccacaaacgccgaaaacacctaccacaccccttccgcagactccgaccaggcggaccgaactgtacgccgtgattgacattgagcgtaccgccgctatgtctaacctccagaaggccttacccagggatgatggaaccagccgcaagaccagacacaattctaccgacctgccaatgtag

SEQ ID NO: 98189 - DNA, 276 bp, Artificial Sequence
  derived and/or modified sequence
atgggcagctgttgttcatgtcctgataaagatacagtccccgacaatcaccgaaacaaattcaaagttatcaacgtcgatgacgacggaaacgagcttgggagtggtatcatggagctgacagacacagagctcatcctttacacgcgcaaaagagattccgtgaaatggcactatttatgcctgcggagatatggctatgacagcaacctgttcagctttgaatccgggagacgttgtcagacaggacagggcatcttcgcttttaagtgttag

SEQ ID NO: 98190 - DNA, 552 bp, Artificial Sequence
  derived and/or modified sequence
atgggaagctgttgctcctgccctgataaggataccgttccggacaaccaccgaaataagttcaaagtgataaacgtggacgacgacggcaacgaactggggtcggggattatggagctaaccgatacggagctgatcctctacacacgaaagagagatagtgtgaagtggcattatctctgtctgagaagatatgggtatgactccaacctgttcagcttcgagagtggcagacggtgccaaaccggccaaggaattttcgcctttaagtgcgcacgggcagaagaattatttaacatgcttcaggaaattatgcagaacaactcgatcaatgtggtggaggagcctgtggtggaaaggaacaaccatcagacggaacttgaagtgcccagaacaccacggactcccaccacgccgggattcgccgctcaaaaccttccaaacggctatcccagatatccttctttcggagacgcatcgtcccatccaagttccaggcacccctcagttgggtccgcgaggctgccgtccgtgggcgaagagtctacttag

SEQ ID NO: 98191 - protein, 191 aa, Artificial Sequence
  derived and/or modified sequence
MLSSIKCVLVGDSAVGKTSLLVRFTSETFPEAYKPTVYENTGVDVFMDGIQISLGLWDTAGNDAFRSIRPLSYQQADVVLMCYSVANHNSFLNLKNKWIGEIRSNLPCTPVLVVATQTDQREMGPHRASCVNAMEGKKLAQDVRAKGYLECSALSNRGVQQVFECAVRTAVNQARRRNRRRLFSINECKIF

SEQ ID NO: 98192 - protein, 103 aa, Artificial Sequence
  derived and/or modified sequence
MLSSIKCVLVGDSAVGKTSLLVRFTSETFPEAYKPTVYENTGVDVFMDGIQISLGLWDTAGNDAFRSIRPLSYQQADVVLMCYSVANHNSFLNLKNKWIGEIR

SEQ ID NO: 98193 - protein, 109 aa, Artificial Sequence
  derived and/or modified sequence
MLSSIKCVLVGDSAVGKTSLLVRFTSETFPEAYKPTVYENTGVDVFMDGIQISLGLWDTAGNDAFRSIRPLSYQQADVVLMCYSVANHNSFLNLKNKWIGEIRSNLPCT

SEQ ID NO: 98194 - protein, 16 aa, Artificial Sequence
  derived and/or modified sequence
MLSSIKCVLVGDSAVG

SEQ ID NO: 98195 - DNA, 576 bp, Artificial Sequence
  derived and/or modified sequence
atgctgagcagcatcaagtgcgtgctggtgggcgacagcgccgtgggcaagaccagcctgctggtgagattcaccagcgagaccttccccgaggcctacaagcccaccgtgtacgagaacaccggcgtggacgtgttcatggacggcatccagatcagcctgggcctgtgggacaccgccggcaacgacgccttcagaagcatcagacccctgagctaccagcaggccgacgtggtgctgatgtgctacagcgtggccaaccacaacagcttcctgaacctgaagaacaagtggatcggcgagatcagaagcaacctgccctgcacccccgtgctggtggtggccacccagaccgaccagagagagatgggcccccacagagccagctgcgtgaacgccatggagggcaagaagctggcccaggacgtgagagccaagggctacctggagtgcagcgccctgagcaacagaggcgtgcagcaggtgttcgagtgcgccgtgagaaccgccgtgaaccaggccagaagaagaaacagaagaagactgttcagcatcaacgagtgcaagatcttctag

SEQ ID NO: 98196 - DNA, 312 bp, Artificial Sequence
  derived and/or modified sequence
atgctgagcagcatcaagtgcgtgctggtgggcgacagcgccgtgggcaagaccagcctgctggtgagattcaccagcgagaccttccccgaggcctacaagcccaccgtgtacgagaacaccggcgtggacgtgttcatggacggcatccagatcagcctgggcctgtgggacaccgccggcaacgacgccttcagaagcatcagacccctgagctaccagcaggccgacgtggtgctgatgtgctacagcgtggccaaccacaacagcttcctgaacctgaagaacaagtggatcggcgagatcagatag

SEQ ID NO: 98197 - DNA, 330 bp, Artificial Sequence
  derived and/or modified sequence
atgctgagcagcatcaagtgcgtgctggtgggcgacagcgccgtgggcaagaccagcctgctggtgagattcaccagcgagaccttccccgaggcctacaagcccaccgtgtacgagaacaccggcgtggacgtgttcatggacggcatccagatcagcctgggcctgtgggacaccgccggcaacgacgccttcagaagcatcagacccctgagctaccagcaggccgacgtggtgctgatgtgctacagcgtggccaaccacaacagcttcctgaacctgaagaacaagtggatcggcgagatcagaagcaacctgccctgcacctag

SEQ ID NO: 98198 - DNA, 51 bp, Artificial Sequence
  derived and/or modified sequence
atgctgagcagcatcaagtgcgtgctggtgggcgacagcgccgtgggctag

SEQ ID NO: 98199 - DNA, 576 bp, Artificial Sequence
  derived and/or modified sequence
atgctttcaagcatcaagtgcgtgcttgtcggcgactctgcggtcggcaaaaccagtttgctcgttaggtttacttccgagaccttccctgaagcctacaagcccacagtgtatgagaacacgggtgtggatgtgttcatggacggtatccagatcagcctgggtctatgggacactgccggtaatgatgcgttcagaagtattagaccactgtcttatcagcaagccgatgtggtgctaatgtgttattctgtcgccaaccataactccttcttgaacctgaagaacaagtggattggtgaaattcgtagcaacctcccctgcactccagtgctggtggtcgcaacacagacagaccagcgagaaatgggccctcaccgggcctcatgtgtgaatgcaatggagggcaagaaattagctcaagatgtgcgcgctaagggttacctggaatgtagtgcactcagcaatcgcggtgttcaacaagtattcgagtgtgccgtaagaaccgctgtgaatcaggcacgtcggcggaatcggcgtaggctgttctcaataaatgaatgcaaaatattctag

SEQ ID NO: 98200 - DNA, 312 bp, Artificial Sequence
  derived and/or modified sequence
atgttgtcatcaatcaaatgtgtcctggttggagacagcgctgtgggcaagacttctctgctagtgagattcacctccgagacattccctgaagcgtacaagccaactgtgtatgaaaacacaggggtcgatgtttttatggacggcatccagatttccctgggactgtgggataccgctggcaatgacgcttttcggtcaatccgacctctgtcttatcagcaggcagacgtcgttcttatgtgctattcagtcgccaaccacaacagcttcctgaacctcaaaaacaaatggattggcgagattcgatag

SEQ ID NO: 98201 - DNA, 576 bp, Artificial Sequence
  derived and/or modified sequence
atgctcagcagcataaaatgcgtgctcgtgggtgactctgctgttggcaaaacctccctcctcgtccgattcacatccgaaaccttccctgaagcttacaaacctactgtgtatgagaataccggtgtggatgtattcatggatgggattcagatttccctcgggctgtgggacacggcaggaaacgacgccttcagatctatccgccctctttcctaccagcaggcagacgttgtcctgatgtgctattcagtcgccaaccataatagctttcttaatttgaaaaataagtggattggagaaattagatcgaatctgccatgtaccccagttcttgttgtcgcgactcaaaccgatcagcgtgagatgggcccacaccgcgcttcctgtgtaaatgctatggaggggaaaaagctggcccaggacgtgcgggctaagggctacctggaatgttcagcactctccaatcggggcgtccagcaggtcttcgaatgcgccgtgaggaccgctgttaatcaggccaggcggcgaaacagacgccgattgtttagcatcaatgagtgtaagatcttctag

SEQ ID NO: 98202 - DNA, 330 bp, Artificial Sequence
  derived and/or modified sequence
atgctcagctcaatcaaatgcgtattggtgggagatagcgccgtgggcaagaccagccttctggtgaggtttacgtcagagacttttcccgaagcctataagcccactgtctacgaaaacaccggagtagacgtctttatggatggcatccagatctctttgggcctgtgggacactgctggtaacgatgcttttcgctcgatcagacccctgagctaccagcaggctgacgttgtgctgatgtgttacagcgtcgccaaccacaattccttcctcaatctcaagaataagtggattggggagatccgttcaaacttaccttgcacctag

SEQ ID NO: 98203 - DNA, 51 bp, Artificial Sequence
  derived and/or modified sequence
atgctttcttccatcaagtgtgtcctcgtgggcgatagtgcagtgggttag

SEQ ID NO: 98204 - DNA, 576 bp, Artificial Sequence
  derived and/or modified sequence
atgctgagcagcatcaagtgtgtgctggtgggggacagcgctgtgggcaagaccagcctgctggtgcgcttcaccagcgagaccttccctgaggcctacaagcccaccgtgtatgaaaatactggagtggatgtgttcatggatggcatccagatcagcctgggcctgtgggacacagctggaaatgatgccttccgcagcatccggcccctgagctaccagcaggctgatgtggtgctgatgtgctacagcgtggccaaccacaacagcttcctgaacctgaagaacaagtggattggagagatccgcagcaacctgccctgcacccctgtgctggtggtggccacccagacagaccagcgggagatgggcccccaccgggccagctgtgtgaatgccatggagggcaagaagctggcccaggatgtgcgggccaagggctacctggagtgcagcgccctgagcaacagaggagtgcagcaggtgtttgaatgtgctgtgaggacagctgtgaaccaggccaggagaagaaacagaagaagactcttcagcatcaatgaatgcaagatcttctag

SEQ ID NO: 98205 - DNA, 312 bp, Artificial Sequence
  derived and/or modified sequence
atgctgagcagcatcaagtgtgtgctggtgggggacagcgctgtgggcaagaccagcctgctggtgcgcttcaccagcgagaccttccctgaggcctacaagcccaccgtgtatgaaaatactggagtggatgtgttcatggatggcatccagatcagcctgggcctgtgggacacagctggaaatgatgccttccgcagcatccggcccctgagctaccagcaggctgatgtggtgctgatgtgctacagcgtggccaaccacaacagcttcctgaacctgaagaacaagtggattggagagatcagatag

SEQ ID NO: 98206 - DNA, 330 bp, Artificial Sequence
  derived and/or modified sequence
atgctgagcagcatcaagtgtgtgctggtgggggacagcgctgtgggcaagaccagcctgctggtgcgcttcaccagcgagaccttccctgaggcctacaagcccaccgtgtatgaaaatactggagtggatgtgttcatggatggcatccagatcagcctgggcctgtgggacacagctggaaatgatgccttccgcagcatccggcccctgagctaccagcaggctgatgtggtgctgatgtgctacagcgtggccaaccacaacagcttcctgaacctgaagaacaagtggattggagagatccgcagcaacctgccctgcacctag

SEQ ID NO: 98207 - DNA, 51 bp, Artificial Sequence
  derived and/or modified sequence
atgctgagcagcatcaagtgtgtgctggtgggggacagcgctgtgggctag

SEQ ID NO: 98208 - DNA, 576 bp, Artificial Sequence
  derived and/or modified sequence
atgctgagcagcatcaagtgcgtgctggtgggcgacagcgccgtgggaaaaacctctctgttggtacgcttcacaagtgagaccttccccgaagcatacaagccaacggtttatgagaacactggggtggacgtcttcatggatgggatacagatttctctgggcctctgggacaccgctggcaacgacgcattccggagcatccggccgctgagttatcagcaggccgacgtggtacttatgtgttacagcgtcgcaaaccacaacagctttctgaatctgaagaacaaatggattggagagataagatccaacctgccatgtacacctgtcctggtcgtcgctacacaaactgatcagcgggaaatgggcccacacagggccagttgtgtgaatgctatggagggaaaaaaacttgcccaggacgtgcgcgctaaaggctacctagaatgcagcgcactctctaaccgaggagtgcagcaggtgtttgaatgcgcggttcggactgcagtaaaccaggcccgccggcggaatcgtaggcgattgtttagcattaacgaatgtaaaattttctag

SEQ ID NO: 98209 - DNA, 312 bp, Artificial Sequence
  derived and/or modified sequence
atgctgagcagcatcaagtgcgtgctggtgggcgacagcgccgtggggaaaacttcgctgctggtgcggttcactagcgagaccttccccgaggcttacaagcccactgtctatgagaacacaggggtcgacgtcttcatggatggcatacaaatcagcttaggcctgtgggacaccgcaggcaatgatgcgttcaggtctataaggcctttatcgtatcagcaggctgacgtcgtgttgatgtgctacagtgtcgccaaccacaattcatttttgaatctgaagaataaatggatcggggaaattaggtag

SEQ ID NO: 98210 - DNA, 576 bp, Artificial Sequence
  derived and/or modified sequence
atgctgagcagcatcaagtgcgtgctggtgggcgacagcgccgtgggtaagacttcactgctggtgcgatttacaagcgaaacctttcctgaggcctataaacctacagtttacgagaatactggggtggacgtctttatggacggaattcagatctcactgggtttgtgggacaccgcaggaaatgatgcttttcgcagtattcgaccgctgagttaccagcaggccgacgtcgtgctcatgtgctactcggtggccaatcacaacagctttcttaacctgaaaaacaagtggataggcgagattcggagtaatctgccctgtactcccgtgttagtcgttgctacacagaccgatcaaagagagatgggcccgcaccgcgcctcgtgcgtcaacgcaatggaaggcaaaaagctcgcgcaggatgttagagctaaggggtacctggagtgttctgccctgtccaaccgcggcgtgcagcaggtgtttgagtgtgctgtgcgcacggccgtgaatcaggcaagacggcgcaatcggcggcggttgttttccatcaacgagtgcaagattttctag

SEQ ID NO: 98211 - DNA, 330 bp, Artificial Sequence
  derived and/or modified sequence
atgctgagcagcatcaagtgcgtgctggtgggcgacagcgccgtgggtaagaccagccttctcgtgaggttcacaagcgagacattccccgaggcatacaagcctactgtgtacgagaacacaggtgtggatgtcttcatggatggaatccagatttccctggggctctgggacacggcagggaacgatgctttccggtctattagaccactttcctaccagcaagctgatgtcgtcctcatgtgctactcagtcgcaaatcacaattctttcctgaacctaaagaataaatggattggagagattcgctctaacctgccttgcacatag

SEQ ID NO: 98212 - DNA, 51 bp, Artificial Sequence
  derived and/or modified sequence
atgctgagcagcatcaagtgcgtgctggtgggcgacagcgccgtggggtag

SEQ ID NO: 98213 - DNA, 576 bp, Artificial Sequence
  derived and/or modified sequence
atgctctcaagtataaaatgtgtactcgttggtgactcagcggtgggaaagacaagcttattggttagatttacatctgaaacctttcccgaagcctataagcctaccgtctacgaaaacaccggtgtggatgttttcatggacggtatacagatttctcttggtttgtgggacactgccggaaatgatgcctttcggtcaatccggccacttagttaccaacaagctgacgtggtgctcatgtgttatagtgttgctaaccataactctttcttaaatctgaagaacaagtggatcggagagatcagaagcaacctaccatgcacacccgtactggtggtggcaacgcagactgaccaacgcgaaatgggaccccatcgtgccagttgtgttaatgcgatggaaggcaagaaactcgcccaggacgtgagagctaagggttatctggagtgctcagctctgagtaaccggggagttcagcaggtgtttgaatgcgctgtccggacagctgtgaatcaggccagaaggcgcaatcgacgccgtttgttttcaataaatgagtgcaagatcttctag

SEQ ID NO: 98214 - DNA, 312 bp, Artificial Sequence
  derived and/or modified sequence
atgctttcctccatcaaatgtgtgctcgtgggcgactctgccgtcggcaaaacatcgctgctggttcgcttcacttcagagacatttcctgaagcttacaaacctaccgtgtatgaaaacacaggcgtggacgtctttatggacggtatccaaatctcactggggttgtgggacacagcaggcaacgatgcgtttcgatctatccggcctctgagctaccagcaggccgatgtggtattgatgtgctactctgtagctaaccataattccttcctgaatctcaagaataagtggattggggaaattcggtag

SEQ ID NO: 98215 - DNA, 576 bp, Artificial Sequence
  derived and/or modified sequence
atgctcagcagcattaagtgtgtgcttgtgggggacagcgctgtcggaaaaacatcactcctggtccggttcacatccgagactttccctgaggcctacaagcctacggtctacgagaatactggggttgatgtcttcatggatgggattcagattagcctggggctgtgggacaccgccggaaacgatgcttttcgctcaattcgacccctctcataccaacaggcggatgtcgtcctaatgtgttattcagtggcaaatcacaactcatttttgaatttgaaaaacaaatggattggcgagatcagatccaacctgccttgtacacccgtcctcgttgtggctacacaaacagatcagcgtgaaatgggcccacacagagccagctgtgtgaatgcaatggagggcaaaaaattagcccaagatgtgcgggctaagggttacctggaatgtagtgccctgtcaaacaggggagtccaacaggtctttgaatgtgcagtaaggaccgccgtgaatcaggctcggagaaggaatagacgcaggctgttttccattaatgaatgtaagatattctag

SEQ ID NO: 98216 - DNA, 330 bp, Artificial Sequence
  derived and/or modified sequence
atgctctcatcaattaagtgcgttttggtcggagactccgcagtcggaaaaacgtccttgctggtgagattcacatctgagacatttcccgaagcatataagccgacagtatacgagaacacaggggtagatgtcttcatggatggaatacagattagcctgggcttgtgggacaccgcagggaacgatgcattcaggtccattagaccactgagttaccagcaggcagatgtagtgctgatgtgttattccgttgccaaccacaattctttcctaaacctgaagaacaagtggatcggagaaatcagatccaatctgccttgcacgtag

SEQ ID NO: 98217 - DNA, 51 bp, Artificial Sequence
  derived and/or modified sequence
atgctgtcctctataaagtgcgtgttggtgggggatagcgcggtgggatag

SEQ ID NO: 98218 - DNA, 1999 bp, Artificial Sequence
  derived and/or modified sequence
tattctaatggagagaaacgcacgtgcacacacacccccctaaacccacacaaatgaaaccccctctgcggagaagccggctacaggaaattgacttaggcacaggaacttgctaatctcttttgtcacattcggattgctcctgctgccccacacacactaacccaaccatcttggggtggactccctgccagcccaactgttgtattttcagttcttccagtgtgaatcagttaatattctcgggaacgagggagaggttgatcctatgaggaaatcaaccacagtgaaaaggcttgggccgcttttgttttcacctgcttttgttgaacaaatttgatttccggagtcagtcattttactgtcaagacatttcttcggcattctgcaacagtttccaacatggctagatccatcagaaactgaagccgtggagaacgctctcggggcctttgccacttcttggagtagaagccgacagagagctgtttggaaacttctccttcacacaccagttgaagactaggctttggaggttttcaaagcagacggtgcttggatgggcagggagaagtaacattctgcaaatcgccgtcagaggtcctgaggacacagacctacctggcttgcattccccttgctgaatggcgtgtgctgcagctgcccactgagggctcttttccctgggattctggacttcagagtaggacagcaggctgggaagatgctgagttccatcaagtgcgtgttggtgggcgactctgctgtggggaaaacctctctgttggtgcgcttcacctccgagaccttcccggaggcctacaagcccacagtgtacgagaacacaggggtggacgtcttcatggatggcatccagatcagcctgggcctctgggacacagccggcaatgacgccttcagaagcatccggcccctgtcctaccagcaggcagacgtggtgctgatgtgctactctgtggccaaccataactcattcctgaacttgaagaacaagtggattggtgaaattaggagcaacttgccctgtacccctgtgctggtggtggccacccagactgaccagcgggagatggggccccacagggcctcctgcgtcaatgccatggaagggaagaaactggcccaggatgtcagagccaagggctacctggagtgctcagcccttagcaatcggggagtacagcaggtgtttgagtgcgccgtccgaactgccgtcaaccaggccaggagacgaaacagaaggaggctcttctccatcaatgagtgcaagatcttctaaaccccaagagacttcacacaacacttatgtatgcaccccaaagactaatggggagagggagggccgggaagccaggaaagcttggtgttttctctgggtacaccccaagcagcgtctccttttggatacagttattgatgaggcttggccactggatgttttcactaactacactctacaagtgaactccttgcccaggccagttagaaaatcccttggggaactgtgatgaatattccatctttgattaaaaaagtgaaatagtctccataattttggacgatgaagtgagtttttcaaagaattccatatttaaagacacattttatttaactaataacaaaatgtattgcttttgtatatatttagttttcacacttggaaaatcttttcctacatcctcgaaaacataaactcctctgtgagtgaaatgcttgtacgaagctctgccatatgtttgtagtgttattattttcacctcaagtagaaagtctgttgaaaccacttggctgctggatttaaatgggtaatcaaatttaaaaatgaccataaatgaatctttgcaatttgttttctacttacctgttattcacagttggatataaaatacagttccataagatatcctaatactgcctaatgattttaaagttatcactatatttttctgaaatgataaaacatcattcatttatttac

SEQ ID NO: 98219 - DNA, 789 bp, Artificial Sequence
  derived and/or modified sequence
agaggcgtgtaggtcaggagcaggaggaagcccaacgctggactgtaccagatcatctaaaactggcaattccaggcacagaaaaccagttcttcagaagcagaagggtggtcagccagggggtgaaagggacaggggtctcgcagccagtttccaacatggctagatccatcagaaactgaagccgtggagaacgctctcggggcctttgccacttcttggagtagaagccgacagagagctgtttggaaacttctccttcacacaccagttgaagactaggctttggaggttttcaaagcagacggtgcttggatgggcagggagaagtaacattctgcaaatcgccgtcagaggtcctgaggacacagacctacctggcttgcattccccttgctgaatggcgtgtgctgcagctgcccactgagggctcttttccctgggattctggacttcagagtaggacagcaggctgggaagatgctgagttccatcaagtgcgtgttggtgggcgactctgctgtggggaaaacctctctgttggtgcgcttcacctccgagaccttcccggaggcctacaagcccacagtgtacgagaacacaggggtggacgtcttcatggatggcatccagatcagcctgggcctctgggacacagccggcaatgacgccttcagaagcatccggcccctgtcctaccagcaggcagacgtggtgctgatgtgctactctgtggccaaccataactcattcctgaacttgaagaacaagtggattggtgaaattagg

SEQ ID NO: 98220 - DNA, 1225 bp, Artificial Sequence
  derived and/or modified sequence
agtttgagaagaagcagtgatcaccttcttcttcactcttcacgctgatgaatttctacatcactgtgcatgtcctgtgctttgcagtcattccctaggagctcgggcccttgacccaaagatactgctcttactaacactacattttaaactcctcctctggactcactctcagagcctgccgcacaatctttaaaaactttgtcaatgattgcaaaatctttttccttttagagtggatttgattttaggagacagccattcggagctacatccagtgaataagtttccaacatggctagatccatcagaaactgaagccgtggagaacgctctcggggcctttgccacttcttggagtagaagccgacagagagctgtttggaaacttctccttcacacaccagttgaagactaggctttggaggttttcaaagcagacggtgcttggatgggcagggagaagtaacattctgcaaatcgccgtcagaggtcctgaggacacagacctacctggcttgcattccccttgctgaatggcgtgtgctgcagctgcccactgagggctcttttccctgggattctggacttcagagtaggacagcaggctgggaagatgctgagttccatcaagtgcgtgttggtgggcgactctgctgtggggaaaacctctctgttggtgcgcttcacctccgagaccttcccggaggcctacaagcccacagtgtacgagaacacaggggtggacgtcttcatggatggcatccagatcagcctgggcctctgggacacagccggcaatgacgccttcagaagcatccggcccctgtcctaccagcaggcagacgtggtgctgatgtgctactctgtggccaaccataactcattcctgaacttgaagaacaagtggattggtgaaattaggagcaacttgccctgtacccctgtgctggtggtggccacccagactgaccagcgggagatggggccccacagggcctcctgcgtcaatgccatggaagggaagaaactggcccaggatgtcagagccaagggctacctggagtgctcagcccttagcaatcggggagtacagcaggtgtttgagtgcgccgtccgaactgccgtcaaccaggccaggagacgaaacagaaggaggctcttctccatcaatgagtgcaagatcttctaaaccccaagagacttcacacaacacttatgtatg

SEQ ID NO: 98221 - DNA, 814 bp, Artificial Sequence
  derived and/or modified sequence
aagtgtttaccataaagggcagctgtgaggctgtgagatgggagaatcaatctatttattggtcagaaagtggttgttcagtaccttggatttctgagtgggcaaggctggaccctgagccctgggacctctgaagtgaacactgcagggccatttgtttccaacatggctagatccatcagaaactgaagccgtggagaacgctctcggggcctttgccacttcttggagtagaagccgacagagagctgtttggaaacttctccttcacacaccagttgaagactaggctttggaggttttcaaagcagacggtgcttggatgggcagggagaagtaacattctgcaaatcgccgtcagaggtcctgaggacacagacctacctggcttgcattccccttgctgaatggcgtgtgctgcagctgcccactgagggctcttttccctgggattctggacttcagagtaggacagcaggctgggaagatgctgagttccatcaagtgcgtgttggtgggcgactctgctgtggggaaaacctctctgttggtgcgcttcacctccgagaccttcccggaggcctacaagcccacagtgtacgagaacacaggggtggacgtcttcatggatggcatccagatcagcctgggcctctgggacacagccggcaatgacgccttcagaagcatccggcccctgtcctaccagcaggcagacgtggtgctgatgtgctactctgtggccaaccataactcattcctgaacttgaagaacaagtggattggtgaaattaggagcaacttgccctgtacc

SEQ ID NO: 98222 - protein, 151 aa, Artificial Sequence
  derived and/or modified sequence
MPVAATNSETAMQQVLDNLGSLPSATGAAELDLIFLRGIMESPIVRSLAKAHERLEETKLEAVRDNNLELVQEILRDLAHVAEQSSTAAELAHILQEPHFQSLLETHDSVASKTYETPPPSPGLDPTFSNQPVPPDAVRMVGIRKTAGEHL

SEQ ID NO: 98223 - protein, 126 aa, Artificial Sequence
  derived and/or modified sequence
MPVAATNSETAMQQVLDNLGSLPSATGAAELDLIFLRGIMESPIVRSLAKAHERLEETKLEAVRDNNLELVQEILRDLAHVAEQSSTAAELAHILQEPHFQSLLETHDSVASKTYETPPPSPGLDP

SEQ ID NO: 98224 - protein, 148 aa, Artificial Sequence
  derived and/or modified sequence
MPVAATNSETAMQQVLDNLGSLPSATGAAELDLIFLRGIMESPIVRSLAKAHERLEETKLEAVRDNNLELVQEILRDLAHVAEQSSTAAELAHILQEPHFQSLLETHDSVASKTYETPPPSPGLDPTFSNQPVPPDAVRMVGIRKTAG

SEQ ID NO: 98225 - DNA, 4414 bp, Artificial Sequence
  derived and/or modified sequence
cttcccagtgggactccagcagggcgtcgtggtctgtgcggtgtctcccaaaccactacctggctgcccccgtaccagctgctgggaaagactacttcctccgagttgtgccggcctccgcgttctcctcacctcccctctcctccggacctccgccccctcgcggagaggccttgccgctttaagagccgggctagcgattgacaagcaataaacgctgagcgcccggctgcgctggagccgcccggagctaggggcttcccggggcgcaggagagacgtttcagagcccttgcctccttcaccatgccggttgccgccaccaactctgaaactgccatgcagcaagtcctggacaacttgggatccctccccagtgccacgggggctgcagagctggacctgatcttccttcgaggcattatggaaagtcccatagtaagatccctggccaaggcccatgagaggctggaggagacgaagctggaggccgtgagagacaacaacctggagctggtgcaggagatcctgcgggacctggcgcacgtggctgagcagagcagcacagccgccgagctggcccacatcctccaggagccccacttccagtccctcctggagacgcacgactctgtggcctcaaagacctatgagacaccaccccccagccctggcctggaccctacattcagcaaccagcctgtacctcccgatgctgtgcgcatggtgggcatccgcaagacagccggagaacatctgggtgtaacgttccgcgtggagggcggcgagctggtgatcgcgcgcattctgcatgggggcatggtggctcaacaaggcctgctgcatgtgggtgacatcatcaaggaggtgaacgggcagccagtgggcagtgacccccgcgcactgcaggagctcctgcgcaatgccagtggcagtgtcatcctcaagatcctgcccagctaccaggagccccatctgccccgccaggtatttgtgaaatgtcactttgactatgacccggcccgagacagcctcatcccctgcaaggaagcaggcctgcgcttcaacgccggggacttgctccagatcgtaaaccaggatgatgccaactggtggcaggcatgccatgtcgaagggggcagtgctgggctcattcccagccagctgctggaggagaagcggaaagcatttgtcaagagggacctggagctgacaccaaactcagggaccctatgcggcagcctttcaggaaagaaaaagaagcgaatgatgtatttgaccaccaagaatgcagagtttgaccgtcatgagctgctcatttatgaggaggtggcccgcatgcccccgttccgccggaaaaccctggtactgattggggctcagggcgtgggacggcgcagcctgaagaacaagctcatcatgtgggatccagatcgctatggcaccacggtgccctacacctcccggcggccgaaagactcagagcgggaaggtcagggttacagctttgtgtcccgtggggagatggaggctgacgtccgtgctgggcgctacctggagcatggcgaatacgagggcaacctgtatggcacacgtattgactccatccggggcgtggtcgctgctgggaaggtgtgcgtgctggatgtcaacccccaggcggtgaaggtgctacgaacggccgagtttgtcccttacgtggtgttcatcgaggccccagacttcgagaccctgcgggccatgaacagggctgcgctggagagtggaatatccaccaagcagctcacggaggcggacctgagacggacagtggaggagagcagccgcatccagcggggctacgggcactactttgacctctgcctggtcaatagcaacctggagaggaccttccgcgagctccagacagccatggagaagctacggacagagccccagtgggtgcctgtcagctgggtgtactgagcctgttcacctggtctttggctcactctgtgttgaaacccagaacctgaatccatccccctcctgacctgtgaccccctgccacaatccttagcccccatatctggctgtccttgggtaacagctcccagcaggccctaagtctggcttcagcacagaggcgtgcactgccagggaggtgggcattcatggggtaccttgtgcccaggtgctgcccactcctgatgcccattggtcaccagatatctctgagggccaagctatgcccaggaatgtgtcagagtcacctccataatggtcagtacagagaagagaaaagctgctttgggaccacatggtcagtaggcacactgccccctgccacccctccccagtcaccagttctcctctggactggccacacccaccccattcctggactcctcccacctctcacccctgtgtcggaggaacaggccttgggctgtttccgtgtgaccaggggaatgtgtggcccgctggcagccaggcaggcccgggtggtggtgccagcctggtgccatcttgaaggctggaggagtcagagtgagagctagtggccacagctgcagagcactgcagctcccagctcctttggaaagggacagggtcgcagggcagatgctgctcggtccttccctcatccacagcttctcactgccgaagtttctccagatttctccaatgtgtcctgacaggtcagccctgctccccacagggccaggctggcaggggccagtgggctcagcccaggtaggggcaggatggagggctgagccctgtgacaacctgctgttaccaactgaagagccccaagctctccatggcccacagcaggcacaggtctgagctctatgtccttgaccttggtccatttggttttctgtctagccaggtccaggtagcccacttgcatcagggctgctgggttggaggggctaaggaggagtgcagaggggaccttgggagcctgggcttgaaggacagttgccctccaggaggttcctcacacacaactccagaggcgccatttacactgtagtctgtacaacctgtggttccacgtgcatgttcggcacctgtctgtgcctctggcaccaggttgtgtgtatgtgtgtgcgtgtgcacgtgcgtgtgtgtgtgtgtgtgtcaggtttaatttggggaggaagcaaagggttttgttttggaggtcactctttggggcccctttctgggggttccccatcagccctcatttcttataataccctgatcccagactccaaagccctggtcctttcctgatgtctcctcccttgtcttattgtccccctaccctaaatgcccccctgccataacttggggagggcagttttgtaaaataggagactccctttaagaaagaatgctgtcctagatgtacttgggcatctcatccttcattattctctgcattccttccggggggagcctgtcctcagaggggacaacctgtgacaccctgagtccaaacccttgtgcctcccagttcttccaagtgtctaactagtcttcgctgcagcgtcagccaaagctggcccctgaaccactgtgtgcccatttcctagggaaggggaaggagaataaacagaatatttattacaaatgttagaatatatttcttatactaggaatctcatttgcatttgcatagactatacacatggggtggaaaggccaggcctgcccccatctcgttggtgtggctctgcgtatactacacactcattctcctgctcctcttttcccttagtcagtgtcctttcatcctgattcagctctgccttgcatcaccctcagcctaagggagtgggaaggaaatggggtgttttcttgctgacctgaggctatagggtcacttgccatttcctaccttctctgggggatttgagggtagaggcaggggaagatctgttgttgcagctgcttctgcccccttgatccaaatgaccatcatctctgatggagatgggttgggtacctggccttcatggcaccttcactgctagggatgctcaaggggcaggcctggggcccttccctcctgtctcttctcggtctttcctctctgagcagcctcctacctcccctgcctgagccctcactccacagccctcccaggtacctagcagaggctgtcagtccttggctcacctggaacagggctggggctgggttggaacaggtgtgtgcccccaccacagctctatgactctgttctccctccctgccattgtggactcttgtatttgagggacctcaagagagtgaggaccctaccatccactgtccatattcagtcccagccccagtgcgcttcctctgttccctccctcagccatccaattcttgagttttctcactgattggttttctttctttttccttggattaaatgtgaaagcaaaggc

SEQ ID NO: 98226 - DNA, 543 bp, Artificial Sequence
  derived and/or modified sequence
aggcgtcccccggcccccgggccagctcctatcccaagacctccgccttcttttcgtcctgacacggcacttaggaccctattcactgggtttaaactccacaggcccctttcacccaggcccgttccctccctgtccacccgcccccgcccctgggccctctttctggggtgctggttgggagaaccaagccccgctgcccattgacactggtccccgcccctgcggtaggggctccaaagtggcttcaggcaccaaggtggtgagctgtgaggggccccggtatctgcgcggcctccccgggggctgtgcgggttgggggtacttagaagcccggcattacggaaggaggacttctggagtcccttctctgaccctgtgagggagagcagcgccagccaggagaaggctccaggagagacgtttcagagcccttgcctccttcaccatgccggttgccgccaccaactctgaaactgccatgcagcaagtcctggacaacttgggatccctccccagtgccacgggggctgcagagctgga

SEQ ID NO: 98227 - DNA, 741 bp, Artificial Sequence
  derived and/or modified sequence
gtcccccggcccccgggccagctcctatcccaagacctccgccttcttttcgtcctgacacggcacttaggaccctattcactgggtttaaactccacaggcccctttcacccaggcccgttccctccctgtccacccgcccccgcccctgggccctctttctggggtgctggttgggagaaccaagccccgctgcccattgacactggtccccgcccctgcggtaggggctccaaagtggcttcaggcaccaaggagagacgtttcagagcccttgcctccttcaccatgccggttgccgccaccaactctgaaactgccatgcagcaagtcctggacaacttgggatccctccccagtgccacgggggctgcagagctggacctgatcttccttcgaggcattatggaaagtcccatagtaagatccctggccaaggcccatgagaggctggaggagacgaagctggaggccgtgagagacaacaacctggagctggtgcaggagatcctgcgggacctggcgcacgtggctgagcagagcagcacagccgccgagctggcccacatcctccaggagccccacttccagtccctcctggagacgcacgactctgtggcctcaaagacctatgagacaccaccccccagccctggcctggaccctacattcagcaaccagcctgtacctcccgatgctgtgcgcatggtgggcatccgcaagacagccggagaacatctg

SEQ ID NO: 98228 - DNA, 588 bp, Artificial Sequence
  derived and/or modified sequence
aggtaggcgtcccccggcccccgggccagctcctatcccaagacctccgccttcttttcgtcctgacacggcacttaggaccctattcactgggtttaaactccacaggcccctttcacccaggcccgttccctccctgtccacccgcccccgcccctgggccctctttctggggtgctggttgggagaaccaagccccgctgcccattgacactggtccccgcccctgcggtaggggctccaaagtggcttcaggcaccaagggaaggaggacttctggagtcccttctctgaccctgtgagggagagcagcgccagccaggagaaggctccaggagagacgtttcagagcccttgcctccttcaccatgccggttgccgccaccaactctgaaactgccatgcagcaagtcctggacaacttgggatccctccccagtgccacgggggctgcagagctggacctgatcttccttcgaggcattatggaaagtcccatagtaagatccctggccaaggcccatgagaggctggaggagacgaagctggaggccgtgagagacaacaacctggagctggtgcaggaga

SEQ ID NO: 98229 - DNA, 584 bp, Artificial Sequence
  derived and/or modified sequence
aaagtggcttcaggcaccaaggtggtgagctgtgaggggccccggtatctgcgcggcctccccgggggctgtgcgggttgggggtacttagaagcccggcattacgagagacgtttcagagcccttgcctccttcaccatgccggttgccgccaccaactctgaaactgccatgcagcaagtcctggacaacttgggatccctccccagtgccacgggggctgcagagctggacctgatcttccttcgaggcattatggaaagtcccatagtaagatccctggccaaggcccatgagaggctggaggagacgaagctggaggccgtgagagacaacaacctggagctggtgcaggagatcctgcgggacctggcgcacgtggctgagcagagcagcacagccgccgagctggcccacatcctccaggagccccacttccagtccctcctggagacgcacgactctgtggcctcaaagacctatgagacaccaccccccagccctggcctggaccctacattcagcaaccagcctgtacctcccgatgctgtgcgcatggtgggcatccgcaagacagccggaga

SEQ ID NO: 98230 - protein, 576 aa, Artificial Sequence
  derived and/or modified sequence
MPVAATNSETAMQQVLDNLGSLPSATGAAELDLIFLRGIMESPIVRSLAKVIMVLWFMQQNVFVPMKYMLKYFGAHERLEETKLEAVRDNNLELVQEILRDLAHVAEQSSTAAELAHILQEPHFQSLLETHDSVASKTYETPPPSPGLDPTFSNQPVPPDAVRMVGIRKTAGEHLGVTFRVEGGELVIARILHGGMVAQQGLLHVGDIIKEVNGQPVGSDPRALQELLRNASGSVILKILPSYQEPHLPRQVFVKCHFDYDPARDSLIPCKEAGLRFNAGDLLQIVNQDDANWWQACHVEGGSAGLIPSQLLEEKRKAFVKRDLELTPNSGTLCGSLSGKKKKRMMYLTTKNAEFDRHELLIYEEVARMPPFRRKTLVLIGAQGVGRRSLKNKLIMWDPDRYGTTVPYTSRRPKDSEREGQGYSFVSRGEMEADVRAGRYLEHGEYEGNLYGTRIDSIRGVVAAGKVCVLDVNPQAVKVLRTAEFVPYVVFIEAPDFETLRAMNRAALESGISTKQLTEADLRRTVEESSRIQRGYGHYFDLCLVNSNLERTFRELQTAMEKLRTEPQWVPVSWVY

SEQ ID NO: 98231 - protein, 31 aa, Artificial Sequence
  derived and/or modified sequence
MPVAATNSETAMQQVLDNLGSLPSATGAAEL

SEQ ID NO: 98232 - DNA, 1731 bp, Artificial Sequence
  derived and/or modified sequence
atgcccgtcgctgcaacaaacagtgagaccgcaatgcagcaagtactagataatctgggttcattaccttcggccaccggggcagctgaactcgacctgattttcttgagagggattatggaaagtcccattgtacgttccctcgccaaagtgatcatggtcctgtggttcatgcagcagaacgtgtttgtgcctatgaagtacatgctaaagtatttcggtgctcatgagcgattggaggagacgaagctggaagctgtgagggacaacaaccttgagctggttcaggagattctgcgagatcttgcccatgtagccgagcagtcatcgaccgctgccgagttagcccatatcttgcaggaaccacacttccagtcacttctggagacacacgactctgtggcgagcaaaacgtacgaaaccccaccccccagtcctggcttagatccaacattcagcaaccagcccgtgccacccgatgcagtacggatggtgggcatccgcaagacagcaggggagcaccttggagtgacatttagagtagaaggaggagaactggttatagcaagaatcttgcatgggggaatggtggcacagcagggcttactccacgtgggagacatcatcaaagaagttaatggacagcccgtgggctctgaccctagagcgttgcaggagctgcttcggaacgcgtcgggatcggtgatcctgaaaattttgcccagctaccaggagcctcacctcccccgccaggttttcgtaaaatgtcatttcgattatgatccagctcgcgatagtctaataccctgcaaggaggctggcctcaggttcaatgcaggcgacctgctacagattgtcaaccaagatgacgctaattggtggcaggcatgtcatgttgaggggggcagcgcagggctcatcccgtctcagttgttagaagagaagaggaaagccttcgtcaagcgtgacctcgaactgacaccaaattcagggacgttgtgtggatctctgtccggtaaaaaaaaaaagcggatgatgtacctcaccaccaaaaacgccgagttcgacagacatgaactgctaatctacgaagaagtggccaggatgccgccttttagacgcaaaacccttgtcttaataggcgcacagggcgtcggacggagaagtttgaaaaacaaactgattatgtgggaccctgacaggtatggtacaacggtgccatacaccagccgaagaccaaaagactccgagagagagggccaagggtacagctttgttagcagaggggagatggaggccgacgttagagcaggtaggtacctggaacatggggagtacgagggcaatttgtatggcactcgcatcgactcaatacgcggcgtggtagccgctggaaaggtgtgtgtgctggatgtgaatccacaagccgtcaaggtccttaggaccgccgaattcgtgccttatgtagtgttcatcgaggcacccgactttgagacgctgcgtgctatgaaccgggctgcactcgaatcaggtatcagcactaaacagcttacagaagcagacttgcgccggactgtagaagagagttcgagaattcagcgtggctacgggcattactttgatctttgtcttgttaactcaaatttagaacgcacctttcgggaactgcagacagcaatggagaaactcagaaccgaaccgcaatgggtccctgtatcatgggtatattag

SEQ ID NO: 98233 - DNA, 1731 bp, Artificial Sequence
  derived and/or modified sequence
atgcctgtggccgccaccaacagcgagacagccatgcagcaggtgctggacaacctgggcagcctgcccagcgccaccggggctgctgagctggacctgatcttcctgcggggcatcatggagagccccatcgtgcgcagcctggccaaggtgatcatggtgctgtggttcatgcagcagaatgtgtttgtgcccatgaagtacatgctgaagtactttggagcccacgagcggctggaggagaccaagctggaggccgtgcgggacaacaacctggagctggtgcaggagatcctgcgggacctggcccacgtggccgagcagagcagcacagctgctgagctggcccacatcctgcaggagccccacttccagagcctgctggagacccatgattctgtggccagcaagacctatgagaccccaccacccagccctggcctggaccccaccttcagcaaccagcctgtgcccccagatgctgtgaggatggtgggcatcaggaagacagctggggagcacctgggcgtgaccttccgggtggagggcggggagctggtgattgcccgcatcctgcatggaggcatggtggcccagcagggcctgctgcacgtgggggacatcatcaaggaggtgaatggccagcctgtgggcagtgacccccgggccctgcaggagctgctgagaaatgccagcggcagcgtcatcctgaagatcctgcccagctaccaggagccccacctgccccggcaggtgtttgtgaagtgccactttgattatgaccctgcccgggacagcctcatcccctgcaaggaggccggcctgcgcttcaatgctggggacctgctgcagatcgtgaaccaggatgatgccaactggtggcaggcctgccacgtggagggcggcagcgctggcctcatccccagccagctgctggaggagaagaggaaggcctttgtgaagagggacctggagctgacccccaacagcggcaccctgtgtggcagcctgagcggcaagaagaagaagaggatgatgtacctgaccaccaagaatgctgagtttgacagacatgagctgctgatctatgaggaggtggccaggatgccacccttccggaggaagaccctggtgctgattggagcccagggcgtgggcagaagaagcctgaagaacaagctgatcatgtgggaccctgacagatatggcaccaccgtgccctacaccagcagaagacccaaggacagcgagcgggagggccagggctacagctttgtgtccagaggagagatggaggctgatgtgcgggccggccgctacctggagcacggggagtatgagggcaacctgtatggcaccagaattgacagcatccggggcgtggtggccgccggcaaggtgtgtgtgctggatgtgaacccccaggccgtgaaggtgctgaggacagctgagtttgtgccctacgtggtgttcatcgaggccccagactttgagaccctgcgggccatgaacagagctgccctggagagcggcatcagcaccaagcagctgacagaggccgacctgcggaggacagtggaggagagcagccgcatccagaggggctacggccactactttgacctgtgcctggtgaacagcaacctggagaggaccttccgggagctgcagacagccatggagaagctgaggacagagccccagtgggtgcctgtgtcctgggtgtactag

SEQ ID NO: 98234 - DNA, 3462 bp, Artificial Sequence
  derived and/or modified sequence
gagcgcccggctgcgctggagccgcccggagctaggggcttcccggggcgcaggagagacgtttcagagcccttgcctccttcaccatgccggttgccgccaccaactctgaaactgccatgcagcaagtcctggacaacttgggatccctccccagtgccacgggggctgcagagctggacctgatcttccttcgaggcattatggaaagtcccatagtaagatccctggccaaggtgataatggtattgtggtttatgcagcagaatgtctttgttcctatgaaatacatgctgaaatactttggggcccatgagaggctggaggagacgaagctggaggccgtgagagacaacaacctggagctggtgcaggagatcctgcgggacctggcgcacgtggctgagcagagcagcacagccgccgagctggcccacatcctccaggagccccacttccagtccctcctggagacgcacgactctgtggcctcaaagacctatgagacaccaccccccagccctggcctggaccctacattcagcaaccagcctgtacctcccgatgctgtgcgcatggtgggcatccgcaagacagccggagaacatctgggtgtaacgttccgcgtggagggcggcgagctggtgatcgcgcgcattctgcatgggggcatggtggctcaacaaggcctgctgcatgtgggtgacatcatcaaggaggtgaacgggcagccagtgggcagtgacccccgcgcactgcaggagctcctgcgcaatgccagtggcagtgtcatcctcaagatcctgcccagctaccaggagccccatctgccccgccaggtatttgtgaaatgtcactttgactatgacccggcccgagacagcctcatcccctgcaaggaagcaggcctgcgcttcaacgccggggacttgctccagatcgtaaaccaggatgatgccaactggtggcaggcatgccatgtcgaagggggcagtgctgggctcattcccagccagctgctggaggagaagcggaaagcatttgtcaagagggacctggagctgacaccaaactcagggaccctatgcggcagcctttcaggaaagaaaaagaagcgaatgatgtatttgaccaccaagaatgcagagtttgaccgtcatgagctgctcatttatgaggaggtggcccgcatgcccccgttccgccggaaaaccctggtactgattggggctcagggcgtgggacggcgcagcctgaagaacaagctcatcatgtgggatccagatcgctatggcaccacggtgccctacacctcccggcggccgaaagactcagagcgggaaggtcagggttacagctttgtgtcccgtggggagatggaggctgacgtccgtgctgggcgctacctggagcatggcgaatacgagggcaacctgtatggcacacgtattgactccatccggggcgtggtcgctgctgggaaggtgtgcgtgctggatgtcaacccccaggcggtgaaggtgctacgaacggccgagtttgtcccttacgtggtgttcatcgaggccccagacttcgagaccctgcgggccatgaacagggctgcgctggagagtggaatatccaccaagcagctcacggaggcggacctgagacggacagtggaggagagcagccgcatccagcggggctacgggcactactttgacctctgcctggtcaatagcaacctggagaggaccttccgcgagctccagacagccatggagaagctacggacagagccccagtgggtgcctgtcagctgggtgtactgagcctgttcacctggtctttggctcactctgtgttgaaacccagaacctgaatccatccccctcctgacctgtgaccccctgccacaatccttagcccccatatctggctgtccttgggtaacagctcccagcaggccctaagtctggcttcagcacagaggcgtgcactgccagggaggtgggcattcatggggtaccttgtgcccaggtgctgcccactcctgatgcccattggtcaccagatatctctgagggccaagctatgcccaggaatgtgtcagagtcacctccataatggtcagtacagagaagagaaaagctgctttgggaccacatggtcagtaggcacactgccccctgccacccctccccagtcaccagttctcctctggactggccacacccaccccattcctggactcctcccacctctcacccctgtgtcggaggaacaggccttgggctgtttccgtgtgaccaggggaatgtgtggcccgctggcagccaggcaggcccgggtggtggtgccagcctggtgccatcttgaaggctggaggagtcagagtgagagctagtggccacagctgcagagcactgcagctcccagctcctttggaaagggacagggtcgcagggcagatgctgctcggtccttccctcatccacagcttctcactgccgaagtttctccagatttctccaatgtgtcctgacaggtcagccctgctccccacagggccaggctggcaggggccagtgggctcagcccaggtaggggcaggatggagggctgagccctgtgacaacctgctgttaccaactgaagagccccaagctctccatggcccacagcaggcacaggtctgagctctatgtccttgaccttggtccatttggttttctgtctagccaggtccaggtagcccacttgcatcagggctgctgggttggaggggctaaggaggagtgcagaggggaccttgggagcctgggcttgaaggacagttgccctccaggaggttcctcacacacaactccagaggcgccatttacactgtagtctgtacaacctgtggttccacgtgcatgttcggcacctgtctgtgcctctggcaccaggttgtgtgtatgtgtgtgcgtgtgcacgtgcgtgtgtgtgtgtgtgtgtcaggtttaatttggggaggaagcaaagggttttgttttggaggtcactctttggggcccctttctgggggttccccatcagccctcatttcttataataccctgatcccagactccaaagccctggtcctttcctgatgtctcctcccttgtcttattgtccccctaccctaaatgcccccctgccataacttggggagggcagttttgtaaaataggagactccctttaagaaagaatgctgtcctagatgtacttgggcatctcatccttcattattctctgcattccttccggggggagcctgtcctcagaggggacaacctgtgacaccctgagtccaaacccttgtgcctcccagttcttccaagtgtctaactagtcttcgctgcagcgtcagccaaagctggcccctgaaccactgtgtgcccatttcctagggaaggggaaggagaataaacagaatatttattacaaa

SEQ ID NO: 98235 - DNA, 1731 bp, Artificial Sequence
  derived and/or modified sequence
atgcccgtggccgccaccaacagcgagaccgccatgcagcaggtgctcgacaaccttgggtctctgccctccgctactggtgccgcagagctggacctgattttcctccgtggaataatggagagcccaattgtgagaagcctagccaaagttatcatggtgctgtggtttatgcagcagaacgtgttcgttcctatgaagtacatgctcaagtacttcggcgcccatgaaagacttgaggagaccaaactggaggctgtccgagacaataacctggaattggtccaagaaatactgagagacctggcccacgttgcagaacagtcctctaccgccgcggaactggctcatattttacaggaaccacattttcagtccctgctagagacccatgacagcgtagcttcaaaaacctacgaaaccccacccccaagcccaggactggatcctactttttcaaatcagcccgttccccccgacgccgttaggatggtgggcatccgaaagacagcaggagagcaccttggggtgacatttagagtggagggcggggagctagtgatcgcccgcatacttcatggcggtatggtagcccaacaggggttacttcatgtgggggacatcattaaggaagtgaacggccagcccgtgggatctgacccccgggccttacaagaacttctgagaaatgcttccgggagcgttattctgaagattttgccatcttaccaggaaccacacttgcctcgtcaggtatttgtgaaatgtcactttgattatgatccagctcgggacagcctgataccgtgtaaggaggccgggcttagattcaatgccggcgatcttctccagattgtgaaccaggacgatgcaaattggtggcaggcctgccacgtcgagggaggttccgctggcctgattccttcacaacttctggaggagaagcggaaagccttcgtaaaacgggatctcgaactgactccaaattcagggacattatgtggatctctgtcaggaaagaagaagaagcgtatgatgtatctcactacaaaaaatgccgagttcgaccgccacgagctgttaatctacgaggaagtcgccaggatgcctccattccgccgaaagactctggtgcttatcggcgcccaaggtgtgggacggcgttctcttaagaataaattaatcatgtgggatcctgatcgctatggaacaactgttccttacaccagtcgtaggcccaaggactcggaacgtgagggacaaggctattcgttcgtcagcaggggggagatggaggcagatgtccgcgcgggacgatacctggaacatggagaatacgaaggtaacttgtacggtacacggatcgactctattcgcggtgtggtggccgcagggaaggtctgtgtgctggacgtcaacccgcaggctgtcaaagtgctgaggaccgcagaatttgttccatatgtggtgtttattgaggcacctgacttcgagactcttagagccatgaaccgagccgccctggagtcaggaatttctactaaacagctgacagaggcggacttgcgccgtacagtcgaagaaagtagtaggatccagcggggatacggacattattttgacctgtgcctggtcaactccaaccttgagaggacattccgcgaactgcaaaccgcgatggagaagctgaggaccgaacctcagtgggtgccagtgagctgggtctattag

SEQ ID NO: 98236 - DNA, 1731 bp, Artificial Sequence
  derived and/or modified sequence
atgcccgtggctgccacaaactctgagacggcaatgcagcaggtgttggataatcttgggagcctgccgtctgcaactggcgcagcagagctggatttgatttttctgcggggaattatggaatcgcccatcgtaaggtcccttgctaaagtgatcatggtgttgtggttcatgcagcagaatgttttcgttccaatgaaatacatgctcaagtatttcggtgcacacgagcggctggaggaaacgaaactcgaggccgtgcgcgacaacaacctggagctggtgcaggagatcttgagggatctcgctcacgttgctgagcagtcatccacggccgcagaattggcgcatatcctgcaagagccacactttcagagtctgctcgagacacacgactccgtggcaagtaagacttacgagactccgccaccatctcccggactagacccaacttttagtaatcagccggtgccacccgatgccgtgcgaatggttggcattcgtaagactgctggtgaacatctcggagtgactttcagggtcgagggcggtgagctggtgatagccaggatcctgcacggaggtatggtggcccagcagggactgctgcatgtaggcgacatcattaaggaggtgaatggtcagcctgtcggaagtgaccctcgagccttgcaggagcttcttagaaatgcatccgggagtgttattctgaaaatcctgcctagctatcaggaacctcacttaccacgacaggtgttcgtcaaatgtcattttgattatgaccctgcaagagattccctgattccgtgtaaggaggctggcctgcgcttcaacgcgggtgatctgctgcagatagtgaaccaggatgacgccaactggtggcaggcctgtcacgtagagggaggcagcgcgggactgatcccgtcccagctgttagaagagaagagaaaagcctttgtcaagagggatctggaactgaccccgaatagcgggacgctctgtggatccctgtcggggaagaagaaaaaacggatgatgtatttgaccacaaagaatgcggagttcgaccggcatgaactccttatatacgaagaggtcgctcgaatgccaccatttagaagaaaaaccttggtcttgatcggtgcccagggcgtcggtaggaggagcttaaagaataagctcattatgtgggaccccgaccggtacggtaccactgttccatatacaagtaggagaccaaaggactccgagagagaaggccagggttacagttttgtctccagaggagagatggaggctgacgtgagagccggacggtacctggaacacggcgagtacgaaggaaatctttatggcaccagaattgatagcataaggggggtcgtagctgcaggaaaggtgtgcgtgctggacgtgaatccccaggcagtgaaagtgttaaggaccgcggaattcgtcccatacgtggtattcatcgaagcgcctgattttgagacactaagagccatgaatcgggcagccctggaatccggcatcagtaccaagcagctcacagaagctgacctgcgcagaacggtggaggaatctagtcgcatccagagaggctacgggcattatttcgatctgtgccttgtgaacagcaatctggagaggacctttagggaattacaaacagcgatggaaaaattgcggacggagccacagtgggtgcctgtgtcatgggtgtattag

SEQ ID NO: 98237 - DNA, 1731 bp, Artificial Sequence
  derived and/or modified sequence
atgcccgtggccgccaccaacagcgagaccgccatgcagcaggtgctggacaacctgggcagcctgcccagcgccaccggcgccgccgagctggacctgatcttcctgagaggcatcatggagagccccatcgtgagaagcctggccaaggtgatcatggtgctgtggttcatgcagcagaacgtgttcgtgcccatgaagtacatgctgaagtacttcggcgcccacgagagactggaggagaccaagctggaggccgtgagagacaacaacctggagctggtgcaggagatcctgagagacctggcccacgtggccgagcagagcagcaccgccgccgagctggcccacatcctgcaggagccccacttccagagcctgctggagacccacgacagcgtggccagcaagacctacgagacccccccccccagccccggcctggaccccaccttcagcaaccagcccgtgccccccgacgccgtgagaatggtgggcatcagaaagaccgccggcgagcacctgggcgtgaccttcagagtggagggcggcgagctggtgatcgccagaatcctgcacggcggcatggtggcccagcagggcctgctgcacgtgggcgacatcatcaaggaggtgaacggccagcccgtgggcagcgaccccagagccctgcaggagctgctgagaaacgccagcggcagcgtgatcctgaagatcctgcccagctaccaggagccccacctgcccagacaggtgttcgtgaagtgccacttcgactacgaccccgccagagacagcctgatcccctgcaaggaggccggcctgagattcaacgccggcgacctgctgcagatcgtgaaccaggacgacgccaactggtggcaggcctgccacgtggagggcggcagcgccggcctgatccccagccagctgctggaggagaagagaaaggccttcgtgaagagagacctggagctgacccccaacagcggcaccctgtgcggcagcctgagcggcaagaagaagaagagaatgatgtacctgaccaccaagaacgccgagttcgacagacacgagctgctgatctacgaggaggtggccagaatgccccccttcagaagaaagaccctggtgctgatcggcgcccagggcgtgggcagaagaagcctgaagaacaagctgatcatgtgggaccccgacagatacggcaccaccgtgccctacaccagcagaagacccaaggacagcgagagagagggccagggctacagcttcgtgagcagaggcgagatggaggccgacgtgagagccggcagatacctggagcacggcgagtacgagggcaacctgtacggcaccagaatcgacagcatcagaggcgtggtggccgccggcaaggtgtgcgtgctggacgtgaacccccaggccgtgaaggtgctgagaaccgccgagttcgtgccctacgtggtgttcatcgaggcccccgacttcgagaccctgagagccatgaacagagccgccctggagagcggcatcagcaccaagcagctgaccgaggccgacctgagaagaaccgtggaggagagcagcagaatccagagaggctacggccactacttcgacctgtgcctggtgaacagcaacctggagagaaccttcagagagctgcagaccgccatggagaagctgagaaccgagccccagtgggtgcccgtgagctgggtgtactag

SEQ ID NO: 98238 - protein, 541 aa, Artificial Sequence
  derived and/or modified sequence
MQQVLDNLGSLPSATGAAELDLIFLRGIMESPIVRSLAKAHERLEETKLEAVRDNNLELVQEILRDLAHVAEQSSTAAELAHILQEPHFQSLLETHDSVASKTYETPPPSPGLDPTFSNQPVPPDAVRMVGIRKTAGEHLGVTFRVEGGELVIARILHGGMVAQQGLLHVGDIIKEVNGQPVGSDPRALQELLRNASGSVILKILPSYQEPHLPRQVFVKCHFDYDPARDSLIPCKEAGLRFNAGDLLQIVNQDDANWWQACHVEGGSAGLIPSQLLEEKRKAFVKRDLELTPNSGTLCGSLSGKKKKRMMYLTTKNAEFDRHELLIYEEVARMPPFRRKTLVLIGAQGVGRRSLKNKLIMWDPDRYGTTVPYTSRRPKDSEREGQGYSFVSRGEMEADVRAGRYLEHGEYEGNLYGTRIDSIRGVVAAGKVCVLDVNPQAVKVLRTAEFVPYVVFIEAPDFETLRAMNRAALESGISTKQLTEADLRRTVEESSRIQRGYGHYFDLCLVNSNLERTFRELQTAMEKLRTEPQWVPVSWVY

SEQ ID NO: 98239 - DNA, 2275 bp, Artificial Sequence
  derived and/or modified sequence
gacctggtgccactcctcagggaatgtctgagtggaggctgcagtaccctgatggtggcctcttgggcacaagatctcagaggaatggggtcaccggagcggagctgagtccttcccttctgcccacacttttccctgtgtgcaaatgtgccctcatttttcctttctggggaactgagttccaagatgcctgacttgcttcctgggcatcatccccttcattaagaggaagaactcatgggagatgggggaggggaagaagctgctgtgaggcgagggccatgcagcaagtcctggacaacttgggatccctccccagtgccacgggggctgcagagctggacctgatcttccttcgaggcattatggaaagtcccatagtaagatccctggccaaggcccatgagaggctggaggagacgaagctggaggccgtgagagacaacaacctggagctggtgcaggagatcctgcgggacctggcgcacgtggctgagcagagcagcacagccgccgagctggcccacatcctccaggagccccacttccagtccctcctggagacgcacgactctgtggcctcaaagacctatgagacaccaccccccagccctggcctggaccctacattcagcaaccagcctgtacctcccgatgctgtgcgcatggtgggcatccgcaagacagccggagaacatctgggtgtaacgttccgcgtggagggcggcgagctggtgatcgcgcgcattctgcatgggggcatggtggctcaacaaggcctgctgcatgtgggtgacatcatcaaggaggtgaacgggcagccagtgggcagtgacccccgcgcactgcaggagctcctgcgcaatgccagtggcagtgtcatcctcaagatcctgcccagctaccaggagccccatctgccccgccaggtatttgtgaaatgtcactttgactatgacccggcccgagacagcctcatcccctgcaaggaagcaggcctgcgcttcaacgccggggacttgctccagatcgtaaaccaggatgatgccaactggtggcaggcatgccatgtcgaagggggcagtgctgggctcattcccagccagctgctggaggagaagcggaaagcatttgtcaagagggacctggagctgacaccaaactcagggaccctatgcggcagcctttcaggaaagaaaaagaagcgaatgatgtatttgaccaccaagaatgcagagtttgaccgtcatgagctgctcatttatgaggaggtggcccgcatgcccccgttccgccggaaaaccctggtactgattggggctcagggcgtgggacggcgcagcctgaagaacaagctcatcatgtgggatccagatcgctatggcaccacggtgccctacacctcccggcggccgaaagactcagagcgggaaggtcagggttacagctttgtgtcccgtggggagatggaggctgacgtccgtgctgggcgctacctggagcatggcgaatacgagggcaacctgtatggcacacgtattgactccatccggggcgtggtcgctgctgggaaggtgtgcgtgctggatgtcaacccccaggcggtgaaggtgctacgaacggccgagtttgtcccttacgtggtgttcatcgaggccccagacttcgagaccctgcgggccatgaacagggctgcgctggagagtggaatatccaccaagcagctcacggaggcggacctgagacggacagtggaggagagcagccgcatccagcggggctacgggcactactttgacctctgcctggtcaatagcaacctggagaggaccttccgcgagctccagacagccatggagaagctacggacagagccccagtgggtgcctgtcagctgggtgtactgagcctgttcacctggtctttggctcactctgtgttgaaacccagaacctgaatccatccccctcctgacctgtgaccccctgccacaatccttagcccccatatctggctgtccttgggtaacagctcccagcaggccctaagtctggcttcagcacagaggcgtgcactgccagggaggtgggcattcatggggtaccttgtgcccaggtgctgcccactcctgatgcccattggtcaccagatatctctgagggccaagctatgcccaggaatgtgtcagagtcacctccataatggtcagtacagagaagagaaaagctgctttgggaccacatggtcagtaggcacactgccccctgccacccct

SEQ ID NO: 98240 - protein, 487 aa, Artificial Sequence
  derived and/or modified sequence
MMHFKSGLELTELQNMTVPEDDNISNDSNDFTEVENGQINSKFISDRESRRSLTNSHLEKKKCDEYIPGTTSLGMSVFNLSNAIMGSGILGLAFALANTGILLFLVLLTSVTLLSIYSINLLLICSKETGCMVYEKLGEQVFGTTGKFVIFGATSLQNTGAMLSYLFIVKNELPSAIKFLMGKEETFSAWYVDGRVLVVIVTFGIILPLCLLKNLGYLGYTSGFSLSCMVFFLIVVIYKKFQIPCIVPELNSTISANSTNADTCTPKYVTFNSKTVYALPTIAFAFVCHPSVLPIYSELKDRSQKKMQMVSNISFFAMFVMYFLTAIFGYLTFYDNVQSDLLHKYQSKDDILILTVRLAVIVAVILTVPVLFFTVRSSLFELAKKTKFNLCRHTVVTCILLVVINLLVIFIPSMKDIFGVVGVTSANMLIFILPSSLYLKITDQDGDKGTQRIWAALFLGLGVLFSLVSIPLVIYDWACSSSSDEGH

SEQ ID NO: 98241 - DNA, 1464 bp, Artificial Sequence
  derived and/or modified sequence
atgatgcactttaaaagcggtttagagctgaccgagctccagaacatgacggtgcccgaggacgacaacattagcaatgactctaacgacttcactgaggtagagaatggccagatcaacagcaagtttattagcgatagggaatcacggcggtccctcactaatagccacctggagaagaagaagtgcgacgaatacatccccgggaccacttcgctcggaatgtccgtcttcaacttgtccaacgccatcatgggctctgggatcctcgggctggcatttgcgctggccaacaccggcattctactgtttttggtgcttttgactagcgtgacattgctgagtatatattctattaacctgctcctgatttgctctaaagaaactgggtgtatggtctatgagaagctcggggagcaggtcttcggtacgaccggtaagtttgtgatctttggagctacctcactgcagaataccggcgccatgctgagttacctgtttatcgtgaagaacgagttaccaagtgccattaagtttttgatgggtaaagaagagaccttttcagcttggtacgtggatggaagggtgctggttgtcattgtgacattcggcatcattctgccattgtgcctactcaagaacctgggttatctggggtatacgagcgggttctcattgagctgcatggtgttttttctgatcgttgtgatttataagaagtttcagatcccctgcatcgtgcccgagttaaactccaccatttccgctaattccacgaatgccgacacttgtactcctaaatacgtgacatttaactccaagacagtatatgctcttccaacaatcgcctttgcatttgtgtgtcacccgtcagtgctgcccatttatagtgagctaaaagataggagtcagaagaaaatgcaaatggtgtcaaatattagcttttttgctatgttcgtgatgtatttcctgacggcaatttttgggtacttgaccttttatgacaacgttcagtccgatcttctccacaagtaccagtctaaggatgatattctgatcttgactgtcagattggccgtgattgtggccgtaattctcactgttcccgtgctattttttaccgtgcgctcgtcacttttcgagctggcgaaaaagactaagttcaatctttgtcggcatactgtcgttacatgcattctgctagtagtgattaacctgctggtcattttcattcccagcatgaaggacattttcggcgtcgtcggggtcacaagtgctaatatgctgatctttattctgccaagctccttatacttgaaaatcaccgaccaggacggggataagggcacacagcggatctgggctgcccttttcctaggcctcggcgtactgttttccctagtgtcaatcccacttgtgatctatgattgggcatgctcatctagctccgatgagggacattag

SEQ ID NO: 98242 - DNA, 1464 bp, Artificial Sequence
  derived and/or modified sequence
atgatgcattttaagagcggcttagagttgacagagctgcaaaacatgactgtgcctgaagacgataatatcagcaatgacagcaacgatttcacagaagtcgagaatggccaaatcaattctaaatttatcagtgacagagagagtcgacgttccctgacaaactctcacctggagaaaaagaagtgcgatgagtacattccagggacaacttccttgggaatgtcagtctttaacctcagcaacgccattatgggttcagggattctgggcctggcttttgccctggccaataccggcatcctgctattcctagtcctcttgaccagcgtaaccttgctcagtatctactcaattaacctccttcttatatgctctaaagaaacaggttgcatggtctatgagaagctcggggagcaggtgttcggcacaactgggaagttcgttatttttggggcgacatccctccaaaacacaggcgcaatgttatcttacctgttcatcgtgaaaaacgagctgcctagtgccattaaatttctgatggggaaggaggagaccttctcagcctggtacgtcgatggaagggtgctggttgtgatagtcactttcggcatcatccttcccctgtgcctattgaaaaacctcggatacctcggatacacctctggcttcagcttgtcctgcatggtgttctttctcatcgtggtaatttacaagaagtttcagataccttgcattgtccctgaactcaacagcaccatttctgcaaactctacaaatgctgacacctgtacccccaagtatgtgacattcaatagcaaaacggtttacgccctgcccacaatcgcgtttgctttcgtctgtcatccgtctgttttgccaatctactcagagcttaaggataggtctcagaagaaaatgcagatggtctccaatattagctttttcgccatgtttgtgatgtattttctcactgctatctttggctacctgactttctatgacaatgttcagtctgacctcctgcataagtaccagagcaaagacgacatcttgatcctgactgtcagactcgctgttattgtggctgtcattttaacggtccctgtgctgttcttcacagtgcgctcctcactgttcgagttagctaagaagactaaattcaatctgtgtaggcacacagtggtgacttgcatcctgctcgtagtgatcaatctacttgtcatctttatcccgtccatgaaagacatttttggggtcgttggggtaacaagcgcgaatatgttgattttcatattaccttcatctttgtacctgaagatcacggatcaggacggcgataagggtacacagcggatctgggctgctctgttcttgggtttgggagtgctcttttcccttgtgagtatcccactggtgatatacgactgggcttgtagctcttcatcagatgaaggacactag

SEQ ID NO: 98243 - DNA, 1464 bp, Artificial Sequence
  derived and/or modified sequence
atgatgcatttcaagagtgggcttgaacttactgagctccagaacatgactgttcctgaagacgataatatcagtaacgattctaacgattttaccgaagtggagaatggccagatcaacagcaagtttatctccgatcgagagtcccgcaggtcactgacgaactcacatttagagaaaaagaaatgcgatgagtatattccgggaacaacatctttggggatgtctgttttcaacctgagcaacgcaataatggggagcggaatcctcggcttggcctttgctctggccaacacaggtattttgctgttcctggtgttactgacctcggtgaccctcctgtccatctattctataaatctccttctcatctgctccaaagagaccggctgtatggtctacgaaaaactgggcgaacaggtgttcggtactaccggaaaatttgtgatctttggtgctacatccctccaaaacaccggggctatgctttcataccttttcatcgtgaaaaatgaactacccagtgcaatcaagtttctgatggggaaagaggaaacgttttccgcctggtatgtggacgggagagtactggtggttatcgtaacatttggtataatccttccgctttgtctactcaagaacctgggttacttggggtatacatccggatttagtctttcgtgcatggtgtttttcctgatcgtcgtgatctacaagaaatttcagatcccttgtatcgtacctgagctcaacagcactatctccgccaatagcactaacgctgatacttgcacacctaagtatgtaacgttcaatagtaaaacggtttatgccttgccaaccatcgctttcgcctttgtatgtcaccccagtgtgctgccgatctattctgaactgaaagataggagccagaagaagatgcaaatggtgtccaatatatcctttttcgctatgtttgtgatgtacttcttgacagccattttcggctacctgacattctatgacaacgtccaaagcgatctgcttcacaaatatcagtctaaggacgacatcctaatattaacggtgcgcttagcggttatcgtcgccgtcattctgaccgtgccagtacttttcttcaccgttaggtcatcgttgtttgaactcgctaagaagaccaagtttaatctctgcaggcatacggtggtcacttgtatcctcctagtggttattaatctgctggtcatttttatcccctcaatgaaagacatcttcggtgtcgtgggcgttactagcgccaatatgctgatcttcatacttccgtctagcctgtacctcaagattactgatcaggatggtgacaaaggcacccagcgcatctgggcagcattgtttctcggccttggcgtgctttttagtcttgtgtctattccactggtaatttacgactgggcatgttcttcctcctccgatgaagggcactag

SEQ ID NO: 98244 - DNA, 1464 bp, Artificial Sequence
  derived and/or modified sequence
atgatgcatttcaagagtggcttggaactaaccgaattacagaacatgaccgttcctgaagatgacaatatatctaacgatagcaatgacttcacggaggtcgagaatggccaaattaactccaagtttattagcgaccgcgaaagtagaagaagtctgacaaacagtcacctcgagaaaaagaagtgcgacgaatacatccccggtaccacttccttgggaatgagcgttttcaatctgagtaacgcaatcatgggttccggtattctcggacttgcatttgccctagctaatacagggatcctgctgtttttggtattgctgacctctgtgacgctgctgtcaatttattctatcaacttactcctaatctgcagcaaagaaacaggatgcatggtgtatgagaagcttggtgagcaggtctttggaacgacaggcaaattcgtgattttcggagccacatctctccagaacaccggggcaatgctcagctatcttttcatcgtgaagaatgaacttccaagcgcgatcaaattcctgatggggaaggaggaaactttctccgcatggtacgttgatggtcgcgtgttagtggttatcgtcacgtttggtatcattctgcctttatgcttactgaagaatctcggatatctgggttatacaagcggattctcccttagctgcatggttttcttcctaatcgtggtgatctacaaaaaatttcagataccctgtattgttccagagttgaattcaacaataagtgccaatagtacaaacgctgatacgtgtacccctaagtatgtgaccttcaacagtaaaaccgtatacgccctaccaacaattgcttttgccttcgtttgccatcccagcgtccttcctatttactcggagttgaaggaccggtctcagaagaagatgcaaatggtaagcaacatctcttttttcgccatgttcgtgatgtattttcttaccgccatcttcggatatctgacgttttacgataacgtacaatcagatctgctgcacaaatatcagtccaaggatgatatcctgatcttgacagtcaggcttgctgtcatagtcgccgtcatcctcaccgtccccgtgctcttcttcactgtgcggagcagcttgttcgaactagcaaaaaaaaccaagttcaatctgtgccggcacacagtggtgacttgtatacttttagtggttatcaatctgttagtcatcttcataccgtctatgaaagacatctttggcgtagttggcgtaacctctgctaacatgctgattttcattctgccgtcttctctatatctgaaaattaccgatcaggacggagacaagggcacacaacggatatgggcagccctatttctaggcctgggagtgctattctcccttgtcagtattccgctagtcatatacgattgggcctgttcatcatcatcagacgaggggcattag

SEQ ID NO: 98245 - DNA, 1464 bp, Artificial Sequence
  derived and/or modified sequence
atgatgcacttcaagagcggcctggagctgacagagctgcagaacatgacagtgcctgaagatgacaacatcagcaatgacagcaatgacttcacagaggtggagaatggccagatcaacagcaagttcatcagtgaccgggagagccgccgcagcctgaccaacagccacctggagaagaagaagtgtgatgagtacatccctggcaccaccagcctgggcatgtctgtgttcaacctgagcaatgccatcatgggcagcggcatcctgggcctggcctttgccctggccaacacaggcatcctgctcttcctggtgctgctgacctctgtgaccctgctgagcatctacagcatcaacctgctgctgatctgcagcaaggagaccggctgcatggtgtatgagaagctgggggagcaggtgtttggcaccaccgggaagtttgtgatctttggagccaccagcctgcagaacacaggagccatgctgagctacctgttcatcgtgaagaatgagctgcccagcgccatcaagttcctgatgggcaaggaggagaccttcagcgcctggtacgtggatggccgggtgctggtggtgattgtgaccttcggcatcatcctgcccctgtgcctgctgaagaacctgggctacctgggctacaccagcggcttcagcctgagctgcatggtgttcttcctgattgtggtgatctacaagaagttccagatcccctgcatcgtgcctgagctgaacagcaccatcagcgccaacagcaccaatgctgacacctgcacccccaagtatgtgaccttcaacagcaagacagtgtatgccctgcccaccatcgcctttgcctttgtgtgccaccccagcgtgctgcccatctacagcgagctgaaggacaggagccagaagaagatgcagatggtgagcaacatctccttctttgccatgtttgtgatgtacttcctgacagccatcttcggctacctgaccttctatgacaacgtgcagagcgacctgctgcacaagtaccagagcaaggatgacatcctgatcctgactgtgcggctggccgtgattgtggccgtcatcctgactgtgcctgtgctcttcttcaccgtgcgcagcagcctgtttgagctggccaagaagaccaagttcaacctgtgccgccacacagtggtgacctgcatcctgctggtggtgatcaacctgctggtgatcttcatccccagcatgaaggacatcttcggcgtggtgggcgtgaccagcgccaacatgctgatcttcatcctgcccagcagcctgtacctgaagatcacagaccaggatggagacaagggcacccagaggatctgggccgccctcttcctgggcctgggcgtgctcttcagcctggtgtccatccccctggtgatctatgactgggcctgcagcagcagcagtgatgagggccactag

SEQ ID NO: 98246 - DNA, 1464 bp, Artificial Sequence
  derived and/or modified sequence
atgatgcacttcaagagcggcctggagctgaccgagctgcagaacatgaccgtgccggaggatgataatatctcgaatgatagcaacgacttcaccgaagtagagaatggccaaattaacagtaaatttatttctgatagagaatcccggcgttccctgaccaactctcacctggaaaaaaagaaatgtgacgagtatatccctggtaccacgagcttaggaatgtcagtgttcaacctttccaacgcaattatggggtccgggatactgggtctggccttcgccctggctaacaccggaatcttgctgttcctcgtcctgctgacctcagtcacattacttagcatttattcaatcaacttattactgatttgctccaaagaaaccgggtgtatggtgtacgaaaagttgggggaacaggtttttgggacaacgggtaaattcgtgatatttggcgccaccagtctgcaaaacaccggggcgatgctgagctacctgtttatcgtgaaaaacgagctgccctccgcaatcaagttcctgatgggcaaggaggagacctttagcgcatggtacgtggatggacgagtgctcgtcgtgatcgtaacattcggcatcatcctgcccttgtgtctgctaaaaaatctcggctatttgggatatacctccggattctctctgagctgcatggtatttttcctgatagtcgtgatctacaagaagtttcagatcccatgtatagtaccagagctaaatagtacaatctctgccaattctacaaatgctgatacttgcacgcctaagtacgtgactttcaacagtaagacagtgtacgcactgccgacaattgcattcgccttcgtatgtcacccctcggtacttccaatttactcagaactgaaggaccggagtcagaagaagatgcagatggtgtcgaacatctcattttttgccatgttcgtgatgtattttctgacagcaatattcggatatcttaccttttatgataacgtacagtcagatctcttgcataaatatcagtcaaaggatgatattctgattcttactgtgcgcctggccgtaatcgtcgccgtaatcttaacagtgcccgttctgttctttactgtcaggtccagtctgtttgagctagccaaaaagaccaaatttaatctgtgcaggcataccgtggtgacgtgcattctcttggtggtgatcaatcttctggtaatcttcataccttctatgaaagacatcttcggagttgtgggggtgacgtccgcgaacatgctgatcttcatcttaccttcctcattatacttaaaaataacggaccaggacggagacaaaggcacacagcgaatctgggcagccctatttttggggctaggcgttctgttcagcctggtgtcaattccactggtgatatacgactgggcctgcagctcaagttctgacgaaggacactag

SEQ ID NO: 98247 - DNA, 1464 bp, Artificial Sequence
  derived and/or modified sequence
atgatgcacttcaagagcggcctggagctgaccgagctgcagaacatgactgtgcccgaggacgataatatatctaacgacagcaacgattttacagaagttgaaaatggacagataaacagtaaattcatctcggaccgggaatccaggcggtccctgactaatagccatcttgaaaaaaagaagtgcgacgagtatatccctggaactacctctctaggaatgagtgtgttcaatctatcgaacgcaattatgggcagtgggatccttggactggcctttgccctggctaacactggaattctcctctttttggtgctgctgactagcgtcaccttgctgtccatatactcaatcaatttacttctcatttgcagcaaagagaccggctgtatggtgtacgagaagttaggcgagcaggtctttgggaccacaggcaaattcgtgatatttggcgctaccagcttgcagaacaccggcgctatgctcagttacttattcatcgttaagaacgagctcccctctgccattaaatttttaatgggtaaggaggagacttttagtgcttggtacgtcgatggcagagtgctcgtcgttattgttacattcggcataatcctgccgctttgtctgctgaaaaacctcggctatctcggctacacctccggttttagcttgtcctgtatggtgtttttcctgatcgtggtaatatacaaaaaattccagatcccttgcattgtgcccgagctgaactcaactatcagcgctaattccacaaacgccgatacttgcacgcccaaatatgtaacgttcaattccaaaactgtttacgcgttgcctaccatcgcttttgctttcgtttgccatccgtctgtgttgccaatatatagcgagctgaaggaccgttcccaaaagaaaatgcagatggtgtctaatatttcattttttgctatgttcgtaatgtacttcttaaccgccatcttcggatatctaactttctatgacaacgtgcaaagtgacctgctgcataagtatcagtctaaagacgatatcctgattctgaccgtaagactggctgtgatagtggccgtcatactgacagtccctgtactattttttactgtgcgcagctccttatttgagctggcaaagaaaacaaagtttaatttgtgtcgtcacacagtggtgacatgcatcctcctggtcgtaataaatctgctcgtgatcttcattccctctatgaaggacattttcggggtcgtgggagttacgtccgctaatatgttgatcttcatcctccccagtagcttatacctcaaaataaccgaccaagacggggataagggcacacagcgcatatgggccgcgctgttcctggggctcggggtcctctttagccttgtgagcataccattagtgatctacgactgggcttgtagttcatctagcgatgaaggtcattag

SEQ ID NO: 98248 - DNA, 1464 bp, Artificial Sequence
  derived and/or modified sequence
atgatgcacttcaagagcggcctggagctgaccgagctgcagaacatgactgtgcctgaggacgataatatctccaacgattcgaacgactttactgaagtggagaatgggcaaattaattcaaaatttatctccgacagagagtccagaaggtctctcacaaactcacacttagaaaaaaaaaagtgcgatgaatacattcccgggacgacatccttaggaatgagtgtgttcaacctgtcgaatgccattatggggtctggaatcctggggttagcgttcgccctggccaacactggaattctcctcttcctcgtgctcctgactagtgtgacgttgctctctatctactccatcaatttactgctgatctgctcaaaagagacaggttgcatggtctatgaaaaactcggtgagcaagtgtttggaaccacaggcaagtttgtgatttttggtgcaacttccctgcaaaacacaggggcaatgctcagctatctgtttatagtgaagaacgagcttccaagcgcaatcaagttcctcatgggaaaagaagaaaccttttctgcctggtacgtcgatgggagagtgctcgtagttattgttacctttggcataatccttccactgtgtctgctcaagaatctggggtacctaggttacacctcaggcttcagtctctcatgcatggtgttttttttgattgttgtcatctataaaaagttccaaatcccctgtattgtgcccgaactcaacagcaccatttccgccaacagcactaacgcagacacttgtactcctaagtatgtcacatttaattccaagaccgtctacgccctccctaccatagccttcgccttcgtgtgtcatccgtctgttcttcctatatattccgaattaaaagaccgctcacagaagaaaatgcaaatggtgtctaacatcagctttttcgcgatgttcgttatgtattttcttactgctattttcgggtacctgactttctatgataacgtgcagagcgatttgctgcataagtaccagagcaaggacgacatcttgatcctgacggtgaggctggctgtaattgtggccgtgattctgactgtgccagtcctgttcttcactgtgagatcctcactcttcgagctggcaaaaaaaaccaagttcaatctgtgtcggcatacagtggtgacctgcatactgctcgtggtgataaacctgctggttattttcatcccctccatgaaggacatattcggagtggtgggagtgacaagcgccaatatgctcatatttatcctgccgtcatccctatatttgaaaattacagaccaagatggtgataagggcactcagaggatttgggccgctctcttcctcggactgggcgtgctcttctccctggtgagcattcccctcgtaatatacgactgggcctgttcctcttcatccgatgagggccattag

SEQ ID NO: 98249 - DNA, 1464 bp, Artificial Sequence
  derived and/or modified sequence
atgatgcacttcaagagcggcctggagctgaccgagctgcagaacatgaccgtgccagaagacgacaacatctcaaacgattcgaacgactttactgaggtggaaaatgggcagataaactcaaaattcatttcggaccgggagtctcgacggtcattgacgaactcacacctcgagaaaaagaagtgtgatgaatacattccaggcaccacatcactgggcatgagcgttttcaatttatccaacgcaatcatgggctctggtatactcggactggcattcgccctggctaatacaggaattctgctctttctcgtgttgctcaccagcgtgacactgctatccatctactctattaatctgctcctgatatgcagcaaagagacaggatgtatggtttacgagaagctgggtgagcaggtgtttgggaccactggaaaatttgtgatcttcggggcaacgtccttgcagaatactggagctatgctgtcctatctgtttatagtaaagaacgagcttcccagcgctataaagttccttatgggcaaggaggagaccttcagcgcgtggtacgtcgacggcagagtcctggtcgtaatagtcacctttggcattatcctgcccctgtgcctattgaagaacctcggctatctgggttatacgagcggcttttccctgagttgtatggtgtttttcctcatcgttgtcatctataagaagtttcagataccgtgcatcgttccagagctgaacagcacgatcagcgccaactccacgaacgcagatacctgcaccccgaagtacgtcactttcaattctaagactgtctacgctttaccaacaatagcttttgcattcgtctgtcacccatcagtgctgccaatatactctgagttgaaggatcggtcacaaaagaaaatgcagatggtgagtaatatcagcttcttcgcaatgttcgtaatgtacttcctgaccgccatttttgggtatctcaccttttacgataacgtgcagtcagacctgctgcacaagtatcagagtaaggacgatatcctaattctcaccgtgcgcctcgccgtcatcgtggccgtaattctgactgtaccagtgctattttttaccgtgcgaagctccttgtttgaacttgccaagaagacgaaattcaatctgtgccgccacaccgtcgtgacatgcattttattagtggtcatcaatctgcttgtcatttttatcccatccatgaaggatatctttggcgtggttggagtgacctctgctaatatgctgatttttatactgcccagcagtctgtacctgaaaatcaccgatcaggatggtgacaagggcacacagcgtatctgggctgcgctctttctcgggctgggagtcctgtttagccttgtctccattcccctggtaatttatgactgggcatgtagttcgtccagtgatgaaggtcactag

SEQ ID NO: 98250 - DNA, 1464 bp, Artificial Sequence
  derived and/or modified sequence
atgatgcatttcaaatctggtctggagttaacagagctgcagaacatgacggtacctgaggacgataatatatcgaacgatagtaatgactttacggaagtagaaaacggccaaatcaactccaaatttatatccgacagggagagtaggaggtctctgacaaactcacatttagagaagaagaaatgtgatgagtatattcctggaacgacaagcttggggatgagcgtcttcaatctcagtaacgccattatgggttccgggatcttagggctggcatttgctctggcaaacacagggatcctcttattcctggtcctgctaaccagcgtgacattactttccatctattccatcaatctgctactgatctgctccaaagagactgggtgtatggtatacgaaaagcttggagagcaggtcttcgggacaaccgggaagtttgtgattttcggtgccacttccctccagaacacgggcgcaatgctatcatacctgtttattgtaaaaaacgagctgcctagcgccatcaaattcctgatgggtaaagaagagactttctcggcctggtatgtcgatggcagagtcctggtcgtcattgtgacgttcggcataatcctgccattgtgcttgctgaaaaacctggggtacctgggctatacgagcggctttagtctctcatgtatggtcttttttttaatagttgtgatatataagaaattccagatcccttgcatagtgccagagctgaacagcacaatctcagccaattcaacaaatgcagatacttgtactcctaaatatgttactttcaattccaaaaccgtgtatgccctcccaactatcgccttcgcttttgtgtgccacccctctgtcctgcccatctacagtgagctgaaggatcgcagccaaaagaaaatgcagatggtatctaatatcagcttctttgctatgttcgtcatgtatttcctcaccgcaatttttggatacctcaccttttatgataacgttcagtccgacctgctccacaagtatcagagcaaagatgatatcctcatactgacggttcgcttagccgtcatcgttgccgtcattctgacagtcccggtcctattttttactgtgagaagctccctcttcgagctcgctaagaaaacaaaattcaatttatgccggcacactgtcgtgacttgtatcctgctggtagtcataaatctgctggtcatcttcatcccatcaatgaaggatatctttggcgtagtcggcgtcacctccgcgaatatgctgatatttatcttgccttcatcgctgtacctaaaaatcaccgatcaggatggcgacaaaggaacccagagaatctgggccgcactcttcctcggactcggggtgttgttcagccttgtatccattcccttagtgatctacgactgggcttgttctagtagcagcgacgaaggccattag

SEQ ID NO: 98251 - DNA, 1464 bp, Artificial Sequence
  derived and/or modified sequence
atgatgcacttcaagagtggactggagctgaccgagcttcagaatatgaccgtgccagaggatgacaatatttctaatgatagtaatgacttcactgaggtagagaatgggcagatcaacagcaaattcatctccgaccgcgaatcgcgtcggtctctcactaattcgcacttggagaaaaaaaaatgcgatgagtatatcccgggtaccaccagcttaggtatgtccgtgttcaacttgagtaacgccattatgggatctggcatcctgggcttagcctttgctctggcgaacacagggattctgctctttttggtgctattgactagcgttacactcctctctatctatagcattaatctattgctaatttgtagcaaggaaaccggatgtatggtctacgagaaattgggcgagcaagtttttgggaccacagggaagttcgtgatcttcggggctacatctttgcaaaatacaggagctatgctgagctatctgttcatcgtgaaaaatgaactgccatcggccatcaagttccttatgggcaaggaagaaactttctccgcctggtatgtggacggacgggtcctcgtcgtgattgtcacttttggcattatcctgcccctctgtctactgaagaacctgggttatctcggttatacatccggattcagcttatcctgcatggtttttttcctgattgtggtcatctataagaagttccagataccctgcatagtgcctgaactgaactcaactatatcagccaattctacaaatgccgacacctgcacacccaagtacgtgacttttaacagcaagaccgtctatgcgctgccaacgatcgctttcgcattcgtgtgtcatcctagtgttctcccaatctacagtgaactgaaagaccggtcacagaaaaagatgcagatggtgtctaatatcagttttttcgcaatgtttgtcatgtattttctgactgcaattttcggctacctgacattctatgataatgtgcagagcgatctgctgcacaaataccaatcgaaagacgatattttgatcctcactgttaggctagcagtgatagtcgccgttatactgactgtgcccgtcctgttttttacagtccgatcatccttattcgagctggcaaagaagactaagttcaacctttgtcgccatacagtcgtgacttgcatccttctcgtcgtgatcaacctgctggtgatatttatccccagtatgaaggatatattcggtgttgttggggtaacaagtgcaaatatgctgatatttattctgccttcaagcttgtacctgaaaatcactgaccaagatggggataaagggacacagaggatctgggcagccctattcctgggactgggcgtgctatttagcctggtgagtatccccctggttatctatgattgggcctgcagctcctcctcagacgagggacactag

SEQ ID NO: 98252 - DNA, 1464 bp, Artificial Sequence
  derived and/or modified sequence
atgatgcactttaagtccggactcgagctgaccgaattacaaaacatgacagtcccagaagacgacaacatctccaacgactctaatgattttactgaagtggagaacgggcagatcaactccaagttcatttcagaccgagaaagtcgccgaagcctcaccaactcgcacctcgaaaagaagaagtgtgacgagtacattcctggcactacgtcactgggcatgtcagtgtttaacctgagtaatgcgatcatgggaagtggcatattgggattggccttcgcgttggctaatacaggaattcttttatttttggtgctactgacatcagtcaccctactcagtatctatagtatcaatctgctgcttatctgcagcaaggaaaccggctgcatggtgtacgagaaactaggtgagcaggttttcgggacaaccggcaaattcgtcatctttggagcaacatcactgcagaataccggtgcgatgctatcctacctgttcatagtgaagaatgagctccctagcgcaatcaaatttttaatggggaaagaagaaaccttttccgcatggtacgtggacggtagggtgctggtggtgattgtcacctttggtataattcttcctttatgcttgctgaagaacctaggctacctcgggtacactagcggcttcagcttatcgtgcatggtattttttctgatcgtcgtcatttataaaaagtttcagattccctgtattgtgccagagctcaacagcactataagcgccaattctaccaacgctgacacatgtactccaaaatatgtgactttcaatagtaagacggtctacgcactgccgaccatcgccttcgcctttgtttgtcaccccagcgtgttgccaatatattccgagctgaaagaccgctctcaaaagaaaatgcaaatggtttctaatatctcattctttgccatgttcgtgatgtattttctaacggccatcttcggttacctgacattctacgataatgtgcagagcgaccttctacacaagtaccagagcaaagacgatattctcattctaactgtgcggcttgcagtaatcgtggccgtgattcttaccgtgcccgttctcttttttaccgtgaggtcttcactcttcgagctggccaaaaagacaaaatttaatctgtgccggcataccgtagttacatgtatcttacttgtagtgattaaccttcttgtcatctttattccgagcatgaaagatatattcggagtcgtgggagtcactagtgctaacatgctgatcttcatcctcccttccagtttgtatctgaagatcacagaccaggacggcgacaaagggacacagcgcatttgggcagccctctttctaggcttaggcgttcttttctcactagtgtctattcctctggtgatatatgattgggcatgctcgtccagtagcgatgaaggtcactag

SEQ ID NO: 98253 - DNA, 1464 bp, Artificial Sequence
  derived and/or modified sequence
atgatgcacttcaaatcgggattggagctgacagagttgcagaacatgaccgtgcccgaagatgataacatctccaacgatagtaatgacttcaccgaggtggaaaatggacagattaactccaagttcattagcgatcgggaaagccggagatccctaaccaattctcacttggaaaaaaagaagtgcgacgagtatatacctggcaccaccagcctcgggatgtcggtgttcaacctcagtaacgctatcatgggatccggtatcctagggctggccttcgctctggccaatactggaattctcttattccttgtcctgctcacaagtgtcacgcttctgtcaatctacagcatcaatctgctacttatatgttctaaggagaccgggtgcatggtttatgagaagctgggcgagcaggtgtttggaactaccggcaaatttgtgattttcggcgcaacaagtttgcagaacacgggagctatgctatcctacttgttcattgttaagaacgaactaccttcggcaattaaattccttatggggaaagaagagaccttcagcgcctggtatgttgatggacgcgttcttgtagtgatcgtaacatttggtattatcctgcccctctgtcttttgaagaacctcggttacctgggatacacctcaggtttctccctgtcctgcatggtgtttttcctaatagtcgtcatctataagaaattccagatcccttgcattgttccggaactgaattcgaccatatccgccaactccacgaatgcggacacatgcaccccgaaatacgtcacattcaatagcaaaacagtctacgccctgcctacaattgccttcgcattcgtttgtcacccatcagtgttaccaatatactccgagctgaaagacaggagtcagaaaaaaatgcaaatggtctctaatatctctttcttcgccatgtttgttatgtatttcctcaccgccatcttcgggtacctgactttttacgataacgtgcagtctgaccttctccacaagtaccagagcaaggatgatatattgatactgacagttcgcctggccgtgattgtagcagtcatcctgactgtgcctgtgctcttcttcacggtgaggagctccttgttcgagctggcgaagaaaactaagttcaacctatgcaggcacaccgtggtgacctgtatcctgctcgtcgtgataaacctgctggtcatctttatcccaagcatgaaggatattttcggagtggtgggcgtgaccagcgccaacatgctgatcttcattttgccctcaagcctgtaccttaaaattacggatcaggacggagacaaaggaacccagagaatatgggctgccctgttccttgggctcggggtgcttttttccctcgtatccatcccattagtcatttatgattgggcatgctccagcagtagtgatgaaggccattag

SEQ ID NO: 98254 - DNA, 3327 bp, Artificial Sequence
  derived and/or modified sequence
gcacaggaggggaggagaccgcgcgcgggacggggaggaatggcctgtccgcgttaaaccatcacaagccatggttgcggaagggccacgcgtcccccagtaggagaatgactccgattcgtgaccctcagcgccggtgcatgtcgatgtaagtgcgaggccggcgagcagagtgtgagtgggggttggtggtgaggggagattctgatgcaatcggcccggaaaggaggagagccaggcgagcgcggactggggcggccacgccactccgccagaaggtcgccaggagcctccgcccttcaccttcctccgaaatccgccaggccacgccaagctccctgcccaacccttactgacgggggccacattttcccggcctccgcagccagaccttgacacaaaggacatcaaactgccgagggtaaaaaccccggaagggcggacacctccacatcgccttttgccacctttccctttatttccggagatatttattgagtgtctactgtgtgccaggcactatatctatgtgcatagaaaaaccctggaaggccatacaacaatatatatagagtgatcgtctctgcttgctgagctaacaggggtgtcaagcttccattttggtatctacttctaaatacactcagaacaggagaaatttggactaattttcaaactacagacactttctaatcatgatgcatttcaaaagtggactcgaattaactgagttgcaaaacatgacagtgcccgaggatgataacattagcaatgactccaatgatttcaccgaagtagaaaatggtcagataaatagcaagtttatttctgatcgtgaaagtagaagaagtctcacaaacagccatttggaaaaaaagaagtgtgatgagtatattccaggtacaacctccttaggcatgtctgtttttaacctaagcaacgccattatgggcagtgggattttgggactcgcctttgccctggcaaacactggaatcctactttttctggtacttttgacttcagtgacattgctgtctatatattcaataaacctcctattgatctgttcaaaagaaacaggctgcatggtgtatgaaaagctgggggaacaagtctttggcaccacagggaagttcgtaatctttggagccacctctctacagaacactggagcaatgctgagctacctcttcatcgtaaaaaatgaactaccctctgccataaagtttctaatgggaaaggaagagacattttcagcctggtacgtggatggccgcgttctggtggtgatagttacctttggcataattctccctctgtgtctcttgaagaacttagggtatcttggctatactagtggattttccttgagctgtatggtttttttcctaattgtggttatttacaagaaatttcaaattccctgcattgttccagagctaaattcaacaataagtgctaattcaacaaatgctgacacgtgtacgccaaaatatgttaccttcaattcaaagaccgtgtatgctttacccaccattgcatttgcatttgtttgccacccgtcagtcctgccaatttacagtgagcttaaagaccgatcacagaaaaaaatgcagatggtttcaaacatctcctttttcgccatgtttgttatgtacttcttgactgccatttttggctacttgacattctatgacaacgtgcagtccgacctccttcacaaatatcagagtaaagatgacattctcatcctgacagtgcggctggctgtcattgttgctgtgatcctcacagtgccggtgttatttttcacggttcgttcatctttatttgaactggctaagaaaacaaagtttaatttatgtcgtcataccgtggttacctgcatactcttggttgttatcaacttgttggtgatcttcataccctccatgaaggatatttttggagtcgtaggagttacatctgctaacatgcttattttcattcttccttcatctctttatttaaaaatcacagaccaggatggagataaaggaactcaaagaatttgggctgcccttttcttgggcctgggggtgttgttctccttggtcagcattcccttggtcatctatgactgggcctgctcatcgagtagtgacgaaggccactgaaacccgccgagaaaaagaaacatccctgttgtctgctcagtcaagtccccacacatcagcaatctctcaccacttcttttgcaagtttacagaagcaaacagaaatgtacaggatacttaaaatggaataactttttggttgcaaaacagagacatggttctataatgcttcatgtccctccaagatttgagatcaatttagggattgtgaaatttttttttcaaatttcatacaatcatatttcccagtacttttcacaatcattttttacccatctaactctatgttttgtggcttcccggtctcttagaactttgaaaacatgatatacaataatgtttatttattatacatccagattctgaaataattttcctactgatgttcagctcacactatctgtacctttttagaagagaaaagaatcttgaattgtatatatttattttgctttacagaaaaaaatggtttcgtaaataatttgcctattttggttaacatagcacatggagataatcatctgaaagttatagggcactgccactgctgaatcagagcatgcccaatatttgaggtggctctgatttcctggcagctgaactcgggtagtccagtggcctagctggtaccacatctattcccatccagagacattctctggcaagtgttctcagctgaaaagtggttggggatgattcttaccttggtaattaaatgaagctacacatttgggtaatctagcaaatgaagtattttttccctcttggcaacttgtgtcagagttactctggtctgagtcaactttcgctggggaaaacctatggaacctactgcaaaaagattgtccaaaatgcctaagaaaatactcctctgatgcatttagccttcaaccctacctgtcttgctgaagggagaaaaatgttttagtacattataggcccagcagcttttattcatgtccaccagctagttgcacagagaatcatgtgtacctaactaaggatgatctaggataagtaactcctgttttatattgagtattttagggaagtctttaaaagacttgttttatatctataaatctaggttattacaaatacaagaattttgtaccttaaataagcctcatttctatttcttcttcattaattctccatctagtcttgt

SEQ ID NO: 98255 - DNA, 3436 bp, Artificial Sequence
  derived and/or modified sequence
agaccgcgcgcgggacggggaggaatggcctgtccgcgttaaaccatcacaagccatggttgcggaagggccacgcgtcccccagtaggagaatgactccgattcgtgaccctcagcgccggtgcatgtcgatgtaagtgcgaggccggcgagcagagtgtgagtgggggttggtggtgaggggagattctgatgcaatcggcccggaaaggaggagagccaggcgagcgcggactggggcggccacgccactccgccagaaggtcgccaggagcctccgcccttcaccttcctccgaaatccgccaggccacgccaagctccctgcccaacccttactgacgggggccacattttcccggcctccgcagccagaccttgacacaaaggacatcaaactgccgagggtaaaaaccccggaagggcggacacctccacatcgccttttgccacctttccctttatttccggagagtcaaggaaacttttgagctatttacagcttgtagcaattatgtaaagtatactcctctgaacaaaatttggagcatgtttgtttctctctacctgatttccccagaatctggaaactatctatatttattgagtgtctactgtgtgccaggcactatatctatgtgcatagaaaaaccctggaaggccatacaacaatatatatagagtgatcgtctctgcttgctgagctaacaggggtgtcaagcttccattttggtatctacttctaaatacactcagaacaggagaaatttggactaattttcaaactacagacactttctaatcatgatgcatttcaaaagtggactcgaattaactgagttgcaaaacatgacagtgcccgaggatgataacattagcaatgactccaatgatttcaccgaagtagaaaatggtcagataaatagcaagtttatttctgatcgtgaaagtagaagaagtctcacaaacagccatttggaaaaaaagaagtgtgatgagtatattccaggtacaacctccttaggcatgtctgtttttaacctaagcaacgccattatgggcagtgggattttgggactcgcctttgccctggcaaacactggaatcctactttttctggtacttttgacttcagtgacattgctgtctatatattcaataaacctcctattgatctgttcaaaagaaacaggctgcatggtgtatgaaaagctgggggaacaagtctttggcaccacagggaagttcgtaatctttggagccacctctctacagaacactggagcaatgctgagctacctcttcatcgtaaaaaatgaactaccctctgccataaagtttctaatgggaaaggaagagacattttcagcctggtacgtggatggccgcgttctggtggtgatagttacctttggcataattctccctctgtgtctcttgaagaacttagggtatcttggctatactagtggattttccttgagctgtatggtttttttcctaattgtggttatttacaagaaatttcaaattccctgcattgttccagagctaaattcaacaataagtgctaattcaacaaatgctgacacgtgtacgccaaaatatgttaccttcaattcaaagaccgtgtatgctttacccaccattgcatttgcatttgtttgccacccgtcagtcctgccaatttacagtgagcttaaagaccgatcacagaaaaaaatgcagatggtttcaaacatctcctttttcgccatgtttgttatgtacttcttgactgccatttttggctacttgacattctatgacaacgtgcagtccgacctccttcacaaatatcagagtaaagatgacattctcatcctgacagtgcggctggctgtcattgttgctgtgatcctcacagtgccggtgttatttttcacggttcgttcatctttatttgaactggctaagaaaacaaagtttaatttatgtcgtcataccgtggttacctgcatactcttggttgttatcaacttgttggtgatcttcataccctccatgaaggatatttttggagtcgtaggagttacatctgctaacatgcttattttcattcttccttcatctctttatttaaaaatcacagaccaggatggagataaaggaactcaaagaatttgggctgcccttttcttgggcctgggggtgttgttctccttggtcagcattcccttggtcatctatgactgggcctgctcatcgagtagtgacgaaggccactgaaacccgccgagaaaaagaaacatccctgttgtctgctcagtcaagtccccacacatcagcaatctctcaccacttcttttgcaagtttacagaagcaaacagaaatgtacaggatacttaaaatggaataactttttggttgcaaaacagagacatggttctataatgcttcatgtccctccaagatttgagatcaatttagggattgtgaaatttttttttcaaatttcatacaatcatatttcccagtacttttcacaatcattttttacccatctaactctatgttttgtggcttcccggtctcttagaactttgaaaacatgatatacaataatgtttatttattatacatccagattctgaaataattttcctactgatgttcagctcacactatctgtacctttttagaagagaaaagaatcttgaattgtatatatttattttgctttacagaaaaaaatggtttcgtaaataatttgcctattttggttaacatagcacatggagataatcatctgaaagttatagggcactgccactgctgaatcagagcatgcccaatatttgaggtggctctgatttcctggcagctgaactcgggtagtccagtggcctagctggtaccacatctattcccatccagagacattctctggcaagtgttctcagctgaaaagtggttggggatgattcttaccttggtaattaaatgaagctacacatttgggtaatctagcaaatgaagtattttttccctcttggcaacttgtgtcagagttactctggtctgagtcaactttcgctggggaaaacctatggaacctactgcaaaaagattgtccaaaatgcctaagaaaatactcctctgatgcatttagccttcaaccctacctgtcttgctgaagggagaaaaatgttttagtacattataggcccagcagcttttattcatgtccaccagctagttgcacagagaatcatgtgtacctaactaaggatgatctaggataagtaactcctgttttatattgagtattttagggaagtctttaaaagacttgttttatatctataaatctaggttattacaaatacaagaattttgtaccttaaataagcctcatttctatttcttcttcattaattctccatctagtcttgtg

SEQ ID NO: 98256 - DNA, 2332 bp, Artificial Sequence
  derived and/or modified sequence
gcatcgtcagagagctgcaagagggaggcagcaaggtgcggccgccagcagtgacaccatgtgaccggcacggctcactgacacgcagctttggttaaagagcgggcgcacaggaggggaggagaccgcgcgcgggacggggaggaatggcctgtccgcgttaaaccatcacaagccatggttgcggaagggccacgcgtcccccagtaggagaatgactccgattcgtgaccctcagcgccggtgcatgtcgatatatttattgagtgtctactgtgtgccaggcactatatctatgtgcatagaaaaaccctggaaggccatacaacaatatatatagagtgatcgtctctgcttgctgagctaacaggggtgtcaagcttccattttggtatctacttctaaatacactcagaacaggagaaatttggactaattttcaaactacagacactttctaatcatgatgcatttcaaaagtggactcgaattaactgagttgcaaaacatgacagtgcccgaggatgataacattagcaatgactccaatgatttcaccgaagtagaaaatggtcagataaatagcaagtttatttctgatcgtgaaagtagaagaagtctcacaaacagccatttggaaaaaaagaagtgtgatgagtatattccaggtacaacctccttaggcatgtctgtttttaacctaagcaacgccattatgggcagtgggattttgggactcgcctttgccctggcaaacactggaatcctactttttctggtacttttgacttcagtgacattgctgtctatatattcaataaacctcctattgatctgttcaaaagaaacaggctgcatggtgtatgaaaagctgggggaacaagtctttggcaccacagggaagttcgtaatctttggagccacctctctacagaacactggagcaatgctgagctacctcttcatcgtaaaaaatgaactaccctctgccataaagtttctaatgggaaaggaagagacattttcagcctggtacgtggatggccgcgttctggtggtgatagttacctttggcataattctccctctgtgtctcttgaagaacttagggtatcttggctatactagtggattttccttgagctgtatggtttttttcctaattgtggttatttacaagaaatttcaaattccctgcattgttccagagctaaattcaacaataagtgctaattcaacaaatgctgacacgtgtacgccaaaatatgttaccttcaattcaaagaccgtgtatgctttacccaccattgcatttgcatttgtttgccacccgtcagtcctgccaatttacagtgagcttaaagaccgatcacagaaaaaaatgcagatggtttcaaacatctcctttttcgccatgtttgttatgtacttcttgactgccatttttggctacttgacattctatgacaacgtgcagtccgacctccttcacaaatatcagagtaaagatgacattctcatcctgacagtgcggctggctgtcattgttgctgtgatcctcacagtgccggtgttatttttcacggttcgttcatctttatttgaactggctaagaaaacaaagtttaatttatgtcgtcataccgtggttacctgcatactcttggttgttatcaacttgttggtgatcttcataccctccatgaaggatatttttggagtcgtaggagttacatctgctaacatgcttattttcattcttccttcatctctttatttaaaaatcacagaccaggatggagataaaggaactcaaagaatttgggctgcccttttcttgggcctgggggtgttgttctccttggtcagcattcccttggtcatctatgactgggcctgctcatcgagtagtgacgaaggccactgaaacccgccgagaaaaagaaacatccctgttgtctgctcagtcaagtccccacacatcagcaatctctcaccacttcttttgcaagtttacagaagcaaacagaaatgtacaggatacttaaaatggaataactttttggttgcaaaacagagacatggttctataatgcttcatgtccctccaagatttgagatcaatttagggattgtgaaatttttttttcaaatttcatacaatcatatttcccagtacttttcacaatcattttttacccatctaactctatgttttgtggcttcccggtctcttagaactttgaaaacatgatatacaataatgtttatttattatacatccagattctgaaataattttcctactgatgttcagctcacactatctgta

SEQ ID NO: 98257 - DNA, 3196 bp, Artificial Sequence
  derived and/or modified sequence
accgcgcgcgggacggggaggaatggcctgtccgcgttaaaccatcacaagccatggttgcggaagggccacgcgtcccccagtaggagaatgactccgattcgtgaccctcagcgccggtgcatgtcgatgtaagtgcgaggccggcgagcagagtgtgagtgggggttggtggtgaggggagattctgatgcaatcggcccggaaaggaggagagccaggcgagcgcggactggggcggccacgccactccgccagaaggtcgccaggagcctccgcccttcaccttcctccgaaatccgccaggccacgccaagctccctgcccaacccttactgacgggggccacattttcccggcctccgcagccagaccttgacacaaaggacatcaaactgccgagggtaaaaaccccggaagggcggacacctccacatcgccttttgccacctttccctttatttccggaggggtgtcaagcttccattttggtatctacttctaaatacactcagaacaggagaaatttggactaattttcaaactacagacactttctaatcatgatgcatttcaaaagtggactcgaattaactgagttgcaaaacatgacagtgcccgaggatgataacattagcaatgactccaatgatttcaccgaagtagaaaatggtcagataaatagcaagtttatttctgatcgtgaaagtagaagaagtctcacaaacagccatttggaaaaaaagaagtgtgatgagtatattccaggtacaacctccttaggcatgtctgtttttaacctaagcaacgccattatgggcagtgggattttgggactcgcctttgccctggcaaacactggaatcctactttttctggtacttttgacttcagtgacattgctgtctatatattcaataaacctcctattgatctgttcaaaagaaacaggctgcatggtgtatgaaaagctgggggaacaagtctttggcaccacagggaagttcgtaatctttggagccacctctctacagaacactggagcaatgctgagctacctcttcatcgtaaaaaatgaactaccctctgccataaagtttctaatgggaaaggaagagacattttcagcctggtacgtggatggccgcgttctggtggtgatagttacctttggcataattctccctctgtgtctcttgaagaacttagggtatcttggctatactagtggattttccttgagctgtatggtttttttcctaattgtggttatttacaagaaatttcaaattccctgcattgttccagagctaaattcaacaataagtgctaattcaacaaatgctgacacgtgtacgccaaaatatgttaccttcaattcaaagaccgtgtatgctttacccaccattgcatttgcatttgtttgccacccgtcagtcctgccaatttacagtgagcttaaagaccgatcacagaaaaaaatgcagatggtttcaaacatctcctttttcgccatgtttgttatgtacttcttgactgccatttttggctacttgacattctatgacaacgtgcagtccgacctccttcacaaatatcagagtaaagatgacattctcatcctgacagtgcggctggctgtcattgttgctgtgatcctcacagtgccggtgttatttttcacggttcgttcatctttatttgaactggctaagaaaacaaagtttaatttatgtcgtcataccgtggttacctgcatactcttggttgttatcaacttgttggtgatcttcataccctccatgaaggatatttttggagtcgtaggagttacatctgctaacatgcttattttcattcttccttcatctctttatttaaaaatcacagaccaggatggagataaaggaactcaaagaatttgggctgcccttttcttgggcctgggggtgttgttctccttggtcagcattcccttggtcatctatgactgggcctgctcatcgagtagtgacgaaggccactgaaacccgccgagaaaaagaaacatccctgttgtctgctcagtcaagtccccacacatcagcaatctctcaccacttcttttgcaagtttacagaagcaaacagaaatgtacaggatacttaaaatggaataactttttggttgcaaaacagagacatggttctataatgcttcatgtccctccaagatttgagatcaatttagggattgtgaaatttttttttcaaatttcatacaatcatatttcccagtacttttcacaatcattttttacccatctaactctatgttttgtggcttcccggtctcttagaactttgaaaacatgatatacaataatgtttatttattatacatccagattctgaaataattttcctactgatgttcagctcacactatctgtacctttttagaagagaaaagaatcttgaattgtatatatttattttgctttacagaaaaaaatggtttcgtaaataatttgcctattttggttaacatagcacatggagataatcatctgaaagttatagggcactgccactgctgaatcagagcatgcccaatatttgaggtggctctgatttcctggcagctgaactcgggtagtccagtggcctagctggtaccacatctattcccatccagagacattctctggcaagtgttctcagctgaaaagtggttggggatgattcttaccttggtaattaaatgaagctacacatttgggtaatctagcaaatgaagtattttttccctcttggcaacttgtgtcagagttactctggtctgagtcaactttcgctggggaaaacctatggaacctactgcaaaaagattgtccaaaatgcctaagaaaatactcctctgatgcatttagccttcaaccctacctgtcttgctgaagggagaaaaatgttttagtacattataggcccagcagcttttattcatgtccaccagctagttgcacagagaatcatgtgtacctaactaaggatgatctaggataagtaactcctgttttatattgagtattttagggaagtctttaaaagacttgttttatatctataaatctaggttattacaaatacaagaattttgtaccttaaataagcctcatttctatttcttcttcattaattctccatctagtcttgtg

SEQ ID NO: 98258 - DNA, 1464 bp, Artificial Sequence
  derived and/or modified sequence
atgatgcacttcaagagcggcctggagctgaccgagctgcagaacatgaccgtgcccgaggacgacaacatcagcaacgacagcaacgacttcaccgaggtggagaacggccagatcaacagcaagttcatcagcgacagagagagcagaagaagcctgaccaacagccacctggagaagaagaagtgcgacgagtacatccccggcaccaccagcctgggcatgagcgtgttcaacctgagcaacgccatcatgggcagcggcatcctgggcctggccttcgccctggccaacaccggcatcctgctgttcctggtgctgctgaccagcgtgaccctgctgagcatctacagcatcaacctgctgctgatctgcagcaaggagaccggctgcatggtgtacgagaagctgggcgagcaggtgttcggcaccaccggcaagttcgtgatcttcggcgccaccagcctgcagaacaccggcgccatgctgagctacctgttcatcgtgaagaacgagctgcccagcgccatcaagttcctgatgggcaaggaggagaccttcagcgcctggtacgtggacggcagagtgctggtggtgatcgtgaccttcggcatcatcctgcccctgtgcctgctgaagaacctgggctacctgggctacaccagcggcttcagcctgagctgcatggtgttcttcctgatcgtggtgatctacaagaagttccagatcccctgcatcgtgcccgagctgaacagcaccatcagcgccaacagcaccaacgccgacacctgcacccccaagtacgtgaccttcaacagcaagaccgtgtacgccctgcccaccatcgccttcgccttcgtgtgccaccccagcgtgctgcccatctacagcgagctgaaggacagaagccagaagaagatgcagatggtgagcaacatcagcttcttcgccatgttcgtgatgtacttcctgaccgccatcttcggctacctgaccttctacgacaacgtgcagagcgacctgctgcacaagtaccagagcaaggacgacatcctgatcctgaccgtgagactggccgtgatcgtggccgtgatcctgaccgtgcccgtgctgttcttcaccgtgagaagcagcctgttcgagctggccaagaagaccaagttcaacctgtgcagacacaccgtggtgacctgcatcctgctggtggtgatcaacctgctggtgatcttcatccccagcatgaaggacatcttcggcgtggtgggcgtgaccagcgccaacatgctgatcttcatcctgcccagcagcctgtacctgaagatcaccgaccaggacggcgacaagggcacccagagaatctgggccgccctgttcctgggcctgggcgtgctgttcagcctggtgagcatccccctggtgatctacgactgggcctgcagcagcagcagcgacgagggccactag

SEQ ID NO: 98259 - protein, 712 aa, Artificial Sequence
  derived and/or modified sequence
MLAMDTCKHVGQLQLAQDHSSLNPQKWHCVDCNTTESIWACLSCSHVACGRYIEEHALKHFQESSHPVALEVNEMYVFCYLCDDYVLNDNTTGDLKLLRRTLSAIKSQNYHCTTRSGRFLRSMGTGDDSYFLHDGAQSLLQSEDQLYTALWHRRRILMGKIFRTWFEQSPIGRKKQEEPFQEKIVVKREVKKRRQELEYQVKAELESMPPRKSLRLQGLAQSTIIEIVSVQVPAQTPASPAKDKVLSTSENEISQKVSDSSVKRRPIVTPGVTGLRNLGNTCYMNSVLQVLSHLLIFRQCFLKLDLNQWLAMTASEKTRSCKHPPVTDTVVYQMNECQEKDTGFVCSRQSSLSSGLSGGASKGRKMELIQPKEPTSQYISLCHELHTLFQVMWSGKWALVSPFAMLHSVWRLIPAFRGYAQQDAQEFLCELLDKIQRELETTGTSLPALIPTSQRKLIKQVLNVVNNIFHGQLLSQVTCLACDNKSNTIEPFWDLSLEFPERYQCSGKDIASQPCLVTEMLAKFTETEALEGKIYVCDQCNSKRRRFSSKPVVLTEAQKQLMICHLPQVLRLHLKRFRWSGRNNREKIGVHVGFEEILNMEPYCCRETLKSLRPECFIYDLSAVVMHHGKGFGSGHYTAYCYNSEGGFWVHCNDSKLSMCTMDEVCKAQAYILFYTQRVTENGHSKLLPPELLLGSQHPNEDADTSSNEILS

SEQ ID NO: 98260 - DNA, 2139 bp, Artificial Sequence
  derived and/or modified sequence
atgctggccatggacacctgcaagcacgtgggccagctgcagctggcccaggaccacagcagcctgaacccccagaagtggcactgcgtggactgcaacaccaccgagagcatctgggcctgcctgagctgcagccacgtggcctgcggcagatacatcgaggagcacgccctgaagcacttccaggagagcagccaccccgtggccctggaggtgaacgagatgtacgtgttctgctacctgtgcgacgactacgtgctgaacgacaacaccaccggcgacctgaagctgctgagaagaaccctgagcgccatcaagagccagaactaccactgcaccaccagaagcggcagattcctgagaagcatgggcaccggcgacgacagctacttcctgcacgacggcgcccagagcctgctgcagagcgaggaccagctgtacaccgccctgtggcacagaagaagaatcctgatgggcaagatcttcagaacctggttcgagcagagccccatcggcagaaagaagcaggaggagcccttccaggagaagatcgtggtgaagagagaggtgaagaagagaagacaggagctggagtaccaggtgaaggccgagctggagagcatgccccccagaaagagcctgagactgcagggcctggcccagagcaccatcatcgagatcgtgagcgtgcaggtgcccgcccagacccccgccagccccgccaaggacaaggtgctgagcaccagcgagaacgagatcagccagaaggtgagcgacagcagcgtgaagagaagacccatcgtgacccccggcgtgaccggcctgagaaacctgggcaacacctgctacatgaacagcgtgctgcaggtgctgagccacctgctgatcttcagacagtgcttcctgaagctggacctgaaccagtggctggccatgaccgccagcgagaagaccagaagctgcaagcacccccccgtgaccgacaccgtggtgtaccagatgaacgagtgccaggagaaggacaccggcttcgtgtgcagcagacagagcagcctgagcagcggcctgagcggcggcgccagcaagggcagaaagatggagctgatccagcccaaggagcccaccagccagtacatcagcctgtgccacgagctgcacaccctgttccaggtgatgtggagcggcaagtgggccctggtgagccccttcgccatgctgcacagcgtgtggagactgatccccgccttcagaggctacgcccagcaggacgcccaggagttcctgtgcgagctgctggacaagatccagagagagctggagaccaccggcaccagcctgcccgccctgatccccaccagccagagaaagctgatcaagcaggtgctgaacgtggtgaacaacatcttccacggccagctgctgagccaggtgacctgcctggcctgcgacaacaagagcaacaccatcgagcccttctgggacctgagcctggagttccccgagagataccagtgcagcggcaaggacatcgccagccagccctgcctggtgaccgagatgctggccaagttcaccgagaccgaggccctggagggcaagatctacgtgtgcgaccagtgcaacagcaagagaagaagattcagcagcaagcccgtggtgctgaccgaggcccagaagcagctgatgatctgccacctgccccaggtgctgagactgcacctgaagagattcagatggagcggcagaaacaacagagagaagatcggcgtgcacgtgggcttcgaggagatcctgaacatggagccctactgctgcagagagaccctgaagagcctgagacccgagtgcttcatctacgacctgagcgccgtggtgatgcaccacggcaagggcttcggcagcggccactacaccgcctactgctacaacagcgagggcggcttctgggtgcactgcaacgacagcaagctgagcatgtgcaccatggacgaggtgtgcaaggcccaggcctacatcctgttctacacccagagagtgaccgagaacggccacagcaagctgctgccccccgagctgctgctgggcagccagcaccccaacgaggacgccgacaccagcagcaacgagatcctgagctag

SEQ ID NO: 98261 - DNA, 2139 bp, Artificial Sequence
  derived and/or modified sequence
atgttggcaatggacacgtgtaagcacgtggggcagcttcagctcgctcaggaccactcgtctctgaatcctcaaaagtggcattgcgtggactgcaacacaacagagagtatctgggcctgcctaagctgctcacatgtggcgtgcggccgttacatcgaagaacacgcgctgaaacatttccaggagagctctcaccccgtggcgctggaagtcaacgagatgtatgttttctgctacctgtgcgatgactatgtactcaacgataacaccactggtgacctgaagcttcttaggcggaccttaagcgccatcaagtctcagaactatcattgcactactaggagcggaaggttccttaggagcatgggaacaggagacgactcctatttcctgcatgacggagcacagagtctcctgcagagcgaagatcagctttacactgctctatggcacagacgccgcattctgatgggaaagatctttagaacatggtttgaacaatcacctatcgggcggaagaagcaggaagagccatttcaagagaaaatcgttgtaaagagggaggttaaaaaacgccggcaagagttggaataccaggttaaagccgaattggaatctatgcctcctagaaagtccctacgcctacagggcctcgcccagagcactattattgagatagtgtccgtgcaggtgcccgcacagacacccgcttctcccgcgaaagataaggtactgtcaacatcagagaacgagatctcccagaaagtatccgattcatctgtgaagcgcagacccattgtcacaccaggcgtcacggggttacgaaaccttggaaatacgtgttacatgaacagtgttcttcaagtgctgtcccacctcctgattttccgacagtgtttcctgaagctggacctgaaccagtggttggccatgactgcctcggaaaaaacgaggagttgcaagcatccgcctgtgaccgacacagtggtctaccagatgaatgagtgtcaggaaaaggacacaggttttgtttgcagtagacagtcctcattaagcagcggactgtcaggaggcgcaagtaagggccggaagatggagttaattcaacccaaagaaccaacaagtcagtacatctctctatgccacgaactgcataccctgttccaggtgatgtggagcggaaaatgggcacttgtgagtccttttgccatgttgcactccgtttggaggttaatcccagcttttcgcggctacgcccagcaggatgcccaggaatttctttgcgagcttctagataaaattcagcgggaactagagacaacgggcacctccctccccgctctcatacccacatctcagagaaagttgatcaaacaggtcctcaatgtggtgaacaatatcttccacggccagttgctcagccaggtcacgtgcctggcatgtgacaataaaagtaacaccattgagcccttttgggacctgtctcttgagtttcccgagagataccagtgcagtggcaaggacatcgcctcacagccttgcctcgttaccgaaatgctcgccaaattcacagagacagaggccttagagggtaagatctatgtatgtgatcaatgcaatagcaaacggcgccgctttagttccaagcctgttgtgttgaccgaggcccaaaaacaattaatgatctgtcacctgccacaagtgttacgtctgcacttgaagaggtttcggtggtctgggcgaaataatcgcgagaagatcggggtgcatgttggtttcgaggagatcttgaacatggaaccttactgttgtcgggaaacgcttaagagcctccggcctgagtgcttcatttatgatctaagtgccgtggtgatgcatcatgggaaaggctttggatcaggacactacacagcatactgctacaattctgaaggcggtttctgggtccactgcaatgactcaaaattgagcatgtgcaccatggatgaagtctgtaaagctcaagcttacattctgttctatacccaacgcgtgacagaaaacggacattcaaaattgctgccacccgagctgctgctaggatctcagcatccaaatgaggacgccgacacatcgagcaatgagatactaagctag

SEQ ID NO: 98262 - DNA, 2139 bp, Artificial Sequence
  derived and/or modified sequence
atgctggcaatggacacttgtaaacatgtggggcagttgcagttggcacaggatcacagttcgctcaatccccagaagtggcattgcgtcgactgtaacaccacagaatcgatctgggcatgtttgtcgtgttcccatgtcgcctgcgggaggtacatagaggagcacgccctgaaacatttccaggaaagtagccacccagtggcgttggaagtcaacgaaatgtacgtgttttgttacctgtgtgacgattacgtactgaatgacaatactacgggagatttgaaactgcttcggcgaaccctttctgcaataaaatcacagaattaccactgtacaacacgcagcggacggttcttaagatctatgggtacaggagatgacagctatttcctgcacgacggggcacagtctctgctccagagcgaagatcagctgtacactgcgctctggcatcgcagacggatcctcatgggcaaaatttttcgaacgtggttcgagcagtccccaatcggaagaaagaagcaggaggagccttttcaagaaaaaattgtggtgaagcgggaggttaagaaacgccggcaagaattggaatatcaagtgaaggctgaactggaatcgatgcccccgcgcaaatcactgcgtttacagggccttgcacagtccaccattattgaaatcgtgtctgtacaggtccccgcccagacacccgcctcccctgcaaaagacaaggtgctgagcacttctgagaatgagatctcccaaaaggtcagcgattcatccgttaagcgccggcctatcgtcaccccaggggtgactggcctgcgtaatttgggcaacacctgttatatgaacagcgtgctgcaggtgctctcccatctgctcatttttaggcaatgttttctgaagttggacttaaatcagtggctggccatgacggcatcggagaagacacgctcttgtaaacatcccccggtcacagatacagtcgtgtatcagatgaacgagtgccaagagaaagatactggcttcgtgtgtagcaggcagtcaagcctatcatctggacttagcggtggggcctccaaaggaaggaagatggaacttatccagcccaaggaaccaactagccagtatatttccctgtgtcacgagctacacaccttgtttcaagtcatgtggtccggtaaatgggccttggtaagccccttcgccatgctgcattctgtgtggcgtctcatccccgcttttcgcggttatgcacagcaagatgcgcaggagtttctctgtgagctgcttgataaaatccagagggaactggagacaacggggactagcctgcccgccctgattcccacttcccaacggaaactcattaagcaggtgttaaatgtcgtgaacaacattttccatggccagctcctctcacaggttacttgcctcgcttgtgataataagtccaacacgattgagccgttctgggacctatccctggagttccctgaacgataccagtgtagcggcaaggacattgcaagtcagccctgcctggttaccgagatgttggccaagttcaccgaaacagaagcactagagggaaagatttatgtgtgtgaccaatgcaacagtaagagacggcggttttccagcaagccagtagtcctgactgaagcccagaagcagctgatgatctgccatctccctcaggtgctaaggctgcacctgaagagatttcggtggagtggccgcaacaaccgagaaaaaattggggttcatgtcggttttgaggaaattctcaacatggagccctattgttgcagagaaaccctgaaatccctgagacccgaatgctttatctacgacctgagcgccgtggttatgcatcacggcaaggggttcgggtctgggcactacaccgcatattgctacaattcggaaggcggcttctgggtgcattgcaacgactcaaaattatctatgtgtaccatggacgaggtgtgtaaggcacaggcatacatcctgttttatacacagagagtgactgagaacgggcacagtaaactcctgccccctgagctactgctgggctcccaacatccaaacgaagatgcagataccagcagcaatgaaatactgtcgtag

SEQ ID NO: 98263 - DNA, 2139 bp, Artificial Sequence
  derived and/or modified sequence
atgctggccatggacacctgcaagcacgtcggtcagttgcagcttgcgcaggatcatagtagtctcaaccctcagaaatggcattgtgtggactgtaacacgaccgagtcaatttgggcttgtctgtcttgcagccacgtagcttgtgggaggtacatcgaagaacatgccctgaagcatttccaggaaagctcacaccctgtagccctggaggttaacgagatgtacgtgttctgctatttatgcgacgattacgttctcaacgacaatacaactggagatttaaagctcctccggagaactttgtccgcgattaagagccaaaattatcactgtactacccgtagcggcagattcctaagatccatgggcaccggggacgatagctatttcttacatgacggagcccagagtcttctccagtctgaggatcagctctacactgctttatggcataggagacgcatactgatgggtaagattttcagaacttggtttgagcagtcacctattggaaggaagaagcaggaggagccatttcaagaaaagatcgtggtcaagagggaagtcaaaaaacgacggcaagaattggagtaccaggtgaaagccgagctggagtcaatgccaccacgaaagagccttcgcctgcaggggctcgcccagtcaacgatcatcgaaatcgtgtcagtccaggtccccgcccagacacctgcatcccccgcgaaggataaagtgctttccacctctgaaaacgagatcagccaaaaagtttctgattcctccgtcaaacgaagacctatcgtcacaccgggtgttactgggctgcgcaaccttggaaatacgtgttatatgaacagtgtccttcaggttctttctcacctcctaatttttcgacagtgcttcctcaaattagacctcaaccaatggctagctatgactgctagtgagaaaactcggagctgtaagcatccccctgtaacagatactgtcgtataccagatgaacgagtgtcaggaaaaggacacgggttttgtctgttctcgccagagtagtctcagcagcgggctttctggcggagcaagcaaggggagaaaaatggaactcattcagccaaaggagcccacctcacaatacatcagcctctgtcacgagctacacaccctcttccaggtcatgtggtccggaaagtgggcgctggtcagcccctttgccatgttgcatagtgtgtggagacttataccagctttcagaggttacgcccagcaggacgcccaggagtttctgtgtgagctactcgataaaattcagagagaactcgaaaccacggggacatcacttccagcgctcatcccaacctcccagcggaagctgattaagcaagtgctcaatgtggtcaataacatcttccatgggcagctccttagccaggtgacgtgtttggcctgcgataacaaaagtaatacaatagaacccttctgggaccttagcctggaattcccagagaggtaccaatgttcagggaaggatatcgcatcacagccctgcctggtcaccgaaatgttggccaagttcaccgagacggaggctcttgaaggcaaaatttacgtctgcgaccagtgtaacagtaaacggcgtcgatttagtagcaaacccgtggtgctgaccgaggcccagaagcagctgatgatctgtcacttgcctcaagttcttcgcctccacctaaaaagattccggtggagtgggcgcaataatcgcgaaaaaataggggtgcatgtgggattcgaggagattctgaacatggagccatactgttgcagggagactctgaagtcactgaggcccgagtgcttcatctacgaccttagcgcagtggtgatgcatcatggaaaaggattcggcagtggccactacaccgcgtattgctataactctgaggggggattttgggtccactgcaatgactcaaaactctccatgtgtaccatggacgaagtctgcaaagcccaagcatacattctgttctacacacaaagggtcaccgagaatgggcatagcaagctgctgccgcctgagttattgctagggtctcagcatcctaatgaggatgccgacacatcttcaaacgagatcctcagctag

SEQ ID NO: 98264 - DNA, 2139 bp, Artificial Sequence
  derived and/or modified sequence
atgctggccatggacacctgcaagcacgtgggccagctgcagctggcccaggaccacagcagcctgaacccccagaagtggcactgtgtggactgcaacaccacagagagcatctgggcctgcctgagctgcagccacgtggcctgtggccgctacatcgaggagcacgccctgaagcacttccaggagagcagccaccctgtggccctggaggtgaatgagatgtatgtgttctgctacctgtgtgatgattatgtgctgaatgacaacaccaccggggacctgaagctgctgcggaggaccctgagcgccatcaagagccagaactaccactgcaccaccaggagcggccgcttcctgcgctccatgggcactggagatgacagctacttcctgcatgatggagcccagagcctgctgcagagcgaggaccagctgtacacagccctgtggcacagaagacgcatcctgatgggcaagatcttccgcacctggtttgagcagagccccatcggcaggaagaagcaggaggagcccttccaggagaagatcgtggtgaagcgggaggtgaagaagaggcggcaggagctggagtaccaggtgaaggccgagctggagagcatgccacccaggaagagcctgcggctgcagggcctggcccagagcaccatcattgaaattgtgtctgtgcaggtgcctgcccagaccccagccagccctgccaaggacaaggtgctgagcaccagtgaaaatgagatcagccagaaggtgtctgacagctctgtgaagaggcggcccatcgtgaccccaggagtgacaggcctgaggaacctgggcaacacctgctacatgaacagcgtgctgcaggtgctgagccacctgctgatcttccggcagtgcttcctgaagctggacctgaaccagtggctggccatgacagccagcgagaagaccaggagctgcaagcacccccctgtgacagacacagtggtgtaccagatgaatgaatgccaggagaaggacaccggctttgtgtgcagccggcagagcagcctgagcagcggcctgtctggaggagccagcaagggcaggaagatggagctgatccagcccaaggagcccaccagccagtacatcagcctgtgccacgagctgcacaccctcttccaggtgatgtggagcggcaagtgggccctggtgagcccctttgccatgctgcacagcgtgtggaggctcatcccagccttccggggctacgcccagcaggatgcccaggagttcctgtgtgagctgctggacaagatccagcgggagctggagaccaccggcaccagcctgcctgccctgatccccaccagccagaggaagctgatcaagcaggtgctgaatgtggtgaacaacatcttccacggccagctgctgagccaggtgacctgcctggcctgtgacaacaagagcaacaccatcgagcccttctgggacctgagcctggagttccctgagcgctaccagtgcagcggcaaggacatcgccagccagccctgcctggtgacagagatgctggccaagttcacagaaacagaggccctggagggcaagatctacgtgtgtgaccagtgcaacagcaagagaagacgcttcagcagcaagcctgtggtgctgacagaggcccagaagcagctgatgatctgccacctgccccaggtgctgcggctgcacctgaagcgcttccgctggagcggcaggaacaaccgggagaagattggagtgcacgtgggctttgaggagatcctgaacatggagccctactgctgccgggagaccctgaagagcctgcggcctgagtgcttcatctatgacctgtctgctgtggtgatgcaccacggcaagggcttcggcagcggccactacacagcctactgctacaacagcgagggcggcttctgggtgcactgcaatgacagcaagctgtccatgtgcaccatggatgaggtgtgcaaggcccaggcctacatcctcttctacacccagagggtgacagaaaatggccacagcaagctgctgcccccagagctgctgctgggcagccagcaccccaatgaagatgctgacaccagcagcaatgagatcctgtcctag

SEQ ID NO: 98265 - DNA, 2139 bp, Artificial Sequence
  derived and/or modified sequence
atgctggccatggacacctgcaagcacgtgggccagctgcagctggctcaggaccactccagcctcaatccacaaaaatggcactgcgtggactgtaacaccacggaatcaatctgggcttgtctgtcttgctcacatgtcgcttgcgggcggtacatcgaagagcatgccctcaagcacttccaggagagctcgcatcctgtggctttggaggttaatgagatgtacgttttttgctatttatgcgacgactatgtcctgaacgataatacaaccggcgatctgaagctcctcagaagaactctctctgctataaagagccagaattatcattgcacaactaggtcaggaaggtttctgagaagcatgggaacgggtgatgattcttactttctgcatgacggtgcacaaagcttacttcagtcagaggatcaactgtacaccgcactctggcaccgtcggcgaatactgatgggcaagattttcaggacctggttcgaacagtcaccgatcggcaggaagaagcaggaggaaccttttcaggaaaagatcgtcgtgaagagggaagttaagaaacggcgacaggaattggaatatcaagtgaaggctgagttagaatccatgcctccgaggaaatctttgaggttacaggggcttgcccagagtacaataatcgagattgtgagcgtccaggtgcccgctcaaacccccgccagcccagccaaggacaaagtgttgtcaaccagcgagaacgaaatttcccagaaggtgtctgattccagcgtgaagcggcgacctatcgtcactccaggtgtaaccggcctaaggaaccttggcaatacttgctatatgaatagcgtgttgcaggtgttgtcacatttactcatctttagacagtgctttctgaaactcgacctgaatcagtggttggccatgactgcatcggagaagactaggtcatgcaagcacccccccgtcactgacacggtggtgtaccagatgaatgagtgtcaggaaaaggatactggatttgtctgtagcagacagtcctccctctcatcgggcctgtctgggggggcttcaaaggggcgaaagatggagctgatacagcctaaagagcctacttcacagtacatctcgttatgtcatgagttgcacactctgtttcaggtgatgtggtccggcaaatgggcgctggtgagtccattcgccatgttacactccgtgtggaggctaattcctgctttccgcggctacgcacaacaggatgctcaggagttcctttgcgaactgttggacaaaatccaacgagagctcgaaactacaggaacctccctacctgccctgatacctacgtcccaaagaaagctcatcaagcaggtgctgaacgttgtcaacaacatattccatggtcagcttctatcacaggtgacctgcctcgcttgtgacaacaaaagtaacaccatagaaccattctgggacctgtcactggagtttccagagaggtaccagtgttccggcaaagatatagcctcacaaccctgcctggtgacagagatgctggctaagttcacagaaaccgaagctcttgaagggaagatctacgtttgtgaccaatgcaattccaaacgtcgacgcttctccagtaagcccgtggtgctcacagaagctcagaagcaactgatgatctgccaccttcctcaagtactgcgactgcacctcaagcgctttcgttggagtggccggaataatcgagaaaagattggggttcacgtgggcttcgaagagattcttaatatggagccttactgttgtcgtgagaccctgaagtccttgcgacctgagtgcttcatctacgacctgtccgccgtggtgatgcaccatggcaagggcttcgggagcggccactacacggcttattgttataactccgagggaggattctgggtgcactgtaacgactcgaaactgagcatgtgcacaatggacgaagtttgtaaggcccaggcctacatacttttttatacacagagagtaaccgagaatgggcattcaaagctgctgccaccagagctcctcctcgggagccagcatcctaatgaggatgctgatacttccagcaacgaaatcctcagctag

SEQ ID NO: 98266 - DNA, 2139 bp, Artificial Sequence
  derived and/or modified sequence
atgctggccatggacacctgcaagcacgtgggccagctgcagctggcccaagatcacagctctttgaacccacagaaatggcattgtgttgactgcaacaccaccgagagtatctgggcctgcctgtcatgttcccacgtggcatgtggtaggtacattgaagagcacgccctgaagcatttccaggagagttcccacccagtcgcactagaagtgaacgagatgtatgtcttttgctacttatgtgacgactatgtgctcaacgataacacaaccggcgatttaaaactgctccgtcgcaccctgtctgctatcaaaagccaaaattatcactgcacaacacgcagcggccggttcctgcgctccatgggaacgggagatgactcctactttctccatgacggagctcagagcttgctgcagagcgaagatcaactctatacagcactgtggcaccgccgacgtatcctaatgggaaagatattccgcacatggtttgaacaatccccgatcgggcggaaaaagcaggaggagccattccaagaaaagatcgtggtcaagagagaggtgaagaagcgaagacaggaactagagtaccaggtgaaagccgagttagagtccatgccccccaggaagagtctgagactgcagggcctcgctcaaagtacaattattgaaattgtgtccgtccaagtgccagcgcaaacaccagctagcccggccaaagataaggtgctgtcaactagcgagaacgaaattagtcagaaggtgagcgattccagcgtgaagcgcaggcctatagtcacccctggagtgacagggttgcggaatctgggtaatacatgttacatgaatagcgtactgcaggtactgtctcacctgctgatttttcgccagtgcttcttaaagttggaccttaatcagtggctagctatgacagcatctgaaaagactcgttcatgcaagcatccccctgttacggacactgtggtttatcagatgaatgaatgtcaggagaaagacactgggttcgtatgctccaggcaaagttccctcagttcgggactttccggaggtgctagtaaaggcagaaagatggagttaatccaaccgaaggaaccaaccagtcagtacatcagtctatgtcacgagttgcataccctgtttcaagtgatgtggagcgggaaatgggcgctggtcagtcctttcgccatgctgcacagtgtgtggagactgattccagctttccgcggctacgctcagcaggatgcccaggagttcctgtgtgagctgctagataagattcagagagagcttgaaacaactggaacatccctgccagcattgatccccacatcccagcgcaaacttatcaagcaggttttgaatgttgtgaacaatatatttcacggacagttactatcacaggttacttgtctggcctgcgacaacaaaagtaacactatcgagccattctgggatctctcattggagtttcccgaacgctaccagtgttctggaaaggacattgcttcgcagccctgcctggtgaccgagatgctggccaaatttactgagacagaggctctggaaggcaagatatacgtgtgtgatcagtgtaacagtaagcgccggcgcttttcctcaaaaccagttgtgctaaccgaagcccagaaacagctgatgatctgccacctaccccaggtgctgagactccaccttaaacggtttcgctggagcggcagaaataaccgagagaaaattggtgtccacgtggggtttgaggagatcctgaacatggaaccctattgctgcagggagaccctgaaatccttgcggcccgaatgcttcatttacgacctctctgccgttgtgatgcatcacggcaaagggttcggctctggccattataccgcttactgttacaatagcgagggaggtttctgggtgcactgtaatgattccaagcttagcatgtgcacaatggacgaggtttgtaaggcacaggcttacatcctgttctacactcagcgagtcaccgagaacggccactcaaagttactgccacccgagctgctgcttggctctcagcaccctaatgaagacgcagacacctcttcaaatgagattctttcatag

SEQ ID NO: 98267 - DNA, 2139 bp, Artificial Sequence
  derived and/or modified sequence
atgctggccatggacacctgcaagcacgtgggccagctgcagctggcccaggaccactcgagcctgaaccctcaaaagtggcattgcgttgactgtaataccaccgagagcatttgggcctgtttatcatgcagccatgtggcatgtggcaggtatattgaggaacacgcactcaaacactttcaggagtcctctcacccagtggcactcgaggtgaatgagatgtatgttttttgctacctgtgcgatgattatgtgctgaacgataacactacaggtgacctgaaactgctccgaaggacactgagcgctatcaaaagccagaactatcactgcactacaaggtctggcaggttcttgcgatcaatgggcacaggggatgattcatactttctgcatgatggggcccagtctttgttgcaaagcgaggatcaactgtacactgctctgtggcacagaagaaggattctgatgggaaaaattttccgaacttggttcgagcagtcaccgattgggaggaaaaaacaggaagagccgtttcaggaaaagatagtcgtgaaacgtgaggtgaaaaagaggcgccaagagctggagtatcaggtcaaagcggagctggagagtatgcctccacgcaaaagcctgcggcttcagggcctcgctcagagcactatcattgagatcgtgtctgtacaagtgccagctcagaccccagcttcaccggccaaggataaagtcttatcaacaagcgaaaatgaaatctcccaaaaggtctctgacagttcagttaagagacgtccaattgtaacccccggtgtgaccggactccggaacctcgggaacacttgctatatgaactcagttcttcaggtgttaagtcacctactcatttttagacagtgcttcctaaagctcgatcttaatcagtggctcgcaatgactgctagtgagaaaactagaagctgcaagcatcctccagtaacagatacagtggtttatcagatgaacgaatgtcaggagaaggatactggatttgtgtgttcaagacaaagtagcctgtcaagtgggctgagcggtggcgcttcaaagggaaggaaaatggagcttatccagcctaaggagccaacgtcacaatacatctcattgtgtcacgaactgcataccctgtttcaggtgatgtggtccggcaagtgggcactggtttccccattcgcaatgttacattccgtgtggcgtctgattcctgcgttccggggttatgcacagcaagacgcccaggagttcttgtgcgaactgttggacaagatccaacgcgaactcgagaccaccggcacttccctgcccgccttgatccctacaagccagcggaaactgattaagcaagtgctgaacgtggtgaacaacatctttcacggccagcttctgtctcaggtgacgtgtctcgcttgtgacaacaagagcaacactatcgagccattttgggatttaagcctcgagttccccgagagataccagtgttcgggcaaagatatagcctcccagccttgtcttgtcaccgagatgctcgcaaagtttacagaaaccgaggccctcgagggcaaaatttacgtttgcgaccagtgtaactccaagaggcggcgtttctcctctaaacctgttgtgttgacagaggctcagaagcagctaatgatatgccatcttccccaagttctgaggctgcacttaaaaaggtttaggtggtccggccgcaacaaccgcgaaaaaatcggagtgcacgttggattcgaagaaattctcaacatggaaccgtattgctgccgcgaaacactcaagagcctgcggcctgagtgctttatctacgacctgtctgccgtggttatgcaccatggtaaaggattcgggtctggccattatactgcctattgctacaattccgagggaggcttctgggtacattgcaatgatagcaaactcagcatgtgtacgatggatgaggtatgtaaggctcaagcgtatatcctgttttacactcagcgtgtgacagagaacggccattcaaaattactccccccggaactcctgctcggttcccagcaccccaacgaggatgccgacacatccagcaatgagatcctctcatag

SEQ ID NO: 98268 - DNA, 2139 bp, Artificial Sequence
  derived and/or modified sequence
atgctggcaatggatacttgcaaacacgttggacagctgcaattggcccaggaccatagctccctcaatccacagaagtggcattgcgtggattgtaacacaacggaaagtatatgggcttgtctctcctgttcccacgtggcgtgtgggaggtatatcgaggagcacgcactcaagcatttccaggaatcgagccaccccgtggccctggaggttaacgagatgtatgtcttctgttacctctgtgacgactacgtccttaacgataatacaactggtgatctgaaattactccggaggactctgagtgccataaaaagtcagaactaccactgcaccactagatccggaaggttcctgcggtccatgggcacaggggatgacagttattttctccacgacggtgcacagtccttgcttcaaagcgaggatcagctctatacagcactctggcatcgcagacggattctgatgggcaaaattttcaggacgtggttcgagcagtcccctattggcagaaagaaacaagaagagcccttccaggaaaaaattgtggtcaaacgggaggttaagaaacgcagacaggaactggaatatcaggtgaaagcagagctggagtctatgccacccagaaaatcccttcggttgcagggtttagcacaaagcactatcatagagatcgtgtctgttcaggttcccgcacagacacctgcctcccctgccaaggacaaggtgctgtcaaccagtgagaatgaaatttcccaaaaggtgtcagatagctcagtcaagaggcgtccaatcgtcacacccggagtgaccggcctgcggaatctgggcaatacttgctacatgaattctgttctccaggtgttgagccacttgttgatcttcaggcagtgtttccttaaactagatttgaatcagtggctggccatgacagcctctgagaagacgaggtcttgcaagcacccccctgtcacagatactgtggtgtatcagatgaatgagtgccaagagaaggacacaggatttgtctgtagtaggcagtcttccctgagctctggtctaagtggcggagccagcaagggcagaaagatggagcttattcagcccaaggaacctacctcacaatacataagcctctgtcatgaacttcataccctgttccaggtcatgtggtcagggaaatgggcgctggtgtccccctttgccatgctgcactctgtctggcggttaatacctgccttccggggatacgcccagcaggacgcccaggagttcctgtgcgagctgctggataagatccaacgggaactggagaccactggcactagcctccctgccctcatacccacctcccaacggaaactgataaagcaggtcttaaacgtggtcaataacatttttcacggtcagctgctgtctcaggtcacctgtttggcctgtgacaacaagagcaacaccatagagccattttgggacctgtccctggagtttcctgaacgttatcagtgctccgggaaggatattgcaagccagccttgcctggtgacagagatgctggccaagtttaccgaaaccgaagcgctggaaggaaagatttacgtctgtgaccagtgcaattcgaagcggaggagattctcgtcgaaacccgtggtgctgacagaagcccagaaacagctcatgatctgtcatctgccccaagttctgcgcctacacctcaaacgctttcgttggtctggacgaaataatagagagaaaatcggggtgcacgtgggatttgaagagatccttaacatggagccatactgttgccgcgagactttgaagtccctccgcccagaatgctttatatacgatctgtctgctgtggtaatgcaccatggcaagggatttggaagcggtcattatacagcatactgctacaacagcgagggcggattctgggtgcactgcaatgactccaaacttagtatgtgcacaatggatgaggtgtgcaaggcccaggcttacatcctgttctacacccagagagtaacagaaaacggccactccaaactgctcccaccagaactgctgctaggctctcagcaccctaatgaagacgcagacactagctctaatgagatcctctcgtag

SEQ ID NO: 98269 - DNA, 2139 bp, Artificial Sequence
  derived and/or modified sequence
atgttagctatggatacctgtaaacacgttggccagctgcaattggctcaggatcattccagtctcaatccccaaaagtggcactgtgtcgactgtaatactaccgaaagcatctgggcctgcctgagctgcagccacgtcgcctgcggaagatacatcgaggagcacgctctgaagcatttccaggagagctcacatcccgttgctctggaggtgaacgaaatgtatgttttttgctatctgtgcgatgactacgtcctcaatgataacactaccggggacctcaaattgctgcgaagaaccctgtcggccataaagtctcaaaattaccattgcacgacccgcagtggtcgatttctcaggtcaatgggcactggagacgactcctactttctgcacgacggcgcacagagtttactgcaatccgaggaccaactatataccgctttgtggcaccgacgcaggattttgatgggcaagatttttaggacatggttcgagcagtcccccataggaaggaagaagcaggaagagccattccaggaaaagatcgtcgtaaagcgagaggtgaagaaacggcgtcaggagctggagtatcaggtcaaagcggagctcgaatctatgcctcccaggaagtccctgaggttgcaaggccttgctcagtcaaccatcatcgaaattgtctccgtccaggtacctgctcagacccccgcttctccagcaaaagacaaggtcctctccacgagcgagaacgagatatctcagaaggtatctgattcgagtgtcaaaaggcgccctattgttaccccaggggtcactggtctgcgcaatttggggaatacgtgctatatgaattcggtgctacaggttctgtctcacctcctcatcttccgccagtgctttttaaagctggatctaaatcagtggctggccatgacggcaagtgaaaaaaccagaagttgcaaacacccgcctgtgaccgatactgtcgtgtaccagatgaatgaatgccaagaaaaagacaccggtttcgtgtgctccagacaatcctccctgtcttccggacttagcggtggcgcatccaaaggcagaaagatggaactgatccagcctaaggagcctaccagccaatacatctcactgtgccacgagctccacacgcttttccaggtgatgtggtctggcaaatgggcactcgtgtcacctttcgctatgctgcactcagtttggaggttgattccagcttttcgcggttacgctcagcaggatgcccaggagtttctctgtgagttgcttgataagatccagagagagctggagaccacaggtacctcactccccgcactgatccccacgagccagaggaagctcatcaaacaagtgttgaacgtggtcaataacatttttcatgggcagcttctctcgcaggtgacttgtttagcatgtgacaataagagcaacactattgagcctttctgggatctgtccctcgagtttccggagaggtatcagtgtagcggcaaggatattgctagccagccatgtcttgtcacggaaatgttggccaagttcaccgagactgaagctctggagggcaaaatctacgtgtgcgaccagtgtaatagcaagagacggcgtttctcctcgaaacccgtagtgcttactgaggcacagaaacagctgatgatctgccatctgccccaggttcttcggctgcacctgaaacgctttcgttggtctggaaggaataatcgagaaaagatcggcgtacacgtaggtttcgaagaaatcctgaacatggagccctactgctgtagggaaacactcaagagcctccgacctgagtgcttcatttacgatctgtccgccgttgtgatgcaccatggtaaggggttcggtagcggccactatactgcgtactgttataattcggagggcggattttgggtgcactgtaacgattctaagttgagtatgtgcactatggatgaagtgtgtaaagcacaggcatacattttgttctacacacaaagggttacggaaaacggacactccaagctgctccccccagagcttcttctgggatcacagcatcccaacgaggacgcagacacctccagtaatgagatactgtcctag

SEQ ID NO: 98270 - DNA, 2139 bp, Artificial Sequence
  derived and/or modified sequence
atgttagcgatggacacctgtaagcacgtgggtcagttgcaactcgcacaggaccactccagtctgaacccacaaaaatggcattgcgtggactgtaataccactgaatccatttgggcttgcctgtcctgcagccatgtggcttgtggcagatatattgaagagcatgccctaaagcattttcaggaatcctcgcatcccgtggctctggaagtcaacgagatgtacgttttttgttacctctgtgacgactatgtgctcaacgataataccaccggagacctcaaattactgcgtcgtactctttcagccatcaagagccagaactatcactgcacaaccaggtccggaaggtttcttaggtctatgggtacaggcgatgactcatactttctgcatgacggagcacagtccctcctgcagtcagaggaccagttgtatactgccttatggcaccgtcgtcgcatcctgatgggcaagatattccgaacgtggtttgaacagagtcccattggacgtaagaaacaagaggaaccattccaggagaaaatagtggtgaaaagggaggtgaagaagagaagacaggaactggagtatcaagtcaaagcagagcttgagtccatgcctccacggaagtcactccggctgcagggtctcgctcagagtaccataatagagattgtgtccgtgcaggtacccgctcagacacccgcatcaccagcgaaggacaaggtcctctcgacgtccgagaatgagatttcccagaaagtgtccgatagctctgtgaagaggcgtcctatcgttacaccaggcgtgacgggtttgcgcaacttgggcaatacttgctatatgaatagcgttctacaggtgctttcccacctgttgatctttaggcagtgcttcctgaagctcgacttgaatcagtggttggccatgacagcgagcgaaaagacccggtcgtgcaagcaccctccggtcacggacaccgtggtgtatcagatgaacgagtgccaagagaaagacacaggctttgtgtgctctagacagtccagcctttcaagcggactgtctgggggagcttccaaagggcgaaaaatggagcttatccagcccaaggagccgaccagccagtacatctctttatgccatgaactccatacactgtttcaagttatgtggtccggtaagtgggccctggtttctcccttcgccatgttacattccgtgtggcgtcttattcccgcattcagaggttacgcccagcaggacgctcaggagttcctttgtgagctgctcgacaagatccagcgggaactggagactacgggcactagcctgcctgcgttaatcccaacctcccagcggaagctgatcaaacaggtgctaaatgttgtaaacaacatctttcatggccagctgttgagtcaagtcacttgcctggcctgcgataataagagcaatactatcgaaccgttctgggacttatccctcgaattccctgagaggtatcagtgcagcgggaaggacatcgcgtcacagccgtgccttgttactgagatgctggcaaagttcacggagactgaggctctggagggcaagatttacgtgtgcgaccagtgtaactccaagcggagaaggttcagctccaaacctgtcgtactgactgaagcgcaaaagcagctaatgatctgtcacctcccgcaggttttaaggcttcacttgaaaagatttcgctggtcaggcagaaacaacagggagaaaattggcgtgcacgttgggttcgaagagattttaaatatggaaccttactgttgtagagaaacactgaagagccttaggcccgaatgttttatttacgatctgtcagcagtggtgatgcaccacggtaagggcttcgggtcaggtcactacaccgcatactgctataacagcgagggtggtttttgggtacattgtaacgactccaaactgtctatgtgtaccatggatgaggtatgcaaggcccaggcctatatcctgttctacacccagagagttactgagaatggacactctaagctgctgccccctgagctgctgctgggaagtcagcatcccaacgaggatgccgatacctcttctaacgagattctaagttag

SEQ ID NO: 98271 - DNA, 4022 bp, Artificial Sequence
  derived and/or modified sequence
gacttcaggaaagcagtttccaggaggtgagagtttaagccaaacctgaaagaggttgatttgtaatgatttgcaggggggcactggaggcagccgccaggacttttcacttaggagatcagcatttgccctgatggaaactgggcgatcctgcagggactgacctctgagttatccaaaggccgacctggggaaagactgattttgaggttttaatagttttcagatgcttcaagtgttgtgaacagagacttgtttggattatgcatttctcagctagactaaataaatgctagcaatggatacgtgcaaacatgttgggcagctgcagcttgctcaagaccattccagcctcaaccctcagaaatggcactgtgtggactgcaacacgaccgagtccatttgggcttgccttagctgctcccatgttgcctgtggaagatatattgaagagcatgcactcaagcactttcaagaaagcagtcatcctgttgcattggaggtgaatgagatgtacgttttttgttacctttgtgatgattatgttctgaatgataacacaactggagacctgaagttactacgacgtacattaagtgccatcaaaagtcaaaattatcactgcacaactcgtagtgggaggtttttacggtccatgggtacaggtgatgattcttatttcttacatgacggtgcccaatctctgcttcaaagtgaagatcaactgtatactgctctttggcacaggagaaggatactaatgggtaaaatctttcgaacatggtttgaacaatcacccattggaagaaaaaagcaagaagaaccatttcaggaaaaaatagtagtaaaaagagaagtaaagaaaagacggcaggaattggagtatcaagttaaagcagaattggaaagtatgcctccaagaaagagtttacgtttacaagggctcgctcagtcgaccataatagaaatagtttctgttcaggtgccagcacaaacgccagcatcaccagcaaaagataaagtactctctacctcagaaaatgaaatatctcaaaaagtcagtgactcctcagttaaacgaaggccaatagtaactcctggtgtaacaggattgagaaatttgggaaatacttgctatatgaattctgttcttcaggtgttgagtcatttacttatttttcgacaatgttttttaaagcttgatctgaaccaatggctggctatgactgctagcgagaagacaagatcttgtaagcatccaccagtcacagatacagtagtatatcaaatgaatgaatgtcaggaaaaagatacaggttttgtttgctccagacaatcaagtctgtcatcaggactaagtggtggagcatcaaaaggtagaaagatggaacttattcagccaaaggagccaacttcacagtacatttctctttgtcatgaattgcatactttgttccaagtcatgtggtctggaaagtgggcgttggtctcaccatttgctatgctacactcagtgtggagactcattcctgcctttcgtggttacgcccaacaagacgctcaggaatttctttgtgaacttttagataaaatacaacgtgaattagagacaactggtaccagtttaccagctcttatccccacttctcaaaggaaactcatcaaacaagttctgaatgttgtaaataacatttttcatggacaacttcttagtcaggttacatgtcttgcatgtgacaacaaatcaaataccatagaacctttctgggacttgtcattggagtttccagaaaggtatcaatgcagtggaaaagatattgcttcccagccatgtctggttactgaaatgttggccaaatttacagaaactgaagctttagaaggaaaaatctacgtatgtgaccagtgtaactcaaagcgtagaaggttttcctccaaaccagttgtactcacagaagcccagaaacaacttatgatatgccacctacctcaggttctcagactgcacctcaaacgattcaggtggtcaggacgtaataaccgagagaagattggtgttcatgttggctttgaggaaatcttaaacatggagccctattgctgcagggagaccctgaaatccctcagaccagaatgctttatctatgacttgtccgcggtggtgatgcaccatgggaaaggatttggctcagggcactacactgcctactgctataattctgaaggagggttctgggtacactgcaatgattccaaactaagcatgtgcactatggatgaagtatgcaaggctcaagcttatatcttgttttatacccaacgagttactgagaatggacattctaaacttttgcctccagagctcctgttggggagccaacatcccaatgaagacgctgatacctcgtctaatgaaatccttagctgatccaaagacaatggggttttcttcctgtgatttatatatatactttttaaaagactgatgtaccattttaaacttcattttttcttgtgaatcagtgtatactacatttatacattttatatctaacaatttttttttttacaaagtataaatgtatatatcaactgaaggtaactacttttttcatatttggagttttaaacttttggtgtttacctcagactgatgttacctcttttatatttttatgtcttaattggctcggatgatgaacttgtgcaatcttctaccaacaaagttcaagtggcatcattttatatacatgtatctttttcaggtattttctatacaaattcttaatagatggaaaattagactctactttggtcactaatagtctttcatttgtatattgaagttaccttgccccttggagttattgaagtgacatgtcaaggtatcacctaaatattcttcagtcacactcactggtatttctgaggctttgtgtgttaacaggccttgtaattgacattattttggttaatgtaaccccaaaattgctttagtaattgctctttggcatagtcaaactataaatgaaaatggcagctttacaaatagtatatttaagtgaactctggaactatggacatgaaaaaaatgatggctgggatttatgatttttgtctggcagcaaacaggtttgtccagaagtctaataattaagcagtcataaaaagtctgaatttagtaaaccagtgtatgatgttattcaaatagtttaccttgggtatgagttcattttataatgtctgatgacattagatctcttaaaactttatgtattttttttagttcaaaggaatagagtcttgaagagaaaaaattatagggcagaaaagataagtgttcaaaattggcaactggactattattatgtctagcatctcattctaaataactaaagcttgatttactcttgctaggattatgtgactactaggtaggagcctcttaaaacactggccctgagcattaaaaaaaaaaaaaaaaactaaaagctatctatctaaacttgcacaaaaaaaaatacagtgtgagtcactctttttcttcttctgataatctcactgggtttctttaaagtcctgttgctgctaactttatcttatttggagagggtagaatcaactaatctctgtagaccagctatgtatctaagctctgttaaccacaggaagatcatgtatcccttttttataagtgggtttatttgcaggttgaagtcttagtgaaagatagtatcctgtagaatgctgttcaccactagtgatcatctgttaagtacaaacttgaaagaggtctctaccaataaatttttcttaaatttcacaaaacaagtcatctgggttagctgatagtgaggtgcagtgagacttttatcactgaatagacaaatcatttgtgccgaaaatacatctggaatattaaatggctatgtttaaaattgttcataatacctatgcaagttgttacctcaactgttacacacttcttaatacctcattaaaaatttacatggtcaagataa

SEQ ID NO: 98272 - DNA, 3161 bp, Artificial Sequence
  derived and/or modified sequence
gggtcgtcgcggccgccgaaccggggggcggggggccggggtgagcgctaagatggccgccccggctcgggctgttttcagatgcttcaagtgttgtgaacagagacttgtttggattatgcatttctcagctagactaaataaatgctagcaatggatacgtgcaaacatgttgggcagctgcagcttgctcaagaccattccagcctcaaccctcagaaatggcactgtgtggactgcaacacgaccgagtccatttgggcttgccttagctgctcccatgttgcctgtggaagatatattgaagagcatgcactcaagcactttcaagaaagcagtcatcctgttgcattggaggtgaatgagatgtacgttttttgttacctttgtgatgattatgttctgaatgataacacaactggagacctgaagttactacgacgtacattaagtgccatcaaaagtcaaaattatcactgcacaactcgtagtgggaggtttttacggtccatgggtacaggtgatgattcttatttcttacatgacggtgcccaatctctgcttcaaagtgaagatcaactgtatactgctctttggcacaggagaaggatactaatgggtaaaatctttcgaacatggtttgaacaatcacccattggaagaaaaaagcaagaagaaccatttcaggaaaaaatagtagtaaaaagagaagtaaagaaaagacggcaggaattggagtatcaagttaaagcagaattggaaagtatgcctccaagaaagagtttacgtttacaagggctcgctcagtcgaccataatagaaatagtttctgttcaggtgccagcacaaacgccagcatcaccagcaaaagataaagtactctctacctcagaaaatgaaatatctcaaaaagtcagtgactcctcagttaaacgaaggccaatagtaactcctggtgtaacaggattgagaaatttgggaaatacttgctatatgaattctgttcttcaggtgttgagtcatttacttatttttcgacaatgttttttaaagcttgatctgaaccaatggctggctatgactgctagcgagaagacaagatcttgtaagcatccaccagtcacagatacagtagtatatcaaatgaatgaatgtcaggaaaaagatacaggttttgtttgctccagacaatcaagtctgtcatcaggactaagtggtggagcatcaaaaggtagaaagatggaacttattcagccaaaggagccaacttcacagtacatttctctttgtcatgaattgcatactttgttccaagtcatgtggtctggaaagtgggcgttggtctcaccatttgctatgctacactcagtgtggagactcattcctgcctttcgtggttacgcccaacaagacgctcaggaatttctttgtgaacttttagataaaatacaacgtgaattagagacaactggtaccagtttaccagctcttatccccacttctcaaaggaaactcatcaaacaagttctgaatgttgtaaataacatttttcatggacaacttcttagtcaggttacatgtcttgcatgtgacaacaaatcaaataccatagaacctttctgggacttgtcattggagtttccagaaaggtatcaatgcagtggaaaagatattgcttcccagccatgtctggttactgaaatgttggccaaatttacagaaactgaagctttagaaggaaaaatctacgtatgtgaccagtgtaactcaaagcgtagaaggttttcctccaaaccagttgtactcacagaagcccagaaacaacttatgatatgccacctacctcaggttctcagactgcacctcaaacgattcaggtggtcaggacgtaataaccgagagaagattggtgttcatgttggctttgaggaaatcttaaacatggagccctattgctgcagggagaccctgaaatccctcagaccagaatgctttatctatgacttgtccgcggtggtgatgcaccatgggaaaggatttggctcagggcactacactgcctactgctataattctgaaggagggttctgggtacactgcaatgattccaaactaagcatgtgcactatggatgaagtatgcaaggctcaagcttatatcttgttttatacccaacgagttactgagaatggacattctaaacttttgcctccagagctcctgttggggagccaacatcccaatgaagacgctgatacctcgtctaatgaaatccttagctgatccaaagacaatggggttttcttcctgtgatttatatatatactttttaaaagactgatgtaccattttaaacttcattttttcttgtgaatcagtgtatactacatttatacattttatatctaacaatttttttttttacaaagtataaatgtatatatcaactgaaggtaactacttttttcatatttggagttttaaacttttggtgtttacctcagactgatgttacctcttttatatttttatgtcttaattggctcggatgatgaacttgtgcaatcttctaccaacaaagttcaagtggcatcattttatatacatgtatctttttcaggtattttctatacaaattcttaatagatggaaaattagactctactttggtcactaatagtctttcatttgtatattgaagttaccttgccccttggagttattgaagtgacatgtcaaggtatcacctaaatattcttcagtcacactcactggtatttctgaggctttgtgtgttaacaggccttgtaattgacattattttggttaatgtaaccccaaaattgctttagtaattgctctttggcatagtcaaactataaatgaaaatggcagctttacaaatagtatatttaagtgaactctggaactatggacatgaaaaaaatgatggctgggatttatgatttttgtctggcagcaaacaggtttgtccagaagtctaataattaagcagtcataaaaagtctgaatttagtaaaccagtgtatgatgttattcaaatagtttaccttgggtatgagttcattttataatgtctgatgacattagatctcttaaaactttatgtattttttttagttcaaaggaatagagtcttg

SEQ ID NO: 98273 - DNA, 2499 bp, Artificial Sequence
  derived and/or modified sequence
gattaccgcgaggtgatgctcgaagccccggggcacttcgggagggcggttgtggcactcggttgaggaggaatgcgcttcccggcgtcttgcccgccttctctccatcgatcggtccccgcgctgccggcacctgctgccgcttaaagcttgaaaatcagcttcctaaagccattcccgatggccttcgatgggaaagaatgccatatggctgaattcattatgggggataagaaatatgtcagtgtgcgcggaggggaacctgttaatacgttcaaatttaagagtagttttcagatgcttcaagtgttgtgaacagagacttgtttggattatgcatttctcagctagactaaataaatgctagcaatggatacgtgcaaacatgttgggcagctgcagcttgctcaagaccattccagcctcaaccctcagaaatggcactgtgtggactgcaacacgaccgagtccatttgggcttgccttagctgctcccatgttgcctgtggaagatatattgaagagcatgcactcaagcactttcaagaaagcagtcatcctgttgcattggaggtgaatgagatgtacgttttttgttacctttgtgatgattatgttctgaatgataacacaactggagacctgaagttactacgacgtacattaagtgccatcaaaagtcaaaattatcactgcacaactcgtagtgggaggtttttacggtccatgggtacaggtgatgattcttatttcttacatgacggtgcccaatctctgcttcaaagtgaagatcaactgtatactgctctttggcacaggagaaggatactaatgggtaaaatctttcgaacatggtttgaacaatcacccattggaagaaaaaagcaagaagaaccatttcaggaaaaaatagtagtaaaaagagaagtaaagaaaagacggcaggaattggagtatcaagttaaagcagaattggaaagtatgcctccaagaaagagtttacgtttacaagggctcgctcagtcgaccataatagaaatagtttctgttcaggtgccagcacaaacgccagcatcaccagcaaaagataaagtactctctacctcagaaaatgaaatatctcaaaaagtcagtgactcctcagttaaacgaaggccaatagtaactcctggtgtaacaggattgagaaatttgggaaatacttgctatatgaattctgttcttcaggtgttgagtcatttacttatttttcgacaatgttttttaaagcttgatctgaaccaatggctggctatgactgctagcgagaagacaagatcttgtaagcatccaccagtcacagatacagtagtatatcaaatgaatgaatgtcaggaaaaagatacaggttttgtttgctccagacaatcaagtctgtcatcaggactaagtggtggagcatcaaaaggtagaaagatggaacttattcagccaaaggagccaacttcacagtacatttctctttgtcatgaattgcatactttgttccaagtcatgtggtctggaaagtgggcgttggtctcaccatttgctatgctacactcagtgtggagactcattcctgcctttcgtggttacgcccaacaagacgctcaggaatttctttgtgaacttttagataaaatacaacgtgaattagagacaactggtaccagtttaccagctcttatccccacttctcaaaggaaactcatcaaacaagttctgaatgttgtaaataacatttttcatggacaacttcttagtcaggttacatgtcttgcatgtgacaacaaatcaaataccatagaacctttctgggacttgtcattggagtttccagaaaggtatcaatgcagtggaaaagatattgcttcccagccatgtctggttactgaaatgttggccaaatttacagaaactgaagctttagaaggaaaaatctacgtatgtgaccagtgtaactcaaagcgtagaaggttttcctccaaaccagttgtactcacagaagcccagaaacaacttatgatatgccacctacctcaggttctcagactgcacctcaaacgattcaggtggtcaggacgtaataaccgagagaagattggtgttcatgttggctttgaggaaatcttaaacatggagccctattgctgcagggagaccctgaaatccctcagaccagaatgctttatctatgacttgtccgcggtggtgatgcaccatgggaaaggatttggctcagggcactacactgcctactgctataattctgaaggagggttctgggtacactgcaatgattccaaactaagcatgtgcactatggatgaagtatgcaaggctcaagcttatatcttgttttatacccaacgagttactgagaatggacattctaaacttttgcctccagagctcctgttggggagccaacatcccaatgaagacgctgatacctcgtctaatgaaatccttagctga

SEQ ID NO: 98274 - protein, 634 aa, Artificial Sequence
  derived and/or modified sequence
MTPILTVLICLGLSLGPRTHVQAGHLPKPTLWAEPGSVITQGSPVTLRCQGGQETQEYRLYREKKTALWITRIPQELVKKGQFPIPSITWEHAGRYRCYYGSDTAGRSESSDPLELVVTGAYIKPTLSAQPSPVVNSGGNVILQCDSQVAFDGFSLCKEGEDEHPQCLNSQPHARGSSRAIFSVGPVSPSRRWWYRCYAYDSNSPYEWSLPSDLLELLVLGVSKKPSLSVQPGPIVAPEETLTLQCGSDAGYNRFVLYKDGERDFLQLAGAQPQAGLSQANFTLGPVSRSYGGQYRCYGAHNLSSEWSAPSDPLDILIAGQFYDRVSLSVQPGPTVASGENVTLLCQSQGWMQTFLLTKEGAADDPWRLRSTYQSQKYQAEFPMGPVTSAHAGTYRCYGSQSSKPYLLTHPSDPLELVVSAGPEDQPLTPTGSDPQSGLGRHLGVVIGILVAVILLLLLLLLLFLILRHRRQGKHWTSTQRKADFQHPAGAVGPEPTDRGLQWRSSPAADAQEENLYAAVKHTQPEDGVEMDTRSPHDEDPQAVTYAEVKHSRPRREMASPPSPLSGEFLDTKDRQAEEDRQMDTEAAASEAPQDVTYAQLHSLTLRREATEPPPSQEGPSPAVPSIYATLAIH

SEQ ID NO: 98275 - DNA, 1905 bp, Artificial Sequence
  derived and/or modified sequence
atgaccccaatccttacagtgcttatttgcctcggcctgtccttaggacctaggacacatgtccaggcgggtcatctgcccaaacctaccctgtgggcagaaccaggctccgttataacacaagggtctcctgtcactctacggtgtcagggcggacaagagacccaggaatacaggctgtacagggagaagaagaccgcactgtggatcacaaggataccacaggagttggtcaaaaagggacagtttccaattccaagcataacgtgggagcacgctggtcgatacaggtgttactatggcagcgatacagccggtcggagcgaatcctcagacccattagaactggtggtgactggcgcctatatcaagccaacactcagtgcccaacccagtccagttgtgaactcaggcggtaacgtcattctgcagtgcgactcgcaggttgcatttgacggattcagcctgtgcaaagaaggggaagatgagcatcctcagtgcttgaacagccagccccatgcacgcggctcgagtcgcgctatcttttctgtcgggccagttagcccctcacgcaggtggtggtaccggtgctacgcatatgatagcaatagtccctatgaatggtcattaccatcagatctgctagagctcctcgttctgggtgtctctaaaaagccttccctgtctgtgcaacccggaccaatcgtggcacccgaggaaaccctaaccttgcagtgtggcagtgacgcgggctacaatcggttcgtgctgtacaaggatggagaacgcgacttcctgcagctggccggagctcagcctcaagccgggcttagccaggccaactttaccctgggtccagtttctcgcagctatggaggacaatataggtgctacggtgcccacaatctttcctcagaatggtccgcgccttctgaccctctggacatacttatcgccgggcagttttacgatcgtgtgagtctgtccgtccagcccggcccaacagtcgccagcggtgagaacgtgacactgctatgccagtcacagggatggatgcagacctttttattgacaaaagagggcgccgccgacgacccttggcgactgaggagcacttatcagtcccaaaaataccaagcagagttccccatgggccctgttacatcagctcacgcagggacatacaggtgttatggcagccagtcctccaaaccatatctgttaacacacccatccgacccgttagagttggtggtatctgctggccccgaggatcaaccactgacaccaaccggcagcgatccccagagcggcctgggaagacacctgggagtagtgatcggcatcctagttgcagtcattctcctgctgttactgctgctgctcctctttctgatcttgcgacatcggcgacagggaaaacattggaccagcacacagcggaaggctgacttccagcaccccgccggggctgttggccccgaaccaacggatcgaggactacaatggcgcagcagtccggctgctgacgcccaggaggagaatctctacgctgccgtgaaacatacgcagccggaggatggcgtagagatggacacccggtctcctcatgatgaagaccctcaagcagtcacgtacgctgaagtgaaacacagtagacctagaagggaaatggcatctcctcctagccctctgtctggagagttccttgatacaaaagataggcaggcggaagaggacaggcaaatggataccgaggccgctgcatccgaggccccacaggacgtaacatacgcccagctccattctttaactttgcggcgcgaggccactgagccaccgcccagccaggaggggccctccccagccgtcccctctatctatgcgacgttagcaattcattag

SEQ ID NO: 98276 - DNA, 1905 bp, Artificial Sequence
  derived and/or modified sequence
atgacccccatcctgactgtgctgatctgcctgggcctgagcctgggccccaggacccacgtgcaggccggccacctgcccaagcccaccctgtgggccgagcccggcagcgtcatcacccagggcagccctgtgaccctgcgctgccagggcggccaggagacccaggagtaccgcctgtaccgggagaagaagacagccctgtggatcacccgcatcccccaggagctggtgaagaagggccagttccccatccccagcatcacctgggagcacgccggccgctaccgctgctactacggcagtgacacagctggccgctctgagagcagtgaccccctggagctggtggtgactggagcctacatcaagcccaccctgagcgcccagcccagccctgtggtgaacagcggcggcaatgtcatcctgcagtgtgacagccaggtggcctttgatggcttcagcctgtgcaaggagggagaagatgagcacccccagtgcctgaacagccagccccacgcccggggcagcagccgggccatcttctctgtgggccctgtgagccccagccgccgctggtggtaccgctgctacgcctatgacagcaacagcccctatgagtggagcctgcccagcgacctgctggagctgctggtgctgggcgtgtccaagaagcccagcctgtctgtgcagcccggccccatcgtggcccctgaggagaccctgaccctgcagtgtggcagtgatgctggctacaacagatttgtgctgtacaaggatggagagcgggacttcctgcagctggccggggcccagccccaggccggcctgagccaggccaacttcaccctgggccctgtgagccgctcctatggaggccagtaccgctgctacggggcccacaacctgagcagcgagtggagcgcccccagcgaccccctggacatcctgattgctggccagttctatgacagagtgtccctgtctgtgcagcccggccccaccgtggccagcggggagaatgtgaccctgctgtgccagagccagggctggatgcagaccttcctgctgaccaaggagggcgctgctgatgacccctggaggctgcggagcacctaccagagccagaagtaccaggccgagttccccatgggccctgtgaccagcgcccacgccggcacctaccgctgctacggcagccagagcagcaagccctacctgctgacccaccccagcgaccccctggagctggtggtgtctgctggccctgaggaccagcccctgacccccactggaagtgacccccagagcggcctgggccgccacctgggcgtggtgattggcatcctggtggccgtcatcctgctgctgctgctgctgctgctgctcttcctgatcctgcggcaccggcggcagggcaagcactggaccagcacccagaggaaggctgacttccagcaccctgctggagctgtgggccctgagcccacagaccggggcctgcagtggaggagcagccctgctgctgatgcccaggaggagaacctgtatgctgctgtgaagcacacccagccagaagatggagtggagatggacaccaggagcccccatgatgaggacccccaggccgtgacctatgcagaggtgaagcacagccggccccggcgggagatggccagcccccccagccccctgagcggggagttcctggacaccaaggaccggcaggccgaggaggaccggcagatggacacagaagctgctgccagcgaggccccccaggatgtgacctacgcccagctgcacagcctgaccctgcggcgggaggccacagagcccccacccagccaggagggccccagccctgctgtgcccagcatctatgccaccctggccatccactag

SEQ ID NO: 98277 - DNA, 2046 bp, Artificial Sequence
  derived and/or modified sequence
atgacccccatcctcacggtcctgatctgtctcgggctgagtctgggccccaggacccacgtgcaggcagggcacctccccaagcccaccctctgggctgaaccaggctctgtgatcacccaggggagtcctgtgaccctcaggtgtcaggggggccaggagacccaggagtaccgtctatatagagaaaagaaaacagcactctggattacacggatcccacaggagcttgtgaagaagggccagttccccatcccatccatcacctgggaacatgcagggcggtatcgctgttactatggtagcgacactgcaggccgctcagagagcagtgaccccctggagctggtggtgacaggagcctacatcaaacccaccctctcagcccagcccagccccgtggtgaactcaggagggaatgtaatcctccagtgtgactcacaggtggcatttgatggcttcagtctgtgtaaggaaggagaagatgaacacccacaatgcctgaactcccagccccatgcccgtgggtcgtcccgcgccatcttctccgtgggccccgtgagcccgagtcgcaggtggtggtacaggtgctatgcttatgactcgaactctccctatgagtggtctctacccagtgatctcctggagctcctggtcctaggtgtttctaagaagccatcactctcagtgcagccaggtcctatcgtggcccctgaggagaccctgactctgcagtgtggctctgatgctggctacaacagatttgttctgtataaggacggggaacgtgacttccttcagctcgctggcgcacagccccaggctgggctctcccaggccaacttcaccctgggccctgtgagccgctcctacgggggccagtacagatgctacggtgcacacaacctctcctccgagtggtcggcccccagcgaccccctggacatcctgatcgcaggacagttctatgacagagtctccctctcggtgcagccgggccccacggtggcctcaggagagaacgtgaccctgctgtgtcagtcacagggatggatgcaaactttccttctgaccaaggagggggcagctgatgacccatggcgtctaagatcaacgtaccaatctcaaaaataccaggctgaattccccatgggtcctgtgacctcagcccatgcggggacctacaggtgctacggctcacagagctccaaaccctacctgctgactcaccccagtgaccccctggagctcgtggtctcagcaggccctgaggaccagcccctcacccccaccgggtcggatccccagagtggtctgggaaggcacctgggggttgtgatcggcatcttggtggccgtcatcctactgctcctcctcctcctcctcctcttcctcatcctccgacatcgacgtcagggcaaacactggacatcgacccagagaaaggctgatttccaacatcctgcaggggctgtggggccagagcccacagacagaggcctgcagtggaggtccagcccagctgccgatgcccaggaagaaaacctctatgctgccgtgaagcacacacagcctgaggatggggtggagatggacactcggagcccacacgatgaagacccccaggcagtgacgtatgccgaggtgaaacactccagacctaggagagaaatggcctctcctccttccccactgtctggggaattcctggacacaaaggacagacaggcggaagaggacaggcagatggacactgaggctgctgcatctgaagccccccaggatgtgacctacgcccagctgcacagcttgaccctcagacgggaggcaactgagcctcctccatcccaggaagggccctctccagctgtgcccagcatctacgccactctggccatccactagcccagggggggacgcagaccccacactccatggagtctggaatgcatgggagctgcccccccagtggacaccattggaccccacccagcctggatctaccccaggagactctgggaacttttaggggtcactcaattctgc

SEQ ID NO: 98278 - DNA, 1905 bp, Artificial Sequence
  derived and/or modified sequence
atgacccccatcctgaccgtgctgatctgcctgggcctgagcctggggccccggacacatgtgcaggcaggccacctacctaaacctacattgtgggctgaacctggctcagttatcacccaggggtcaccagtcactttaagatgtcagggaggacaggagactcaggaataccgcttatatcgagaaaaaaagaccgcgctttggattactcgcattccgcaggagctggtcaagaaagggcaattcccaataccaagcattacttgggagcatgccgggcgctacaggtgttactacggaagtgacacggctggtagatcagagtccagcgatccactggagctagtggtcacgggggcctatatcaagcccaccctgagcgcccagccttcacctgtagtgaactcaggaggaaatgtcattctgcagtgtgactctcaggtggcctttgatggtttcagtttgtgtaaggagggagaggacgagcatccgcagtgcctgaatagtcaaccgcacgccagagggtcgagccgggccatcttctctgttggaccagtgagtcctagtaggcgttggtggtatagatgctacgcctatgattccaactccccttacgagtggtcattacccagtgacttactggagttgttagtgctgggggtgagcaagaaaccttctctgagcgtgcagcctggcccgattgtggcacccgaggaaaccctcaccctacaatgtggatcagacgccgggtacaaccgtttcgtgctgtataaagatggcgagcgagatttcctacagctggcaggggcgcaaccgcaggccggtctctcccaggctaattttactcttggcccagtctctcgtagctatggagggcagtataggtgttatggtgcacataatctgagtagtgaatggtccgcacccagcgacccgctggatatcctaattgcaggacagttctatgaccgcgtgagcctgagtgtgcaacccgggccgaccgttgcttctggggaaaacgtgacactactctgccagagtcaggggtggatgcagactttcctcctgaccaaggagggagccgcagatgacccctggcggctgagatcaacatatcagtctcaaaaataccaggccgagttccccatgggccccgtgacatccgcccacgcaggtacatatcgctgctacggctcacagtcgagcaagccctacctgctcacccacccctctgatccgctggaactggttgtgagtgctgggcccgaagaccagccacttacaccaacaggctctgatccccagtcggggttaggccgccatcttggtgtagtgattgggatcctggtagccgtcattcttctgctgctcctgttattgctgcttttcctgattctgaggcacaggagacagggcaagcactggaccagcacccagaggaaagccgattttcaacaccctgccggggctgtcggacccgagcccacggaccggggattgcaatggagatcatcccctgccgcggatgcccaggaagagaacctctacgctgcagtaaaacacactcagccggaagacggtgtcgaaatggacacgcggagtccccatgacgaggatcctcaggccgttacctacgcagaagtgaaacattccaggccgcgaagggagatggcgtctccaccaagcccactatctggcgaatttttggacaccaaggaccgacaggccgaagaagaccgtcagatggacaccgaagctgctgcaagtgaggccccgcaggatgtgacctatgcccagctgcactctttgaccctgagacgggaagcaaccgagcctcccccatctcaagagggaccctctcccgctgtgccgagtatttacgcaacgttagctattcactag

SEQ ID NO: 98279 - DNA, 1905 bp, Artificial Sequence
  derived and/or modified sequence
atgacacctatactgactgtgctgatatgtttgggactaagcctgggcccaaggacccatgttcaggccggacacttacctaagcccacattgtgggcggagccgggttcggtgataacccaaggttcccccgtaacccttagatgtcagggaggtcaggagacgcaggaataccgcctgtacagagaaaagaagactgccctgtggatcacacgcattccgcaggagctagtgaagaagggtcaatttccaatcccctcaatcacctgggaacacgccggacgttatcggtgctactatggatccgacacggccggaagaagcgaaagtagcgacccactggagctggtcgtcacgggtgcatatataaagcctacacttagcgcacagccttcccctgtggtgaactcaggcggtaatgtgattctgcagtgtgattcccaggtcgcttttgatggattcagtctgtgtaaagagggagaggacgagcatccccagtgcctcaatagccagccccacgccagagggagctcccgtgccatcttcagtgtaggacccgtctcaccctctcgcagatggtggtatcgatgttacgcttacgacagtaacagcccctacgagtggtcactaccatctgatctgctggagctccttgtcctcggagtgtccaagaagcccagtctgagtgttcaacccggaccaatcgttgctccggaagagaccctgaccctgcagtgcggctccgatgccggatataatcgctttgtgctgtacaaagacggtgagcgagattttctgcagctcgcgggtgcccaaccacaggccggtctgagccaggcaaatttcacactcggccctgtctctagatcctatggtggtcagtacagatgctatggcgcacataatctgtcgtcagagtggtcagcccctagtgacccattagacattctcatcgccggacagttctatgatcgagtttctctttctgtgcaaccaggccctacagtggccagcggagagaacgtaacactgctctgtcagtcacagggttggatgcaaactttcctgttgacaaaagagggggcagcagatgatccatggaggcttcgtagcacataccagagccagaagtaccaggcagaatttccaatgggacctgtgacgtccgctcacgcaggcacctaccgctgttatgggtcccagtcttctaagccttacctgctgactcatccatccgatcctttggagttggtagtgagcgccggaccagaggaccaacctctcaccccgacgggctccgatccccagtcagggttggggcgtcatctcggcgtggtcatcggcatcttggtagcggtgatcctgctgctactgcttttgctgctgctgttcctcattctgcggcaccgcaggcagggcaaacactggaccagtactcaacgaaaggctgactttcagcatcctgccggtgccgtcggcccagagcctacggatcgtggcctgcagtggcgcagttccccggctgctgacgcccaagaggaaaacctgtatgcagctgtcaagcacactcagcccgaagacggggttgaaatggataccaggagtccccacgatgaagaccctcaagctgtgacttacgcagaagtaaagcacagcagaccacggagagagatggccagtcctccctcgcccctgtctggtgaatttttggacaccaaagatcgtcaggccgaggaggatagacagatggatactgaagcagccgcttcagaggcgccacaggacgtcacatacgcacagctgcactctctgactcttaggcgcgaagcaactgaaccacccccatcacaagagggcccttcccctgccgtgcccagtatttacgcaaccctggcaattcattag

SEQ ID NO: 98280 - DNA, 1905 bp, Artificial Sequence
  derived and/or modified sequence
atgacccccatcctgaccgtgctgatctgcctgggcctgagcctgggccccagaacccacgtgcaggccggccacctgcccaagcccaccctgtgggccgagcccggcagcgtgatcacccagggcagccccgtgaccctgagatgccagggcggccaggagacccaggagtacagactgtacagagagaagaagaccgccctgtggatcaccagaatcccccaggagctggtgaagaagggccagttccccatccccagcatcacctgggagcacgccggcagatacagatgctactacggcagcgacaccgccggcagaagcgagagcagcgaccccctggagctggtggtgaccggcgcctacatcaagcccaccctgagcgcccagcccagccccgtggtgaacagcggcggcaacgtgatcctgcagtgcgacagccaggtggccttcgacggcttcagcctgtgcaaggagggcgaggacgagcacccccagtgcctgaacagccagccccacgccagaggcagcagcagagccatcttcagcgtgggccccgtgagccccagcagaagatggtggtacagatgctacgcctacgacagcaacagcccctacgagtggagcctgcccagcgacctgctggagctgctggtgctgggcgtgagcaagaagcccagcctgagcgtgcagcccggccccatcgtggcccccgaggagaccctgaccctgcagtgcggcagcgacgccggctacaacagattcgtgctgtacaaggacggcgagagagacttcctgcagctggccggcgcccagccccaggccggcctgagccaggccaacttcaccctgggccccgtgagcagaagctacggcggccagtacagatgctacggcgcccacaacctgagcagcgagtggagcgcccccagcgaccccctggacatcctgatcgccggccagttctacgacagagtgagcctgagcgtgcagcccggccccaccgtggccagcggcgagaacgtgaccctgctgtgccagagccagggctggatgcagaccttcctgctgaccaaggagggcgccgccgacgacccctggagactgagaagcacctaccagagccagaagtaccaggccgagttccccatgggccccgtgaccagcgcccacgccggcacctacagatgctacggcagccagagcagcaagccctacctgctgacccaccccagcgaccccctggagctggtggtgagcgccggccccgaggaccagcccctgacccccaccggcagcgacccccagagcggcctgggcagacacctgggcgtggtgatcggcatcctggtggccgtgatcctgctgctgctgctgctgctgctgctgttcctgatcctgagacacagaagacagggcaagcactggaccagcacccagagaaaggccgacttccagcaccccgccggcgccgtgggccccgagcccaccgacagaggcctgcagtggagaagcagccccgccgccgacgcccaggaggagaacctgtacgccgccgtgaagcacacccagcccgaggacggcgtggagatggacaccagaagcccccacgacgaggacccccaggccgtgacctacgccgaggtgaagcacagcagacccagaagagagatggccagcccccccagccccctgagcggcgagttcctggacaccaaggacagacaggccgaggaggacagacagatggacaccgaggccgccgccagcgaggccccccaggacgtgacctacgcccagctgcacagcctgaccctgagaagagaggccaccgagcccccccccagccaggagggccccagccccgccgtgcccagcatctacgccaccctggccatccactag

SEQ ID NO: 98281 - protein, 482 aa, Artificial Sequence
  derived and/or modified sequence
MTGAYPKPTLSAQPSPVVTSGGRVTLQCESQVAFGGFILCKEGEEEHPQCLNSQPHARGSSRAIFSVGPVSPNRRWSHRCYGYDLNSPYVWSSPSDLLELLVPGVSKKPSLSVQPGPVVAPGESLTLQCVSDVGYDRFVLYKEGERDLRQLPGRQPQAGLSQANFTLGPVSRSYGGQYRCYGAHNLSSECSAPSDPLDILITGQIRGTPFISVQPGPTVASGENVTLLCQSWRQFHTFLLTKAGAADAPLRLRSIHEYPKYQAEFPMSPVTSAHAGTYRCYGSLNSDPYLLSHPSEPLELVVSGPSMGSSPPPTGPISTPAGPEDQPLTPTGSDPQSGLGRHLGVVIGILVAVVLLLLLLLLLFLILRHRRQGKHWTSTQRKADFQHPAGAVGPEPTDRGLQWRSSPAADAQEENLYAAVKDTQPEDGVEMDTRAAASEAPQDVTYAQLHSLTLRRKATEPPPSQEREPPAEPSIYATLAIH

SEQ ID NO: 98282 - protein, 505 aa, Artificial Sequence
  derived and/or modified sequence
MSYPGYPPPPGGYPPAAPGGGPWGGAAYPPPPSMPPIGLDNVATYAGQFNQDYLSGMAANMSGTFGGANMPNLYPGAPGAGYPPVPPGGFGQPPSAQQPVPPYGMYPPPGGNPPSRMPSYPPYPGAPVPGQPMPPPGQQPPGAYPGQPPVTYPGQPPVPLPGQQQPVPSYPGYPGSGTVTPAVPPTQFGSRGTITDAPGFDPLRDAEVLRKAMKGFGTDEQAIIDCLGSRSNKQRQQILLSFKTAYGKDLIKDLKSELSGNFEKTILALMKTPVLFDIYEIKEAIKGVGTDEACLIEILASRSNEHIRELNRAYKAEFKKTLEEAIRSDTSGHFQRLLISLSQGNRDESTNVDMSLAQRDAQELYAAGENRLGTDESKFNAVLCSRSRAHLVAVFNEYQRMTGRDIEKSICREMSGDLEEGMLAVVKCLKNTPAFFAERLNKAMRGAGTKDRTLIRIMVSRSETDLLDIRSEYKRMYGKSLYHDISGDTSGDYRKILLKICGGND

SEQ ID NO: 98283 - protein, 412 aa, Artificial Sequence
  derived and/or modified sequence
MRGSSTRTISRECWRLWAAPLCPAACSSLWDVSTPRRKPTLQDALISAIPYPGQPPVTYPGQPPVPLPGQQQPVPSYPGYPGSGTVTPAVPPTQFGSRGTITDAPGFDPLRDAEVLRKAMKGFGTDEQAIIDCLGSRSNKQRQQILLSFKTAYGKDLIKDLKSELSGNFEKTILALMKTPVLFDIYEIKEAIKGVGTDEACLIEILASRSNEHIRELNRAYKAEFKKTLEEAIRSDTSGHFQRLLISLSQGNRDESTNVDMSLAQRDAQELYAAGENRLGTDESKFNAVLCSRSRAHLVAVFNEYQRMTGRDIEKSICREMSGDLEEGMLAVVKCLKNTPAFFAERLNKAMRGAGTKDRTLIRIMVSRSETDLLDIRSEYKRMYGKSLYHDISGDTSGDYRKILLKICGGND

SEQ ID NO: 98284 - protein, 472 aa, Artificial Sequence
  derived and/or modified sequence
MPPIGLDNVATYAGQFNQDYLSGMAANMSGTFGGANMPNLYPGAPGAGYPPVPPGGFGQPPSAQQPVPPYGMYPPPGGNPPSRMPSYPPYPGAPVPGQPMPPPGQQPPGAYPGQPPVTYPGQPPVPLPGQQQPVPSYPGYPGSGTVTPAVPPTQFGSRGTITDAPGFDPLRDAEVLRKAMKGFGTDEQAIIDCLGSRSNKQRQQILLSFKTAYGKDLIKDLKSELSGNFEKTILALMKTPVLFDIYEIKEAIKGVGTDEACLIEILASRSNEHIRELNRAYKAEFKKTLEEAIRSDTSGHFQRLLISLSQGNRDESTNVDMSLAQRDAQELYAAGENRLGTDESKFNAVLCSRSRAHLVAVFNEYQRMTGRDIEKSICREMSGDLEEGMLAVVKCLKNTPAFFAERLNKAMRGAGTKDRTLIRIMVSRSETDLLDIRSEYKRMYGKSLYHDISGDTSGDYRKILLKICGGND

SEQ ID NO: 98285 - DNA, 318 bp, Artificial Sequence
  derived and/or modified sequence
atgagcctgaagtcctggcacccccagagcaagaccaagagggtgggcgccagcgagggcaacccccagtggggcagcggctccatggaggcccccctgctgagcagcttcctgccccccctggccagcgaggccgagctgaccggcaacacctggttcctgcaccgctgcagctgcatcctgaacctggaggagagcatggacagcgactggggcgcctggtggggcgtgtccctgccccggcgggcccccttcctgatctacggcagtgatggcccctggtgcacccaggccggcttccctggctggggccactag

SEQ ID NO: 98286 - DNA, 1518 bp, Artificial Sequence
  derived and/or modified sequence
atgtcctatccaggatatcctccccctccaggcggatacccaccagccgcaccaggcggcggcccctggggcggcgccgcttacccccctcccccgtccatgccacctatcggcctggacaacgtggccacttatgccggccagttcaatcaggactacctgagcggaatggccgccaatatgagcggaaccttcgggggggctaacatgcccaacctgtacccaggcgcgccaggggccggctaccctccagtcccccctggggggttcggccagcccccatcagcacagcaaccagtgcccccgtacggaatgtatcccccacccgggggaaaccccccatcaaggatgccaagctatccgccttaccccggggctcccgtgcccggccagcctatgccgcctcctggtcagcagccccctggggcttacccaggtcagccgcctgtgacctacccaggccagcctccagtacccctcccagggcagcaacagcccgtgcccagttatcctggctatccggggtcaggtacggtgacacctgccgtacctcctactcaatttggctcacgaggcacaattaccgacgcccccggattcgatccattgcgagacgccgaggttctcaggaaggccatgaaaggtttcggcaccgatgaacaggcgatcatagattgcctagggagccgaagcaataagcagcgacaacagattctgctttctttcaaaaccgcttatgggaaagacctgatcaaagatctgaaatcagagctatccgggaacttcgagaagacaatcctcgccttgatgaagacgccagtgctgttcgatatatacgaaatcaaggaggctatcaagggggtgggaactgatgaggcatgtctgattgaaattctagctagtagaagcaatgagcacattcgcgagctaaatagagcctacaaggccgaattcaaaaagaccctggaggaggccatccggtccgacaccagcgggcatttccaaaggttactcataagcctgagccagggcaatagagatgagtccactaacgtagatatgagcctggcgcagagagacgctcaggagctctatgcagctggagagaaccgcttaggcacggacgagagcaaattcaatgcagtgttatgctcccgctcgagggcccacctagttgccgtgtttaacgaatatcagaggatgacagggcgtgatatagagaagtctatctgcagggaaatgtcgggggatttggaagagggcatgttagccgtggtgaaatgtcttaaaaacactccggctttttttgccgaacggctgaacaaagctatgcggggcgctgggactaaggacaggaccttaatacgaattatggtgtcaaggagcgaaacagatcttctcgacatccggtctgaatacaagaggatgtacggcaagagtctgtaccacgacatctccggcgatacatccggtgactaccggaagatcctcttaaaaatatgcggcgggaacgattag

SEQ ID NO: 98287 - DNA, 1518 bp, Artificial Sequence
  derived and/or modified sequence
atgtcctatcccggatacccccccccacccggaggataccctcctgcagctcctgggggtggaccctggggaggtgctgcctatcccccacccccgagcatgccacctatagggttggataatgttgccacctatgcagggcagtttaatcaggattatttgtcaggaatggccgctaatatgtcaggtaccttcggaggggcgaatatgcccaacctgtaccctggagccccaggagctggatatccgcccgtgcccccaggaggattcggacaacccccaagtgcccaacaacctgtacccccttacggtatgtatccccctccaggagggaaccctccatcccgaatgccctcctatccaccctacccaggggcgccagtgcccggacaaccgatgccccccccgggtcagcagcctcccggtgcatatcccgggcagcctccagttacgtaccccgggcagccaccagttccactgccaggacagcagcagcccgttccaagttatccggggtaccccggatctggcaccgtcactcccgcagtcccaccaacccagttcggctcaagagggaccatcaccgatgccccaggcttcgacccccttagggatgctgaagttctgagaaaagcgatgaagggcttcggcaccgatgaacaggcgattatcgattgtcttggtagcagatcaaacaagcagcggcaacagattttgttgagctttaaaacggcgtacggtaaggatctcatcaaggatctgaagtctgagctgagcggcaatttcgaaaagacaatattagccctgatgaaaaccccagtccttttcgacatctatgaaattaaggaggccattaagggcgttggtaccgacgaggcctgccttattgagatactggcttctcgaagcaacgagcacatcagggaacttaatagagcctacaaggcagagttcaagaagaccttggaagaggctatacgctcagatactagcggccactttcagcgattgctcataagtctctcacagggaaacagagatgaatctactaatgtggatatgagtttagcgcagcgcgatgcacaggagctctacgccgccggcgagaaccggctcggtacagacgagagcaagttcaatgccgtactctgttcacgaagcagggctcacctggtggcagtgtttaacgagtatcagaggatgaccggtcgggacatcgaaaaaagcatctgtagagaaatgtccggggatcttgaagagggtatgctggcagttgttaaatgcttgaagaatacccctgcctttttcgctgagagactgaacaaggcaatgaggggggctggaactaaggacagaactctcatcaggattatggtcagccgcagcgaaaccgatctgctcgacataaggagtgagtataaaaggatgtatggcaaaagcctttatcacgatatttcgggtgatacatccggggattatcggaaaatcttactgaagatttgtggaggaaacgattag

SEQ ID NO: 98288 - DNA, 489 bp, Artificial Sequence
  derived and/or modified sequence
atgtctttggctcaacgagacgcgcaggaattatacgctgcgggcgaaaaccgccttggaaccgatgagtccaagttcaacgctgtgctttgtagtcgcagtagagcacaccttgtcgcagtgttcaatgagtaccaacgtatgacaggcagagatatcgagaagtcaatatgtagagaaatgagcggcgacctggaagaggggatgctggcagtagtgaagtgcctgaaaaacactcccgccttttttgccgaaagattgaataaagccatgaggggcgctggtacaaaggacagaacattgatcaggataatggtctcccggagtgaaacagacctcctggatatccgctccgagtataagaggatgtacgggaagtcactgtaccacgatatctcttcaattagttgcatgcccgcttcatatggtcatctggaagaggcaacatgcctggcattaaaactgctgcgagtggaggggaatgattag

SEQ ID NO: 98289 - DNA, 1518 bp, Artificial Sequence
  derived and/or modified sequence
atgagttatcccgggtatcctcccccccctggcggctatccgcctgcagccccgggcgggggcccctggggaggtgcagcctatcctccgccgccaagcatgcctcccattggactagataatgtggccacctatgccggacagttcaaccaggattatctctctggtatggccgcgaacatgtccggtacattcggtggcgccaatatgccaaatctctatcctggcgctcccggcgctgggtatcccccagtgccgccgggggggttcggtcagccgcctagcgctcagcagcctgtgcctccatacggtatgtaccccccccctgggggcaacccgccaagccgtatgccaagctacccaccttatcccggcgctccggtgcctggccagcccatgccaccccctggccaacagcctcccggcgcctatccaggccaaccacccgtaacatacccggggcagccacctgttccactgccaggtcagcaacagcccgtaccgtcataccccggctaccccggatccggtactgtgacgccagccgtgcctccaacgcaattcggaagccgcggcaccatcaccgacgctccagggttcgatccgttgcgcgacgccgaggtgctgcgcaaggcgatgaagggattcggaaccgatgagcaggcaatcatcgattgcttgggttcaagatcaaacaagcaacgacagcagatcctgctgtctttcaagaccgcctatggaaaggacctgataaaggacctgaagtctgagttgtccgggaactttgagaaaacaatcctggccctaatgaagactccggtactgttcgacatttacgagataaaagaagcaattaagggagtgggaaccgatgaggcctgtctgattgagatactggcctcccgctctaacgagcatatccgagagctgaaccgagcctacaaggccgagttcaagaaaacactggaggaggctattaggagtgatacatcagggcactttcaaagactgctaataagcctttcccaagggaaccgggacgaaagcactaacgttgacatgtctctcgcccaacgggacgcgcaagagttatacgccgcgggagaaaaccgtctaggtaccgatgagagcaagttcaatgctgtgctttgttcccgttctcgcgcccatcttgtcgcagtgtttaatgaataccagcgcatgaccgggagagatattgagaagtccatctgccgggagatgtccggagatttagaggagggcatgcttgcggtggtcaaatgcttaaagaacacccctgcattttttgccgaacggcttaacaaggccatgcgaggtgccggtactaaagaccggacactcatccgcatcatggtgtcccgcagtgaaacagatttattggacatccggtccgaatacaagaggatgtatggcaagtcactctaccacgacattagtggtgatacttccggcgattatagaaaaattctgctcaaaatctgcggaggaaatgattag

SEQ ID NO: 98290 - DNA, 1518 bp, Artificial Sequence
  derived and/or modified sequence
atgtcctacccagggtacccccccccgccgggcggctatccccccgctgcccccgggggcggcccatgggggggagcggcctaccctcccccacctagcatgcctccgattgggctcgacaacgtagcgacttacgccggacagttcaatcaggattatctgagtggtatggccgccaacatgagtgggactttcggcggagccaacatgcccaacctatacccaggggctccaggggccgggtatccacctgttccccccggcgggttcggtcagcccccttccgcacaacagcccgtgcccccttacgggatgtatcccccaccgggcggtaatccccctagtcggatgccctcttatcccccttatccaggcgccccagttccaggccagcctatgcctccgcctgggcagcagccccccggagcctaccccggtcaacccccagtaacataccccggtcagccgcctgtgcctctccctggccagcagcaacctgtgcccagttatcctgggtaccccggaagcgggactgtgaccccagccgtcccccctacccagttcggctcaagagggaccattacagatgctcccggcttcgaccctctccgggacgccgaggtgctccgtaaagcaatgaaagggtttggaaccgatgagcaggccatcattgattgtttggggagtcgtagtaataaacagcgacagcagattcttctcagtttcaagacagcttatgggaaagacctgatcaaggaccttaagagtgagctgtctggaaatttcgagaagaccattctcgctctcatgaagacacccgtgttgtttgacatatatgagatcaaagaagcaatcaaaggggtgggtacagatgaggcctgcttgatcgagatccttgctagtaggtctaacgagcacatccgcgagctgaatagagcctacaaggcagagtttaaaaagactctggaggaagccatacggagcgacacttccggccattttcagagactcctgatctctctttctcagggcaatagagatgagagcacaaacgtcgatatgagcctggcccagcgtgacgcacaggagctgtatgctgcaggagagaaccgcctggggacagatgaaagcaaattcaatgctgtcctgtgctccaggtcacgggcacatctggtagcagtgttcaacgaatatcagaggatgactggtagagacattgaaaagtcaatatgccgcgagatgtctggagacttagaggagggcatgttggcagttgtcaaatgtctcaaaaataccccagccttcttcgcagaaagactgaataaagccatgcggggagccggcacaaaggatcggaccctgatccgcatcatggtttcacgctccgagaccgatctcctggacattcgttccgagtataaacgcatgtacggcaagtcactctaccatgacatttccggcgatactagcggggattacaggaaaatcttactgaaaatctgcgggggcaacgactag

SEQ ID NO: 98291 - DNA, 1518 bp, Artificial Sequence
  derived and/or modified sequence
atgagctacccgggttaccctcccccacccgggggctatccccccgccgcgccaggcggagggccatggggaggagccgcgtaccctcctcctcccagtatgccgcccatcggcctggataatgtggccacctacgcggggcagtttaatcaggactacctcagcggaatggctgctaatatgtccggcacctttgggggcgccaatatgcccaatttgtacccaggagctcccggagctgggtatcctccagttcctcctggaggattcgggcaaccccccagcgcacaacaacctgttcccccgtatgggatgtacccaccacctggaggaaacccgccctcacgaatgccctcctaccccccttacccaggcgcccccgtccctggacaacccatgccaccccccggccaacaaccgccaggagcctacccgggacagcctccagtaacctaccccggtcaaccccctgttccattacctggccagcaacagccagtccctagttatccagggtatcctggatccggaaccgtcactcccgcagtgccccccacccagtttggctcacggggcaccatcacggatgcgcctgggtttgatccactgagagatgccgaggtgctaagaaaggccatgaaggggttcggtaccgatgaacaggccatcatagattgcctggggtcacggtctaataagcagcgacagcagatcctgctttccttcaaaactgcttatggcaaggacctaattaaggacctcaagtcagagctgagcggtaacttcgagaagactattctggccctgatgaaaacccctgtcctgtttgacatttatgagataaaagaagcaattaagggagttgggaccgacgaggcctgtttaatagagattctagctagtcggtccaacgagcacatccgcgaactaaatcgcgcatacaaagctgagttcaaaaaaaccctggaggaagcaattcggtctgacacatcgggccattttcaaagactactgatctcacttagccaggggaacagagatgaaagcaccaatgtagatatgtctcttgctcagcgcgatgcccaggagctgtatgccgctggagaaaacagactcggcaccgacgaatccaaattcaatgcggtgttatgcagccggtcacgcgctcatctcgtggctgtgttcaacgagtaccagcgcatgactgggagagatattgagaagagcatatgcagagagatgtcaggggacctggaagagggaatgcttgccgttgtgaagtgtcttaaaaacacacccgctttcttcgccgagaggctgaacaaggcaatgcggggagctggaactaaggacaggactctgattcgtatcatggtgtcacggtccgaaacggacctgcttgatattcgcagcgaatataaacgtatgtatggaaagagtctttatcacgatatttccggagatacttccggcgactataggaagatactgctgaaaatttgtggaggaaacgattag

SEQ ID NO: 98292 - DNA, 1239 bp, Artificial Sequence
  derived and/or modified sequence
atgcgaggctcatctacacggaccatcagccgagagtgctggcgcctctgggccgctcctctgtgccccgccgcttgcagcagcctgtgggatgtcagcactccgaggaggaagccgaccctgcaggatgccctcatttctgccataccgtaccccggccaacctcccgtcacatacccaggccagcccccagtgcccttacccggccagcaacaaccagtcccatcatacccgggttaccctgggtccggaacagttactccagccgtaccccctactcagtttggcagtaggggaaccatcacggatgcacccggtttcgaccctctgagagacgccgaagtcttgcgtaaggcaatgaagggttttggaacagacgagcaggcgatcattgactgcctagggagtcggagcaataaacaacgccagcagatcctgttgtccttcaaaaccgcttatggaaaagacctcatcaaggacctgaaatctgaactgagcggcaactttgagaaaacgatcctggctctgatgaaaacgcctgtgttattcgacatttacgagattaaggaggcgattaagggcgtcggcaccgatgaagcatgcctgattgaaatcctggcaagccgaagtaatgagcacataagagaacttaatagggcttataaggcagaattcaaaaagacactggaagaggctattcgatccgacacgtccggccattttcagagacttctcatttcactaagccagggcaacagagacgaatctacaaatgtcgatatgagtctcgcccagcgcgatgcacaggagctctacgcggctggggagaatcgtctcgggaccgacgaaagtaagttcaacgccgtgctgtgctctcggagccgagctcacctggtagctgtttttaatgagtaccagcgaatgacagggcgggacattgaaaagagtatctgccgggaaatgagtggtgacctcgaagagggcatgttggcagtcgtgaaatgtctaaaaaacactccagcctttttcgccgaacgacttaataaagcaatgcgtggggcaggtaccaaagataggaccctgatccgcattatggtgagccgaagtgaaacggacctgctggatattaggagcgagtataagcgtatgtatggaaagtctctttatcatgatattagtggggatactagtggcgattacagaaaaatattgctaaaaatctgtggggggaacgattag

SEQ ID NO: 98293 - DNA, 453 bp, Artificial Sequence
  derived and/or modified sequence
atgagttacccaggctaccctcctccccccggaggctatccacccgcagctcctggtggaggcccgtggggaggcgcagcttatcctccacctccatccatgcctccgatcggactggataacgtcgctacctatgcaggccaattcaatcaggactatttaagcggcatggccgccaacatgtcaggaacatttggaggggctaacatgcctaacttatacccaggggcgcccggagcaggatacccacccgttcctcccgggggatttggtcagccccctagcgcacaacagccagtgccaccatatgggatgtacccgccaccaggaggcaatcccccctcccgcatgccctcttacccaccatatccaggagcacccgtacctggccagccaatgcctccacccggacagcaaccacccggcgcctacccaggtcaaccgcctgtgtag

SEQ ID NO: 98294 - DNA, 1518 bp, Artificial Sequence
  derived and/or modified sequence
atgagttaccctggctatccacctccaccaggcggttatcctccggccgctccaggtggcggcccctggggaggagcagcataccctccacctccaagtatgccacccattggcttggataatgttgctacatacgccggacagttcaatcaagactacttatccggaatggctgcgaatatgtcgggaacattcggtggagccaacatgccgaatctgtacccaggcgcgccgggcgcaggatatccacccgtcccacctggtgggtttggccaaccccccagcgcccagcagccagtgcccccctacggaatgtaccccccccccggtggcaaccctcctagccgcatgcctagttacccaccctacccaggagctccagtgcccggccagccaatgcctcccccggggcagcaacctcctggagcctatcctggtcaacctcctgttacctaccccggccaaccacctgtcccccttcctggacagcagcaaccagtaccaagctacccaggatatccagggagcgggaccgtgactcccgcagtacctcctacccaatttggcagcaggggcacaataactgacgcccccggcttcgacccacttcgagatgccgaagtattgaggaaggctatgaaagggttcggaactgatgagcaagccattatcgattgtctgggatctaggagcaataaacagaggcagcagattttactttctttcaagaccgcctacggcaaggacttaatcaaggacctgaagtccgagctgtccgggaatttcgaaaaaacgattctggccttgatgaaaactccagtgctgttcgatatatatgaaattaaagaggctatcaagggcgtgggcaccgatgaagcatgcctaatcgagatcctggcttctagaagcaatgaacacatcagggaactgaacagggcctacaaagccgagttcaagaaaacactcgaagaagccatccgatccgatactagcgggcacttccagagactgctgatctctctaagccaaggcaatcgggacgagagcactaatgtcgacatgtcattggcccagcgggacgctcaggaactatacgccgctggagaaaaccgacttggtacagacgagagcaagtttaatgcagtgctctgtagccgctcccgggcccaccttgtggccgttttcaacgagtatcagcgcatgaccggccgggacatcgagaagtccatttgtagagagatgagtggagacctcgaagagggcatgctggcagtcgtaaagtgcttaaagaacactccagcattctttgccgagagattgaacaaagccatgcgtggagccggaaccaaagatcggacgctaatccgcattatggtgagtcggtctgaaacagacctgctcgacataagatccgagtacaaaaggatgtatggcaaaagcctttaccacgacatcagtggggacactagtggggactatcgtaagattctcctgaagatatgcggcggtaatgattag

SEQ ID NO: 98295 - DNA, 615 bp, Artificial Sequence
  derived and/or modified sequence
atgtcttaccctggctacccccctccaccgggtggctacccaccagctgcccccggtggaggtccatgggggggagccgcatacccacccccgccgtcgatgcccccaatcgggcttgataacgtggcgacctacgctggtcaattcaaccaggattacttgtccggcatggctgctaacatgtctggaacgttcggtggagccaacatgcccaacctttaccccggggccccaggagccgggtatccccctgtgccccctggtggatttggccagccgccctccgcccagcaacctgtccctccatacgggatgtaccccccacccggaggcaacccacccagccggatgccttcctatcccccctacccaggcgcaccagtccctggccaaccgatgccacctccagggcagcagccaccgggagcttatccaggacaaccaccggtgacctacccaggccagccaccggtcccattgcccggtcagcagcagcctgtgccatcttatcctggatatccaggaagcggtaccgttaccccagcagtgccgccaactcaattcggatcccgcggcaccataacagacgctcccggcttcgatccactccggtag

SEQ ID NO: 98296 - DNA, 1518 bp, Artificial Sequence
  derived and/or modified sequence
atgagctatccaggatatcctcccccacctggagggtatccccctgcagctccaggaggaggcccgtggggcggcgcagcttacccgcccccgccatcgatgcctcccattggtctggataatgtggcgacctacgccgggcagttcaaccaggattatctctccgggatggccgcaaacatgtccggcactttcggcggggcaaacatgcctaacttataccccggggcccccggggcaggataccccccagttccaccaggagggtttggacagccgccatccgcacagcagcctgtcccgccatacgggatgtaccccccccccggcggcaacccccctagtcggatgccttcctacccgccttaccccggggcccctgtccctggtcagccaatgcccccaccaggtcagcaaccaccgggggcgtaccccggtcaacctcccgtcacttaccctggtcaaccacctgtgccactgcccgggcagcagcagccggtccctagctaccccggctaccctggaagcggcacagtgacaccagccgtaccgcccacacagttcggttctagaggaaccatcactgatgccccaggttttgatcccctgagggatgcagaggtgctccgaaaggcaatgaaaggtttcgggaccgatgagcaagcgatcatcgattgcctcggctcaaggtccaataagcaacggcagcagatcctgctcagcttcaaaacggcatatggcaaggatttaattaaggacctcaagagcgagctaagcgggaacttcgagaagacgatcctggctctgatgaagacaccagtcctatttgacatctatgagatcaaagaggcgattaaaggggtgggtacggatgaagcctgcctgatagagatcctggcaagtcgcagcaacgaacacataagggaactgaatagggcatataaggctgaattcaaaaagaccttggaggaagcaatccgatccgatacaagcgggcacttccagcgactgctgatctctctgtcacaaggtaatcgcgacgaaagtaccaacgtggacatgagcctggcccagagagacgcccaggaactgtacgccgccggggaaaatcgcctgggcaccgatgaatctaagttcaatgcagttttgtgttccagatcaagggcccacttagtggctgtatttaatgagtatcagcgtatgacaggtagggatattgagaaatctatctgtcgggaaatgtcaggggacctggaggagggaatgctggcagtcgttaagtgtcttaagaatacccccgctttttttgctgagagactgaataaggctatgcgtggagccggtacgaaagacaggacattgatccggattatggtttcccgcagcgaaacagatcttttagatatacgttctgagtataagaggatgtatggcaaatccctgtatcacgatatcagtggcgatacatccggcgactatagaaagatcttgctgaaaatctgtggaggaaacgattag

SEQ ID NO: 98297 - DNA, 1419 bp, Artificial Sequence
  derived and/or modified sequence
atgccacccattggcttagacaacgtcgcaacctatgcaggccaattcaaccaggactacctgtccgggatggctgcgaacatgagtggcaccttcggtggagccaacatgcctaacctctaccccggagctcctggcgctgggtatcctcccgtccctccaggtggcttcggtcagcctcccagcgcgcaacaacccgtgcccccgtacggaatgtaccccccaccaggaggcaaccccccctcaaggatgcctagttacccgccttatccgggcgcccctgtgcctggccagccaatgccacctcccggccagcagccccccggcgcataccccggccagccaccagtcacctatccagggcagcctcccgtgccgctcccaggtcagcagcagccagtcccctcgtatcctggttaccccggtagcggcacagtcaccccagcggttccaccaacccagtttggcagtagaggcactattacagatgcacctggcttcgacccacttagggacgccgaggtgctgcgaaaagccatgaagggattcggaacagacgaacaggcgattattgactgtctggggagccgatctaataaacagcgacagcagatcctcctttctttcaaaaccgcttacggcaaagaccttatcaaagacttgaagtcagaactgtccggtaattttgagaagaccatacttgccctgatgaaaacccctgtcctttttgacatctatgaaattaaagaagctattaagggcgttggcaccgatgaagcgtgtctgatagagattctcgcaagccgtagtaacgaacacatcagggagctgaaccgtgcgtacaaggccgaattcaagaaaactttggaagaggcaatcagatccgacacctcggggcattttcagaggctcctgataagtcttagccaaggaaatcgagacgagagcacaaatgtcgatatgagcctcgcgcagagggatgcccaggaactctatgcagcaggggagaacaggttaggaaccgacgagtcgaagtttaacgccgtcctctgctccagatcccgggcccatctcgttgcagtgttcaatgagtatcagaggatgacgggacgtgatattgagaaatcgatctgcagagagatgagtggggacttagaagagggaatgctggctgtggtgaagtgtctgaagaatacccctgcattctttgctgagagactcaacaaggcgatgagaggtgccggtaccaaagatcgaacactgattcgtataatggtctctcggagcgaaaccgatttactggacataaggtccgagtataaacggatgtatgggaaaagtctgtaccatgatatctccggagatacctctggagactaccgcaaaatcctccttaaaatatgcggcggcaatgactag

SEQ ID NO: 98298 - DNA, 1518 bp, Artificial Sequence
  derived and/or modified sequence
atgagctacccaggctacccacctcctcctgggggctaccccccagctgcccctgggggcggcccctggggcggggccgcctacccacctcctccttccatgccacccatcggcctggacaacgtggccacctacgccggccagttcaaccaggactacctgagcggcatggccgccaacatgagcggcacctttggaggagccaacatgcccaacctgtacccaggggcccctggggccggctacccacctgtgcccccaggcggcttcggccagcccccatctgcccagcagcctgtgcccccctacggcatgtacccacctcctgggggcaacccccccagcaggatgcccagctacccaccctacccaggggcccctgtgcccggccagcccatgcctcctcctggccagcagcccccaggggcctacccaggccagccccctgtgacctacccaggccagccccctgtgcccctgcccggccagcagcagcctgtgcccagctacccaggctacccaggcagcggcaccgtgaccccagctgtgccccccacccagtttggcagccggggcaccatcacagatgcccctggctttgaccccctgagagatgctgaggtgctgaggaaggccatgaagggcttcggcacagatgagcaggccatcatcgactgcctgggcagccgcagcaacaagcagaggcagcagatcctgctgtccttcaagacagcctacggcaaggacctgatcaaggacctgaagtctgagctgagcggcaactttgagaagaccatcctggccctgatgaagacccctgtgctgtttgacatctatgagatcaaggaggccatcaagggcgtgggcacagatgaggcctgcctgattgagatcctggccagccgcagcaatgagcacatccgggagctgaacagagcctacaaggccgagttcaagaagaccctggaggaggccatccgcagtgacaccagcggccacttccagaggctgctgatcagcctgagccagggcaacagagatgagagcaccaacgtggacatgagcctggcccagagagatgcccaggagctgtatgctgctggagaaaatcggctgggcacagatgagagcaagttcaatgctgtgctgtgcagccgcagccgggcccacctggtggccgtgttcaatgagtaccagaggatgacaggccgggacatcgagaagagcatctgccgggagatgtctggggacctggaggagggcatgctggccgtggtgaagtgcctgaagaacaccccagccttctttgctgagcggctgaacaaggccatgagaggagctggcaccaaggacaggaccctcatccgcatcatggtgagccgctcagaaacagacctgctggacatccgctctgagtacaagaggatgtatggcaagagcctgtaccatgacatcagcggggacaccagcggggactacaggaagatcctgctgaagatctgtggcggcaatgactag

SEQ ID NO: 98299 - DNA, 489 bp, Artificial Sequence
  derived and/or modified sequence
atgagcctggcccagagagatgcccaggagctgtatgctgctggggagaaccggctgggcacagatgagagcaagttcaatgctgtgctgtgcagccgcagccgggcccacctggtggccgtgttcaatgagtaccagaggatgacaggccgggacatcgagaagagcatctgccgggagatgtctggggacctggaggagggcatgctggccgtggtgaagtgcctgaagaacaccccagccttctttgctgagcggctgaacaaggccatgagaggagctggcaccaaggacaggaccctcatccgcatcatggtgagccgctcagaaacagacctgctggacatccgctctgagtacaagaggatgtatggcaagagcctgtaccatgacatcagcagcatcagctgcatgcctgccagctatggccacctggaggaggccacctgcctggccctgaagctgctgcgggtggagggcaatgactag

SEQ ID NO: 98300 - DNA, 1239 bp, Artificial Sequence
  derived and/or modified sequence
atgaggggcagcagcaccaggaccatcagccgggagtgctggaggctgtgggccgcccccctgtgcccagctgcctgcagcagcctgtgggatgtgtccacccccaggaggaagcccaccctgcaggatgccctgatcagcgccatcccctacccaggccagccccctgtgacctacccaggccagccccctgtgcccctgcccggccagcagcagcctgtgcccagctacccaggctacccaggcagcggcaccgtgaccccagctgtgccccccacccagtttggcagccggggcaccatcacagatgcccctggctttgaccccctgagagatgctgaggtgctgaggaaggccatgaagggctttggaacagatgagcaggccatcatcgactgcctgggcagccgcagcaacaagcagaggcagcagatcctgctgtccttcaagacagcctacggcaaggacctgatcaaggacctgaagtctgagctgagcggcaactttgagaagaccatcctggccctgatgaagacccctgtgctgtttgacatctatgagatcaaggaggccatcaagggcgtgggcacagatgaggcctgcctgattgagatcctggccagccgcagcaatgagcacatccgggagctgaacagagcctacaaggccgagttcaagaagaccctggaggaggccatccgcagtgacaccagcggccacttccagaggctgctgatcagcctgagccagggcaacagagatgagagcaccaacgtggacatgagcctggcccagagagatgcccaggagctgtatgctgctggggagaaccggctgggcacagatgagagcaagttcaatgctgtgctgtgcagccgcagccgggcccacctggtggccgtgttcaatgagtaccagaggatgacaggccgggacatcgagaagagcatctgccgggagatgtctggggacctggaggagggcatgctggccgtggtgaagtgcctgaagaacaccccagccttctttgctgagcggctgaacaaggccatgagaggagctggcaccaaggacaggaccctcatccgcatcatggtgagccgctcagaaacagacctgctggacatccgctctgagtacaagaggatgtatggcaagagcctgtaccatgacatcagcggggacaccagcggggactacaggaagatcctgctgaagatctgtggcggcaatgactag

SEQ ID NO: 98301 - DNA, 453 bp, Artificial Sequence
  derived and/or modified sequence
atgagctacccaggctacccacctcctcctgggggctaccccccagctgcccctgggggcggcccctggggcggggccgcctacccacctcctccttccatgccacccatcggcctggacaacgtggccacctacgccggccagttcaaccaggactacctgagcggcatggccgccaacatgagcggcacctttggaggagccaacatgcccaacctgtacccaggggcccctggggccggctacccacctgtgcccccaggcggcttcggccagcccccatctgcccagcagcctgtgcccccctacggcatgtacccacctcctgggggcaacccccccagcaggatgcccagctacccaccctacccaggggcccctgtgcccggccagcccatgcctcctcctggccagcagcccccaggggcctacccaggccagccccctgtgtag

SEQ ID NO: 98302 - DNA, 615 bp, Artificial Sequence
  derived and/or modified sequence
atgagctacccaggctacccacctcctcctgggggctaccccccagctgcccctgggggcggcccctggggcggggccgcctacccacctcctccttccatgccacccatcggcctggacaacgtggccacctacgccggccagttcaaccaggactacctgagcggcatggccgccaacatgagcggcacctttggaggagccaacatgcccaacctgtacccaggggcccctggggccggctacccacctgtgcccccaggcggcttcggccagcccccatctgcccagcagcctgtgcccccctacggcatgtacccacctcctgggggcaacccccccagcaggatgcccagctacccaccctacccaggggcccctgtgcccggccagcccatgcctcctcctggccagcagcccccaggggcctacccaggccagccccctgtgacctacccaggccagccccctgtgcccctgcccggccagcagcagcctgtgcccagctacccaggctacccaggcagcggcaccgtgaccccagctgtgccccccacccagtttggcagccggggcaccatcacagatgcccctggctttgaccccctgaggtag

SEQ ID NO: 98303 - DNA, 1419 bp, Artificial Sequence
  derived and/or modified sequence
atgccacccatcggcctggacaacgtggccacctacgccggccagttcaaccaggactacctgagcggcatggccgccaacatgagcggcaccttcggcggggccaacatgcccaacctgtacccaggggcccctggagctggctacccacctgtgcccccaggcggcttcggccagccccccagcgcccagcagcctgtgcccccctacggcatgtacccacctcctgggggcaacccccccagcaggatgcccagctacccaccctacccaggggcccctgtgcccggccagcccatgcctcctcctggccagcagcccccaggggcctacccaggccagccccctgtgacctacccaggccagccccctgtgcccctgcccggccagcagcagcctgtgcccagctacccaggctacccaggcagcggcaccgtgaccccagctgtgccccccacccagtttggcagccggggcaccatcacagatgcccctggctttgaccccctgagagatgctgaggtgctgaggaaggccatgaagggctttggaacagatgagcaggccatcatcgactgcctgggcagccgcagcaacaagcagaggcagcagatcctgctgtccttcaagacagcctacggcaaggacctgatcaaggacctgaagtctgagctgagcggcaactttgagaagaccatcctggccctgatgaagacccctgtgctgtttgacatctatgagatcaaggaggccatcaagggcgtgggcacagatgaggcctgcctgattgagatcctggccagccgcagcaatgagcacatccgggagctgaacagagcctacaaggccgagttcaagaagaccctggaggaggccatccgcagtgacaccagcggccacttccagaggctgctgatcagcctgagccagggcaacagagatgagagcaccaacgtggacatgagcctggcccagagagatgcccaggagctgtatgctgctggggagaaccggctgggcacagatgagagcaagttcaatgctgtgctgtgcagccgcagccgggcccacctggtggccgtgttcaatgagtaccagaggatgacaggccgggacatcgagaagagcatctgccgggagatgtctggggacctggaggagggcatgctggccgtggtgaagtgcctgaagaacaccccagccttctttgctgagcggctgaacaaggccatgagaggagctggcaccaaggacaggaccctcatccgcatcatggtgagccgctcagaaacagacctgctggacatccgctctgagtacaagaggatgtatggcaagagcctgtaccatgacatcagcggggacaccagcggggactacaggaagatcctgctgaagatctgtggcggcaatgactag

SEQ ID NO: 98304 - DNA, 1518 bp, Artificial Sequence
  derived and/or modified sequence
atgagctaccccggctacccccccccccccggcggctacccccccgccgctcctggtgggggaccttggggtggcgcagcctaccctcctcctcccagcatgccaccaatcggcctggataatgtggccacctacgcgggccagtttaatcaggactatctctcaggcatggccgcaaatatgagtgggacatttggcggcgccaatatgcctaacctgtaccccggggctccaggcgctgggtatcctccggttcctcctggtggttttgggcagcctccatccgcgcagcagccagtgccaccatacgggatgtaccctcctcccgggggtaaccccccttcccgtatgccatcttatcctccatatcccggtgccccggtcccgggtcaaccaatgccccctcccggccagcagccccccggtgcatatcctggtcaaccgccagtgacctacccaggtcagcctcctgtgccactgcccggacagcagcagcctgtgcccagctaccctgggtaccccgggagcgggacagtgactcccgcagttcctcctacacagttcgggtcacgagggaccattacggacgcaccggggttcgaccccctgcgggatgcagaggttctgcgcaaggcaatgaaagggttcgggacggatgaacaagctataatagattgtctgggatcaagatctaataagcagcggcagcaaatccttcttagcttcaagaccgcgtacggcaaagacctcattaaggatctcaagtctgagttatccgggaatttcgagaagaccattctggctttgatgaagacgcccgtcctgtttgatatctacgaaattaaagaggcgatcaaaggggtcgggaccgatgaggcctgcctgattgaaatcctggcaagccggagtaacgagcacatacgggaactgaatagagcctacaaggctgaatttaaaaaaaccttagaggaggccatccggtctgatacgtcaggccactttcagaggttgcttatcagtctctcacagggaaatcgagacgagtcaacaaatgtagatatgagcctggcccagagagatgcccaagaactgtacgccgctggtgagaatagactgggtactgacgaatcaaaatttaatgcggtcctctgctcccgatcccgcgctcacctcgttgccgtgtttaatgagtaccagcgaatgacaggccgtgatatcgagaaatcgatttgccgggaaatgtctggcgaccttgaagaggggatgctggctgtggttaagtgtctgaaaaatacacccgcattcttcgcggagaggctcaacaaagccatgcgcggcgccggaacgaaagatcggactctgatcagaatcatggtgtccaggtctgaaacggacctcctggacattcgcagcgagtataagagaatgtacggcaaaagtctctaccatgacatctccggtgatacaagcggggattaccgaaagatactgttgaaaatctgtggtggcaacgattag

SEQ ID NO: 98305 - DNA, 1518 bp, Artificial Sequence
  derived and/or modified sequence
atgagctaccccggctacccccccccccccggcggctacccccccgctgctccgggaggggggccgtgggggggcgccgcatatcctcccccaccttccatgccacctatcggactcgacaatgtggccacatacgcaggtcagttcaatcaagattatttgagtggcatggccgcgaacatgagcgggaccttcggcggagccaacatgccgaatctctatcccggagccccaggggcaggctacccccccgtgccgccagggggatttggacagcccccatccgcgcaacagccagtgcccccatatgggatgtacccccctcccggcggcaaccctccaagtagaatgcctagttaccctccgtaccctggcgcacctgtacccgggcagcccatgccgccccctggccagcagcctccaggagcatatccagggcagccacccgtgacttaccctggtcagccccctgtgccactgcctggacagcaacagcctgttccctcatacccaggttatccaggaagcggcaccgtgaccccagcggtcccaccgacccaatttgggagcagaggtaccatcaccgacgctccagggttcgaccccctccgggacgcagaggttctgaggaaggccatgaagggatttgggacggacgaacaggccatcatcgattgtttgggatctcgctccaataaacagcgtcagcagatactactgtcctttaaaacggcgtatggcaaggacctgataaaggacctcaagagcgaattatctggaaattttgaaaagacgattctggctcttatgaagactccagttctcttcgatatctacgagataaaggaagccatcaagggtgtgggaacagatgaggcttgtcttatagagatactggcctctcggtctaatgaacatattagagaactgaacagggcctacaaagccgagtttaaaaaaactctggaggaggccattcgcagcgacacttctggccacttccagagactgttgattagcttaagccaaggaaaccgcgacgagagcacaaacgtggacatgtctctagctcagagagacgcgcaggagctgtacgccgccggtgagaatcgccttggaacagacgaaagcaagttcaatgccgtgctgtgtagccgcagccgagcccatctggtggctgtgtttaacgaataccaaagaatgaccggccgcgatatcgaaaagagtatctgccgagagatgtcaggtgacctagaagaaggtatgctggctgtagtcaagtgcttgaaaaacacccctgccttctttgctgaacggctgaacaaggctatgcgaggggcaggtacaaaggacaggaccctgatcaggatcatggtcagcagatccgaaacagatctcttggacattcgttcagagtataagcgcatgtacggtaagagtctgtaccatgatatctcaggcgacacttctggtgattaccgcaaaatccttctgaaaatctgcggaggcaacgattag

SEQ ID NO: 98306 - DNA, 489 bp, Artificial Sequence
  derived and/or modified sequence
atgagcctggcccagcgggacgcccaggagctgtacgccgccggcgagaacagactggggaccgacgaatcaaaatttaacgccgtgttgtgttcccgcagtagagcgcatctggtagctgtgttcaatgagtaccaacggatgaccggacgggacatagagaagtcgatatgccgggagatgtcaggagaccttgaagaaggcatgctggccgtggtcaaatgccttaagaatacacccgctttcttcgctgaaaggctgaacaaagccatgcgcggtgccgggaccaaagatcggacactgatcagaatcatggtttcccgttccgaaaccgatctgctggacatccgctcagagtacaaaaggatgtatgggaaaagcttatatcacgatatctcgtccattagttgcatgcctgcctcttatggtcatctcgaggaggccacttgcctcgctctcaaactcttgcgagtggaaggcaatgattag

SEQ ID NO: 98307 - DNA, 1518 bp, Artificial Sequence
  derived and/or modified sequence
atgagctaccccggctacccccccccccccggcggctacccccccgccgcacctggcggtggtccctggggaggcgccgcctatccacccccaccttctatgccccccatcgggctggataatgttgcgacgtatgcaggacagtttaatcaggattacctgagcggcatggccgctaatatgtcaggcacttttggcggggctaacatgccgaatctttaccctggagcacccggagcgggctatcctccagtccctcccggcggattcggtcagcccccttcggcccaacagcctgtgccaccatacggaatgtacccacctccaggcggtaatccaccttctcgcatgccgagctaccctccatatccaggcgcaccggtgccggggcagccgatgccaccgcccggtcaacaacctccaggcgcttacccaggccagccccccgtgacttaccccgggcagccacccgtgccacttcccggtcagcagcaaccagttccctcttaccccggatatcccggctcaggcaccgtgacccccgcagttcccccaacccaatttggatcaaggggtactataacggacgccccaggattcgatccactccgtgacgccgaggtgctgcgtaaggctatgaagggtttcggtactgatgaacaggctatcatagattgcctcgggtcacggagcaataagcagaggcaacagatactgctaagctttaaaactgcttacgggaaggatcttatcaaggacctgaagtctgaattgtcaggtaatttcgaaaagaccattttggccctgatgaagaccccagtcctctttgacatctacgaaataaaagaggccatcaaaggtgttggaaccgacgaagcctgtcttatcgaaatactggcgagccgaagcaacgaacatatcagggaattaaaccgggcctacaaggccgaattcaagaaaacattagaagaagccatcaggagcgatacctctggccacttccaacgcctgctcataagcctgagccagggaaaccgggacgaaagtacaaatgtggacatgtctctggcgcagcgcgacgcccaggagctctacgctgctggggagaaccgattaggcaccgacgagtccaaatttaatgccgtgctctgctccaggtctcgtgcacacctggttgccgtgttcaacgaataccagcgcatgactggcagagacatagaaaagagcatctgccgtgagatgtccggcgatttagaagagggcatgttggcagtagtgaaatgcctcaagaatacccctgcattttttgctgagaggttgaacaaagcaatgagaggagctggcactaaagatagaaccctcattagaatcatggtgtcacgatcagagaccgatctgctagatatcagaagtgagtataagcggatgtacggaaagagcctgtatcacgacattagcggcgatactagcggtgactacagaaaaatcttactcaagatctgcgggggtaacgactag

SEQ ID NO: 98308 - DNA, 1518 bp, Artificial Sequence
  derived and/or modified sequence
atgagctaccccggctacccccccccccccggcggctacccccccgctgcccccggtggcggcccttggggaggagccgcataccccccgcccccaagcatgccacctatcggcttggacaacgtcgccacctacgctggacagttcaaccaggactatttgtccggcatggcagccaacatgtctggcaccttcggaggggcaaacatgccaaatttgtatccaggcgctcctggcgctggttatcctccagttccaccaggaggatttggccaaccgccatcagctcagcaacccgtgcccccctatggtatgtaccccccaccgggcggaaatcctcccagtcgtatgccttcttatcctccctaccccggagctcccgtgcccggacagccaatgcctcccccaggacagcagccaccaggcgcttatcccggacaacccccagttacatacccaggacagccccctgtgcctctgccgggccagcaacagcctgtgccctcctacccaggctatcccgggtctggcacagtcacaccagccgtcccacccactcaattcggttctcgtggaactatcactgacgcacccggatttgaccctctgagggacgctgaagttctccgcaaagcaatgaaaggatttggcacagacgagcaggcaatcatcgattgtctcggatcacggtctaacaagcagagacaacagatattactgtcttttaagacagcttacggcaaggacctcatcaaggatctgaagtcagaactgtccggcaacttcgagaaaacaattctggccttaatgaagacgcccgtgctgtttgatatatatgagattaaggaggccataaaaggggtgggaacagacgaggcatgcctcattgaaattctggcctctcggtctaacgagcacataagggagctcaaccgagcatataaggctgagttcaagaagaccctggaggaggccattcggagcgacacgagcggccactttcagaggctcctgatctcactgtcccaggggaatagggacgagtcaaccaacgtggacatgagtctagctcagcgtgacgctcaggaactctatgcagccggcgaaaatcgtttgggaactgacgagagtaagttcaatgcggtgctctgttcccgcagccgagcccacctggtggccgtctttaacgagtaccagcgaatgacagggagggacattgaaaaaagcatatgcagagaaatgagcggcgacctggaggaagggatgctggccgtcgtgaagtgcctgaagaatactcccgctttcttcgcggagcggttaaataaagccatgcgtggtgctggcacgaaggatagaaccttgatacggattatggtatcccggtcagagaccgacctgcttgatattcgatccgagtataagagaatgtatgggaagagtctataccacgacatttctggcgatacgtccggggactataggaaaatcctgctgaaaatctgcgggggcaatgactag

SEQ ID NO: 98309 - DNA, 1518 bp, Artificial Sequence
  derived and/or modified sequence
atgagctaccccggctacccccccccccccggcggctacccccccgccgctccgggcggaggcccatggggaggtgcagcatacccacctcctccgagtatgcctccaattggcctggacaatgttgccacatacgcgggacagtttaatcaggactatcttagtggcatggctgccaatatgtcgggtaccttcggaggagcaaacatgccaaacctctatcctggcgcaccaggggccggatacccacctgtcccacccggcgggttcgggcagcccccatctgcccagcagcctgtgccaccatatggtatgtatcctccacccggggggaacccgcctagtcggatgcctagttatccgccctaccctggagcccctgtgcccggccagccaatgccaccaccgggccaacaaccacccggcgcataccccggacagcctccagtaacatatccaggccagccgccagtccccttacccggccagcagcagccagtcccaagttacccgggatacccggggagcggaaccgtgacccctgccgttcctcccacccagtttggctcaagagggactatcaccgatgccccaggtttcgatcctttaagagacgccgaagtgctcagaaaagctatgaagggatttggaaccgatgaacaagccattattgactgtcttggaagtcgcagtaacaaacagcggcagcagattttactgtcctttaagacagcctacggcaaggatctcattaaggatttaaagtcagagctgtccggaaatttcgagaaaacgattctggctctgatgaagactcccgttctgttcgacatttatgaaattaaagaagccatcaaaggtgtcggcacggacgaggcgtgcctcattgagattcttgctagcagatctaatgagcacattcgtgaactaaatagggcgtacaaggctgaatttaagaagaccctagaagaagcaattagatcagacaccagcggacatttccagcgtttgctcatcagtctgagccaaggcaatcgcgacgagtctacaaatgtggatatgagcctggcccaacgggacgcgcaggagttgtatgcagctggggagaatcgcctcgggacagatgaatctaagttcaacgccgtgctgtgcagtaggagccgcgctcacctggtggctgtgttcaatgagtatcagcggatgaccggcagggacatcgaaaaaagcatatgtagagagatgtctggagatctggaagaggggatgttggccgtggtgaaatgtctgaagaatacccctgccttctttgccgagcgcctgaacaaggcaatgaggggggctggtactaaggacaggaccctgataagaattatggtgagcagatcagagaccgatctcctggatatccgatcggaatacaaacgaatgtatgggaaaagcctgtaccacgacatctctggcgacactagcggcgactatcgaaaaattcttttgaaaatctgtggaggcaatgattag

SEQ ID NO: 98310 - DNA, 1239 bp, Artificial Sequence
  derived and/or modified sequence
atgcggggcagcagcacccggaccatcagccgggagtgctggcggctgtgggcagcgccattgtgccccgccgcgtgcagtagcttatgggacgtgtcaactcccaggcggaagccgacattgcaggacgcacttatttcagcaatcccatatccgggccagccacccgtgacataccccggccaacctcccgttccattacctggccagcagcagcctgttcccagttaccccggatatcctgggtccggcacggtaacccctgcagtgccaccgactcaatttggctcacgcggaactatcacggatgcacccggcttcgacccactgagggacgccgaggtgctgcgtaaggctatgaagggctttggtaccgatgaacaggccattatagattgccttggcagtcgctcgaataagcaacggcaacagatacttctgtcattcaagacagcatacgggaaggatttaataaaagacctgaaatcggaactgagcgggaatttcgaaaagacaattttagcccttatgaagaccccagtactgtttgacatttacgagattaaggaagccatcaagggggtagggacggatgaagcgtgcctcatcgagatcctggcctctcggtccaatgagcacatcagggaactgaatcgagcctacaaggccgaatttaagaagacccttgaggaggcaattagatctgatacttccggccattttcagagattgctgatctccctcagtcagggcaaccgcgatgagtccaccaatgtggacatgagcctggcccagcgggatgcgcaggaactttacgctgcaggcgaaaataggctggggaccgatgagtctaaattcaacgctgtactctgctcccgtagccgcgcccacttggtggccgtcttcaatgaataccagcggatgaccggcagagacattgaaaagtctatctgccgcgagatgtctggtgacctcgaagaaggtatgctggcagtcgtgaagtgtcttaagaacacgcccgccttcttcgcggagagattgaataaagctatgcgcggcgcgggcacaaaggatcggacactcataaggattatggtgagcagaagtgaaaccgacctgctggacatccgctctgagtacaagcggatgtatgggaagtctttgtaccacgatatcagcggggacacttctggtgattataggaagattctccttaagatctgtggcggtaatgactag

SEQ ID NO: 98311 - DNA, 453 bp, Artificial Sequence
  derived and/or modified sequence
atgagctaccccggctacccccccccccccggcggctacccccccgccgcaccgggagggggtccctggggaggtgctgcgtatcccccccccccaagcatgcctcctatcggtctggacaacgtggccacttatgcaggccagtttaaccaggactatctctctggcatggcagcaaacatgtctggcaccttcggaggagccaacatgccaaacctctatcccggcgcgcccggcgctgggtaccctccagtacctcccggaggcttcggacagcctccttccgcccagcagcccgtgcctccttacgggatgtaccccccaccagggggcaacccacctagcagaatgccaagctatccaccctaccccggtgctcctgtgccgggccagcctatgcccccacctggacagcaacctcctggggcgtaccctggacaacctcccgtctag

SEQ ID NO: 98312 - DNA, 1518 bp, Artificial Sequence
  derived and/or modified sequence
atgagctaccccggctacccccccccccccggcggctacccccccgccgcccccggggggggcccatggggaggtgctgcctacccacctccccccagtatgccccctattggattggataatgtcgccacctacgcagggcaattcaatcaggactacttgtctgggatggccgccaacatgtcagggaccttcggaggtgctaatatgccaaatctgtatccaggcgcccctggagctggatatcctcctgtgccacccggtggattcgggcagccacccagtgcacagcagccggtaccaccttacggcatgtacccaccacctgggggcaatcccccttcccgaatgccttcatacccaccctatcccggggcgcctgtcccaggccagcccatgccgccacccggccaacagcctcccggcgcctaccctggtcagccacccgttacctacccgggccagccacccgtgcccttgccaggccagcagcaacccgtgccttcatatccagggtatccagggagcgggacagtaactcctgccgtacctccgacccaatttggttcccgcggcactatcaccgacgctcccggctttgacccgttacgcgacgccgaggtgctgaggaaggccatgaaaggcttcgggacggacgagcaagctatcatcgactgccttggaagcaggtccaacaagcaaaggcaacagattctcctctcgttcaaaacagcctacggaaaagacctgataaaggatttaaaatctgagctttccggcaactttgaaaaaacaatcctggccctgatgaagaccccagtgctgttcgacatatacgagatcaaggaggctataaaaggggtcggcactgatgaagcctgtttaattgagatactggcatccaggtctaatgaacatatcagagaattaaatcgcgcgtataaggccgagtttaaaaaaaccttggaagaagccattcgatcagataccagtgggcatttccaaagattacttatctcactgtcacaggggaaccgcgacgagagcactaacgtagacatgtcattggcccagagggatgcccaggaattatatgctgccggcgaaaacagactggggactgacgagtccaaattcaacgccgtattgtgcagccgtagtcgagctcacttggtggcagtattcaatgaataccagagaatgacaggtcgggatattgaaaagtccatttgcagggagatgagcggcgacctggaggaagggatgctggccgtggtaaaatgtcttaagaatactccagcgtttttcgctgagcggctgaacaaagcaatgcgcggggctggcacgaaagatcggactctgattcgcatcatggtttcacgctctgagaccgaccttcttgacatcagatcggagtacaagagaatgtacggcaaatccctctaccatgacatctcaggggacacatccggggactatcgaaagatcctccttaagatctgcggaggaaatgactag

SEQ ID NO: 98313 - DNA, 615 bp, Artificial Sequence
  derived and/or modified sequence
atgagctaccccggctacccccccccccccggcggctacccccccgcagcccccggtggcggcccgtgggggggggccgcctatcctcctccaccaagtatgcctccgatcggcctcgacaacgtcgccacctatgcgggtcagtttaatcaagactacctgtctggcatggctgctaatatgagcggaacgttcggaggagccaacatgcctaacctatatccaggggcccctggggccggctaccccccagtacctcctggcgggttcgggcagccacctagcgcccagcaacccgtgccaccgtatggaatgtaccctccaccaggcggaaaccccccctctcggatgcctagttatcctccctatccaggtgcccccgtgcccggccagccgatgcctccccctgggcaacagccaccgggggcctatcccggacagccacccgttacctatccaggtcaacctcccgttcccttgcccggccagcagcagccagtgccctcgtatccaggttaccctggatcaggcacagtgactccggccgtcccgcccacgcagttcggaagtaggggcacaatcactgatgctcccggtttcgatccccttcggtag

SEQ ID NO: 98314 - DNA, 1518 bp, Artificial Sequence
  derived and/or modified sequence
atgagctaccccggctacccccccccccccggcggctacccccccgcagctcctgggggcggcccttgggggggggccgcgtatcctcctccaccctctatgccccctattggcctcgacaacgtggctacatatgcaggtcagttcaatcaggactatctctctggcatggctgctaacatgagcgggacctttgggggagcaaacatgcccaatctgtaccctggggccccaggtgccgggtacccccccgtcccccccggcgggttcggccagccaccaagtgcccaacaacccgtccctccttacggaatgtatcctcctcctggtggaaacccaccgtctagaatgcccagttatccaccataccctggtgcccctgttccagggcagccaatgccccctccaggccagcaaccgcccggtgcttacccagggcaaccacctgtgacctacccagggcagccacccgttcctctccctgggcagcaacagcctgtgccctcttaccctggctatcctgggtctgggaccgtgacgcccgccgtacctccgactcagtttgggtctcgcggcactattaccgacgcccctggatttgatccattgcgggacgcagaggttctacggaaggcaatgaagggatttggcactgacgaacaggccatcatcgactgtttaggcagtagaagcaataagcagaggcagcagatcctgctgagtttcaaaaccgcctatgggaaggacctcatcaaagaccttaaatcagagctatccggaaattttgagaaaacaatactggctttaatgaaaaccccagtgcttttcgatatctatgaaataaaagaggccattaagggggtagggactgacgaggcttgccttatcgagatcttggctagtcgctccaacgaacacattcgggagttaaacagagcctacaaagctgagtttaagaaaactttggaggaggcgattaggagtgacacaagtggccacttccaaaggctccttatttccctgagtcaaggaaatagggatgagagcactaatgtggacatgagcctggcccaacgcgacgctcaggagctgtatgcagcaggcgaaaataggttaggcaccgacgaatccaaattcaacgcagtgctgtgcagtaggagtagggcccatctcgtagctgtgtttaacgaatatcaacggatgaccggccgggacatcgagaagtcgatttgcagagagatgtctggagacctggaagaagggatgttggccgtggtgaaatgtctgaaaaataccccagcattctttgcagagaggttgaataaggctatgcggggagcagggactaaggatcgtacactgataaggattatggtgtccagatctgagacagatttgctagatatcaggtctgagtacaagagaatgtatggaaagagcctgtatcatgacatctctggggacacctctggcgactatcgcaaaatcctgcttaagatctgtggtgggaatgattag

SEQ ID NO: 98315 - DNA, 1419 bp, Artificial Sequence
  derived and/or modified sequence
atgccccccatcggcctggacaacgtggccacctacgccggccagtttaatcaggattacctctcgggcatggccgccaatatgtccgggactttcggaggcgcgaatatgccaaatctctatccaggggcacccggggccggatatccccccgtccccccaggaggatttgggcagcccccaagtgcccagcagcccgtgcctccctacgggatgtacccccctcccggcggtaaccctccttcaagaatgccttcttatcccccttaccctggcgctcccgtgccgggccagcccatgcctccccccggacagcaaccgccaggtgcttacccagggcagcctccagtgacctatcctggacagccaccagtgcctctacctggccagcaacagcccgtaccgtcttatcccgggtaccccgggagcggaacagttactcctgctgtgcctcccactcagttcggctcgcgagggaccattactgacgccccaggctttgaccccctgagagacgccgaggtgcttaggaaggccatgaaggggttcggaactgatgagcaggccattattgactgtttgggctcacggtctaataagcagcggcagcagatccttctctcttttaaaacagcctacggcaaggaccttatcaaagacttaaaatccgagttaagtgggaatttcgaaaagacgatcctagcactgatgaaaacaccggtgttgtttgacatttacgaaatcaaagaagctatcaaaggcgtaggaaccgacgaagcctgcttgatcgagatcttggccagcagaagtaatgaacatatcagggagcttaacagagcctacaaagcggaattcaaaaaaacactggaagaagcaattaggtcggacacatcaggtcacttccaacgactgttaataagcctgagtcagggcaatcgagacgaatccacaaacgtcgacatgtccctggctcagagagacgcacaagagctgtacgccgccggcgagaatcggttgggcaccgatgagagcaagttcaacgccgtcctgtgttccagaagccgcgcgcatctggtcgctgtgttcaacgaatatcagcgcatgactggccgggacatagagaagtctatttgtagggaaatgtccggcgatctagaagagggcatgctggccgtagtgaagtgcttgaagaacacacccgccttctttgcggagagactcaacaaagccatgcggggcgccggaactaaggaccgaaccctcattcggatcatggtcagcaggagcgaaaccgaccttctcgacattcggtccgagtacaagagaatgtacggtaagagcctgtaccacgatatcagcggcgatacttccggtgactacagaaaaattctgcttaaaatctgtggaggaaatgattag

SEQ ID NO: 98316 - DNA, 2534 bp, Artificial Sequence
  derived and/or modified sequence
gcactgcctctggcacctggggcagccgcgcccgcggagttttccgcccggcgctgacggctgctgcgcccgcggctccccagtgccccgagtgccccgcgggccccgcgagcgggagtgggacccagcccctaggcagaacccaggcgccgcgcccgggacgcccgcggagagagccactcccgcccacgtcccatttcgcccctcgcgtccggagtccccgtggccaggtgagggctctcaggcagagcctgaatgtgctttcgtcttctcttccagatctaaccatgagctaccctggctatcccccgcccccaggtggctacccaccagctgcaccaggtggtggtccctggggaggtgctgcctaccctcctccgcccagcatgccccccatcgggctggataacgtggccacctatgcggggcagttcaaccaggactatctctcgggaatggcggccaacatgtctgggacatttggaggagccaacatgcccaacctgtaccctggggcccctggggctggctacccaccagtgccccctggcggctttgggcagcccccctctgcccagcagcctgttcctccctatgggatgtatccacccccaggaggaaacccaccctccaggatgccctcatatccgccatacccaggggcccctgtgccgggccagcccatgccaccccccggacagcagcccccaggggcctaccctgggcagccaccagtgacctaccctggtcagcctccagtgccactccctgggcagcagcagccagtgccgagctacccaggatacccggggtctgggactgtcacccccgctgtgcccccaacccagtttggaagccgaggcaccatcactgatgctcccggctttgaccccctgcgagatgccgaggtcctgcggaaggccatgaaaggcttcgggacggatgagcaggccatcattgactgcctggggagtcgctccaacaagcagcggcagcagatcctactttccttcaagacggcttacggcaaggatttgatcaaagatctgaaatctgaactgtcaggaaactttgagaagacaatcttggctctgatgaagaccccagtcctctttgacatttatgagataaaggaagccatcaagggggttggcactgatgaagcctgcctgattgagatcctcgcttcccgcagcaatgagcacatccgagaattaaacagagcctacaaagcagaattcaaaaagaccctggaagaggccattcgaagcgacacatcagggcacttccagcggctcctcatctctctctctcagggaaaccgtgatgaaagcacaaacgtggacatgtcactcgcccagagagatgcccaggagctgtatgcggccggggagaaccgcctgggaacagacgagtccaagttcaatgcggttctgtgctcccggagccgggcccacctggtagcagttttcaatgagtaccagagaatgacaggccgggacattgagaagagcatctgccgggagatgtccggggacctggaggagggcatgctggccgtggtgaaatgtctcaagaataccccagccttctttgcggagaggctcaacaaggccatgaggggggcaggaacaaaggaccggaccctgattcgcatcatggtgtctcgcagcgagaccgacctcctggacatcagatcagagtataagcggatgtacggcaagtcgctgtaccacgacatctcgggagatacttcaggggattaccggaagattctgctgaagatctgtggtggcaatgactgaacagtgactggtggctcacttctgcccacctgccggcaacaccagtgccaggaaaaggccaaaagaatgtctgtttctaacaaatccacaaatagccccgagattcaccgtcctagagcttaggcctgtcttccacccctcctgacccgtatagtgtgccacaggacctgggtcggtctagaactctctcaggatgccttttctaccccatccctcacagcctcttgctgctaaaatagatgtttcatttttctgactcatgcaatcattcccctttgcctgtggctaagacttggcttcatttcgtcatgtaattgtatatttttatttggaggcatattttcttttcttacagtcattgccagacagaggcatacaagtctgtttgctgcatacacatttctggtgagggcgactgggtgggtgaagcaccgtgtcctcgctgaggagagaaagggaggcgtgcctgagaaggtagcctgtgcatctggtgagtgtgtcacgagctttgttactgccaaactcactcctttttagaaaaaacaaaaaaaaagggccagaaagtcattccttccatcttccttgcagaaaccacgagaacaaagccagttccctgtcagtgacagggcttcttgtaatttgtggtatgtgccttaaacctgaatgtctgtagccaaaacttgtttccacattaagagtcagccagctctggaatggtctggaaatgtc

SEQ ID NO: 98317 - DNA, 2729 bp, Artificial Sequence
  derived and/or modified sequence
gcactgcctctggcacctggggcagccgcgcccgcggagttttccgcccggcgctgacggctgctgcgcccgcggctccccagtgccccgagtgccccgcgggccccgcgagcgggagtgggacccagcccctaggcagaacccaggcgccgcgcccgggacgcccgcggagagagccactcccgcccacgtcccatttcgcccctcgcgtccggagtccccgtggccagggattattggacctgcctggtttaaactattgtcttagttaattttgtgctgctctaacaaaatatcacagactgagtaatttataagcaatagtagcttatttggctcacagttctggaggctgagaagatcgtgaggctgcatctggcaagggccttcttgctgcttcataacatggcagaagacatcatgcggcaggggctctcaggcagagcctgaatgtgctttcgtcttctcttccagatctaaccatgagctaccctggctatcccccgcccccaggtggctacccaccagctgcaccaggtggtggtccctggggaggtgctgcctaccctcctccgcccagcatgccccccatcgggctggataacgtggccacctatgcggggcagttcaaccaggactatctctcgggaatggcggccaacatgtctgggacatttggaggagccaacatgcccaacctgtaccctggggcccctggggctggctacccaccagtgccccctggcggctttgggcagcccccctctgcccagcagcctgttcctccctatgggatgtatccacccccaggaggaaacccaccctccaggatgccctcatatccgccatacccaggggcccctgtgccgggccagcccatgccaccccccggacagcagcccccaggggcctaccctgggcagccaccagtgacctaccctggtcagcctccagtgccactccctgggcagcagcagccagtgccgagctacccaggatacccggggtctgggactgtcacccccgctgtgcccccaacccagtttggaagccgaggcaccatcactgatgctcccggctttgaccccctgcgagatgccgaggtcctgcggaaggccatgaaaggcttcgggacggatgagcaggccatcattgactgcctggggagtcgctccaacaagcagcggcagcagatcctactttccttcaagacggcttacggcaaggatttgatcaaagatctgaaatctgaactgtcaggaaactttgagaagacaatcttggctctgatgaagaccccagtcctctttgacatttatgagataaaggaagccatcaagggggttggcactgatgaagcctgcctgattgagatcctcgcttcccgcagcaatgagcacatccgagaattaaacagagcctacaaagcagaattcaaaaagaccctggaagaggccattcgaagcgacacatcagggcacttccagcggctcctcatctctctctctcagggaaaccgtgatgaaagcacaaacgtggacatgtcactcgcccagagagatgcccaggagctgtatgcggccggggagaaccgcctgggaacagacgagtccaagttcaatgcggttctgtgctcccggagccgggcccacctggtagcagttttcaatgagtaccagagaatgacaggccgggacattgagaagagcatctgccgggagatgtccggggacctggaggagggcatgctggccgtggtgaaatgtctcaagaataccccagccttctttgcggagaggctcaacaaggccatgaggggggcaggaacaaaggaccggaccctgattcgcatcatggtgtctcgcagcgagaccgacctcctggacatcagatcagagtataagcggatgtacggcaagtcgctgtaccacgacatctcgggagatacttcaggggattaccggaagattctgctgaagatctgtggtggcaatgactgaacagtgactggtggctcacttctgcccacctgccggcaacaccagtgccaggaaaaggccaaaagaatgtctgtttctaacaaatccacaaatagccccgagattcaccgtcctagagcttaggcctgtcttccacccctcctgacccgtatagtgtgccacaggacctgggtcggtctagaactctctcaggatgccttttctaccccatccctcacagcctcttgctgctaaaatagatgtttcatttttctgactcatgcaatcattcccctttgcctgtggctaagacttggcttcatttcgtcatgtaattgtatatttttatttggaggcatattttcttttcttacagtcattgccagacagaggcatacaagtctgtttgctgcatacacatttctggtgagggcgactgggtgggtgaagcaccgtgtcctcgctgaggagagaaagggaggcgtgcctgagaaggtagcctgtgcatctggtgagtgtgtcacgagctttgttactgccaaactcactcctttttagaaaaaacaaaaaaaaagggccagaaagtcattccttccatcttccttgcagaaaccacgagaacaaagccagttccctgtcagtgacagggcttcttgtaatttgtggtatgtgccttaaacctgaatgtctgtagccaaaacttgtttccacattaagagtcagccagctctggaatggtctggaaatgtc

SEQ ID NO: 98318 - DNA, 1780 bp, Artificial Sequence
  derived and/or modified sequence
gacggctgctgcgcccgcggctccccagtgccccgagtgccccgcgggccccgcgagcgggagtgggacccagcccctaggcagaacccaggcgccgcgcccgggacgcccgcggagagagccactcccgcccacgtcccatttcgcccctcgcgtccggagtccccgtggccaggtgtgtgtctggggaagagacttacagaagtggagttgctgagtcaaagatctaaccatgagctaccctggctatcccccgcccccaggtggctacccaccagctgcaccaggtggtggtccctggggaggtgctgcctaccctcctccgcccagcatgccccccatcgggctggataacgtggccacctatgcggggcagttcaaccaggactatctctcgggaatggcggccaacatgtctgggacatttggaggagccaacatgcccaacctgtaccctggggcccctggggctggctacccaccagtgccccctggcggctttgggcagcccccctctgcccagcagcctgttcctccctatgggatgtatccacccccaggaggaaacccaccctccaggatgccctcatatccgccatacccaggggcccctgtgccgggccagcccatgccaccccccggacagcagcccccaggggcctaccctgggcagccaccagtgacctaccctggtcagcctccagtgccactccctgggcagcagcagccagtgccgagctacccaggatacccggggtctgggactgtcacccccgctgtgcccccaacccagtttggaagccgaggcaccatcactgatgctcccggctttgaccccctgcgagatgccgaggtcctgcggaaggccatgaaaggcttcgggacggatgagcaggccatcattgactgcctggggagtcgctccaacaagcagcggcagcagatcctactttccttcaagacggcttacggcaaggatttgatcaaagatctgaaatctgaactgtcaggaaactttgagaagacaatcttggctctgatgaagaccccagtcctctttgacatttatgagataaaggaagccatcaagggggttggcactgatgaagcctgcctgattgagatcctcgcttcccgcagcaatgagcacatccgagaattaaacagagcctacaaagcagaattcaaaaagaccctggaagaggccattcgaagcgacacatcagggcacttccagcggctcctcatctctctctctcagggaaaccgtgatgaaagcacaaacgtggacatgtcactcgcccagagagatgcccaggagctgtatgcggccggggagaaccgcctgggaacagacgagtccaagttcaatgcggttctgtgctcccggagccgggcccacctggtagcagttttcaatgagtaccagagaatgacaggccgggacattgagaagagcatctgccgggagatgtccggggacctggaggagggcatgctggccgtggtgaaatgtctcaagaataccccagccttctttgcggagaggctcaacaaggccatgaggggggcaggaacaaaggaccggaccctgattcgcatcatggtgtctcgcagcgagaccgacctcctggacatcagatcagagtataagcggatgtacggcaagtcgctgtaccacgacatctcgagtatctcctgcatgccagcaagctatggacatctggaagaagccacatgccttgccctcaagttgcttagggtggaaggaaatgattag

SEQ ID NO: 98319 - DNA, 6720 bp, Artificial Sequence
  derived and/or modified sequence
gcactgcctctggcacctggggcagccgcgcccgcggagttttccgcccggcgctgacggctgctgcgcccgcggctccccagtgccccgagtgccccgcgggccccgcgagcgggagtgggacccagcccctaggcagaacccaggcgccgcgcccgggacgcccgcggagagagccactcccgcccacgtcccatttcgcccctcgcgtccggagtccccgtggccagatctaaccatgagctaccctggctatcccccgcccccaggtggctacccaccagctgcaccaggtggtggtccctggggaggtgctgcctaccctcctccgcccagcatgccccccatcgggctggataacgtggccacctatgcggggcagttcaaccaggactatctctcgggaatggcggccaacatgtctgggacatttggaggagccaacatgcccaacctgtaccctggggcccctggggctggctacccaccagtgccccctggcggctttgggcagcccccctctgcccagcagcctgttcctccctatgggatgtatccacccccaggaggaaacccaccctccaggatgccctcatatccgccatacccaggggcccctgtgccgggccagcccatgccaccccccggacagcagcccccaggggcctaccctgggcagccaccagtgacctaccctggtcagcctccagtgccactccctgggcagcagcagccagtgccgagctacccaggatacccggggtctgggactgtcacccccgctgtgcccccaacccagtttggaagccgaggcaccatcactgatgctcccggctttgaccccctgcgagatgccgaggtcctgcggaaggccatgaaaggcttcgggacggatgagcaggccatcattgactgcctggggagtcgctccaacaagcagcggcagcagatcctactttccttcaagacggcttacggcaaggatttgatcaaagatctgaaatctgaactgtcaggaaactttgagaagacaatcttggctctgatgaagaccccagtcctctttgacatttatgagataaaggaagccatcaagggggttggcactgatgaagcctgcctgattgagatcctcgcttcccgcagcaatgagcacatccgagaattaaacagagcctacaaagcagaattcaaaaagaccctggaagaggccattcgaagcgacacatcagggcacttccagcggctcctcatctctctctctcagggaaaccgtgatgaaagcacaaacgtggacatgtcactcgcccagagagatgcccaggagctgtatgcggccggggagaaccgcctgggaacagacgagtccaagttcaatgcggttctgtgctcccggagccgggcccacctggtagcagttttcaatgagtaccagagaatgacaggccgggacattgagaagagcatctgccgggagatgtccggggacctggaggagggcatgctggccgtggtgaaatgtctcaagaataccccagccttctttgcggagaggctcaacaaggccatgaggggggcaggaacaaaggaccggaccctgattcgcatcatggtgtctcgcagcgagaccgacctcctggacatcagatcagagtataagcggatgtacggcaagtcgctgtaccacgacatctcgggagatacttcaggggattaccggaagattctgctgaagatctgtggtggcaatgactgaacagtgactggtggctcacttctgcccacctgccggcaacaccagtgccaggaaaaggccaaaagaatgtctgtttctaacaaatccacaaatagccccgagattcaccgtcctagagcttaggcctgtcttccacccctcctgacccgtatagtgtgccacaggacctgggtcggtctagaactctctcaggatgccttttctaccccatccctcacagcctcttgctgctaaaatagatgtttcatttttctgactcatgcaatcattcccctttgcctgtggctaagacttggcttcatttcgtcatgtaattgtatatttttatttggaggcatattttcttttcttacagtcattgccagacagaggcatacaagtctgtttgctgcatacacatttctggtgagggcgactgggtgggtgaagcaccgtgtcctcgctgaggagagaaagggaggcgtgcctgagaaggtagcctgtgcatctggtgagtgtgtcacgagctttgttactgccaaactcactcctttttagaaaaaacaaaaaaaaagggccagaaagtcattccttccatcttccttgcagaaaccacgagaacaaagccagttccctgtcagtgacagggcttcttgtaatttgtggtatgtgccttaaacctgaatgtctgtagccaaaacttgtttccacattaagagtcagccagctctggaatggtctggaaatgtcttcctggtaccaacttgttttcttctgcttgattctgccctgtggctcagaggtctggccttatcagccagtgaaagttcatgtaaccttacgtagagatttgtgtgcaggaaaccctgagcatacactagtttgcagggactcgtaaggacatgggaagggaggttcccgaaatccaggcaggaggcccagacacctgaaaggcaaagggatcttggttggttgcaggtgcagtgaagtccactgaaggtgtggtgcgaagaatgcagtccttcacccaggtcccaggagggaagaagggtgtgtgctaattcctggtgcccctcggcgggggccagagagaaggatggggacaacccagagagtcacaagaccagtgcctcccctcagggtgcctccaggctgaaaggggctcctggctctggtctctggggaccctgtgcccgttggttggtggtgtgagggaagagaatccataagagagtttctgagaattatggtgtcatgtccagaagctagagcttaccttgcatcaggggtctccacccactccttttccaacctcctgcgttgaggtttagaaaagagagaatcgactaggcactatggctcacgcctgtaatccaaggactttgggaagctgaggtgagaggatcacttgagctcaggagttcaagactagcctagccaacagcgagacccctgtctctactaaaaaatttggccaggcgtggtggctcacggctgtaatcccagcactttgggaggtgaggcgggcagatcacctgaggtcaggagttcgagacccagcctggccaacatggtgaaaccccatctctactaaaaatacaaaaattagccaggcatggtggcacattcctgtaatcccagctacacaggatgctgaggcaggagaatcacttgaacccaggaggcagaggttgtagtgagctgagatcacaccattgcacttcaacctgggtggacagagtgagactctgtctcaaaaaaaaaaaaaaatttacctggcattgtagtgcattccctatagtcggctactctggaggctgaggcaggaagatccttagagcccaagaaattgaggccgtagtaagctgtgattacaccactgcactccagcctggacaacagagcgagaccttgtctcaaatgagaaaaaaacaaaaagaaatgggagaatccagagagactaggctagatcaagcctgctgggtcctggcaggagccccagggagtagctcatctgcagacatttgcttgaggactaccccctaaacataaaggaagaatgacatccgaagggtgtggagcagccatgagctgagaactagcctggtctacctgagattgatggcaggtcctggtcaacacgtcagctctgcgtcagagtccatgcctcaagcccaagctgaagccccatccctgctgctctcccaagaactcctctgctagggcaggccccttgcccttgggtgccaggtgggacctgcctgatgggatggggtgcttggcatatacaacttgccatgaactcaaggtgaccctgggggcctcctgaattgtgatggggcctagaaccaatgtgctctgatgtgaccatattctgtgacattaccttgccctgtttactccaaagttcccagcctggtgcccagcaggcaatattgcacctacagacacatttactttggtttccaaagtgtttttagacatttgaatttgttgccaacatttaaacattgagagatttcatatttttaaaaatctggaattctggcttctcttgaaaactcagaaattctggcactatggggcttgcattcctgcatggctggagctgagttgcagctgcccctttaggcctgtactccttatttgctataggctccgtcttgtattacactaagcccatgtcacccatttggctcctgcaggcctttgggtttgagaccctggtctacacacttggagaccacctgttgtaaagtacatggatgtgctttggtcaaggaatagaccaaggtggatatccaggccagagtgactcagcgagtttaggtcacaggcgtatactccacttgttatataacctgcttgtgtaagttcatacttggctcaaagccactattgtttggaaaaggtataactgccctgctgacgctgtacagatgttcttgggctcggatgggcatggctccacgtggtgtgcactagcacccagagagagtgaagctattgacccctgtaagggagagtgaccatctggcagatagatagaggggagccaggacatggctcagcttgtgcccagagggagagttaagccgctgaccctgtagccagggagtgcacctgcaagcatgggggtggcaggagccacagagctggctgctgagaggagctgcagatctggagaagacagcctaggtaaaggtggacagtgtgagagctgctgatgagatagctgctgaataaaactacattttacctgcctatggcccgccaggttttctttcagctatcgcccatccacccagtcccctcgaacctcagcatgggctggaacctgaccctgggcatgacatttggcatagttgtggacctgacacctgtgtttgtcctagtcctgtttctccctgccttcctgttcctctcgctgccctcatggtcactcccaagagatccaacccatgttaagtatgggctggaggactgcatgaatgcctcatgatcttcccagaggcaaaggcacctactgccttccaaggtcagtgggaggttgggatcaacactgtttattatgcttaggacaaaaaagatagggagaaagatgtgcaaccttacaggtcatctttctgggatagaacacaatgggtcttctcctgcctcctggatatgttagtcaaggccagtccatgctacacatctagtctgacttctaaaatagaagcaccagatgaattcagccctgagagaattttcagcagctgtgggggcgctggaggaaacactattaaatagttttgcacctgagacagatagcctcactcgcctcaccctagtcctggtggcatttgtctcaggtgcaaaatttaagaaagaaaccttggagtgctcaccctgtggctgggtagatggtcctaaagtggtggttttcaagcctgagtgtgtatcaggatcatcaggggagcttgctaaagagcagttcctgcggtcagaccctcatgcattttgagcaggtgtggggactgggaaactgcatctgtaacctgctgtaatctaacgcttatctaaatactactgtgctcacacagagaacaccgcaaaagtagaggtgttcctccagagggcaggtgagcagatggcacagtctgcttggaattcagtcaggtgatgagagatgagatgaggcactcctagctttgggaagagggagctgaaagatgaacctttgcaggtgcccacggtcaaagtggtggtttaatgccatgccatgcccattttctgttggccttggcagggagttacagccctaccttaggacctggctccttatttctgctgtaggctctttcctgccctggccgagatggagtggaatgagacctagaaacatcaagctaaatacatgtcctcagaaagataaaggtttacattttcacccccatcaaatctgaaagctctctgcctgtgtttttctaagggatagggacatcattactcagtccacaacctggactcatgtagggtcccctgtcagtaaaggagtcagtcaagcccaccaggtataccaaggactcttaccctcagcccctactccttggaaagctgccccttggcctaatattggtgtttagcttgagcctgactccttctcaacactaagagctgatgaagtcctgaagcagaaagagctctgacctgagagtcaaacatccttattctgatctcagctcagcccctgatttgttgtgtgaccctggatatgtcacttcctgtctttttgactttttaaaatgaagggtagactagaggagagcttctaaaactttaatgtggtcaacgaaatggaataggaaattccacaagtctgtccttccacaaaagcagcaaataaggtggcaaaaactcaaatttatgggaactctggaaacgaattgaaagtttacagcaatcaggtgaatacctaagaataaaagctggatttagtaaga

SEQ ID NO: 98320 - DNA, 6699 bp, Artificial Sequence
  derived and/or modified sequence
ttcctggagcagctccgcagccggaaggctgctgctcctcgcgggcccgccgtgcccacccctaggcagaacccaggcgccgcgcccgggacgcccgcggagagagccactcccgcccacgtcccatttcgcccctcgcgtccggagtccccgtggccaggtgtgtgtctggggaagagacttacagaagtggagttgctgagtcaaagatctaaccatgagctaccctggctatcccccgcccccaggtggctacccaccagctgcaccaggtggtggtccctggggaggtgctgcctaccctcctccgcccagcatgccccccatcgggctggataacgtggccacctatgcggggcagttcaaccaggactatctctcgggaatggcggccaacatgtctgggacatttggaggagccaacatgcccaacctgtaccctggggcccctggggctggctacccaccagtgccccctggcggctttgggcagcccccctctgcccagcagcctgttcctccctatgggatgtatccacccccaggaggaaacccaccctccaggatgccctcatatccgccatacccaggggcccctgtgccgggccagcccatgccaccccccggacagcagcccccaggggcctaccctgggcagccaccagtgacctaccctggtcagcctccagtgccactccctgggcagcagcagccagtgccgagctacccaggatacccggggtctgggactgtcacccccgctgtgcccccaacccagtttggaagccgaggcaccatcactgatgctcccggctttgaccccctgcgagatgccgaggtcctgcggaaggccatgaaaggcttcgggacggatgagcaggccatcattgactgcctggggagtcgctccaacaagcagcggcagcagatcctactttccttcaagacggcttacggcaaggatttgatcaaagatctgaaatctgaactgtcaggaaactttgagaagacaatcttggctctgatgaagaccccagtcctctttgacatttatgagataaaggaagccatcaagggggttggcactgatgaagcctgcctgattgagatcctcgcttcccgcagcaatgagcacatccgagaattaaacagagcctacaaagcagaattcaaaaagaccctggaagaggccattcgaagcgacacatcagggcacttccagcggctcctcatctctctctctcagggaaaccgtgatgaaagcacaaacgtggacatgtcactcgcccagagagatgcccaggagctgtatgcggccggggagaaccgcctgggaacagacgagtccaagttcaatgcggttctgtgctcccggagccgggcccacctggtagcagttttcaatgagtaccagagaatgacaggccgggacattgagaagagcatctgccgggagatgtccggggacctggaggagggcatgctggccgtggtgaaatgtctcaagaataccccagccttctttgcggagaggctcaacaaggccatgaggggggcaggaacaaaggaccggaccctgattcgcatcatggtgtctcgcagcgagaccgacctcctggacatcagatcagagtataagcggatgtacggcaagtcgctgtaccacgacatctcgggagatacttcaggggattaccggaagattctgctgaagatctgtggtggcaatgactgaacagtgactggtggctcacttctgcccacctgccggcaacaccagtgccaggaaaaggccaaaagaatgtctgtttctaacaaatccacaaatagccccgagattcaccgtcctagagcttaggcctgtcttccacccctcctgacccgtatagtgtgccacaggacctgggtcggtctagaactctctcaggatgccttttctaccccatccctcacagcctcttgctgctaaaatagatgtttcatttttctgactcatgcaatcattcccctttgcctgtggctaagacttggcttcatttcgtcatgtaattgtatatttttatttggaggcatattttcttttcttacagtcattgccagacagaggcatacaagtctgtttgctgcatacacatttctggtgagggcgactgggtgggtgaagcaccgtgtcctcgctgaggagagaaagggaggcgtgcctgagaaggtagcctgtgcatctggtgagtgtgtcacgagctttgttactgccaaactcactcctttttagaaaaaacaaaaaaaaagggccagaaagtcattccttccatcttccttgcagaaaccacgagaacaaagccagttccctgtcagtgacagggcttcttgtaatttgtggtatgtgccttaaacctgaatgtctgtagccaaaacttgtttccacattaagagtcagccagctctggaatggtctggaaatgtcttcctggtaccaacttgttttcttctgcttgattctgccctgtggctcagaggtctggccttatcagccagtgaaagttcatgtaaccttacgtagagatttgtgtgcaggaaaccctgagcatacactagtttgcagggactcgtaaggacatgggaagggaggttcccgaaatccaggcaggaggcccagacacctgaaaggcaaagggatcttggttggttgcaggtgcagtgaagtccactgaaggtgtggtgcgaagaatgcagtccttcacccaggtcccaggagggaagaagggtgtgtgctaattcctggtgcccctcggcgggggccagagagaaggatggggacaacccagagagtcacaagaccagtgcctcccctcagggtgcctccaggctgaaaggggctcctggctctggtctctggggaccctgtgcccgttggttggtggtgtgagggaagagaatccataagagagtttctgagaattatggtgtcatgtccagaagctagagcttaccttgcatcaggggtctccacccactccttttccaacctcctgcgttgaggtttagaaaagagagaatcgactaggcactatggctcacgcctgtaatccaaggactttgggaagctgaggtgagaggatcacttgagctcaggagttcaagactagcctagccaacagcgagacccctgtctctactaaaaaatttggccaggcgtggtggctcacggctgtaatcccagcactttgggaggtgaggcgggcagatcacctgaggtcaggagttcgagacccagcctggccaacatggtgaaaccccatctctactaaaaatacaaaaattagccaggcatggtggcacattcctgtaatcccagctacacaggatgctgaggcaggagaatcacttgaacccaggaggcagaggttgtagtgagctgagatcacaccattgcacttcaacctgggtggacagagtgagactctgtctcaaaaaaaaaaaaaaatttacctggcattgtagtgcattccctatagtcggctactctggaggctgaggcaggaagatccttagagcccaagaaattgaggccgtagtaagctgtgattacaccactgcactccagcctggacaacagagcgagaccttgtctcaaatgagaaaaaaacaaaaagaaatgggagaatccagagagactaggctagatcaagcctgctgggtcctggcaggagccccagggagtagctcatctgcagacatttgcttgaggactaccccctaaacataaaggaagaatgacatccgaagggtgtggagcagccatgagctgagaactagcctggtctacctgagattgatggcaggtcctggtcaacacgtcagctctgcgtcagagtccatgcctcaagcccaagctgaagccccatccctgctgctctcccaagaactcctctgctagggcaggccccttgcccttgggtgccaggtgggacctgcctgatgggatggggtgcttggcatatacaacttgccatgaactcaaggtgaccctgggggcctcctgaattgtgatggggcctagaaccaatgtgctctgatgtgaccatattctgtgacattaccttgccctgtttactccaaagttcccagcctggtgcccagcaggcaatattgcacctacagacacatttactttggtttccaaagtgtttttagacatttgaatttgttgccaacatttaaacattgagagatttcatatttttaaaaatctggaattctggcttctcttgaaaactcagaaattctggcactatggggcttgcattcctgcatggctggagctgagttgcagctgcccctttaggcctgtactccttatttgctataggctccgtcttgtattacactaagcccatgtcacccatttggctcctgcaggcctttgggtttgagaccctggtctacacacttggagaccacctgttgtaaagtacatggatgtgctttggtcaaggaatagaccaaggtggatatccaggccagagtgactcagcgagtttaggtcacaggcgtatactccacttgttatataacctgcttgtgtaagttcatacttggctcaaagccactattgtttggaaaaggtataactgccctgctgacgctgtacagatgttcttgggctcggatgggcatggctccacgtggtgtgcactagcacccagagagagtgaagctattgacccctgtaagggagagtgaccatctggcagatagatagaggggagccaggacatggctcagcttgtgcccagagggagagttaagccgctgaccctgtagccagggagtgcacctgcaagcatgggggtggcaggagccacagagctggctgctgagaggagctgcagatctggagaagacagcctaggtaaaggtggacagtgtgagagctgctgatgagatagctgctgaataaaactacattttacctgcctatggcccgccaggttttctttcagctatcgcccatccacccagtcccctcgaacctcagcatgggctggaacctgaccctgggcatgacatttggcatagttgtggacctgacacctgtgtttgtcctagtcctgtttctccctgccttcctgttcctctcgctgccctcatggtcactcccaagagatccaacccatgttaagtatgggctggaggactgcatgaatgcctcatgatcttcccagaggcaaaggcacctactgccttccaaggtcagtgggaggttgggatcaacactgtttattatgcttaggacaaaaaagatagggagaaagatgtgcaaccttacaggtcatctttctgggatagaacacaatgggtcttctcctgcctcctggatatgttagtcaaggccagtccatgctacacatctagtctgacttctaaaatagaagcaccagatgaattcagccctgagagaattttcagcagctgtgggggcgctggaggaaacactattaaatagttttgcacctgagacagatagcctcactcgcctcaccctagtcctggtggcatttgtctcaggtgcaaaatttaagaaagaaaccttggagtgctcaccctgtggctgggtagatggtcctaaagtggtggttttcaagcctgagtgtgtatcaggatcatcaggggagcttgctaaagagcagttcctgcggtcagaccctcatgcattttgagcaggtgtggggactgggaaactgcatctgtaacctgctgtaatctaacgcttatctaaatactactgtgctcacacagagaacaccgcaaaagtagaggtgttcctccagagggcaggtgagcagatggcacagtctgcttggaattcagtcaggtgatgagagatgagatgaggcactcctagctttgggaagagggagctgaaagatgaacctttgcaggtgcccacggtcaaagtggtggtttaatgccatgccatgcccattttctgttggccttggcagggagttacagccctaccttaggacctggctccttatttctgctgtaggctctttcctgccctggccgagatggagtggaatgagacctagaaacatcaagctaaatacatgtcctcagaaagataaaggtttacattttcacccccatcaaatctgaaagctctctgcctgtgtttttctaagggatagggacatcattactcagtccacaacctggactcatgtagggtcccctgtcagtaaaggagtcagtcaagcccaccaggtataccaaggactcttaccctcagcccctactccttggaaagctgccccttggcctaatattggtgtttagcttgagcctgactccttctcaacactaagagctgatgaagtcctgaagcagaaagagctctgacctgagagtcaaacatccttattctgatctcagctcagcccctgatttgttgtgtgaccctggatatgtcacttcctgtctttttgactttttaaaatgaagggtagactagaggagagcttctaaaactttaatgtggtcaacgaaatggaataggaaattccacaagtctgtccttccacaaaagcagcaaataaggtggcaaaaactcaaatttatgggaactctggaaacgaattgaaagtttacagcaatcaggtgaatacctaagaataaaagctggatttagtaaga

SEQ ID NO: 98321 - DNA, 6769 bp, Artificial Sequence
  derived and/or modified sequence
gcactgcctctggcacctggggcagccgcgcccgcggagttttccgcccggcgctgacggctgctgcgcccgcggctccccagtgccccgagtgccccgcgggccccgcgagcgggagtgggacccagcccctaggcagaacccaggcgccgcgcccgggacgcccgcggagagagccactcccgcccacgtcccatttcgcccctcgcgtccggagtccccgtggccaggtgtgtgtctggggaagagacttacagaagtggagttgctgagtcaaagatctaaccatgagctaccctggctatcccccgcccccaggtggctacccaccagctgcaccaggtggtggtccctggggaggtgctgcctaccctcctccgcccagcatgccccccatcgggctggataacgtggccacctatgcggggcagttcaaccaggactatctctcgggaatggcggccaacatgtctgggacatttggaggagccaacatgcccaacctgtaccctggggcccctggggctggctacccaccagtgccccctggcggctttgggcagcccccctctgcccagcagcctgttcctccctatgggatgtatccacccccaggaggaaacccaccctccaggatgccctcatatccgccatacccaggggcccctgtgccgggccagcccatgccaccccccggacagcagcccccaggggcctaccctgggcagccaccagtgacctaccctggtcagcctccagtgccactccctgggcagcagcagccagtgccgagctacccaggatacccggggtctgggactgtcacccccgctgtgcccccaacccagtttggaagccgaggcaccatcactgatgctcccggctttgaccccctgcgagatgccgaggtcctgcggaaggccatgaaaggcttcgggacggatgagcaggccatcattgactgcctggggagtcgctccaacaagcagcggcagcagatcctactttccttcaagacggcttacggcaaggatttgatcaaagatctgaaatctgaactgtcaggaaactttgagaagacaatcttggctctgatgaagaccccagtcctctttgacatttatgagataaaggaagccatcaagggggttggcactgatgaagcctgcctgattgagatcctcgcttcccgcagcaatgagcacatccgagaattaaacagagcctacaaagcagaattcaaaaagaccctggaagaggccattcgaagcgacacatcagggcacttccagcggctcctcatctctctctctcagggaaaccgtgatgaaagcacaaacgtggacatgtcactcgcccagagagatgcccaggagctgtatgcggccggggagaaccgcctgggaacagacgagtccaagttcaatgcggttctgtgctcccggagccgggcccacctggtagcagttttcaatgagtaccagagaatgacaggccgggacattgagaagagcatctgccgggagatgtccggggacctggaggagggcatgctggccgtggtgaaatgtctcaagaataccccagccttctttgcggagaggctcaacaaggccatgaggggggcaggaacaaaggaccggaccctgattcgcatcatggtgtctcgcagcgagaccgacctcctggacatcagatcagagtataagcggatgtacggcaagtcgctgtaccacgacatctcgggagatacttcaggggattaccggaagattctgctgaagatctgtggtggcaatgactgaacagtgactggtggctcacttctgcccacctgccggcaacaccagtgccaggaaaaggccaaaagaatgtctgtttctaacaaatccacaaatagccccgagattcaccgtcctagagcttaggcctgtcttccacccctcctgacccgtatagtgtgccacaggacctgggtcggtctagaactctctcaggatgccttttctaccccatccctcacagcctcttgctgctaaaatagatgtttcatttttctgactcatgcaatcattcccctttgcctgtggctaagacttggcttcatttcgtcatgtaattgtatatttttatttggaggcatattttcttttcttacagtcattgccagacagaggcatacaagtctgtttgctgcatacacatttctggtgagggcgactgggtgggtgaagcaccgtgtcctcgctgaggagagaaagggaggcgtgcctgagaaggtagcctgtgcatctggtgagtgtgtcacgagctttgttactgccaaactcactcctttttagaaaaaacaaaaaaaaagggccagaaagtcattccttccatcttccttgcagaaaccacgagaacaaagccagttccctgtcagtgacagggcttcttgtaatttgtggtatgtgccttaaacctgaatgtctgtagccaaaacttgtttccacattaagagtcagccagctctggaatggtctggaaatgtcttcctggtaccaacttgttttcttctgcttgattctgccctgtggctcagaggtctggccttatcagccagtgaaagttcatgtaaccttacgtagagatttgtgtgcaggaaaccctgagcatacactagtttgcagggactcgtaaggacatgggaagggaggttcccgaaatccaggcaggaggcccagacacctgaaaggcaaagggatcttggttggttgcaggtgcagtgaagtccactgaaggtgtggtgcgaagaatgcagtccttcacccaggtcccaggagggaagaagggtgtgtgctaattcctggtgcccctcggcgggggccagagagaaggatggggacaacccagagagtcacaagaccagtgcctcccctcagggtgcctccaggctgaaaggggctcctggctctggtctctggggaccctgtgcccgttggttggtggtgtgagggaagagaatccataagagagtttctgagaattatggtgtcatgtccagaagctagagcttaccttgcatcaggggtctccacccactccttttccaacctcctgcgttgaggtttagaaaagagagaatcgactaggcactatggctcacgcctgtaatccaaggactttgggaagctgaggtgagaggatcacttgagctcaggagttcaagactagcctagccaacagcgagacccctgtctctactaaaaaatttggccaggcgtggtggctcacggctgtaatcccagcactttgggaggtgaggcgggcagatcacctgaggtcaggagttcgagacccagcctggccaacatggtgaaaccccatctctactaaaaatacaaaaattagccaggcatggtggcacattcctgtaatcccagctacacaggatgctgaggcaggagaatcacttgaacccaggaggcagaggttgtagtgagctgagatcacaccattgcacttcaacctgggtggacagagtgagactctgtctcaaaaaaaaaaaaaaatttacctggcattgtagtgcattccctatagtcggctactctggaggctgaggcaggaagatccttagagcccaagaaattgaggccgtagtaagctgtgattacaccactgcactccagcctggacaacagagcgagaccttgtctcaaatgagaaaaaaacaaaaagaaatgggagaatccagagagactaggctagatcaagcctgctgggtcctggcaggagccccagggagtagctcatctgcagacatttgcttgaggactaccccctaaacataaaggaagaatgacatccgaagggtgtggagcagccatgagctgagaactagcctggtctacctgagattgatggcaggtcctggtcaacacgtcagctctgcgtcagagtccatgcctcaagcccaagctgaagccccatccctgctgctctcccaagaactcctctgctagggcaggccccttgcccttgggtgccaggtgggacctgcctgatgggatggggtgcttggcatatacaacttgccatgaactcaaggtgaccctgggggcctcctgaattgtgatggggcctagaaccaatgtgctctgatgtgaccatattctgtgacattaccttgccctgtttactccaaagttcccagcctggtgcccagcaggcaatattgcacctacagacacatttactttggtttccaaagtgtttttagacatttgaatttgttgccaacatttaaacattgagagatttcatatttttaaaaatctggaattctggcttctcttgaaaactcagaaattctggcactatggggcttgcattcctgcatggctggagctgagttgcagctgcccctttaggcctgtactccttatttgctataggctccgtcttgtattacactaagcccatgtcacccatttggctcctgcaggcctttgggtttgagaccctggtctacacacttggagaccacctgttgtaaagtacatggatgtgctttggtcaaggaatagaccaaggtggatatccaggccagagtgactcagcgagtttaggtcacaggcgtatactccacttgttatataacctgcttgtgtaagttcatacttggctcaaagccactattgtttggaaaaggtataactgccctgctgacgctgtacagatgttcttgggctcggatgggcatggctccacgtggtgtgcactagcacccagagagagtgaagctattgacccctgtaagggagagtgaccatctggcagatagatagaggggagccaggacatggctcagcttgtgcccagagggagagttaagccgctgaccctgtagccagggagtgcacctgcaagcatgggggtggcaggagccacagagctggctgctgagaggagctgcagatctggagaagacagcctaggtaaaggtggacagtgtgagagctgctgatgagatagctgctgaataaaactacattttacctgcctatggcccgccaggttttctttcagctatcgcccatccacccagtcccctcgaacctcagcatgggctggaacctgaccctgggcatgacatttggcatagttgtggacctgacacctgtgtttgtcctagtcctgtttctccctgccttcctgttcctctcgctgccctcatggtcactcccaagagatccaacccatgttaagtatgggctggaggactgcatgaatgcctcatgatcttcccagaggcaaaggcacctactgccttccaaggtcagtgggaggttgggatcaacactgtttattatgcttaggacaaaaaagatagggagaaagatgtgcaaccttacaggtcatctttctgggatagaacacaatgggtcttctcctgcctcctggatatgttagtcaaggccagtccatgctacacatctagtctgacttctaaaatagaagcaccagatgaattcagccctgagagaattttcagcagctgtgggggcgctggaggaaacactattaaatagttttgcacctgagacagatagcctcactcgcctcaccctagtcctggtggcatttgtctcaggtgcaaaatttaagaaagaaaccttggagtgctcaccctgtggctgggtagatggtcctaaagtggtggttttcaagcctgagtgtgtatcaggatcatcaggggagcttgctaaagagcagttcctgcggtcagaccctcatgcattttgagcaggtgtggggactgggaaactgcatctgtaacctgctgtaatctaacgcttatctaaatactactgtgctcacacagagaacaccgcaaaagtagaggtgttcctccagagggcaggtgagcagatggcacagtctgcttggaattcagtcaggtgatgagagatgagatgaggcactcctagctttgggaagagggagctgaaagatgaacctttgcaggtgcccacggtcaaagtggtggtttaatgccatgccatgcccattttctgttggccttggcagggagttacagccctaccttaggacctggctccttatttctgctgtaggctctttcctgccctggccgagatggagtggaatgagacctagaaacatcaagctaaatacatgtcctcagaaagataaaggtttacattttcacccccatcaaatctgaaagctctctgcctgtgtttttctaagggatagggacatcattactcagtccacaacctggactcatgtagggtcccctgtcagtaaaggagtcagtcaagcccaccaggtataccaaggactcttaccctcagcccctactccttggaaagctgccccttggcctaatattggtgtttagcttgagcctgactccttctcaacactaagagctgatgaagtcctgaagcagaaagagctctgacctgagagtcaaacatccttattctgatctcagctcagcccctgatttgttgtgtgaccctggatatgtcacttcctgtctttttgactttttaaaatgaagggtagactagaggagagcttctaaaactttaatgtggtcaacgaaatggaataggaaattccacaagtctgtccttccacaaaagcagcaaataaggtggcaaaaactcaaatttatgggaactctggaaacgaattgaaagtttacagcaatcaggtgaatacctaagaataaaagctggatttagtaaga

SEQ ID NO: 98322 - DNA, 1859 bp, Artificial Sequence
  derived and/or modified sequence
gacggctgctgcgcccgcggctccccagtgccccgagtgccccgcgggccccgcgagcgggagtgggacccagcccctaggcagaacccaggcgccgcgcccgggacgcccgcggagagagccactcccgcccacgtcccatttcgcccctcgcgtccggagtccccgtggccaggtgtgtgtctggggaagagacttacagaagtggagttgctgagtcaaagatctaaccatgagctaccctggctatcccccgcccccaggtggctacccaccagctgcaccaggtggtggtccctggggaggtgctgcctaccctcctccgcccagcatgccccccatcgggctggataacgtggccacctatgcggggcagttcaaccaggactatctctcgggaatgctggcggctttgggcagcccccctctgcccagcagcctgttcctccctatgggatgtatccacccccaggaggaaacccaccctccaggatgccctcatatccgccataccctaccctgggcagccaccagtgacctaccctggtcagcctccagtgccactccctgggcagcagcagccagtgccgagctacccaggatacccggggtctgggactgtcacccccgctgtgcccccaacccagtttggaagccgaggcaccatcactgatgctcccggctttgaccccctgcgagatgccgaggtcctgcggaaggccatgaaaggcttcgggacggatgagcaggccatcattgactgcctggggagtcgctccaacaagcagcggcagcagatcctactttccttcaagacggcttacggcaaggatttgatcaaagatctgaaatctgaactgtcaggaaactttgagaagacaatcttggctctgatgaagaccccagtcctctttgacatttatgagataaaggaagccatcaagggggttggcactgatgaagcctgcctgattgagatcctcgcttcccgcagcaatgagcacatccgagaattaaacagagcctacaaagcagaattcaaaaagaccctggaagaggccattcgaagcgacacatcagggcacttccagcggctcctcatctctctctctcagggaaaccgtgatgaaagcacaaacgtggacatgtcactcgcccagagagatgcccaggagctgtatgcggccggggagaaccgcctgggaacagacgagtccaagttcaatgcggttctgtgctcccggagccgggcccacctggtagcagttttcaatgagtaccagagaatgacaggccgggacattgagaagagcatctgccgggagatgtccggggacctggaggagggcatgctggccgtggtgaaatgtctcaagaataccccagccttctttgcggagaggctcaacaaggccatgaggggggcaggaacaaaggaccggaccctgattcgcatcatggtgtctcgcagcgagaccgacctcctggacatcagatcagagtataagcggatgtacggcaagtcgctgtaccacgacatctcgggagatacttcaggggattaccggaagattctgctgaagatctgtggtggcaatgactgaacagtgactggtggctcacttctgcccacctgccggcaacaccagtgccaggaaaaggccaaaagaatgtctgtttctaacaaatccacaaatagccccgagattcaccgtcctagagcttaggcctgtcttccacccctcctgacccgtatagtgtgccacaggacctgggtcggtctagaactctctcaggatgccttttctaccccatccctcacagcctcttgctgctaaaatagatgtttcatttttctg

SEQ ID NO: 98323 - DNA, 610 bp, Artificial Sequence
  derived and/or modified sequence
agtgaactggtctgcgacaagcagggcagatgcagcagtttcttctgcagggtcccagttgtggtggtggctgccctttcaagaagctgggtcccacgggccagcaggggctctcaggcagagcctgaatgtgctttcgtcttctcttccagatctaaccatgagctaccctggctatcccccgcccccaggtggctacccaccagctgcaccaggtggtggtccctggggaggtgctgcctaccctcctccgcccagcatgccccccatcgggctggataacgtggccacctatgcggggcagttcaaccaggactatctctcgggaatggcggccaacatgtctgggacatttggaggagccaacatgcccaacctgtaccctggggcccctggggctggctacccaccagtgccccctggcggctttgggcagcccccctctgcccagcagcctgttcctccctatgggatgtatccacccccaggaggaaacccaccctccaggatgccctcatatccgccatacccaggggcccctgtgccgggccagcccatgccaccccccggacagcagcccccaggggcctaccctgggcagccaccagtg

SEQ ID NO: 98324 - DNA, 6965 bp, Artificial Sequence
  derived and/or modified sequence
gcactgcctctggcacctggggcagccgcgcccgcggagttttccgcccggcgctgacggctgctgcgcccgcggctccccagtgccccgagtgccccgcgggccccgcgagcgggagtgggacccagcccctaggcagaacccaggcgccgcgcccgggacgcccgcggagagagccactcccgcccacgtcccatttcgcccctcgcgtccggagtccccgtggccagggattattggacctgcctggtttaaactattgtcttagttaattttgtgctgctctaacaaaatatcacagactgagtaatttataagcaatagtagcttatttggctcacagttctggaggctgagaagatcgtgaggctgcatctggcaagggccttcttgctgcttcataacatggcagaagacatcatgcgggtgtgtgtctggggaagagacttacagaagtggagttgctgagtcaaagatctaaccatgagctaccctggctatcccccgcccccaggtggctacccaccagctgcaccaggtggtggtccctggggaggtgctgcctaccctcctccgcccagcatgccccccatcgggctggataacgtggccacctatgcggggcagttcaaccaggactatctctcgggaatggcggccaacatgtctgggacatttggaggagccaacatgcccaacctgtaccctggggcccctggggctggctacccaccagtgccccctggcggctttgggcagcccccctctgcccagcagcctgttcctccctatgggatgtatccacccccaggaggaaacccaccctccaggatgccctcatatccgccatacccaggggcccctgtgccgggccagcccatgccaccccccggacagcagcccccaggggcctaccctgggcagccaccagtgacctaccctggtcagcctccagtgccactccctgggcagcagcagccagtgccgagctacccaggatacccggggtctgggactgtcacccccgctgtgcccccaacccagtttggaagccgaggcaccatcactgatgctcccggctttgaccccctgcgagatgccgaggtcctgcggaaggccatgaaaggcttcgggacggatgagcaggccatcattgactgcctggggagtcgctccaacaagcagcggcagcagatcctactttccttcaagacggcttacggcaaggatttgatcaaagatctgaaatctgaactgtcaggaaactttgagaagacaatcttggctctgatgaagaccccagtcctctttgacatttatgagataaaggaagccatcaagggggttggcactgatgaagcctgcctgattgagatcctcgcttcccgcagcaatgagcacatccgagaattaaacagagcctacaaagcagaattcaaaaagaccctggaagaggccattcgaagcgacacatcagggcacttccagcggctcctcatctctctctctcagggaaaccgtgatgaaagcacaaacgtggacatgtcactcgcccagagagatgcccaggagctgtatgcggccggggagaaccgcctgggaacagacgagtccaagttcaatgcggttctgtgctcccggagccgggcccacctggtagcagttttcaatgagtaccagagaatgacaggccgggacattgagaagagcatctgccgggagatgtccggggacctggaggagggcatgctggccgtggtgaaatgtctcaagaataccccagccttctttgcggagaggctcaacaaggccatgaggggggcaggaacaaaggaccggaccctgattcgcatcatggtgtctcgcagcgagaccgacctcctggacatcagatcagagtataagcggatgtacggcaagtcgctgtaccacgacatctcgggagatacttcaggggattaccggaagattctgctgaagatctgtggtggcaatgactgaacagtgactggtggctcacttctgcccacctgccggcaacaccagtgccaggaaaaggccaaaagaatgtctgtttctaacaaatccacaaatagccccgagattcaccgtcctagagcttaggcctgtcttccacccctcctgacccgtatagtgtgccacaggacctgggtcggtctagaactctctcaggatgccttttctaccccatccctcacagcctcttgctgctaaaatagatgtttcatttttctgactcatgcaatcattcccctttgcctgtggctaagacttggcttcatttcgtcatgtaattgtatatttttatttggaggcatattttcttttcttacagtcattgccagacagaggcatacaagtctgtttgctgcatacacatttctggtgagggcgactgggtgggtgaagcaccgtgtcctcgctgaggagagaaagggaggcgtgcctgagaaggtagcctgtgcatctggtgagtgtgtcacgagctttgttactgccaaactcactcctttttagaaaaaacaaaaaaaaagggccagaaagtcattccttccatcttccttgcagaaaccacgagaacaaagccagttccctgtcagtgacagggcttcttgtaatttgtggtatgtgccttaaacctgaatgtctgtagccaaaacttgtttccacattaagagtcagccagctctggaatggtctggaaatgtcttcctggtaccaacttgttttcttctgcttgattctgccctgtggctcagaggtctggccttatcagccagtgaaagttcatgtaaccttacgtagagatttgtgtgcaggaaaccctgagcatacactagtttgcagggactcgtaaggacatgggaagggaggttcccgaaatccaggcaggaggcccagacacctgaaaggcaaagggatcttggttggttgcaggtgcagtgaagtccactgaaggtgtggtgcgaagaatgcagtccttcacccaggtcccaggagggaagaagggtgtgtgctaattcctggtgcccctcggcgggggccagagagaaggatggggacaacccagagagtcacaagaccagtgcctcccctcagggtgcctccaggctgaaaggggctcctggctctggtctctggggaccctgtgcccgttggttggtggtgtgagggaagagaatccataagagagtttctgagaattatggtgtcatgtccagaagctagagcttaccttgcatcaggggtctccacccactccttttccaacctcctgcgttgaggtttagaaaagagagaatcgactaggcactatggctcacgcctgtaatccaaggactttgggaagctgaggtgagaggatcacttgagctcaggagttcaagactagcctagccaacagcgagacccctgtctctactaaaaaatttggccaggcgtggtggctcacggctgtaatcccagcactttgggaggtgaggcgggcagatcacctgaggtcaggagttcgagacccagcctggccaacatggtgaaaccccatctctactaaaaatacaaaaattagccaggcatggtggcacattcctgtaatcccagctacacaggatgctgaggcaggagaatcacttgaacccaggaggcagaggttgtagtgagctgagatcacaccattgcacttcaacctgggtggacagagtgagactctgtctcaaaaaaaaaaaaaaatttacctggcattgtagtgcattccctatagtcggctactctggaggctgaggcaggaagatccttagagcccaagaaattgaggccgtagtaagctgtgattacaccactgcactccagcctggacaacagagcgagaccttgtctcaaatgagaaaaaaacaaaaagaaatgggagaatccagagagactaggctagatcaagcctgctgggtcctggcaggagccccagggagtagctcatctgcagacatttgcttgaggactaccccctaaacataaaggaagaatgacatccgaagggtgtggagcagccatgagctgagaactagcctggtctacctgagattgatggcaggtcctggtcaacacgtcagctctgcgtcagagtccatgcctcaagcccaagctgaagccccatccctgctgctctcccaagaactcctctgctagggcaggccccttgcccttgggtgccaggtgggacctgcctgatgggatggggtgcttggcatatacaacttgccatgaactcaaggtgaccctgggggcctcctgaattgtgatggggcctagaaccaatgtgctctgatgtgaccatattctgtgacattaccttgccctgtttactccaaagttcccagcctggtgcccagcaggcaatattgcacctacagacacatttactttggtttccaaagtgtttttagacatttgaatttgttgccaacatttaaacattgagagatttcatatttttaaaaatctggaattctggcttctcttgaaaactcagaaattctggcactatggggcttgcattcctgcatggctggagctgagttgcagctgcccctttaggcctgtactccttatttgctataggctccgtcttgtattacactaagcccatgtcacccatttggctcctgcaggcctttgggtttgagaccctggtctacacacttggagaccacctgttgtaaagtacatggatgtgctttggtcaaggaatagaccaaggtggatatccaggccagagtgactcagcgagtttaggtcacaggcgtatactccacttgttatataacctgcttgtgtaagttcatacttggctcaaagccactattgtttggaaaaggtataactgccctgctgacgctgtacagatgttcttgggctcggatgggcatggctccacgtggtgtgcactagcacccagagagagtgaagctattgacccctgtaagggagagtgaccatctggcagatagatagaggggagccaggacatggctcagcttgtgcccagagggagagttaagccgctgaccctgtagccagggagtgcacctgcaagcatgggggtggcaggagccacagagctggctgctgagaggagctgcagatctggagaagacagcctaggtaaaggtggacagtgtgagagctgctgatgagatagctgctgaataaaactacattttacctgcctatggcccgccaggttttctttcagctatcgcccatccacccagtcccctcgaacctcagcatgggctggaacctgaccctgggcatgacatttggcatagttgtggacctgacacctgtgtttgtcctagtcctgtttctccctgccttcctgttcctctcgctgccctcatggtcactcccaagagatccaacccatgttaagtatgggctggaggactgcatgaatgcctcatgatcttcccagaggcaaaggcacctactgccttccaaggtcagtgggaggttgggatcaacactgtttattatgcttaggacaaaaaagatagggagaaagatgtgcaaccttacaggtcatctttctgggatagaacacaatgggtcttctcctgcctcctggatatgttagtcaaggccagtccatgctacacatctagtctgacttctaaaatagaagcaccagatgaattcagccctgagagaattttcagcagctgtgggggcgctggaggaaacactattaaatagttttgcacctgagacagatagcctcactcgcctcaccctagtcctggtggcatttgtctcaggtgcaaaatttaagaaagaaaccttggagtgctcaccctgtggctgggtagatggtcctaaagtggtggttttcaagcctgagtgtgtatcaggatcatcaggggagcttgctaaagagcagttcctgcggtcagaccctcatgcattttgagcaggtgtggggactgggaaactgcatctgtaacctgctgtaatctaacgcttatctaaatactactgtgctcacacagagaacaccgcaaaagtagaggtgttcctccagagggcaggtgagcagatggcacagtctgcttggaattcagtcaggtgatgagagatgagatgaggcactcctagctttgggaagagggagctgaaagatgaacctttgcaggtgcccacggtcaaagtggtggtttaatgccatgccatgcccattttctgttggccttggcagggagttacagccctaccttaggacctggctccttatttctgctgtaggctctttcctgccctggccgagatggagtggaatgagacctagaaacatcaagctaaatacatgtcctcagaaagataaaggtttacattttcacccccatcaaatctgaaagctctctgcctgtgtttttctaagggatagggacatcattactcagtccacaacctggactcatgtagggtcccctgtcagtaaaggagtcagtcaagcccaccaggtataccaaggactcttaccctcagcccctactccttggaaagctgccccttggcctaatattggtgtttagcttgagcctgactccttctcaacactaagagctgatgaagtcctgaagcagaaagagctctgacctgagagtcaaacatccttattctgatctcagctcagcccctgatttgttgtgtgaccctggatatgtcacttcctgtctttttgactttttaaaatgaagggtagactagaggagagcttctaaaactttaatgtggtcaacgaaatggaataggaaattccacaagtctgtccttccacaaaagcagcaaataaggtggcaaaaactcaaatttatgggaactctggaaacgaattgaaagtttacagcaatcaggtgaatacctaagaataaaagctggatttagtaaga

SEQ ID NO: 98325 - DNA, 1051 bp, Artificial Sequence
  derived and/or modified sequence
cgcgcccgcggagttttccgcccggcgctgacggctgctgcgcccgcggctccccagtgccccgagtgccccgcgggccccgcgagcgggagtgggacccagcccctaggcagaacccaggcgccgcgcccgggacgcccgcggagagagccactcccgcccacgtcccatttcgcccctcgcgtccggagtccccgtggccaggtgtgtgtctggggaagagacttacagaagtggagttgctgagtcaaaggaacgatgattccataccttaccaggtccccttgcctgatgaaccagaggttggagaatgaagagagacaggggcctctgacttcccctgttgctggagggatggcaataaggacacaggaagataaatagacagacctggagtcctgagaatgaggcagtgcgtctctacctctgagatctaaccatgagctaccctggctatcccccgcccccaggtggctacccaccagctgcaccaggtggtggtccctggggaggtgctgcctaccctcctccgcccagcatgccccccatcgggctggataacgtggccacctatgcggggcagttcaaccaggactatctctcgggaatggcggccaacatgtctgggacatttggaggagccaacatgcccaacctgtaccctggggcccctggggctggctacccaccagtgccccctggcggctttgggcagcccccctctgcccagcagcctgttcctccctatgggatgtatccacccccaggaggaaacccaccctccaggatgccctcatatccgccatacccaggggcccctgtgccgggccagcccatgccaccccccggacagcagcccccaggggcctaccctgggcagccaccagtgacctaccctggtcagcctccagtgccactccctgggcagcagcagccagtgccgagctacccaggatacccggggtctgggactgtcacccccgctgtgcccccaacccagtttggaagccgaggcaccatcactgatgctcccggctttgaccccctgcga

SEQ ID NO: 98326 - DNA, 2602 bp, Artificial Sequence
  derived and/or modified sequence
ctctgttctctgcgctgggcatggagtggagctgtgaggccgagcccctgccctgccctgccctgccctgcccacgcaacagggactaggtttgcagggcagggcctggtatgctcacccttcactggctctcattgctttcctcattccttttatgcggcagtcaattgttggggattccaggggattaacagggcccctttcctcaaggcattctttgtgctgcaaggtgttccctgataagagaggccagggtttcacttccatcgcccaggctggagtgcaatggcgtgatctgggctcactgcaacctccacctcccaggctcaaatgattctcctgcctcagcctcctgagtagagtagctgggaccacagtcgcatgccatggtgctcggctaatttttttgtattttatttttgtaacgacagggtctcattatgttgcccaggctggtgtcaaacttctgagctcaaatgatctgcctgcgtcagcctcccaaagtgctgggattataggcatgggccactgtgcctggcctcatcttgtcattttaaagaatatatcagcagggattattggacctgcctggtttaaactattgtcttagttaattttgtgctgctctaacaaaatatcacagactgagtaatttataagcaatagtagcttatttggctcacagttctggaggctgagaagatcgtgaggctgcatctggcaagggccttcttgctgcttcataacatggcagaagacatcatgcgggtgtgtgtctggggaagagacttacagaagtggagttgctgagtcaaagatctaaccatgagctaccctggctatcccccgcccccaggtggctacccaccagctgcaccaggtggtggtccctggggaggtgctgcctaccctcctccgcccagcatgccccccatcgggctggataacgtggccacctatgcggggcagttcaaccaggactatctctcgggaatggcggccaacatgtctgggacatttggaggagccaacatgcccaacctgtaccctggggcccctggggctggctacccaccagtgccccctggcggctttgggcagcccccctctgcccagcagcctgttcctccctatgggatgtatccacccccaggaggaaacccaccctccaggatgccctcatatccgccatacccaggggcccctgtgccgggccagcccatgccaccccccggacagcagcccccaggggcctaccctgggcagccaccagtgacctaccctggtcagcctccagtgccactccctgggcagcagcagccagtgccgagctacccaggatacccggggtctgggactgtcacccccgctgtgcccccaacccagtttggaagccgaggcaccatcactgatgctcccggctttgaccccctgcgagatgccgaggtcctgcggaaggccatgaaaggcttcgggacggatgagcaggccatcattgactgcctggggagtcgctccaacaagcagcggcagcagatcctactttccttcaagacggcttacggcaaggatttgatcaaagatctgaaatctgaactgtcaggaaactttgagaagacaatcttggctctgatgaagaccccagtcctctttgacatttatgagataaaggaagccatcaagggggttggcactgatgaagcctgcctgattgagatcctcgcttcccgcagcaatgagcacatccgagaattaaacagagcctacaaagcagaattcaaaaagaccctggaagaggccattcgaagcgacacatcagggcacttccagcggctcctcatctctctctctcagggaaaccgtgatgaaagcacaaacgtggacatgtcactcgcccagagagatgcccaggagctgtatgcggccggggagaaccgcctgggaacagacgagtccaagttcaatgcggttctgtgctcccggagccgggcccacctggtagcagttttcaatgagtaccagagaatgacaggccgggacattgagaagagcatctgccgggagatgtccggggacctggaggagggcatgctggccgtggtgaaatgtctcaagaataccccagccttctttgcggagaggctcaacaaggccatgaggggggcaggaacaaaggaccggaccctgattcgcatcatggtgtctcgcagcgagaccgacctcctggacatcagatcagagtataagcggatgtacggcaagtcgctgtaccacgacatctcgggagatacttcaggggattaccggaagattctgctgaagatctgtggtggcaatgactgaacagtgactggtggctcacttctgcccacctgccggcaacaccagtgccaggaaaaggccaaaagaatgtctgtttctaacaaatccacaaatagccccgagattcaccgtcctagagcttaggcctgtcttccacccctcctgacccgtatagtgtgccacaggacctgggtcggtctagaactctctcaggatgccttttctaccccatccctcacagcctcttgctgctaaaatagatgtttcatttttctgactc

SEQ ID NO: 98327 - DNA, 2155 bp, Artificial Sequence
  derived and/or modified sequence
acctggggcagccgcgcccgcggagttttccgcccggcgctgacggctgctgcgcccgcggctccccagtgccccgagtgccccgcgggccccgcgagcgggagtgggacccagcccctaggcagaacccaggcgccgcgcccgggacgcccgcggagagagccactcccgcccacgtcccatttcgcccctcgcgtccggagtccccgtggccaggtgtgtgtctggggaagagacttacagaagtggagttgctgagtcaaagatctaaccatgagctaccctggctatcccccgcccccaggtggctacccaccagctgcaccaggttggctggcactggcctgggttctctctctatagtagaaatcctgccatccagatcctgccactgccacctttgctagcacagctgagcagcctctgagcagcaagagaggaggaggcaggaaatttagggaaggttcttcctggagggtctggagccctggagatgaagagccgatccgaagctgccatgtagaggaaagcatctaacaggccagaggccccatgatgatgtcgaatgcccatcgggcacccagctgagccctgcaggtggtggtccctggggaggtgctgcctaccctcctccgcccagcatgccccccatcgggctggataacgtggccacctatgcggggcagttcaaccaggactatctctcgggaatggcggccaacatgtctgggacatttggaggagccaacatgcccaacctgtaccctggggcccctggggctggctacccaccagtgccccctggcggctttgggcagcccccctctgcccagcagcctgttcctccctatgggatgtatccacccccaggaggaaacccaccctccaggatgccctcatatccgccatacccaggggcccctgtgccgggccagcccatgccaccccccggacagcagcccccaggggcctaccctgggcagccaccagtgacctaccctggtcagcctccagtgccactccctgggcagcagcagccagtgccgagctacccaggatacccggggtctgggactgtcacccccgctgtgcccccaacccagtttggaagccgaggcaccatcactgatgctcccggctttgaccccctgcgagatgccgaggtcctgcggaaggccatgaaaggcttcgggacggatgagcaggccatcattgactgcctggggagtcgctccaacaagcagcggcagcagatcctactttccttcaagacggcttacggcaaggatttgatcaaagatctgaaatctgaactgtcaggaaactttgagaagacaatcttggctctgatgaagaccccagtcctctttgacatttatgagataaaggaagccatcaagggggttggcactgatgaagcctgcctgattgagatcctcgcttcccgcagcaatgagcacatccgagaattaaacagagcctacaaagcagaattcaaaaagaccctggaagaggccattcgaagcgacacatcagggcacttccagcggctcctcatctctctctctcagggaaaccgtgatgaaagcacaaacgtggacatgtcactcgcccagagagatgcccaggagctgtatgcggccggggagaaccgcctgggaacagacgagtccaagttcaatgcggttctgtgctcccggagccgggcccacctggtagcagttttcaatgagtaccagagaatgacaggccgggacattgagaagagcatctgccgggagatgtccggggacctggaggagggcatgctggccgtggtgaaatgtctcaagaataccccagccttctttgcggagaggctcaacaaggccatgaggggggcaggaacaaaggaccggaccctgattcgcatcatggtgtctcgcagcgagaccgacctcctggacatcagatcagagtataagcggatgtacggcaagtcgctgtaccacgacatctcgggagatacttcaggggattaccggaagattctgctgaagatctgtggtggcaatgactgaacagtgactggtggctcacttctgcccacctgccggcaacaccagtgccaggaaaaggccaaaagaatgtctgtttctaacaaatccacaaatag

SEQ ID NO: 98328 - DNA, 1518 bp, Artificial Sequence
  derived and/or modified sequence
atgtcatatcctgggtacccgcctccaccaggcggttacccccctgcagcccctggaggaggtccctgggggggtgccgcttatccaccccctccctcaatgccaccaatcggtctagacaatgtcgccacctatgctgggcaattcaatcaggattatttatccggcatggctgctaacatgagcggcacttttgggggtgccaatatgcctaatctctacccaggtgcccctggggctggctacccaccagtcccaccgggaggtttcggacagcctccaagcgcccagcaacccgtaccaccctacggaatgtatccccctcctggcggtaacccccctagtagaatgccgagttaccctccctatcctggggctcctgtgcctggtcaacccatgcctccacctggacaacagccccctggggcttaccctggacagccgcctgtgacgtacccaggccaacccccagtcccgttgccaggccaacagcagcccgtgccttcctatccaggctatcctggctcaggaaccgttacccccgctgtcccgccaacccagttcggctccaggggcactataacagacgctcccggatttgacccattgagggacgctgaagtactcaggaaggccatgaaaggttttggcaccgacgagcaagccatcatcgactgtctgggttctcgtagtaacaaacagcggcaacagatactgctttcttttaaaaccgcctacgggaaggatctgatcaaagaccttaaaagtgaactcagcggaaactttgagaaaaccattctggccttgatgaagacgcctgtgttgttcgatatctacgaaatcaaggaagccatcaagggagtgggcactgacgaagcatgtctgatcgagatactcgcttcccgctcaaatgagcatatccgggagctgaatagggcctataaagcggagtttaagaaaaccttggaggaggctatcagatcagatacatctggccattttcagaggctcctcatctccctctcccagggaaatagggacgagtccaccaatgtagacatgagtctggcccagagagacgctcaagaactttacgcagctggggagaaccggctcggtacagacgagtccaagttcaacgctgtcctgtgttccagaagcagggcccatctagtagctgtatttaatgagtaccagcggatgacaggcagagatatcgaaaaatcgatttgtagagaaatgagtggtgatctagaggagggcatgctggccgtcgtgaaatgcttgaaaaacacgcctgccttctttgccgagagactcaataaggctatgcggggagctgggactaaggacagaaccttgatacggattatggtaagtcggtccgagacagatctcctcgatattagatctgagtacaagaggatgtacggcaagtcactgtatcacgacatctctggagacacttcaggcgactaccggaagatcctcctgaaaatatgcggtgggaatgattag

SEQ ID NO: 98329 - DNA, 1518 bp, Artificial Sequence
  derived and/or modified sequence
atgtcgtacccaggataccccccacctcctggcggttacccccctgccgctcccggaggcggaccatggggtggggctgcctatcctccacccccaagtatgccgcctatcggcctcgataacgtcgccacctacgctggtcagttcaaccaggattacttgtctggaatggccgctaatatgagcggaacttttgggggagccaatatgcccaacttatacccaggggcacctggcgctggatacccacccgtccctcctggcggattcggacagcccccttcagcacagcagccagtccccccatatggcatgtaccctccgccaggaggaaatccgcctagtcgcatgccttcctacccaccctatccgggagccccagtccccggacagcccatgcccccaccgggtcagcaacctcccggagcatatcctgggcagcctccggtaacctaccctgggcagccccctgttcccctgccagggcagcaacagcccgtgccgtcatatcccggatacccaggaagcggtaccgtcacccctgccgtgcctccaacccagtttggatctcgtggcactattactgacgccccaggatttgatccgctgcgcgatgctgaggtcctccgaaaggcaatgaaggggttcgggacagatgagcaggcaattattgattgtctgggaagtcgctccaataagcaaaggcagcagatcctgctctccttcaagaccgcctacggaaaggaccttattaaagatcttaaatccgagctcagtgggaatttcgaaaaaacgatcttggcactaatgaaaacaccagtcctgttcgacatctacgagatcaaggaagccatcaagggggtgggtaccgatgaggcttgtcttatcgagattcttgcctctaggtctaatgaacacatccgggaactcaacagagcatataaagccgaattcaaaaaaaccctggaagaggctattaggagcgacacaagcggtcatttccagaggttgttaatttccttgagccaagggaatagagacgaatcaacgaatgtggacatgtccctagcccaacgagacgcccaggagctgtacgccgcaggagaaaatagactcgggacggatgagtctaagttcaacgcagtactgtgctcacgaagcagggcgcatcttgtggctgtgttcaatgagtaccagcgcatgaccggaagggatatcgaaaaatcaatttgccgagaaatgagtggagatctggaggagggaatgctggcagtcgtgaaatgtctgaaaaatacccccgcattcttcgccgagcgtctgaacaaggcaatgagaggcgcaggcaccaaggatcgaacccttattcgcatcatggtgagtaggtcagaaaccgacctgctggatattaggtccgaatacaaacgaatgtatgggaagtctctgtaccatgatatcagcggtgacaccagtggcgactacaggaaaatcctgcttaagatttgcggaggtaacgattag

SEQ ID NO: 98330 - DNA, 489 bp, Artificial Sequence
  derived and/or modified sequence
atgtcacttgcgcaacgtgacgcacaagaactctacgcggcaggggaaaaccgcctgggtaccgatgaatccaagttcaacgcggttctctgctctcggagccgcgcacacctcgtcgcagtatttaacgaatatcaaagaatgaccggacgggatatcgagaagagcatatgccgcgagatgtccggggacctggaagaaggaatgctggccgttgtcaaatgcctaaaaaacacgcccgcattctttgccgaaagactgaacaaggccatgcggggtgctgggaccaaggatcgcactctgataaggattatggtgtcccgctctgaaacggacctgcttgacatccgctctgagtacaaacggatgtatgggaaatcactgtaccatgacatcagctcaatctcgtgtatgccagcctcatatggacatctggaggaggccacctgtctggcactcaagttgctcagagtcgaaggcaatgactag

SEQ ID NO: 98331 - DNA, 1518 bp, Artificial Sequence
  derived and/or modified sequence
atgagctatcctgggtaccctcctcccccaggcggatatcctccagcggctcctgggggtggcccatgggggggagcagcatacccccctccacccagtatgccacctatcggtctggacaacgtggctacctatgctggccagtttaatcaggactatctgagcggcatggccgctaacatgagtggcaccttcggtggcgcaaatatgccaaatctgtatcccggagcacccggtgccggttacccacccgttcctcctggcggttttggacagccaccaagcgcacagcagcccgtgcccccttatggaatgtatcctcctcctggcggaaaccccccaagccgtatgcctagctaccctccctatcccggtgctcccgtgccgggacaacctatgcctccccctggccagcagccgccaggcgcttaccctggccagcccccagtaacttaccccggacagccaccagtgccattacctggccagcagcaacccgtgccgtcctatccaggatacccgggtagcggaacagtgaccccagcggttcctcccactcagttcggttcccggggtacaatcacagacgcacccggtttcgatccccttcgggacgctgaggtgctgcggaaggcgatgaaggggttcgggactgatgagcaggcaatcatcgattgcctcggtagccgttcaaacaaacagagacagcagatattgttatcttttaaaacagcatacggaaaggacctcattaaagatttaaaatctgagctgtctggcaactttgaaaaaactattcttgcacttatgaagacccctgtgctgtttgatatctatgaaataaaagaagcgatcaagggcgtaggcacagacgaagcttgcctcatcgaaatcctcgcttccagatccaacgaacatatcagggaactcaacagggcatacaaagctgagtttaaaaagacgctagaggaggccattaggtccgacactagtggtcatttccagagacttctaatttccctctcccagggcaaccgagacgagtcaactaacgtggatatgtcactcgcacagagggacgcccaagagctatacgcggctggcgaaaatcggctcgggaccgacgagtctaagttcaatgccgtcctctgctctcggtctagggcacacttggtggcagtctttaacgagtatcagcggatgaccggaagagacattgaaaaaagtatatgccgcgaaatgtcaggggatctcgaagagggcatgctggcagtggtgaagtgtctcaaaaatacaccggctttctttgccgagagactaaacaaggcaatgcggggagccggaactaaggaccgtaccttgatcagaattatggtgagccgatcagaaaccgatttactcgacattcgatccgaatacaagaggatgtacggaaagtccctgtaccatgacatcagcggagacacttcaggcgactatcgcaagatcctgctgaaaatctgcgggggaaacgactag

SEQ ID NO: 98332 - DNA, 1518 bp, Artificial Sequence
  derived and/or modified sequence
atgagctacccaggataccccccacctcctgggggatatcccccagcagcccctggcggtggcccttggggaggtgctgcctacccaccgcctccaagtatgccaccaatcggcctcgacaatgtggccacgtatgcgggtcagttcaaccaggattatctgagcggaatggctgccaacatgagcggcacctttggaggagccaatatgcctaatctataccccggagcccctggcgcaggctatccaccagtgcctcctggcggattcggacagccaccatcagcccagcagccagtaccaccctatggtatgtacccgccacctggcggtaatcccccatccagaatgccaagttaccctccctacccgggagctcctgtgcctggtcagccaatgcctccacccggtcagcagccgccaggcgcttaccccggtcagccccctgtgacctatcctggtcaaccccctgtaccccttcccggacagcagcagcccgtgccctcttaccctggctaccctggaagtgggaccgtgacccccgctgttccaccgactcagtttggtagtcgcggtacaatcacggatgctccagggtttgatccactgagagatgcagaagtgctgcgcaaagctatgaagggattcggcacagacgagcaggctattatagactgtctcggcagtcgctcaaacaagcaaagacaacaaattctgctgagcttcaaaaccgcctatggtaaggacctaattaaagacctgaagtcagagctcagcggcaactttgagaaaactattcttgcactgatgaaaactccagtgcttttcgatatctacgaaataaaagaagcaattaaaggagtggggacagacgaagcttgcttaattgagatattagctagccgctcaaatgagcatattagagagcttaaccgagcttataaagctgaatttaaaaaaacacttgaggaagctatccgctcagatacctccggccatttccagagactccttatcagtctcagtcaaggcaacagagacgaatcgactaacgtcgacatgagcctcgcacaacgcgatgcccaagagctgtatgccgctggcgagaatagactggggacggacgagtcaaagtttaacgctgtcctttgtagcagaagtcgtgcccatttggtcgccgttttcaacgaataccagaggatgaccggccgagacatcgagaaatccatctgccgggaaatgtccggcgacctggaggaaggaatgctcgcagttgtcaagtgtctcaaaaatactccggctttctttgctgagcgactgaacaaggcaatgcgtggagcgggtaccaaggacagaacactgattcgtattatggtgagtcggtctgagactgatctgcttgatattcgtagcgagtataaacggatgtatggcaaatcattgtatcacgatattagcggagacacaagcggagattatagaaaaatactgctgaagatttgtggagggaacgattag

SEQ ID NO: 98333 - DNA, 1518 bp, Artificial Sequence
  derived and/or modified sequence
atgagttacccaggttatcccccaccacctggcggttatccacccgctgcacctggtgggggtccatggggaggcgctgcctatcctccaccaccgtccatgcccccaatcgggcttgataatgtggccacctacgcgggacagtttaaccaggactatctttcaggcatggcagccaacatgagcggcacttttgggggagcaaatatgccaaacctgtatccgggtgcccctggagctgggtatccccctgtgcctcccggaggtttcggacagccccctagcgcgcaacaacccgtccccccttatggaatgtacccccctccgggtggcaatcccccttcacggatgccctcctacccaccatatcccggagcaccagtgcccggtcagccgatgccgccacctggtcagcaacccccaggagcttaccctgggcagcctcccgttacctacccgggacaaccacctgtgcctctgccaggacagcagcagcccgtgccctcttatcctggctaccctggctctgggaccgtgactcctgccgtgcctcctactcagtttggcagccgtggtactattaccgatgctccaggcttcgatcccctgcgagacgcggaagtgcttcgcaaggccatgaagggattcgggaccgatgagcaggctattatagattgcctgggtagcaggagcaacaaacagaggcagcaaattctcttaagcttcaaaacagcatacggtaaagatctcatcaaggatctcaagtccgaactatccggaaactttgaaaagacaatcctggctttaatgaaaactcccgtgctttttgatatctacgaaataaaagaagcaatcaaaggagtgggaacagatgaagcctgcctgatcgaaattttagcctcaagatccaacgagcatatcagggaactgaacagagcctataaggccgagttcaagaaaaccttggaggaggcgattaggtcggatacctctggacactttcagaggctgctgatctccttgagccagggtaaccgtgacgagtctacaaatgtggacatgtctctcgcacagcgcgatgcccaggaactgtacgcagcaggtgaaaatagactcggcaccgacgaaagcaagttcaacgccgttctctgttcacgctctcgagcacacttggtcgctgtctttaatgaataccagagaatgacaggcagggacatcgagaagagcatttgtagggaaatgagcggggacctcgaagaaggcatgctcgctgtcgtgaaatgcctaaagaacactcccgcattttttgccgagcggctgaacaaggcgatgcgaggggctggtaccaaggaccgaaccttaatcagaattatggtctctagaagtgagactgatctccttgatataagatcggaatacaaacgtatgtatggcaagagtttataccatgacatctctggggacacgtcgggagactatcggaagatcttgcttaagatttgcggaggcaatgactag

SEQ ID NO: 98334 - DNA, 1239 bp, Artificial Sequence
  derived and/or modified sequence
atgagaggcagcagcactcggacaatctcccgcgagtgctggcggctctgggccgctcccttatgtcctgcagcatgtagctccctgtgggatgtcagcacacccagaagaaagccaacactacaggacgcattgatctccgctattccatatccagggcaaccccctgtaacctaccccggacagccaccagttccccttccaggccagcagcagcccgtccctagttatccgggatacccagggtcaggaacggtcacaccagctgtgccgcctactcagtttgggtctcgtggtacaataacagatgccccaggattcgaccctttacgggatgctgaggtgttacggaaggcaatgaaaggcttcggtaccgacgaacaggctattattgactgcttaggatcgcgatccaataaacagcgacaacagattctgctgagtttcaagaccgcatatggaaaggatctaatcaaggatcttaaatctgaacttagcggaaatttcgaaaagactatcttagcactaatgaaaacacccgtgttgtttgatatctatgaaattaaagaagccatcaaaggggtgggcaccgacgaggcatgtctgatcgaaatcttagcaagccgcagtaacgaacatattcgagaattgaatagagcttataaggccgagtttaaaaagacattggaggaagctatccggagtgatacaagtgggcattttcaacgcctactcatctctctgagccaggggaacagagacgaatccacaaatgtggacatgtctttagcgcagcgcgatgctcaggaactatacgctgctggagagaatagactgggcaccgatgaatcgaagttcaatgctgtcctgtgttctcgcagtagggcccacctggtggcggtgtttaatgagtaccaacgaatgacgggaagggacatcgaaaaatccatctgtcgggaaatgtcgggcgatctagaagagggaatgctggcggtggtgaagtgtctgaagaatactcccgctttttttgctgagcgcctcaataaagccatgcggggtgccggtaccaaggatcgcaccctgatcagaattatggtttcgaggagcgaaaccgatttactggatatacgttcggaatacaaaagaatgtatggaaagagcctctaccacgatatctcaggagataccagcggagattatcgtaagatactccttaagatctgcggaggcaatgattag

SEQ ID NO: 98335 - DNA, 453 bp, Artificial Sequence
  derived and/or modified sequence
atgtcttaccctggatatccacccccaccaggcggatatccaccagccgcaccaggaggaggcccttggggaggagccgcttaccctccgccaccaagtatgccgccaatcgggctagacaatgtggctacatacgcaggccagttcaatcaagactatctgtctgggatggccgcaaatatgtcaggtaccttcgggggagcgaacatgcctaacctgtatccgggagccccaggcgctggatatcctcccgtgccacccggaggctttggccagccacccagcgctcagcagcctgtacctccttacggaatgtaccctcctcccggtggtaatccaccttcaagaatgccttcctatcctccctatcccggagcgccagtgccagggcagcccatgccccctccgggacaacaaccacccggtgcctaccctggacagccacccgtgtag

SEQ ID NO: 98336 - DNA, 1518 bp, Artificial Sequence
  derived and/or modified sequence
atgtcctaccctggctaccctcctccgcctgggggttatccacccgcagctccagggggaggaccctgggggggtgccgcttaccctccacctccgagtatgccaccaattggactagacaatgtggctacctacgcagggcaatttaatcaggattacctgagcggcatggcagctaacatgtctggaacatttgggggtgctaacatgcctaatctgtatccaggagctccaggcgcaggctatccccctgtgccaccagggggttttggtcagcctcctagtgcacagcagccggtgcccccttacggcatgtacccccctccaggcggtaatccaccatcaaggatgccatcctacccaccgtatcctggggctccagtccccggtcagccaatgcctccacctggccaacagccgccaggagcctacccaggccagccccctgtgacgtatcctggacaacccccagtgccactgcccggtcaacagcagcccgtaccttcgtatccagggtaccctgggagtgggaccgtcaccccagccgtgccccctacgcaattcggtagcagaggcacaatcaccgacgctccaggcttcgatccactccgcgacgccgaggttctgaggaaagcaatgaaaggattcggcacagatgagcaggccataatcgactgcctggggtccaggagcaacaagcagcgccaacagatactgctgtcattcaagactgcctacgggaaggatctcattaaggacctaaagtctgagctaagcgggaatttcgagaaaactattctggctctgatgaagacacccgtattattcgacatttatgaaatcaaggaagcaatcaaaggcgtcggtactgatgaggcttgcctcattgagatcctggcctccagatccaatgagcacatccgcgagctcaaccgagcatacaaagccgaatttaagaaaaccttggaggaggccatccgatccgataccagtggtcactttcagaggcttttgatttccctgtcccagggaaacagagacgaaagtacaaatgtcgatatgagtcttgcccagcgcgatgcccaggagttatacgcggcaggcgagaacagactgggtacggatgagagcaaattcaatgccgttctatgcagccgttcaagggcccacctggtggcagttttcaatgagtaccaaaggatgacggggcgtgatatagagaaaagcatttgcagagaaatgtcgggtgacctggaggagggcatgctcgccgtggtgaaatgcctgaagaacaccccagcatttttcgcagaacgtctcaacaaggcgatgcgtggggctggtaccaaagaccgtaccctgatacgtattatggtgagtaggtctgagactgaccttttagacatccgaagtgaatacaagagaatgtatggaaaaagcctctaccatgatatcagcggcgacacttctggtgactacagaaagattctgctcaagatctgcggcggaaacgactag

SEQ ID NO: 98337 - DNA, 615 bp, Artificial Sequence
  derived and/or modified sequence
atgagttatccgggttaccccccacccccaggagggtacccacctgcggcaccaggaggaggaccttgggggggagctgcttaccctccacccccatctatgccaccaatcgggttggacaacgttgccacttacgctggccaattcaatcaggattatctgagcggaatggccgctaacatgagcgggacttttggtggtgccaatatgcccaatctctaccccggtgcgccaggggctgggtacccgccagtgccacccggtgggttcgggcagccgccaagcgcgcaacagccggtgccaccatacggaatgtaccccccaccaggcggaaatccaccttccagaatgcctagttaccccccttacccaggtgccccagtccctggccagccgatgccgcctccgggacaacagcccccaggagcatatcctgggcagcctcctgtaacctatcctgggcagccccctgtcccgctgcctggtcagcagcagcccgtgcctagctaccctggatacccaggttccggtactgttacccctgccgtcccacctacacagtttggttctcgtggaaccatcacagacgcccctggatttgatccgttgcggtag

SEQ ID NO: 98338 - DNA, 1518 bp, Artificial Sequence
  derived and/or modified sequence
atgtcctatccaggatacccaccgccacctggtggatacccacccgctgcacccggtggaggaccctggggcggagcagcgtacccaccacctccgtcaatgccccctatcggccttgataacgttgccacctacgctggacaattcaatcaggactacttatcaggaatggctgccaatatgtcagggacattcggtggagctaatatgcccaatctgtatccgggtgccccaggagccggttaccctccggtcccacccggaggatttggccagccccctagcgctcagcaacccgttcccccatacggaatgtatccgcctcctggtgggaatccccctagccgtatgccgtcatatcccccttatcctggagcaccagtaccaggccagcctatgccaccacccggtcagcaaccaccaggtgcctaccccggacagccccctgtgacatatccagggcagccccctgtccccctgcccggacagcagcagcccgtaccatcctacccagggtaccccggttctggaactgttaccccagcggtgccacccacacaattcggctccagaggaactatcaccgacgccccaggatttgaccccctgcgggatgctgaagttctccgaaaggcaatgaaggggtttggcactgatgagcaggctataatcgattgtctggggtcacggtcaaataagcagcgccagcagattctcctgagcttcaagactgcctatgggaaggacctgattaaggatctcaagagtgagctctcgggcaactttgagaagaccatactcgctctcatgaagacccctgtcttgttcgatatctacgaaataaaagaggccattaaaggtgtcggcacagacgaagcttgtctgattgagattctggcatctcggtcaaatgagcatatccgcgagctgaaccgtgcgtacaaagctgaatttaaaaagacactcgaagaggcaatcagaagcgataccagcgggcattttcaacgattgctaatttctctgagccaggggaatcgcgatgaatccaccaatgtcgacatgtctctagcccagagagacgcgcaagaactgtatgccgctggcgagaacaggctgggaactgatgagtccaaattcaacgcagtgttatgttcacggtctagggcacacctagtggcggtttttaacgagtaccagcgcatgacggggcgtgatatcgagaaatctatttgccgagaaatgtccggcgacctagaggaagggatgctggccgtggttaagtgtctgaagaatacacccgcatttttcgcggaaagactgaacaaggctatgaggggcgctgggactaaggataggactctcattcggataatggtcagtcgatcagagacagatctgctcgacataagatctgagtacaagagaatgtatggcaagagcttgtatcatgatattagcggcgacacctcaggggattacaggaaaattttgctgaagatatgtggaggcaatgactag

SEQ ID NO: 98339 - DNA, 1419 bp, Artificial Sequence
  derived and/or modified sequence
atgcctccaatagggttggacaacgtcgccacttacgctggtcaattcaaccaggattacttaagcggcatggccgctaacatgtcaggcacgttcgggggtgctaatatgcctaacctctaccctggcgctccaggagcaggctacccccctgtcccgcctgggggattcggacaaccacccagcgcgcagcagcctgttcccccatatggtatgtacccaccacctggcggtaaccctcctagccgtatgccatcatatcctccatacccgggagctccggtccccggacagccgatgccgccacctggacaacagcccccaggtgcctaccctggacagccccctgtgacctaccccggacaacctccagtccctctgcctggacagcagcagccagtgccgtcataccctggataccccggatccggtactgtcacccccgctgtgccccctacccagttcggttccagaggaactataacggatgccccaggattcgacccattaagggacgccgaggtgctccgcaaagccatgaagggcttcgggacagacgagcaggccatcatagattgtcttgggagcaggtccaacaagcagcgtcagcagatcttgctgtcttttaagactgcctatggaaaggatcttatcaaagaccttaaatccgagttgtctggaaattttgagaagaccattctcgccttgatgaagacccctgtcctctttgatatttacgaaattaaggaagctatcaagggagtgggtacggacgaagcttgcctgatagagattctggcatcccgctctaacgaacacatcagagagttgaacagggcctataaagcagagttcaagaagaccctcgaggaggccatcagatctgatacaagcgggcacttccagaggctcctgatttccttaagtcagggaaacagggacgagagtaccaacgttgacatgtctctagcacagagggacgcccaggagttgtatgctgctggggagaatagactcgggaccgatgagagcaaatttaatgccgtgctttgcagccgtagtcgggctcatctagtggcagtctttaacgaataccagcgtatgaccgggcgagatattgaaaagagcatctgcagggagatgtctggtgacctcgaagagggcatgctcgcagttgtcaaatgtctaaaaaacacgcctgcgttttttgctgagcggttgaacaaagccatgcggggagccggaacaaaggatcggacacttattagaattatggttagtcgcagtgaaacggacttactggatattcgctctgaatacaaacggatgtacgggaaatctctctatcacgatattagcggtgacacctcaggcgattatcggaagatcctgctgaaaatctgtggcggaaacgactag

SEQ ID NO: 98340 - DNA, 1518 bp, Artificial Sequence
  derived and/or modified sequence
atgagctaccccggctacccccccccccccggcggctacccccccgccgcccccggcggcggcccctggggcggcgccgcctacccccccccccccagcatgccccccatcggcctggacaacgtggccacctacgccggccagttcaaccaggactacctgagcggcatggccgccaacatgagcggcaccttcggcggcgccaacatgcccaacctgtaccccggcgcccccggcgccggctacccccccgtgccccccggcggcttcggccagccccccagcgcccagcagcccgtgcccccctacggcatgtaccccccccccggcggcaacccccccagcagaatgcccagctaccccccctaccccggcgcccccgtgcccggccagcccatgcccccccccggccagcagccccccggcgcctaccccggccagccccccgtgacctaccccggccagccccccgtgcccctgcccggccagcagcagcccgtgcccagctaccccggctaccccggcagcggcaccgtgacccccgccgtgccccccacccagttcggcagcagaggcaccatcaccgacgcccccggcttcgaccccctgagagacgccgaggtgctgagaaaggccatgaagggcttcggcaccgacgagcaggccatcatcgactgcctgggcagcagaagcaacaagcagagacagcagatcctgctgagcttcaagaccgcctacggcaaggacctgatcaaggacctgaagagcgagctgagcggcaacttcgagaagaccatcctggccctgatgaagacccccgtgctgttcgacatctacgagatcaaggaggccatcaagggcgtgggcaccgacgaggcctgcctgatcgagatcctggccagcagaagcaacgagcacatcagagagctgaacagagcctacaaggccgagttcaagaagaccctggaggaggccatcagaagcgacaccagcggccacttccagagactgctgatcagcctgagccagggcaacagagacgagagcaccaacgtggacatgagcctggcccagagagacgcccaggagctgtacgccgccggcgagaacagactgggcaccgacgagagcaagttcaacgccgtgctgtgcagcagaagcagagcccacctggtggccgtgttcaacgagtaccagagaatgaccggcagagacatcgagaagagcatctgcagagagatgagcggcgacctggaggagggcatgctggccgtggtgaagtgcctgaagaacacccccgccttcttcgccgagagactgaacaaggccatgagaggcgccggcaccaaggacagaaccctgatcagaatcatggtgagcagaagcgagaccgacctgctggacatcagaagcgagtacaagagaatgtacggcaagagcctgtaccacgacatcagcggcgacaccagcggcgactacagaaagatcctgctgaagatctgcggcggcaacgactag

SEQ ID NO: 98341 - DNA, 489 bp, Artificial Sequence
  derived and/or modified sequence
atgagcctggcccagagagacgcccaggagctgtacgccgccggcgagaacagactgggcaccgacgagagcaagttcaacgccgtgctgtgcagcagaagcagagcccacctggtggccgtgttcaacgagtaccagagaatgaccggcagagacatcgagaagagcatctgcagagagatgagcggcgacctggaggagggcatgctggccgtggtgaagtgcctgaagaacacccccgccttcttcgccgagagactgaacaaggccatgagaggcgccggcaccaaggacagaaccctgatcagaatcatggtgagcagaagcgagaccgacctgctggacatcagaagcgagtacaagagaatgtacggcaagagcctgtaccacgacatcagcagcatcagctgcatgcccgccagctacggccacctggaggaggccacctgcctggccctgaagctgctgagagtggagggcaacgactag

SEQ ID NO: 98342 - DNA, 1239 bp, Artificial Sequence
  derived and/or modified sequence
atgagaggcagcagcaccagaaccatcagcagagagtgctggagactgtgggccgcccccctgtgccccgccgcctgcagcagcctgtgggacgtgagcacccccagaagaaagcccaccctgcaggacgccctgatcagcgccatcccctaccccggccagccccccgtgacctaccccggccagccccccgtgcccctgcccggccagcagcagcccgtgcccagctaccccggctaccccggcagcggcaccgtgacccccgccgtgccccccacccagttcggcagcagaggcaccatcaccgacgcccccggcttcgaccccctgagagacgccgaggtgctgagaaaggccatgaagggcttcggcaccgacgagcaggccatcatcgactgcctgggcagcagaagcaacaagcagagacagcagatcctgctgagcttcaagaccgcctacggcaaggacctgatcaaggacctgaagagcgagctgagcggcaacttcgagaagaccatcctggccctgatgaagacccccgtgctgttcgacatctacgagatcaaggaggccatcaagggcgtgggcaccgacgaggcctgcctgatcgagatcctggccagcagaagcaacgagcacatcagagagctgaacagagcctacaaggccgagttcaagaagaccctggaggaggccatcagaagcgacaccagcggccacttccagagactgctgatcagcctgagccagggcaacagagacgagagcaccaacgtggacatgagcctggcccagagagacgcccaggagctgtacgccgccggcgagaacagactgggcaccgacgagagcaagttcaacgccgtgctgtgcagcagaagcagagcccacctggtggccgtgttcaacgagtaccagagaatgaccggcagagacatcgagaagagcatctgcagagagatgagcggcgacctggaggagggcatgctggccgtggtgaagtgcctgaagaacacccccgccttcttcgccgagagactgaacaaggccatgagaggcgccggcaccaaggacagaaccctgatcagaatcatggtgagcagaagcgagaccgacctgctggacatcagaagcgagtacaagagaatgtacggcaagagcctgtaccacgacatcagcggcgacaccagcggcgactacagaaagatcctgctgaagatctgcggcggcaacgactag

SEQ ID NO: 98343 - DNA, 453 bp, Artificial Sequence
  derived and/or modified sequence
atgagctaccccggctacccccccccccccggcggctacccccccgccgcccccggcggcggcccctggggcggcgccgcctacccccccccccccagcatgccccccatcggcctggacaacgtggccacctacgccggccagttcaaccaggactacctgagcggcatggccgccaacatgagcggcaccttcggcggcgccaacatgcccaacctgtaccccggcgcccccggcgccggctacccccccgtgccccccggcggcttcggccagccccccagcgcccagcagcccgtgcccccctacggcatgtaccccccccccggcggcaacccccccagcagaatgcccagctaccccccctaccccggcgcccccgtgcccggccagcccatgcccccccccggccagcagccccccggcgcctaccccggccagccccccgtgtag

SEQ ID NO: 98344 - DNA, 615 bp, Artificial Sequence
  derived and/or modified sequence
atgagctaccccggctacccccccccccccggcggctacccccccgccgcccccggcggcggcccctggggcggcgccgcctacccccccccccccagcatgccccccatcggcctggacaacgtggccacctacgccggccagttcaaccaggactacctgagcggcatggccgccaacatgagcggcaccttcggcggcgccaacatgcccaacctgtaccccggcgcccccggcgccggctacccccccgtgccccccggcggcttcggccagccccccagcgcccagcagcccgtgcccccctacggcatgtaccccccccccggcggcaacccccccagcagaatgcccagctaccccccctaccccggcgcccccgtgcccggccagcccatgcccccccccggccagcagccccccggcgcctaccccggccagccccccgtgacctaccccggccagccccccgtgcccctgcccggccagcagcagcccgtgcccagctaccccggctaccccggcagcggcaccgtgacccccgccgtgccccccacccagttcggcagcagaggcaccatcaccgacgcccccggcttcgaccccctgagatag

SEQ ID NO: 98345 - DNA, 1419 bp, Artificial Sequence
  derived and/or modified sequence
atgccccccatcggcctggacaacgtggccacctacgccggccagttcaaccaggactacctgagcggcatggccgccaacatgagcggcaccttcggcggcgccaacatgcccaacctgtaccccggcgcccccggcgccggctacccccccgtgccccccggcggcttcggccagccccccagcgcccagcagcccgtgcccccctacggcatgtaccccccccccggcggcaacccccccagcagaatgcccagctaccccccctaccccggcgcccccgtgcccggccagcccatgcccccccccggccagcagccccccggcgcctaccccggccagccccccgtgacctaccccggccagccccccgtgcccctgcccggccagcagcagcccgtgcccagctaccccggctaccccggcagcggcaccgtgacccccgccgtgccccccacccagttcggcagcagaggcaccatcaccgacgcccccggcttcgaccccctgagagacgccgaggtgctgagaaaggccatgaagggcttcggcaccgacgagcaggccatcatcgactgcctgggcagcagaagcaacaagcagagacagcagatcctgctgagcttcaagaccgcctacggcaaggacctgatcaaggacctgaagagcgagctgagcggcaacttcgagaagaccatcctggccctgatgaagacccccgtgctgttcgacatctacgagatcaaggaggccatcaagggcgtgggcaccgacgaggcctgcctgatcgagatcctggccagcagaagcaacgagcacatcagagagctgaacagagcctacaaggccgagttcaagaagaccctggaggaggccatcagaagcgacaccagcggccacttccagagactgctgatcagcctgagccagggcaacagagacgagagcaccaacgtggacatgagcctggcccagagagacgcccaggagctgtacgccgccggcgagaacagactgggcaccgacgagagcaagttcaacgccgtgctgtgcagcagaagcagagcccacctggtggccgtgttcaacgagtaccagagaatgaccggcagagacatcgagaagagcatctgcagagagatgagcggcgacctggaggagggcatgctggccgtggtgaagtgcctgaagaacacccccgccttcttcgccgagagactgaacaaggccatgagaggcgccggcaccaaggacagaaccctgatcagaatcatggtgagcagaagcgagaccgacctgctggacatcagaagcgagtacaagagaatgtacggcaagagcctgtaccacgacatcagcggcgacaccagcggcgactacagaaagatcctgctgaagatctgcggcggcaacgactag

SEQ ID NO: 98346 - protein, 675 aa, Artificial Sequence
  derived and/or modified sequence
MSLWLLEGVPMRQAAVTSTSLTIKSVFTRSELKFSPQWSHHGKIVTCQLQDADGKFLSNDTVQLNVKHTPKLEIKVTPSDAIVREGDSVTMTCEVSSSNPEYTTVSWLKDGTSLKKQNTFTLNLREVTKDQSGKYCCQVSNDVGPGRSEEVFLQVQYAPEPSTVQILHSPAVEGSQVEFLCMSLANPLPTNYTWYHNGKEMQGRTEEKVHIPKILPWHAGTYSCVAENILGTGQRGPGAELDVQYPPKKVTTVIQNPMPIREGDTVTLSCNYNSSNPSVTRYEWKPHGAWEEPSLGVLKIQNVGWDNTTIACAACNSWCSWASPVALNVQYAPRDVRVRKIKPLSEIHSGNSVSLQCDFSSSHPKEVQFFWEKNGRLLGKESQLNFDSISPEDAGSYSCWVNNSIGQTASKAWTLEVLYAPRRLRVSMSPGDQVMEGKSATLTCESDANPPVSHYTWFDWNNQSLPYHSQKLRLEPVKVQHSGAYWCQGTNSVGKGRSPLSTLTVYYSPETIGRRVAVGLGSCLAILILAICGLKLQRRWKRTQSQQGLQENSSGQSFFVRNKKVRRAPLSEGPHSLGCYNPMMEDGISYTTLRFPEMNIPRTGDAESSEMQRPPPDCDDTVTYSALHKRQVGDYENVIPDFPEDEGIHYSELIQFGVGERPQAQENVDYVILKH

SEQ ID NO: 98347 - DNA, 2028 bp, Artificial Sequence
  derived and/or modified sequence
atgagcttgtggctgctagagggcgtgcccatgaggcaggccgcagtgacaagcacatccttgacaattaagagtgtcttcacaaggtcagaactgaaattctctccccaatggtctcatcatggaaaaatcgtgacttgccagctccaagacgccgacgggaaattcctttcaaacgatactgtgcagcttaatgttaagcatactccaaaactggagatcaaggtgaccccgtccgacgcaattgtgagggaaggcgatagcgtgacaatgacgtgcgaggtatcatcttccaaccccgaatacacaaccgtatcctggcttaaagatggcacaagcttgaaaaaacagaacacttttactcttaatctgcgagaagtaacaaaggaccagagtggcaagtactgctgccaggtatccaacgacgtgggacccgggcggtcggaggaagtatttctgcaagtgcagtatgccccagagccgtcaactgtgcagatcctacactcaccagcagtagagggctcacaggtggagtttctgtgtatgagtctggccaatcccctgcccaccaactacacctggtatcacaacggaaaggagatgcagggaaggaccgaggagaaggtacacatacccaagatcctgccgtggcatgctggaacatatagctgtgtggccgaaaacatacttgggacgggacagcgcgggcccggggccgagctggatgtgcagtatcctcctaaaaaggtgactacagtaattcagaatcccatgcccatacgggagggcgatacagtgacactgtcctgtaactataactcttctaatccctctgtgactagatacgagtggaagcctcacggcgcctgggaagagccttctttgggcgtattgaagattcagaacgtgggctgggataacacaaccatagcctgcgccgcctgtaactcttggtgttcttgggcgagcccggtggctttgaatgtgcagtacgcacccagggacgtgagagttcgcaaaattaagccactgtcagagatccactccggcaacagtgtctctttgcagtgtgatttctccagcagccatcctaaggaggtacaatttttttgggaaaagaatggtcgtttgctcgggaaggagagtcagctgaattttgattcaatttcaccagaagatgccggcagctattcctgctgggtgaataactcaatcggacaaacagcctccaaagcttggaccctggaggttttatatgcccctcggcgactgagggtgtctatgtccccaggcgaccaggtgatggagggcaagagtgctactctcacttgtgaaagtgacgccaatccacccgtgtcacactacacttggtttgactggaataatcagtccctcccctaccactctcaaaagctgaggctcgagccagttaaggtccagcactcaggagcatactggtgtcaagggacaaatagcgtaggcaagggacgcagccccctctcaactctcactgtctattatagtcctgaaacaattggccgaagggtggccgtcggacttggcagttgcctggcaatcctgatcctggcaatttgcggcctcaaattacagcggaggtggaaacggacccagagccagcagggtcttcaagaaaactcatctgggcagtccttttttgtgcgcaacaaaaaagtgcgacgggcccccctaagcgaagggccccactcattgggctgctataatcccatgatggaggacggtattagctataccactttgaggtttcctgagatgaacatacctaggacaggtgatgccgaatcatctgaaatgcaacgaccacctccggattgcgacgacacggtgacctactccgcccttcacaagcgtcaagtgggtgactacgagaatgttatcccggacttcccggaagacgagggaatacactatagtgaactgattcagttcggggtcggtgaacgtcctcaggcccaggaaaacgttgactacgttatcctcaagcattag

SEQ ID NO: 98348 - DNA, 2028 bp, Artificial Sequence
  derived and/or modified sequence
atgagcctgtggctgctggagggcgtgcccatgaggcaggccgctgtgaccagcaccagcctgaccatcaagtctgtgttcaccaggtctgagctgaagttcagcccccagtggagccaccacggcaagatcgtgacctgccagctgcaggatgctgatggcaagttcctgagcaatgacacagtgcagctgaatgtgaagcacacccccaagctggagatcaaggtgacccccagtgatgccatcgtgcgggagggggacagcgtgaccatgacctgtgaggtgagcagcagcaaccctgagtacaccaccgtgtcctggctgaaggatggcaccagcctgaagaagcagaacaccttcaccctgaacctgcgggaggtgaccaaggaccagagcggcaagtactgctgccaggtgtccaatgatgtgggccctggccgctctgaggaggtgttcctgcaggtgcagtatgcccctgagcccagcacagtgcagatcctgcacagccctgctgtggagggcagccaggtggagttcctgtgcatgagcctggccaaccccctgcccaccaactacacctggtaccacaacgggaaggagatgcagggccgcacagaggagaaggtgcacatccccaagatcctgccctggcatgctggcacctacagctgtgtggccgagaacatcctgggcaccggccagaggggccctggagctgagctggatgtgcagtacccacccaagaaggtgaccaccgtcatccagaaccccatgcccatccgggagggggacacagtgaccctgagctgcaactacaacagcagcaaccccagcgtgaccaggtatgagtggaagccccatggagcctgggaggagcccagcctgggcgtgctgaagatccagaatgtgggctgggacaacaccaccatcgcctgtgccgcctgcaacagctggtgctcctgggccagccctgtggccctgaatgtgcagtatgcccccagagatgtgcgggtgaggaagatcaagcccctgtctgagatccacagcggcaacagcgtgtccctgcagtgtgacttcagcagcagccaccccaaggaggtgcagttcttctgggagaagaatggccgcctgctgggcaaggagagccagctgaactttgacagcatcagcccagaagatgctggcagctacagctgctgggtgaacaacagcatcggccagacagccagcaaggcctggaccctggaggtgctgtatgccccccggcggctgcgggtgtccatgagccctggggaccaggtgatggagggcaagagcgccaccctgacctgtgagagtgatgccaacccccctgtgagccactacacctggtttgactggaacaaccagagcctgccctaccacagccagaagctgcggctggagcctgtgaaggtgcagcacagcggggcctactggtgccagggcaccaacagcgtgggcaagggccgcagccccctgagcaccctgactgtgtactacagccctgagaccatcggccggcgggtggccgtgggcctgggcagctgcctggccatcctgatcctggccatctgtggcctgaagctgcagaggcgctggaagaggacccagagccagcagggcctgcaggagaacagcagcggccagagcttctttgtgaggaacaagaaggtgcggcgggcccccctgtctgagggcccccacagcctgggctgctacaaccccatgatggaggatggcatctcctacaccaccctgcgcttccctgagatgaacatccccaggactggagatgctgagagcagcgagatgcagaggcctcctccagactgtgatgacacagtgacctacagcgccctgcacaagaggcaggtgggggactatgaaaatgtcatcccagacttcccagaagatgagggcatccactacagcgagctgatccagtttggagtgggggagcggccccaggcccaggagaatgtggactatgtgatcctgaagcactag

SEQ ID NO: 98349 - DNA, 2028 bp, Artificial Sequence
  derived and/or modified sequence
atgagcctgtggctgctggagggcgtgcccatgcggcaggccgccgttacaagcacatcccttacaatcaagtccgtctttactaggagtgaactcaaattctctccacaatggagccaccatggaaagatagtgacatgccagttacaagacgccgatggaaagtttctaagcaacgacaccgtccagctgaatgtaaaacacactcccaaactcgagatcaaagtcacaccatccgacgctatagtgagagagggggactcagtgactatgacttgcgaagtttcaagctctaacccagaatacaccactgtctcttggctcaaagacgggacaagtctgaaaaaacagaacactttcactctgaatctcagggaagttaccaaggatcagtctggcaaatactgttgtcaggtgagcaatgacgtaggcccaggccgatctgaagaagtgttcctccaggttcagtacgccccagagcccagcacagtgcagatcctgcacagtccggcagtcgagggtagccaagtcgagttcctctgcatgtctctggctaatcctctgcccaccaattacacctggtaccataatggcaaggaaatgcagggccgaactgaggagaaagtccatattcctaaaatcctaccctggcacgccggaacctacagttgtgtcgctgaaaacatcttagggacaggacagagggggccaggcgccgagctggatgtacagtatccacctaaaaaggtgacaacggtgatacaaaaccctatgcccatcagggagggcgacactgtgactctgtcatgtaactacaatagctcgaacccttctgtaaccagatacgaatggaagccacatggagcttgggaagagccaagcctcggagtgctcaaaattcaaaacgtcgggtgggacaataccaccatcgcctgtgcagcttgtaactcctggtgtagctgggcaagccccgtggccctgaacgtgcagtacgccccgcgcgacgtgagagtcagaaagattaagcctcttagcgagattcattcagggaactccgtgtccctccagtgcgatttctcttcttcacaccccaaagaggttcagttcttttgggaaaagaacggcagactgctcggcaaagagagccagctaaacttcgactctatcagcccagaggacgcaggttcatattcctgttgggtcaataattcaatcggccaaactgcctccaaggcctggaccctggaagtgctttacgcaccaagacggctcagggtatcaatgtccccaggggaccaggtaatggagggcaagtctgcaaccctcacttgtgaaagcgatgccaaccctccagtcagccactatacttggttcgactggaataatcagagcttgccatatcactcacagaaactgcgtctagaacctgtcaaggttcagcatagtggggcatattggtgccagggcaccaacagcgtagggaagggcagatcacctttgtccacgctcacagtatattactctcctgagaccatcgggcggagggtcgctgtcggcctgggttcctgcctagcaatactcattttagcaatttgcggactaaagctgcagagaaggtggaaacggacacagtcccagcaggggttacaagaaaattcttcagggcagagctttttcgtaagaaacaaaaaagtccgccgagcgcctttatccgaggggccccattcactggggtgttacaaccctatgatggaggacgggatatcatacaccactttaaggtttcccgaaatgaatattcctagaaccggcgacgccgagtcaagcgagatgcagcgccctccgccggactgcgatgacacagtcacttacagcgccctgcacaagagacaggtgggcgactatgagaacgtaatccctgacttccctgaagacgagggtatccactattccgagctgatacaatttggagtgggcgagagaccccaggcacaggaaaacgttgactacgtgattttaaaacactag

SEQ ID NO: 98350 - DNA, 2028 bp, Artificial Sequence
  derived and/or modified sequence
atgtccctttggctgttggagggtgttccaatgagacaggctgccgtcaccagtacttccttgaccatcaaatcagtattcacccgaagcgagctcaaattttctccccagtggagccaccatgggaaaatcgtcacgtgccagttgcaggacgccgatgggaagtttttgagtaacgacaccgtgcagctgaatgtcaagcacactcctaaactggagatcaaggtgaccccctccgacgcaatcgtccgggaaggcgattcagtaacaatgacctgtgaggttagctcaagtaatcccgaatacaccactgtcagttggctaaaggatggcacctctctgaagaagcaaaataccttcactctcaatctgagagaggttactaaagatcaatcaggaaaatactgttgtcaagttagcaacgacgtcggaccgggtagatccgaggaagtgtttctgcaagttcagtacgctcctgagccctctacggtccagatcctccacagcccagccgtcgaaggttcacaggtagaatttctctgcatgagtctcgcaaacccgctgcctaccaattacacgtggtatcacaatggcaaggagatgcagggcaggacagaggagaaagtgcatatccctaaaattctgccttggcatgccggaacttactcttgtgttgccgaaaatattctcggaactggccagcgcggtcccggagctgagcttgatgtacaatatccacctaaaaaggtcaccacagtcattcaaaaccccatgcctatcagagaaggggataccgtaactctcagctgcaattacaactcctctaatccttctgttacgaggtacgagtggaaaccccacggcgcatgggaagaaccgagccttggcgtattgaagatccagaatgtaggctgggacaatacaaccatcgcatgcgccgcatgcaattcttggtgctcttgggcttctcccgtggctctgaacgttcaatacgcccctcgcgatgtacgcgtgcggaagattaaacccctgagtgaaattcattctggaaatagcgtgagtttacagtgtgacttctctagctcccacccgaaagaggttcagttcttctgggagaagaatggaaggctgctgggaaaggaatcccagctgaatttcgatagtatttcccccgaggatgctggtagttactcctgttgggtcaacaacagcatcggccagaccgccagcaaagcgtggaccctggaggtgctttatgcccctagacggcttcgggttagtatgagccccggtgaccaagtgatggaaggcaagtcagctaccttaacttgtgagtcagacgctaatccaccagtgtcgcattacacctggttcgattggaacaatcaaagtttgccgtatcactctcaaaaactgcgtttggaacctgtcaaggtccagcacagcggagcttattggtgccagggcaccaatagcgtgggtaaaggccgatcaccactctccacacttacagtgtactacagcccagaaactattggccgtagggtggccgtgggtctgggatcttgtctggcaattctgattctagccatctgcggactgaaattgcagcgccgttggaaacggacccagagccagcagggactgcaggaaaacagttcgggccaatctttcttcgtgcgaaataaaaaagtgagacgagctccactcagtgaggggcctcactccctgggctgctataaccctatgatggaagacggcatatcatacacaaccttaaggttcccggaaatgaatataccacggactggggacgcagagagctccgagatgcagagaccgccaccagattgtgacgatactgtcacctattcagccctgcacaaacgacaggttggtgattacgaaaatgtgattcccgactttccagaagatgagggcatacactactccgagctcattcagttcggagtgggagagcgtccccaggctcaggaaaatgttgactacgtcattttaaagcattag

SEQ ID NO: 98351 - DNA, 2642 bp, Artificial Sequence
  derived and/or modified sequence
ggaagacacgcggaaacagaatacttggctttctctgactcaagtaaatgggtttttgagcaccctgaaaccctctacgcctgggagggggcctgcgtctggatcccctgcacctacagagccctagatggtgacctggaaagcttcatcctgttccacaatcctgagtataacaagaacacctcgaagtttgatgggacaagactctatgaaagcacaaaggatgggaaggttccttctgagcagaaaagggtgcaattcctgggagacaagaataagaactgcacactgagtatccacccggtgcacctcaatgacagtggtcagctggggctgaggatggagtccaagactgagaaatggatggaacgaatacacctcaatgtctctgtggctcctagagggggttccaatgaggcaggctgctgtcacctcgacctccttgaccatcaagtctgtcttcacccggagcgagctcaagttctccccacagtggagtcaccatgggaagattgtgacctgccagcttcaggatgcagatgggaagttcctctccaatgacacggtgcagctgaacgtgaagcacaccccgaagttggagatcaaggtcactcccagtgatgccatagtgagggagggggactctgtgaccatgacctgcgaggtcagcagcagcaacccggagtacacgacggtatcctggctcaaggatgggacctcgctgaagaagcagaatacattcacgctaaacctgcgcgaagtgaccaaggaccagagtgggaagtactgctgtcaggtctccaatgacgtgggcccgggaaggtcggaagaagtgttcctgcaagtgcagtatgccccggaaccttccacggttcagatcctccactcaccggctgtggagggaagtcaagtcgagtttctttgcatgtcactggccaatcctcttccaacaaattacacgtggtaccacaatgggaaagaaatgcagggaaggacagaggagaaagtccacatcccaaagatcctcccctggcacgctgggacttattcctgtgtggcagaaaacattcttggtactggacagaggggcccgggagctgagctggatgtccagtatcctcccaagaaggtgaccacagtgattcaaaaccccatgccgattcgagaaggagacacagtgaccctttcctgtaactacaattccagtaaccccagtgttacccggtatgaatggaaaccccatggcgcctgggaggagccatcgcttggggtgctgaagatccaaaacgttggctgggacaacacaaccatcgcctgcgcagcttgtaatagttggtgctcgtgggcctcccctgtcgccctgaatgtccagtatgccccccgagacgtgagggtccggaaaatcaagcccctttccgagattcactctggaaactcggtcagcctccaatgtgacttctcaagcagccaccccaaagaagtccagttcttctgggagaaaaatggcaggcttctggggaaagaaagccagctgaattttgactccatctccccagaagatgctgggagttacagctgctgggtgaacaactccataggacagacagcgtccaaggcctggacacttgaagtgctgtatgcacccaggaggctgcgtgtgtccatgagcccgggggaccaagtgatggaggggaagagtgcaaccctgacctgtgagagcgacgccaaccctcccgtctcccactacacctggtttgactggaataaccaaagcctcccctaccacagccagaagctgagattggagccggtgaaggtccagcactcgggtgcctactggtgccaggggaccaacagtgtgggcaagggccgttcgcctctcagcaccctcaccgtctactatagcccggagaccatcggcaggcgagtggctgtgggactcgggtcctgcctcgccatcctcatcctggcaatctgtgggctcaagctccagcgacgttggaagaggacacagagccagcaggggcttcaggagaattccagcggccagagcttctttgtgaggaataaaaaggttagaagggcccccctctctgaaggcccccactccctgggatgctacaatccaatgatggaagatggcattagctacaccaccctgcgctttcccgagatgaacataccacgaactggagatgcagagtcctcagagatgcagagacctcccccggactgcgatgacacggtcacttattcagcattgcacaagcgccaagtgggcgactatgagaacgtcattccagattttccagaagatgaggggattcattactcagagctgatccagtttggggtcggggagcggcctcaggcacaagaaaatgtggactatgtgatcctcaaacattgacactggatgggctgcagcagaggcactgggggcagcgggggccagggaagtccccgagtttccccagacaccgccacatggcttcctcctgcgcgcatgtgcgcacacacacacacacacgcacacacacacacacacactcactgcggagaaccttgtgcctggctcagagccagtctttttggtgagggtaaccccaaacctccaaaactcctgcccctgttctcttcca

SEQ ID NO: 98352 - DNA, 2028 bp, Artificial Sequence
  derived and/or modified sequence
atgagcctgtggctgctggagggcgtgcccatgagacaggccgccgtgaccagcaccagcctgaccatcaagagcgtgttcaccagaagcgagctgaagttcagcccccagtggagccaccacggcaagatcgtgacctgccagctgcaggacgccgacggcaagttcctgagcaacgacaccgtgcagctgaacgtgaagcacacccccaagctggagatcaaggtgacccccagcgacgccatcgtgagagagggcgacagcgtgaccatgacctgcgaggtgagcagcagcaaccccgagtacaccaccgtgagctggctgaaggacggcaccagcctgaagaagcagaacaccttcaccctgaacctgagagaggtgaccaaggaccagagcggcaagtactgctgccaggtgagcaacgacgtgggccccggcagaagcgaggaggtgttcctgcaggtgcagtacgcccccgagcccagcaccgtgcagatcctgcacagccccgccgtggagggcagccaggtggagttcctgtgcatgagcctggccaaccccctgcccaccaactacacctggtaccacaacggcaaggagatgcagggcagaaccgaggagaaggtgcacatccccaagatcctgccctggcacgccggcacctacagctgcgtggccgagaacatcctgggcaccggccagagaggccccggcgccgagctggacgtgcagtacccccccaagaaggtgaccaccgtgatccagaaccccatgcccatcagagagggcgacaccgtgaccctgagctgcaactacaacagcagcaaccccagcgtgaccagatacgagtggaagccccacggcgcctgggaggagcccagcctgggcgtgctgaagatccagaacgtgggctgggacaacaccaccatcgcctgcgccgcctgcaacagctggtgcagctgggccagccccgtggccctgaacgtgcagtacgcccccagagacgtgagagtgagaaagatcaagcccctgagcgagatccacagcggcaacagcgtgagcctgcagtgcgacttcagcagcagccaccccaaggaggtgcagttcttctgggagaagaacggcagactgctgggcaaggagagccagctgaacttcgacagcatcagccccgaggacgccggcagctacagctgctgggtgaacaacagcatcggccagaccgccagcaaggcctggaccctggaggtgctgtacgcccccagaagactgagagtgagcatgagccccggcgaccaggtgatggagggcaagagcgccaccctgacctgcgagagcgacgccaacccccccgtgagccactacacctggttcgactggaacaaccagagcctgccctaccacagccagaagctgagactggagcccgtgaaggtgcagcacagcggcgcctactggtgccagggcaccaacagcgtgggcaagggcagaagccccctgagcaccctgaccgtgtactacagccccgagaccatcggcagaagagtggccgtgggcctgggcagctgcctggccatcctgatcctggccatctgcggcctgaagctgcagagaagatggaagagaacccagagccagcagggcctgcaggagaacagcagcggccagagcttcttcgtgagaaacaagaaggtgagaagagcccccctgagcgagggcccccacagcctgggctgctacaaccccatgatggaggacggcatcagctacaccaccctgagattccccgagatgaacatccccagaaccggcgacgccgagagcagcgagatgcagagacccccccccgactgcgacgacaccgtgacctacagcgccctgcacaagagacaggtgggcgactacgagaacgtgatccccgacttccccgaggacgagggcatccactacagcgagctgatccagttcggcgtgggcgagagaccccaggcccaggagaacgtggactacgtgatcctgaagcactag

SEQ ID NO: 98353 - protein, 85 aa, Artificial Sequence
  derived and/or modified sequence
MSDKSDLKAELERKKQRLAQIREEKKRKEEERKKKEADMQQKKEPVQDDSDLDRKRRETEALLQSIGISPEPPLVPTPMSPSSKS

SEQ ID NO: 98354 - protein, 602 aa, Artificial Sequence
  derived and/or modified sequence
MSDKSDLKAELERKKQRLAQIREEKKRKEEERKKKEADMQQKKEPVQDDSDLDRKRRETEALLQSIGISPEPPLVPTPMSPSSKSVSTPSEAGSQDSGDLGPLTRRRLHKLGVSKVTQVDFLPREVVSYSKETQTPLATHQSEEDEEDEEMVESKVGQDSELENQDKKQEVKEAPPRELTEEEKQQILHSEEFLIFFDRTIRVIERALAEDSDIFFDYSGRELEEKDGDVQAGANLSFNRQFYDEHWSKHRVVTCMDWSLQYPELMVASYNNNEDAPHEPDGVALVWNMKFKKTTPEYVFHCQSSVMSVCFARFHPNLVVGGTYSGQIVLWDNRSHRRTPVQRTPLSAAAHTHPVYCVNVVGTQNAHNLITVSTDGKMCSWSLDMLSTPQESMELVYNKSKPVAVTGMAFPTGDVNNFVVGSEEGTVYTACRHGSKAGIGEVFEGHQGPVTGINCHMAVGPIDFSHLFVTSSFDWTVKLWTTKHNKPLYSFEDNADYVYDVMWSPVHPALFACVDGMGRLDLWNLNNDTEVPTASVAIEGASALNRVRWAQAGKEVAVGDSEGRIWVYDVGEGLAMLPGWSQNSWTQAILLCWPPKVLGLQT

SEQ ID NO: 98355 - DNA, 258 bp, Artificial Sequence
  derived and/or modified sequence
atgagcgacaagagcgacctgaaggccgagctggagagaaagaagcagagactggcccagatcagagaggagaagaagagaaaggaggaggagagaaagaagaaggaggccgacatgcagcagaagaaggagcccgtgcaggacgacagcgacctggacagaaagagaagagagaccgaggccctgctgcagagcatcggcatcagccccgagccccccctggtgcccacccccatgagccccagcagcaagagctag

SEQ ID NO: 98356 - DNA, 1809 bp, Artificial Sequence
  derived and/or modified sequence
atgagcgacaagagcgacctgaaggccgagctggagagaaagaagcagagactggcccagatcagagaggagaagaagagaaaggaggaggagagaaagaagaaggaggccgacatgcagcagaagaaggagcccgtgcaggacgacagcgacctggacagaaagagaagagagaccgaggccctgctgcagagcatcggcatcagccccgagccccccctggtgcccacccccatgagccccagcagcaagagcgtgagcacccccagcgaggccggcagccaggacagcggcgacctgggccccctgaccagaagaagactgcacaagctgggcgtgagcaaggtgacccaggtggacttcctgcccagagaggtggtgagctacagcaaggagacccagacccccctggccacccaccagagcgaggaggacgaggaggacgaggagatggtggagagcaaggtgggccaggacagcgagctggagaaccaggacaagaagcaggaggtgaaggaggccccccccagagagctgaccgaggaggagaagcagcagatcctgcacagcgaggagttcctgatcttcttcgacagaaccatcagagtgatcgagagagccctggccgaggacagcgacatcttcttcgactacagcggcagagagctggaggagaaggacggcgacgtgcaggccggcgccaacctgagcttcaacagacagttctacgacgagcactggagcaagcacagagtggtgacctgcatggactggagcctgcagtaccccgagctgatggtggccagctacaacaacaacgaggacgccccccacgagcccgacggcgtggccctggtgtggaacatgaagttcaagaagaccacccccgagtacgtgttccactgccagagcagcgtgatgagcgtgtgcttcgccagattccaccccaacctggtggtgggcggcacctacagcggccagatcgtgctgtgggacaacagaagccacagaagaacccccgtgcagagaacccccctgagcgccgccgcccacacccaccccgtgtactgcgtgaacgtggtgggcacccagaacgcccacaacctgatcaccgtgagcaccgacggcaagatgtgcagctggagcctggacatgctgagcaccccccaggagagcatggagctggtgtacaacaagagcaagcccgtggccgtgaccggcatggccttccccaccggcgacgtgaacaacttcgtggtgggcagcgaggagggcaccgtgtacaccgcctgcagacacggcagcaaggccggcatcggcgaggtgttcgagggccaccagggccccgtgaccggcatcaactgccacatggccgtgggccccatcgacttcagccacctgttcgtgaccagcagcttcgactggaccgtgaagctgtggaccaccaagcacaacaagcccctgtacagcttcgaggacaacgccgactacgtgtacgacgtgatgtggagccccgtgcaccccgccctgttcgcctgcgtggacggcatgggcagactggacctgtggaacctgaacaacgacaccgaggtgcccaccgccagcgtggccatcgagggcgccagcgccctgaacagagtgagatgggcccaggccggcaaggaggtggccgtgggcgacagcgagggcagaatctgggtgtacgacgtgggcgagggcctggccatgctgcccggctggagccagaacagctggacccaggccatcctgctgtgctggccccccaaggtgctgggcctgcagacctag

SEQ ID NO: 98357 - DNA, 258 bp, Artificial Sequence
  derived and/or modified sequence
atgtccgacaagtcggacctgaaggctgaactggagaggaaaaagcaacggctagctcagataagagaggaaaagaagaggaaagaagaggaacgcaagaagaaagaagccgatatgcagcaaaagaaggagcccgtccaggatgattccgacttggatcggaaaaggcgcgaaacagaggcgctgctccagtctatcgggataagccctgaacctcctctggtccctaccccgatgagcccctcgtcaaagagctag

SEQ ID NO: 98358 - DNA, 1809 bp, Artificial Sequence
  derived and/or modified sequence
atgtccgacaaatccgacttgaaggccgaattggaaaggaaaaaacagagactggcccaaattcgtgaggagaaaaagcggaaagaagaggagagaaagaaaaaagaggctgatatgcagcaaaaaaaagagccggtgcaggacgattcggatctggacaggaagcgacgtgaaactgaagccctgcttcaaagcatcggcatcagtccagaacctcccctcgttcctactcccatgtccccctctagtaaatccgtttcaacccccagcgaagcgggtagccaggactctggcgatttgggcccgcttacaaggagaagattacacaagctcggcgtttccaaagtcacccaggtcgacttcctgccgcgagaagtggtttcctactccaaggagacacagactcctttggcaactcaccaatcagaggaagatgaagaagacgaagagatggttgaatccaaggtgggccaagatagtgagctggagaatcaagataagaaacaggaggtaaaagaggccccgcctcgcgagctcacagaagaggagaagcagcagatcctacactccgaagagttcttgatcttctttgacagaaccattcgagtcatcgagagggctctggcagaggactctgacatcttcttcgattacagcgggagagagcttgaggagaaggacggagacgtacaggcgggtgctaaccttagcttcaacaggcagttctacgacgagcactggtccaagcatagggttgtaacctgtatggactggagcttacagtacccggagttgatggtggcgagctacaataataatgaggacgccccccatgagcccgatggagtcgcactcgtatggaacatgaagtttaagaaaaccacgcccgagtacgtgttccactgccaaagtagcgttatgtccgtttgctttgctcgcttccaccccaacctggtcgtgggtggaacctactctggccagattgtgctctgggacaaccgctctcataggcgcactccagtgcagcgcactcctctcagcgccgctgctcacactcacccagtctactgcgtgaatgtcgtggggacacagaacgcccacaacctgatcaccgtgagcaccgatggaaagatgtgtagctggtcactagacatgctgtcaaccccccaggagtccatggaactggtctataataagtcaaaacctgtggctgtgactggcatggccttccccaccggggatgtcaacaactttgttgttggctctgaggaggggacagtgtacactgcttgccggcatgggtccaaggccgggattggtgaagtctttgagggacatcagggacctgtaacaggcatcaactgtcatatggcggtcggaccaatcgatttttcccacctgtttgtgacttcctcattcgactggactgttaagctgtggaccacaaagcacaacaaaccgctttatagttttgaggacaacgccgactacgtgtatgatgttatgtggagcccagtgcacccagcccttttcgcatgtgtcgacggtatgggcagactggacctgtggaacttgaacaacgacacggaggtgccaactgcctcggtggccatagagggagcctccgctctaaacagggtgcgttgggctcaggcgggcaaggaagtggccgttggcgacagtgaagggcgcatttgggtgtatgacgtaggtgagggtctggccatgcttccagggtggtcacagaatagttggacccaggcaattctgttgtgttggccccctaaggtgctcggcttacagacctag

SEQ ID NO: 98359 - DNA, 258 bp, Artificial Sequence
  derived and/or modified sequence
atgtctgacaagagtgacctgaaggccgagctggagaggaagaagcagaggctggcccagatccgggaggagaagaagaggaaggaggaggagaggaagaagaaggaggccgacatgcagcagaagaaggagcctgtgcaggatgacagcgacctggacaggaagaggcgggagacagaggccctgctgcagagcatcggcatcagccctgagccccccctggtgcccacccccatgagccccagcagcaagagctag

SEQ ID NO: 98360 - DNA, 1809 bp, Artificial Sequence
  derived and/or modified sequence
atgtctgacaagagtgacctgaaggccgagctggagaggaagaagcagaggctggcccagatccgggaggagaagaagaggaaggaggaggagaggaagaagaaggaggccgacatgcagcagaagaaggagcctgtgcaggatgacagcgacctggacaggaagaggcgggagacagaggccctgctgcagagcatcggcatcagccctgagccccccctggtgcccacccccatgagccccagcagcaagtctgtgtccacccccagcgaggccggcagccaggacagcggggacctgggccccctgacccggcggcggctgcacaagctgggcgtgtccaaggtgacccaggtggacttcctgccccgggaggtggtgtcctacagcaaggagacccagacccccctggccacccaccagagcgaggaggatgaagaagatgaggagatggtggagagcaaggtgggccaggacagcgagctggagaaccaggacaagaagcaggaggtgaaggaggccccaccccgggagctgacagaggaggagaagcagcagatcctgcacagcgaggagttcctgatcttctttgacaggaccatccgggtcatcgagcgggccctggccgaggacagcgacatcttctttgactacagcggccgggagctggaggagaaggatggagatgtgcaggccggggccaacctgtccttcaaccggcagttctatgatgagcactggagcaagcaccgggtggtgacctgcatggactggagcctgcagtacccagagctgatggtggccagctacaacaacaatgaagatgcccctcatgagccagatggagtggccctggtgtggaacatgaagttcaagaagaccaccccagaatatgtgttccactgccagagctctgtgatgtctgtgtgctttgcccgcttccaccccaacctggtggtgggcggcacctacagcggccagatcgtgctgtgggacaacagaagccacaggaggacccctgtgcagaggacccccctgtctgctgctgcccacacccaccctgtgtactgtgtgaatgtggtgggcacccagaatgcccacaacctgatcaccgtgtccacagatggcaagatgtgctcctggagcctggacatgctgagcaccccccaggagagcatggagctggtgtacaacaagagcaagcctgtggccgtgacaggcatggccttccccactggagatgtgaacaactttgtggtgggcagcgaggagggcaccgtgtacacagcctgcagacatggcagcaaggccggcattggagaggtgtttgagggccaccagggccctgtgacaggcatcaactgccacatggctgtgggccccatcgacttcagccacctgtttgtgaccagcagctttgactggacagtgaagctgtggaccaccaagcacaacaagcccctgtacagctttgaggacaatgctgactatgtgtatgatgtgatgtggagccctgtgcacccagccctgtttgcctgtgtggatggcatgggccgcctggacctgtggaacctgaacaatgacacagaggtgcccacagcctctgtggccatcgagggcgccagcgccctgaacagagtgcgctgggcccaggccggcaaggaggtggccgtgggggacagcgagggccgcatctgggtgtatgatgtgggggagggcctggccatgctgcccggctggagccagaacagctggacccaggccatcctgctgtgctggccacccaaggtgctgggcctgcagacctag

SEQ ID NO: 98361 - DNA, 258 bp, Artificial Sequence
  derived and/or modified sequence
atgagcgacaagagcgacctgaaggccgagctggagcggaagaagcagcgccttgcacagattagggaggaaaagaaacgaaaggaggaagaacgaaagaagaaggaagccgatatgcagcagaaaaaagaaccagtgcaagacgattccgacttggacaggaagcggcgcgaaactgaagcactgctacagagtattggaattagtcctgaaccaccgcttgtgcccaccccaatgtcgccatcctctaaaagctag

SEQ ID NO: 98362 - DNA, 1809 bp, Artificial Sequence
  derived and/or modified sequence
atgagcgacaagagcgacctgaaggccgagctggagcggaagaagcagcgactggctcaaattcgcgaggaaaagaaaagaaaggaagaggaacgcaagaagaaggaggcagatatgcagcagaaaaaagaacctgtccaggatgatagcgatctggatcggaagagaagggagactgaggctcttctgcaaagcatcggcatcagcccagaacccccattggtaccgactcctatgtctcctagcagtaaatccgtgtcaactccttcagaggccggatcccaggattctggcgatctcggacctttaaccaggcgccgattgcataaactgggcgtcagtaaggttacacaggttgatttcttgccacgcgaagtggtaagctattcaaaagagactcaaacacctctggctacacatcagagtgaagaagacgaagaggatgaagaaatggtggaatctaaggtcggccaggactcggagctggaaaaccaggacaagaagcaagaggtgaaagaggcccccccgcgagagttgactgaggaagaaaaacagcaaatcctgcattctgaagagttcctgattttttttgaccgaaccattcgcgttattgaaagagctctggccgaagattctgatatcttcttcgattactcaggacgagaactggaagaaaaggatggcgacgtgcaggctggcgctaatctgagcttcaacagacagttttatgatgagcactggtcgaagcatagggtggtgacttgtatggattggtcattgcagtaccctgaattgatggtggcatcatacaacaacaacgaggacgccccacatgagcccgacggggtagcactcgtttggaacatgaagttcaaaaagactactccagagtacgtatttcattgccagtcatcggtcatgtctgtgtgttttgctaggttccacccgaatctcgtggtgggtggaacatattcagggcagatcgttttatgggataatcggtcccaccgtcggacacctgtacaaaggacccccctttctgctgcagctcacacgcatccagtgtactgcgttaatgttgtgggaacccagaatgcccataacttgattacggtaagtactgacggtaaaatgtgttcttggagcctagacatgctgtcgaccccacaggaaagtatggaactggtgtataacaaaagcaagcctgtggcggtaacggggatggcttttccaacaggcgacgtcaacaacttcgtggtcggtagtgaggaggggaccgtctacacagcctgccgccacggcagcaaagccgggataggggaagtgtttgaaggtcatcagggtcccgtgaccggtatcaactgccacatggcagttggccccatagatttctcccatctctttgtgaccagtagtttcgactggacagttaagttgtggaccacaaagcacaacaagcccctgtactctttcgaggataatgcggactacgtgtacgacgttatgtggagccctgttcaccccgcactgtttgcctgcgtcgacggcatgggccggctcgatctgtggaatctaaataacgataccgaagttccaaccgcctctgtcgctattgagggagcctccgcactgaaccgggttagatgggcccaggcggggaaagaagtagctgtaggagatagcgaaggcagaatttgggtctacgatgttggcgaaggtctggccatgctccccggctggtcacagaacagctggacccaggccatccttctgtgctggcccccaaaagttctgggattacagacttag

SEQ ID NO: 98363 - DNA, 258 bp, Artificial Sequence
  derived and/or modified sequence
atgagtgataagagtgacttgaaggctgagctcgaacgaaagaagcaacgtctagctcagattcgcgaagagaagaagaggaaagaggaagagaggaagaaaaaagaggccgacatgcaacagaaaaaggagcccgtgcaagatgattcagatttagaccgaaagcgcagggagacagaagccctgttgcagtccatcggtatctcaccagagccccctctggtgcctacccccatgtctccttctagcaaaagctag

SEQ ID NO: 98364 - DNA, 1809 bp, Artificial Sequence
  derived and/or modified sequence
atgagtgacaaatcagatctaaaggctgaactggaaagaaaaaagcagcgactcgcccagatccgggaggaaaaaaaacgcaaagaagaggaaagaaaaaaaaaggaggcggatatgcagcaaaaaaaagaacctgtccaagatgattccgacctagatcgcaagagacgcgagacggaagccttgcttcagtcgattggtatcagccctgaaccccctcttgtacccaccccaatgtctccctcaagcaagtctgtcagcacaccatcggaggctggttcccaggatagcggtgatctgggacccctgacaaggagaagattacacaaactgggagtaagcaaggtgactcaggtggatttcctgcctcgggaagtggttagttactccaaagaaacacaaacacccttggccacccaccagagcgaggaggatgaagaggacgaggagatggtggagagcaaggtgggacaggactcagagcttgaaaaccaggataaaaagcaggaagtcaaggaagccccacccagggaactcacagaggaggagaagcagcaaattcttcatagtgaagaatttctcatattctttgaccgcacgatcagggtgatcgaaagggccttggccgaagatagcgacatttttttcgactattctggcagggagctcgaagagaaagatggggatgttcaggctggagccaatctttcattcaatcgtcagttctacgatgagcattggtcaaagcatagagtcgtgacttgcatggattggtcgctgcagtatcctgagctcatggtggcttcctataataataatgaggacgcaccccacgagcccgacggggtagccctcgtgtggaatatgaaattcaaaaagacgaccccagaatacgtttttcactgccaaagctccgtgatgtcagtctgtttcgcgaggttccatcctaacctggttgtcggtgggacctactccggacagatcgtcctctgggacaatcgatcccaccggaggactcccgtacagcggactcctctttccgccgctgctcatacgcacccagtctactgtgtgaatgtcgttggtacccagaacgcccacaacctgatcactgtctcaacggatgggaagatgtgctcttggtctctggacatgctgtccacgccacaggagagcatggaactggtgtacaacaagagcaagcctgtggcagtgacaggcatggccttccctacaggagacgtgaacaatttcgtggttgggagtgaggagggcaccgtgtatactgcctgtcggcatgggagtaaggctggcatcggagaggtgttcgaaggacatcaaggacctgttactggcataaactgtcacatggctgtcggccctattgatttcagtcacctgtttgtcacgagctcattcgactggacagtcaagctttggaccacgaaacacaataagcccttgtattcgttcgaggataacgcggactatgtgtacgatgttatgtggtctcctgtgcatcccgctctctttgcctgcgtcgatggcatggggcgactggacctttggaatttgaacaacgacacagaagtgccgacggcttctgtagcgatcgagggggctagcgcccttaatagagtcagatgggctcaagccggtaaggaagtggcggtcggagactcagaagggagaatctgggtgtacgacgtgggagagggactcgctatgctgccaggctggtcccagaactcctggactcaggccatcctgctctgctggccacccaaggtcctgggcctacagacatag

SEQ ID NO: 98365 - DNA, 575 bp, Artificial Sequence
  derived and/or modified sequence
agtgtcaggctctgggagagaggaagtgatcgctcccggaggagcgcgagccgagcggccggcgcagcgtgagacagcacatcctgcccgcgccggccccgccaccttcgggagccgcctgcaccaacgctgccgccgcccaggagccgccgccggctcggggagcccagttccgccgctgccgagcgcgtccagtctcactctgccacccaggctagagtgcagtgcatgattataactcattgtaaccgtgaattcttggcgtcaagctgtcctcccgcctcagcctcccaaagcactggggttacaggaaaccaacatgtctgacaaaagtgacttaaaagctgagctagagcgcaaaaagcagcgcttagcacagataagagaagagaagaaacggaaggaagaggagaggaaaaagaaagaggctgatatgcagcagaagaaagaacccgttcaggacgactctgatctggatcgcaaacgacgagagacagaggctttgctgcaaagcattggtatctcaccggagccgcctctagtcccaacccctatgtctccctcctcgaaatcag

SEQ ID NO: 98366 - DNA, 2249 bp, Artificial Sequence
  derived and/or modified sequence
gagagaggaagtgatcgctcccggaggagcgcgagccgagcggccggcgcagcgtgagacagcacatcctgcccgcgccggccccgccaccttcgggagccgcctgcaccaacgctgccgccgcccaggagccgccgccggctcggggagcccagttccgccgctgccgagcgcgtccaggaaaccaacatgtctgacaaaagtgacttaaaagctgagctagagcgcaaaaagcagcgcttagcacagataagagaagagaagaaacggaaggaagaggagaggaaaaagaaagaggctgatatgcagcagaagaaagaacccgttcaggacgactctgatctggatcgcaaacgacgagagacagaggctttgctgcaaagcattggtatctcaccggagccgcctctagtcccaacccctatgtctccctcctcgaaatcagtgagcactcccagtgaagctggaagccaagactcaggcgatctggggccattaacaagaagaagactgcataaactgggcgtgtcaaaggtcacccaagtggatttcctgccaagggaagtagtgtcctactcaaaggagacccagactcctcttgccacgcatcagtctgaagaggatgaggaagatgaggaaatggtggaatctaaagttggccaggactcagaactggaaaatcaggacaaaaaacaggaagtgaaggaagcccctccaagagagttgacagaggaagaaaaacagcagatccttcattcagaggaatttctcatcttttttgaccggacaatacgggtaattgaaagagccctggctgaagattccgacatcttttttgactacagcggccgagagttagaggaaaaagatggggatgttcaggctggagccaatctttctttcaatcgtcagttctatgatgaacattggtccaagcatcgagtggtcacttgtatggactggtccctccagtaccctgagctgatggtggcttcttacaacaacaatgaagatgctccccatgaaccagatggagtggccttggtttggaacatgaagtttaagaaaaccacaccagaatacgtcttccactgtcagtcctctgtgatgtcggtctgcttcgcccgtttccatcctaacttggtggttggtgggacttactcgggccagattgtcctctgggacaatcgcagtcatcgaaggactccagtgcagcggacacccttatcagctgctgcacacacgcatcccgtgtactgtgtaaatgttgttgggacccagaatgctcataacctcatcactgtctccactgatggcaaaatgtgttcctggagcctggacatgctctcaactccacaggagagcatggagctggtgtacaataagtccaagcctgtcgctgttaccggaatggctttcccaacgggagacgtcaataacttcgtggttggcagtgaggaaggtacagtctacacggcttgtcgtcatggaagcaaagcaggtattggtgaggtctttgaaggtcaccaagggccagtgacaggaattaactgccacatggcagtgggcccaatcgacttttctcacctgtttgtcacatcatcatttgactggactgtcaaactgtggaccaccaagcacaacaagccgctctactcctttgaagacaatgcagactatgtgtacgatgtcatgtggtcccccgtgcatcctgcgctttttgcctgcgtggacgggatggggcgcttggacctctggaacctcaacaatgacaccgaggttccaacagcaagtgtggccattgagggggcatccgccctaaaccgtgttcgttgggcccaagctggcaaagaagttgctgttggggactcggaaggccgtatttgggtctatgacgttggagagggtcttgctatgttgccaggctggtctcaaaattcctggactcaagcaatcctcctatgttggcctcccaaagtgctgggattacagacatgagccactgtgcccagctatgcctgcttgttatatcagctactgagagatgagtaccaaaatctggaagtataattgtggatatcttttagttctttcagttctatcagcttttgttttctgtatccaaagctttgttattaggtgcctacatattgaggatttcatgtgtttgcgatgaactgacccttttatcaatatgaaatgttgctgtttattcctagtaataatcctttttcttaaatctactttga

SEQ ID NO: 98367 - protein, 243 aa, Artificial Sequence
  derived and/or modified sequence
MRPLLVLLLLGLAAGSPPLDDNKIPSLCPGHPGLPGTPGHHGSQGLPGRDGRDGRDGAPGAPGEKGEGGRPGLPGPRGDPGPRGEAGPAGPTGPAGECSVPPRSAFSAKRSESRVPPPSDAPLPFDRVLVNEQGHYDAVTGKFTCQVPGVYYFAVHATVYRASLQFDLVKNGESIASFFQFFGGWPKPASLSGGAMVRLEPEDQVWVQVGVGDYIGIYASIKTDSTFSGFLVYSDWHSSPVFA

SEQ ID NO: 98368 - DNA, 732 bp, Artificial Sequence
  derived and/or modified sequence
atgagacctttattggtactgctcctcctcggcctcgcagcaggcagccctcctcttgatgacaacaagatcccttctctgtgtccgggccaccctggcctgcccgggacccccgggcatcatggatctcaaggactgcccggacgagatggcagagatggaagggatggcgccccgggagctccaggggaaaagggggaaggcggaaggcctggacttcccgggccacggggcgaccctggcccccggggagaggctggaccagccggaccgaccgggccagccggcgagtgttccgtcccccctcgttcagctttttctgctaaacgcagtgagtcccgtgtgccaccacccagcgacgctccattaccgtttgacagagtcctggtgaacgagcagggacattatgacgccgtcaccggtaaattcacatgccaagtgccaggagtatactacttcgctgtgcatgcaaccgtgtacagagctagtctgcagtttgatctcgtgaagaatggcgagagtatagcctcttttttccagttcttcggtggatggccaaaacctgcttccctttccgggggcgctatggttaggttggagccagaggaccaagtgtgggtccaggtgggagtgggggattatatcgggatttatgccagtatcaagactgactctacctttagtggcttccttgtgtattccgactggcattcaagtcccgtctttgcgtag

SEQ ID NO: 98369 - DNA, 732 bp, Artificial Sequence
  derived and/or modified sequence
atgcgccctttactcgtactcctcctcctggggctggccgccggcagccctccactagacgacaacaagatcccatccctgtgcccagggcaccccggtctgcccggaactcccggccaccatggcagtcaagggctaccagggcgggacggtcgagatggcagggacggagcccctggagcaccaggagagaaaggcgaggggggaaggcccggactgcccggcccccgtggtgatcctggcccccggggtgaagcaggaccagccgggcccacgggtcccgctggggagtgttctgtacctcccagatctgccttttcagctaaacgctctgaatctcgcgtgccccctccatccgacgccccattgccatttgacagggtgttggtcaatgagcaagggcattacgacgccgtgactggcaagttcacttgccaagtgccaggcgtctattactttgcagtccatgcaacggtctaccgggcgagtctgcagttcgatctggtgaagaatggcgaatccattgcttctttcttccagttttttggcggatggccaaaacccgcctccctctctggtggcgcgatggtgagacttgagcctgaagatcaggtttgggtgcaggtgggcgttggtgactacataggaatttacgcttcaattaaaaccgatagcacgttcagtgggtttctggtgtactcggactggcactcaagtcccgtgttcgcttag

SEQ ID NO: 98370 - DNA, 732 bp, Artificial Sequence
  derived and/or modified sequence
atgaggcccctgctggtgctgctgctgctgggcctggccgccggcagcccccccctggatgacaacaagatccccagcctgtgccccggccaccctggcctgcccggcaccccaggccaccacggcagccagggcctgcccggcagagatggaagagatggaagagatggagcccctggggcccctggagagaagggggagggcggccggcccggcctgcccggccccaggggggaccccggccccagaggagaggccggccctgctggccccaccggccctgctggagaatgttctgtgcccccaagaagtgccttcagcgccaagaggtctgagagccgggtgcccccacccagtgatgcccccctgccctttgacagagtgctggtgaatgagcagggccactatgatgctgtgacaggcaagttcacctgccaggtgcctggggtgtactactttgctgtgcacgccaccgtgtaccgggccagcctgcagtttgacctggtgaagaatggagagagcatcgccagcttcttccagttcttcggcggctggcccaagccagccagcctgagcggcggggccatggtgcggctggagcctgaggaccaggtgtgggtgcaggtgggcgtgggggactacatcggcatctatgccagcatcaagacagacagcaccttcagcggcttcctggtgtacagcgactggcacagcagccctgtgtttgcctag

SEQ ID NO: 98371 - DNA, 732 bp, Artificial Sequence
  derived and/or modified sequence
atgcggcccctgctggtgctgctgctgctgggcctggccgccggctcccctccactggatgataataagattccgtctctatgccccggacatccaggtctgcctgggacccctggccaccacggcagccagggattacccggaagggacggacgcgacggtcgggacggagcgccgggggctcccggtgagaaaggcgaaggagggcggcctggcctgcccggcccccgtggagatccgggcccaagaggcgaagctggtcctgctggccccaccgggccggctggagagtgtagcgtgcccccgcgttctgcctttagtgccaaacgctccgaatctcgagtgcctcctcccagtgatgccccattgccatttgatcgtgttctagtcaatgagcagggacactatgatgcagtcacaggaaagttcacatgccaggtgccaggcgtctactatttcgctgtgcatgctaccgtgtaccgcgcttccctccagttcgatctcgtgaaaaacggcgagtccatcgctagcttttttcagttctttggtggatggccaaagcccgcatcgctgtctggtggcgctatggtgcggctggagccggaagaccaagtctgggtgcaggtaggtgtgggcgattatattggcatatacgcatcaataaaaacagactccactttcagtggctttctggtttattcagactggcattcaagccctgttttcgcatag

SEQ ID NO: 98372 - DNA, 732 bp, Artificial Sequence
  derived and/or modified sequence
atgcggcccctgctggtgctgctgctgctgggcctggccgccggctctccccctctggacgacaacaaaatcccgtcgctgtgcccgggacacccgggactgccaggtacacccggtcatcacggcagtcagggcttgccaggtcgggacgggcgagacggcagagatggcgcaccaggcgcaccaggtgagaagggagaaggcggtcggcctgggctgccgggaccaaggggcgaccctggtcctagaggagaggcgggccccgcgggccccaccgggccagctggagagtgtagcgtgccgcctcggtcagccttttcagcaaagcggagtgaatccagagtgccccctccctctgatgctccactgccattcgatcgggtacttgtgaacgagcagggacattatgatgcggtcaccgggaaattcacatgccaagttcccggcgtgtactacttcgcagttcacgctacagtatatcgggcgagtctgcagttcgacctcgtgaaaaacggcgagtccatcgcctcattcttccagttcttcggtgggtggccaaaaccggcatccctgagcggtggcgccatggtgaggctggaaccggaggatcaagtctgggtgcaggtgggcgttggagattatattgggatttacgcctcaatcaaaacagactctacgttctccggcttcctggtttactcagactggcattccagcccggtgttcgcgtag

SEQ ID NO: 98373 - DNA, 732 bp, Artificial Sequence
  derived and/or modified sequence
atgcgtccactcttagtgctgcttctgctggggcttgcagctggatcccctccactagacgacaacaaaattccaagcttatgtccaggtcatcccggactacccggaactcctggacaccacgggagtcagggactccccggtagggatggtagagacgggagggacggcgctcctggagctccaggcgagaaaggggaagggggacgccctgggctaccaggacctcgcggtgaccctgggcctagaggggaggccggacccgctgggcctacgggacccgcaggtgaatgctcagttccaccacggtcagccttctccgccaagaggagcgagtcaagagtgccaccaccatcagacgctccactcccctttgatcgagtgctggtgaatgaacaaggccattacgatgccgtcacaggtaaattcacatgtcaggtgccaggggtgtactacttcgcggtgcacgcgactgtgtaccgtgctagcctacaattcgacctggtgaagaacggggaatctattgcctcctttttccaattctttgggggatggccaaagcctgcctctttgtccggcggagcaatggtgaggcttgaacctgaagaccaggtttgggtccaggtcggcgtgggtgattacattggaatttacgcctcgattaagaccgactctacatttagtggctttctcgtgtattccgattggcattcctcgcctgtatttgcctag

SEQ ID NO: 98374 - DNA, 732 bp, Artificial Sequence
  derived and/or modified sequence
atgcggccattgctagttctcctgctgcttggtcttgccgctgggagtccgcctctggatgacaacaaaataccctccctttgtccgggtcacccaggactccccggaactcctggccatcatggctctcaaggtttgcctggcagagacggccgagacgggagggatggggcacctggagcacccggtgaaaaaggtgaaggagggagaccaggcttgcccggtcctaggggcgacccgggaccgaggggggaggcaggaccggctgggccaaccggcccagcaggagagtgttccgtccccccaaggtctgcttttagcgccaagcgctctgagtcacgcgtacctcctccatccgacgctcctctccctttcgatcgcgtgctggtcaatgaacagggacattacgatgccgtgacgggaaagtttacttgccaggtgcctggggtttattactttgcagtccatgcaacggtctacagagcctctcttcagtttgatcttgttaaaaacggagaaagtattgcctccttcttccaattctttgggggttggccgaagcctgccagtctttcaggtggcgctatggtgcggttggaacccgaggatcaagtttgggtgcaggtgggggtgggggattacatcggcatttacgcaagcattaaaacagactctacttttagtgggttcctggtgtacagcgactggcatagtagccctgtctttgcctag

SEQ ID NO: 98375 - DNA, 1353 bp, Artificial Sequence
  derived and/or modified sequence
gaacaactggtttcctcttggagtctgggaggaggaaagcggagccggcagggagcgaaccaggactggggtgacggcagggcagggggcgcctggccggggagaagcgcgggggctggagcaccaccaactggagggtccggagtagcgagcgccccgaaggaggccatcggggagccgggaggggggactgcgagaggaccccggcgtccgggctcccggtgccagcgctatgaggccactcctcgtcctgctgctcctgggcctggcggccggctcgcccccactggacgacaacaagatccccagcctctgcccggggcaccccggccttccaggcacgccgggccaccatggcagccagggcttgccgggccgcgatggccgcgacggccgcgacggcgcgcccggggctccgggagagaaaggcgagggcgggaggccgggactgccgggacctcgaggggaccccgggccgcgaggagaggcgggacccgcggggcccaccgggcctgccggggagtgctcggtgcctccgcgatccgccttcagcgccaagcgctccgagagccgggtgcctccgccgtctgacgcacccttgcccttcgaccgcgtgctggtgaacgagcagggacattacgacgccgtcaccggcaagttcacctgccaggtgcctggggtctactacttcgccgtccatgccaccgtctaccgggccagcctgcagtttgatctggtgaagaatggcgaatccattgcctctttcttccagtttttcggggggtggcccaagccagcctcgctctcggggggggccatggtgaggctggagcctgaggaccaagtgtgggtgcaggtgggtgtgggtgactacattggcatctatgccagcatcaagacagacagcaccttctccggatttctggtgtactccgactggcacagctccccagtctttgcttagtgcccactgcaaagtgagctcatgctctcactcctagaaggagggtgtgaggctgacaaccaggtcatccaggagggctggcccccctggaatattgtgaatgactagggaggtggggtagagcactctccgtcctgctgctggcaaggaatgggaacagtggctgtctgcgatcaggtctggcagcatggggcagtggctggatttctgcccaagaccagaggagtgtgctgtgctggcaagtgtaagtcccccagttgctctggtccaggagcccacggtggggtgctctcttcctggtcctctgcttctctggatcctccccaccccctcctgctcctggggccggcccttttctcagagatcactcaataaacctaagaaccctc

SEQ ID NO: 98376 - DNA, 732 bp, Artificial Sequence
  derived and/or modified sequence
atgagacccctgctggtgctgctgctgctgggcctggccgccggcagcccccccctggacgacaacaagatccccagcctgtgccccggccaccccggcctgcccggcacccccggccaccacggcagccagggcctgcccggcagagacggcagagacggcagagacggcgcccccggcgcccccggcgagaagggcgagggcggcagacccggcctgcccggccccagaggcgaccccggccccagaggcgaggccggccccgccggccccaccggccccgccggcgagtgcagcgtgccccccagaagcgccttcagcgccaagagaagcgagagcagagtgcccccccccagcgacgcccccctgcccttcgacagagtgctggtgaacgagcagggccactacgacgccgtgaccggcaagttcacctgccaggtgcccggcgtgtactacttcgccgtgcacgccaccgtgtacagagccagcctgcagttcgacctggtgaagaacggcgagagcatcgccagcttcttccagttcttcggcggctggcccaagcccgccagcctgagcggcggcgccatggtgagactggagcccgaggaccaggtgtgggtgcaggtgggcgtgggcgactacatcggcatctacgccagcatcaagaccgacagcaccttcagcggcttcctggtgtacagcgactggcacagcagccccgtgttcgcctag

SEQ ID NO: 98377 - protein, 737 aa, Artificial Sequence
  derived and/or modified sequence
MALCSALMTIFTIKMGTAKQAIDQGRSPVIIDNTNIQAWEMKPYVEVAIGKGYRVEFHEPETWWKFDPEELEKRNKHGVSRKKIAQMLDRYEYQMSISIVMNSVEPSHKSTQRPPPPQGRQRERVLKKTGHRLSKTKQKRNRKRNKKQNSQNRIMEENSLEFLSDLTPGDQDPSQSEEEDIEKTRRESEYPFIDGLQNEVGDFVTGYKEKRWKNKDPKDSFQNVMSIVELDNTPKNYLSKEGDNLFVSLLLRPNEISVTCPILTQNLSCVTTDDCSGMKVEKHIRNRHTIALDTQDLSAETSCLFMKKREIVDKNLSHEPILCHQHGIRMSDKVLREEQVYTTKINHWAFFTTNLSDEDLQLGSDRQPYFGSWPAGPHKFICEQRPKKDRACKLAGPDSRGQWIQMIFTSVAASEPGNNPEILTDKLLIGNEDFSPPPETMDSFIETNLFRSCLPQPDIPKNALESTKNKKRRKKRIFNLVPNFDLLGQSRIGVKEREKCDLLTKNHGLKITLGEEKDRISERNSEEENKQKLMTFDHHPLWFYLDIIKATPLNIDGQRYSHCLSFNRLRCSASLYKNYIPSFVLHNLSSIWKPSFTNKKLFLTFESQTRVGNKLNDAGFISPEILHSHPDTSCSLGVTSDFHFLNERFDRKLKRWEEPKELPAEDSQDLTSTDYRSLELPLSQGFAFQLVKLFGSPGVPMESLLPDDYVVPLDWKTLKMIYLQWKMSVEKRQKKIG

SEQ ID NO: 98378 - DNA, 957 bp, Artificial Sequence
  derived and/or modified sequence
atgcccgtggacaaggccaaggcccccctgagagagctgctgagagagagagccgagaagatgggccagaacctgaacagaatcccctacaaggacaccttctggaagggcaccaccagaaccagacccagaaacggcaccctgaacaagcacagcggcatcgacttcaagcagctgaacttcctgaccaagctgaacgagaaccacagcggcgagctgtggaagggcagatggcagggcaacgacatcgtggtgaaggtgctgaaggtgagagactggagcaccagaaagagcagagacttcaacgaggagtgccccagactgagaatcttcagccaccccaacgtgctgcccgtgctgggcgcctgccagagcccccccgccccccaccccaccctgatcacccactggatgccctacggcagcctgtacaacgtgctgcacgagggcaccaacttcgtggtggaccagagccaggccgtgaagttcgccctggacatggccagaggcatggccttcctgcacaccctggagcccctgatccccagacacgccctgaacagcagaagcgtgatgatcgacgaggacatgaccgccagaatcagcatggccgacgtgaagttcagcttccagtgccccggcagaatgtacgcccccgcctgggtggcccccgaggccctgcagaagaagcccgaggacaccaacagaagaagcgccgacatgtggagcttcgccgtgctgctgtgggagctggtgaccagagaggtgcccttcgccgacctgagcaacatggagatcggcatgaaggtggccctggagggcctgagacccaccatcccccccggcatcagcccccacgtgtgcaagctgatgaagatctgcatgaacgaggaccccgccaagagacccaagttcgacatgatcgtgcccatcctggagaagatgcaggacaagtag

SEQ ID NO: 98379 - DNA, 957 bp, Artificial Sequence
  derived and/or modified sequence
atgcctgtggataaagccaaagcccccttgcgagaactcctgcgtgaacgtgcagagaagatggggcagaatctcaatagaatcccatataaggacacattctggaaaggaacaacacgaaccagacctcgcaacggaaccctaaataagcactctggtatcgattttaagcagcttaacttcttgactaagctgaacgaaaatcattctggagagctttggaagggccgttggcagggcaatgacatcgtggtgaaggttctgaaagtcagagattggtctacgcgcaaaagcagggatttcaacgaagaatgtcccagactgcgcatattcagccatcccaacgtgcttccagtgcttggcgcatgccagtccccccctgctccccacccaactttgattacccattggatgccatatggctctctgtacaatgtcttacacgagggaaccaacttcgtggttgatcaaagtcaggctgtaaaattcgcccttgatatggcacgaggcatggccttcctgcataccctggaaccgctaattcctcgccacgccctaaattcaaggagcgtgatgatcgacgaggacatgacagcacgaatttccatggctgacgtgaagttcagcttccaatgtcctgggcgcatgtatgcaccagcctgggttgcgcctgaggccctgcagaagaaaccagaagacacaaacaggaggtcagccgacatgtggtcttttgccgtcctactgtgggagcttgtgacaagggaggtgcctttcgccgatcttagcaatatggagattgggatgaaggtggccttggagggcttgcggcccactatcccacctggaatttccccacacgtctgcaaattgatgaagatttgtatgaacgaggatcctgccaagagaccaaagtttgacatgatcgtccctattttggaaaagatgcaggataagtag

SEQ ID NO: 98380 - DNA, 957 bp, Artificial Sequence
  derived and/or modified sequence
atgcctgtggacaaggccaaggcccccctgcgggagctgctgcgggagcgggcagagaagatgggccagaacctgaaccgcatcccctacaaggacaccttctggaagggcaccaccaggacccggcccagaaatggcaccctgaacaagcacagcggcatcgacttcaagcagctgaacttcctgaccaagctgaatgaaaaccacagcggggagctgtggaagggccgctggcagggcaatgacatcgtggtgaaggtgctgaaggtgcgggactggagcaccaggaagagccgggacttcaatgaggagtgcccccggctgcgcatcttcagccaccccaacgtgctgcctgtgctgggcgcctgccagagccccccagccccccaccccaccctcatcacccactggatgccctacggcagcctgtacaacgtgctgcacgagggcaccaactttgtggtggaccagagccaggccgtgaagtttgccctggacatggcccggggcatggccttcctgcacaccctggagcccctcatccccaggcatgccctgaacagccgctctgtgatgattgatgaggacatgacagcccgcatctccatggctgatgtgaagttctccttccagtgccccggccgcatgtatgccccagcctgggtggcccctgaggccctgcagaagaagccagaggacaccaacagaagatctgctgacatgtggagctttgctgtgctgctgtgggagctggtgacccgggaggtgccctttgctgacctgagcaacatggagatcggcatgaaggtggccctggagggcctgcggcccaccatccccccaggcatcagcccccacgtgtgcaagctgatgaagatctgcatgaatgaagatcctgccaagaggcccaagtttgacatgattgtgcccatcctggagaagatgcaggacaagtag

SEQ ID NO: 98381 - DNA, 957 bp, Artificial Sequence
  derived and/or modified sequence
atgcccgtggacaaggccaaggcccccctgcgggagctgctgcgggagagagccgagaagatgggtcagaacctgaacagaattccatataaggacaccttctggaagggaacaactagaacgcgccctcggaatggtactctgaataaacactcaggcatcgattttaagcagttgaatttcctgactaagcttaacgaaaaccacagcggagagttatggaagggaaggtggcagggaaatgacattgtcgttaaagtgctcaaagtccgagactggtcaaccagaaagagtagagacttcaatgaagagtgccctcgcctccggatcttcagccaccccaatgtgctccccgtgttaggggcctgccagtccccgcccgctccccatcctacactgattacccactggatgccttacgggtctctgtataacgtcctgcacgagggaactaatttcgtggtcgaccagtcacaggctgtcaagtttgcattggatatggcgcggggcatggcatttctccacacactggagccactaatccctcgccacgcactcaactcgcggagcgtcatgatagacgaggacatgactgcaagaattagtatggccgacgtcaagttttcctttcagtgcccaggcagaatgtacgcaccggcctgggtggccccggaggccctgcagaaaaagcccgaagatactaatcgccgatcagccgacatgtggagcttcgcagttttactttgggaactcgtgactcgcgaagtgccgttcgcggacctgagtaatatggagattggaatgaaggtcgctctggagggcctgcggccaaccattccgcccggcatttcaccgcacgtatgcaagctcatgaagatatgtatgaatgaagaccctgctaagagacctaaatttgatatgatagtgccaattcttgaaaaaatgcaggacaaatag

SEQ ID NO: 98382 - DNA, 957 bp, Artificial Sequence
  derived and/or modified sequence
atgcccgtggataaggccaaggcacctctgcgcgagctgctaagggagagggctgaaaagatgggtcagaatttaaaccgaatcccttacaaagacacgttctggaaaggcacgaccagaactagaccgagaaacggaacactaaacaaacacagcggcatcgactttaagcagctcaattttttaactaagcttaacgagaaccacagcggagagttatggaaaggacgctggcagggcaacgatatagtagtgaaggtgctcaaggtgagggactggtcaacgcgcaagtcacgagattttaatgaagaatgtccgaggctccggatattttctcatccgaacgtgctcccagttctgggggcatgccagagtcccccagcgcctcatccaactttaatcacccattggatgccatacggctcgctatataatgtactccatgagggcacaaactttgtggtggatcaaagtcaggcagtgaagttcgccctggatatggcacggggtatggcgtttctgcacactctggagccattaatcccacggcacgccttgaattctagatccgttatgattgacgaagatatgaccgccagaatctcaatggccgatgtcaaatttagctttcaatgtccgggacgcatgtatgctccagcctgggtggcccctgaagcattgcaaaaaaagccagaggacacaaatcgaagatccgccgacatgtggtccttcgccgttctgctatgggagctcgtgactcgcgaggtgcccttcgccgatcttagcaatatggagataggcatgaaagtggctttggagggactccgcccaactatccctcccggaattagccctcacgtgtgcaagctgatgaagatctgtatgaacgaagaccccgctaagcggcctaagttcgacatgattgtccctattttggagaagatgcaggacaaatag

SEQ ID NO: 98383 - protein, 606 aa, Artificial Sequence
  derived and/or modified sequence
MCSEARLARRLRDALREEEPWAVEELLRCGADPNLVLEDGAAAVHLAAGARHPRGLRCLGALLRQGGDPNARSVEALTPLHVAAAWGCRRGLELLLSQGADPALRDQDGLRPLDLALQQGHLECARVLQDLDTRTRTRTRIGAETQEPEPAPGTPGLSGPTDETLDSIALQKQPCRGDNRDIGLEADPGPPSLPVPLETVDKHGSSASPPGHWDYSSDASFVTAVEVSGAEDPASDTPPWAGSLPPTRQGLLHVVHANQRVPRSQGTEAELNARLQALTLTPPNAAGFQSSPSSMPLLDRSPAHSPPRTPTPGASDCHCLWEHQTSIDSDMATLWLTEDEASSTGGREPVGPCRHLPVSTVSDLELLKGLRALGPEFSGHSLELAAALRTGCIPDVQADEDALAQQFEQPDPARRWREGVVKSSFTYLLLDPRETQDLPARAFSLTPAERLQTFIRAIFYVGKGTRARPYVHLWEALGHHGRSRKQGSRRSPTRSKGTAMEWWQAGHLLVAGAWGCTCCTVPSLSSWLKASDSFIPRTSRPGAECWGVGHPAWGEMFECSSCPMLTAAPISGFRRGVCVCVCVCVCVCVCVCVCVCREHPGRSPPG

SEQ ID NO: 98384 - DNA, 89 bp, Artificial Sequence
  derived and/or modified sequence
taaactgacacaaacacagacacacagatacacacatacatacagaaatacacattcacacacagacctggtctttggagccagagatg

SEQ ID NO: 98385 - DNA, 95 bp, Artificial Sequence
  derived and/or modified sequence
acatacgcaaatcaataaacataatccatcacataaacagaaccaaagacaaaaatcacatgattatctcaatagatgcagaaaaggccttcgac

SEQ ID NO: 98386 - DNA, 142 bp, Artificial Sequence
  derived and/or modified sequence
aaacacgcaaacacacacacaagcacactaccacacaagcggacacacatgcaaacacgcgaacacacacacatatacacacaagcacattacaaaacacaagcaaacaccagcagacacacaaacacacaaacatacatgg

SEQ ID NO: 98387 - DNA, 1320 bp, Artificial Sequence
  derived and/or modified sequence
atgtggaccccagtaaggaggggagcggcatggcttgggaccctactgggccctggtgaaggtccccctgaacctcgaggcggcgctgcccacgcccataaacctcccgcaggaagccgaaagagtaccgaccaggctgtgagattcggcccctcacaggggatgtgctctgaagcaaggctcgcccggcggctgagggatgcattgagagaagaggaaccgtgggctgtggaagaattgctgagatgcggggctgaccctaacctggtgcttgaagatggggctgctgcggtgcacctggctgcaggggcgagacatcctcgaggcttgcgatgcttaggggcgttgcttcggcagggaggagatcctaatgcacgctctgtcgaggctcttacccctttacacgtggcagctgcatgggggtgcaggcggggccttgagctgctgctgtcacagggcgcagacccggctctcagagatcaggacggcttaaggccactggatctagcccttcagcagggtcacctggagtgcgccagggtgctgcaagatctcgatactcgcactcgcacgcggacaagaataggcgcagaaacccaggagccggaacccgcccccgggactccaggtctgagcggtcctaccgatgaaaccttggatagtatcgcgctgcagaaacagccatgtcgcggtgacaatcgagatatcggcctggaagcagatccaggcccaccatccttgccagtgcctttagagacggtcgacaaacacgggtcttccgcttccccacccgggcattgggactattctagcgacgctagctttgttaccgccgtcgaagtgagtggtgccgaggaccccgccagtgacacgccaccttgggccggaagcctaccccccacacgccaaggcctgctccatgttgtgcacgcaaatcagcgcgtcccaagaagtcaaggtaccgaagccgagctcaatgcacgcctacaggccctcactctcactccccccaacgctgcgggtttccaatcttcccccagtagtatgccactactagacagatctcccgcccatagcccaccaagaacccctactcccggcgcatcagattgtcattgcctttgggaacaccagactagcatagatagcgacatggcgacactgtggttgaccgaagacgaggcctcttccacaggaggacgcgagccagttggaccgtgccggcatctgcccgtctctacagtttcagatctcgaattactcaaaggcctcagggctctaggccggctgagaacgtgtcagccggaaccgtcacattag

SEQ ID NO: 98388 - DNA, 1821 bp, Artificial Sequence
  derived and/or modified sequence
atgtgctctgaagcccgtctagcacgacgactccgagatgctctccgtgaggaagagccatgggccgtggaagagttgcttcggtgtggagcagaccccaatttggtgctagaggatggggcggcagccgtgcacttagcggctggcgcacgtcatccacgcggactgaggtgcttaggggcccttttacgacaaggtggggacccgaacgctcgctctgttgaagcactcacacccctgcatgtggccgctgcttgggggtgccgacgagggctggagctgctcctgagccaaggagccgatccggctctgcgcgatcaagacggattgagacctctggatctggctttgcagcagggacatctcgagtgcgccagagttctgcaagatctggacactcggacacgtacacgtacccgaattggggcggaaacccaggaaccagaacctgccccggggacacccggactctccggacctacggatgaaacgttggactctattgcccttcaaaagcagccttgcaggggtgacaatagagacatcgggctagaagccgatcctgggccaccatccctgccagtcccacttgaaaccgtggataagcacggaagcagcgcgtcccctcccgggcattgggattatagcagcgacgcctcgtttgtgactgcagtcgaggtcagtggtgctgaggatcccgccagcgatacgcctccctgggcggggtctctgccccctacaaggcagggcctgttgcatgtggtccacgcaaatcagcgagtgccacggagccaaggcaccgaggccgagctgaacgcccggctgcaggccttgacgttgaccccgcctaacgctgcgggtttccaatcaagcccgtcttcgatgccattgttggatcgttccccagctcactcaccaccccgtacaccaactcctggggcgtcagactgccattgcctgtgggaacaccaaacttccatcgacagtgacatggcgacactttggctcaccgaagacgaggcatcttcaactggcggtagggagcctgtcgggccgtgccggcatttgcccgtctccacggtatctgacctggagttattaaaggggctccgcgccctaggacccgaattttctggacactcattggaattggcggcagcactacgcaccgggtgtatccctgatgtgcaggcagatgaggatgcactggcccagcagttcgagcaaccagaccccgcccgtagatggagagagggcgtcgtgaagtcaagttttacctacctgctgctcgatcccagggaaacacaagacctgccagcaagggcctttagccttacgcctgccgaacgactccaaacttttatccgcgccatcttctatgtgggaaaaggaactagagcccgcccatacgtacatctatgggaggccctgggacaccatggcagaagccgcaagcagggcagccgccgaagccccactagaagcaagggcacagccatggaatggtggcaggccggacacctgttggttgcgggcgcatggggttgcacttgctgtactgtgcctagtctgagttcctggctcaaggcttctgactcatttattcctcgcacttccagaccaggggctgaatgttggggcgtgggacatccggcctggggggagatgtttgaatgttccagttgccctatgttgaccgccgcccccatttctgggttccgccgaggagtgtgtgtgtgtgtttgtgtgtgcgtctgcgtctgtgtttgcgtgtgtgtgtgcgtttgccgcgaacacccgggacggtcccctccggggtag

SEQ ID NO: 98389 - DNA, 1320 bp, Artificial Sequence
  derived and/or modified sequence
atgtggacccctgtgagaagaggagctgcctggctgggcaccctgctgggccctggagagggccccccagagccccggggcggggccgcccacgcccacaagcccccagctggcagcaggaagagcacagaccaggccgtgcgcttcggccccagccagggcatgtgcagcgaggcccggctggcccggcggctgagagatgccctgcgggaggaggagccctgggccgtggaggagctgctgcgctgtggggctgaccccaacctggtgctggaggatggagctgctgctgtgcacctggccgccggggcccggcacccccggggcctgcgctgcctgggcgccctgctgcggcagggcggggaccccaatgcccggtctgtggaggccctgacccccctgcacgtggccgccgcctggggctgcagaagaggcctggagctgctgctgagccagggcgctgaccctgccctgcgggaccaggacggcctgcggcccctggacctggccctgcagcagggccacctggagtgtgcccgggtgctgcaggacctggacaccaggaccaggaccaggaccagaattggagctgagacccaggagcctgagcccgcccctggcaccccaggcctgagcggccccacagatgagaccctggacagcatcgccctgcagaagcagccctgccgcggggacaacagagacatcggcctggaggccgaccccggcccccccagcctgcctgtgcccctggagaccgtggacaagcacggcagcagcgccagccccccaggccactgggactacagcagtgatgccagctttgtgacagctgtggaggtgtctggagcagaagatcctgccagtgacaccccaccctgggccggcagcctgccccccacccggcagggcctgctgcacgtggtgcacgccaaccagagggtgcccaggagccagggcacagaagctgagctgaatgcccggctgcaggccctgaccctgaccccaccaaatgctgctggcttccagagcagccccagctccatgcccctgctggacaggagccctgcccacagcccccccaggacccccacccctggggccagtgactgccactgcctgtgggagcaccagaccagcattgacagcgacatggccaccctgtggctgacagaagatgaggccagcagcactggaggccgggagcctgtgggcccctgccgccacctgcctgtgtccacagtgtctgacctggagctgctgaagggcctgcgggccctgggccgcctgcggacctgccagcctgagcccagccactag

SEQ ID NO: 98390 - DNA, 1821 bp, Artificial Sequence
  derived and/or modified sequence
atgtgcagcgaggcccggctggcccggcggctgagagatgccctgcgggaggaggagccctgggccgtggaggagctgctgcgctgtggggctgaccccaacctggtgctggaggatggagctgctgctgtgcacctggccgccggggcccggcacccccggggcctgcgctgcctgggcgccctgctgcggcagggcggggaccccaatgcccggtctgtggaggccctgacccccctgcacgtggccgccgcctggggctgcagaagaggcctggagctgctgctgagccagggcgctgaccctgccctgcgggaccaggacggcctgcggcccctggacctggccctgcagcagggccacctggagtgtgcccgggtgctgcaggacctggacaccaggaccaggaccaggaccagaattggagctgagacccaggagcctgagcccgcccctggcaccccaggcctgagcggccccacagatgagaccctggacagcatcgccctgcagaagcagccctgccgcggggacaacagagacatcggcctggaggccgaccccggcccccccagcctgcctgtgcccctggagaccgtggacaagcacggcagcagcgccagccccccaggccactgggactacagcagtgatgccagctttgtgacagctgtggaggtgtctggagcagaagatcctgccagtgacaccccaccctgggccggcagcctgccccccacccggcagggcctgctgcacgtggtgcacgccaaccagagggtgcccaggagccagggcacagaagctgagctgaatgcccggctgcaggccctgaccctgaccccaccaaatgctgctggcttccagagcagccccagctccatgcccctgctggacaggagccctgcccacagcccccccaggacccccacccctggggccagtgactgccactgcctgtgggagcaccagaccagcattgacagcgacatggccaccctgtggctgacagaagatgaggccagcagcactggaggccgggagcctgtgggcccctgccgccacctgcctgtgtccacagtgtctgacctggagctgctgaagggcctgcgggccctgggccctgagttcagcggccacagcctggagctggccgccgccctgaggacaggctgcatcccagatgtgcaggctgatgaagatgccctggcccagcagtttgagcagcctgaccctgcccggcgctggagggagggcgtggtgaagagcagcttcacctacctgctgctggacccccgggagacccaggacctgcctgcccgggccttcagcctgaccccagctgagcggctgcagaccttcatccgggccatcttctacgtgggcaagggcacccgggcccggccctacgtgcacctgtgggaggccctgggccaccacggccgcagcaggaagcagggcagcagaagaagccccaccaggagcaagggcacagccatggagtggtggcaggccggccacctgctggtggccggggcctggggctgcacctgctgcaccgtgcccagcctgagctcctggctgaaggccagtgacagcttcatccccaggaccagcaggcctggagctgagtgctggggcgtgggccacccagcctggggcgagatgtttgagtgcagcagctgccccatgctgacagctgcccccatcagcggcttccggcggggcgtgtgtgtgtgtgtgtgtgtgtgtgtgtgtgtgtgtgtgtgtgtgtgtgtgtgtgtgtgccgggagcaccctggccgcagccccccaggatag

SEQ ID NO: 98391 - DNA, 1320 bp, Artificial Sequence
  derived and/or modified sequence
atgtggacccccgtgcggcggggcgccgcctggctgggcaccctgttgggtcctggtgaagggcccccggagcccagagggggtgccgcccatgcccataaaccacccgccggttctagaaaatccaccgatcaagctgtgaggtttggcccttctcagggcatgtgctccgaagcccggctggcccggagacttagggatgcattgagagaggaagaaccttgggctgtggaggagctgcttcggtgcggcgcagacccaaatctggtactggaagatggggccgctgccgttcatctagccgctggggccaggcacccccgcggcctgcgatgcctaggagcactcctgcggcaggggggggacccaaacgcgaggagtgttgaagccttgactccactgcatgtggccgccgcttggggatgcaggcgggggcttgaactcctcctgagccaaggcgcggatcccgctctccgtgatcaggacgggctaaggccactggatctggccctgcaacaaggacatctggagtgtgcacgcgtgctgcaggatttggacacacgtactcgaacgcggacacgaatcggagcagagacccaagagcccgagcccgctccaggcactcctggactgagtggccctactgatgagaccctggacagcattgccctgcaaaaacaaccttgccggggggataaccgcgacattggcctcgaggctgatccagggcccccaagccttcctgtgcccctggaaaccgtcgacaagcacggatccagcgctagccctcctggccattgggattattctagtgacgcaagcttcgtgaccgccgtggaagtgagtggcgcagaggatcccgcctccgatacccccccttgggctggaagtctcccacccacccgccagggcctgttgcatgtggtgcatgccaatcagcgggtccctcgatctcaagggactgaagccgagttaaatgcaagactgcaggcccttactctgacacctcccaatgcagccggctttcagtcttctccttctagtatgcctcttttagacagatccccggctcatagcccacccagaacacccacccccggagcgtctgattgtcactgtctttgggagcaccagacttcaatagactcagacatggccactctgtggctaaccgaagatgaggcatctagcaccggaggacgagagcccgtaggcccatgccggcacctgcctgtgtcgactgtgtccgacctcgagctgctgaagggcctgcgtgctctcggacggcttcggacatgtcagcccgagccatcccattag

SEQ ID NO: 98392 - DNA, 1821 bp, Artificial Sequence
  derived and/or modified sequence
atgtgcagcgaggcccggctggcccggcggctgcgggacgccctgcgggaggaggaaccctgggcagtggaggaactcctgcgctgtggggccgaccctaacctcgtgctagaagacggagctgccgcagttcacctagccgcaggggctaggcatcccaggggactaagatgtcttggagctttactgcgccaaggcggtgatcctaacgcgaggtctgtggaggcactcactccgctgcacgttgctgcggcctggggctgtaggagaggccttgagctgttgctctcccagggagccgatcccgcactcagagaccaggacggcctaagaccattggatctggccctgcagcaggggcatctggaatgcgctcgtgtgctgcaagacctggatacaaggacaagaactaggactaggatcggagcagaaacccaggagcccgagcccgctcccggaacgccggggctaagtggacctaccgacgagaccttagattcaatcgccctgcagaagcagccttgtcgaggagataaccgagacatagggctggaggctgacccaggccccccttcattaccagttccactggaaacagtggacaaacatgggtcatccgcatcccctcctggacactgggattattcctctgatgctagctttgtgacagcagtggaagtgtcaggagcagaggaccctgcttcagacactcccccatgggccggtagcctgccccctactcggcaaggactgctgcacgtggtgcacgcaaatcagagggtcccccggtcccagggaacggaagctgaacttaatgccagacttcaggctctcacactaacaccaccaaacgcagcaggttttcagagttcaccgagcagcatgcccctgttagatcggtcgccggcccacagcccgcctagaacgcctacacccggagcatccgattgtcactgcctgtgggagcatcaaacctcaatagactccgacatggccaccctgtggctaacagaggatgaggcctcttctacaggagggcgcgaaccagtggggccatgccggcatcttcccgtgagcacagtctccgatctggagttgctgaaaggactccgtgccctcgggccagagttctcgggtcacagcctggaactggccgccgcactgcgcaccgggtgcatccccgatgtgcaagcagacgaagacgcacttgcccaacagtttgaacagccggatcccgctcggaggtggcgtgaaggcgttgtgaaaagcagttttacatacctccttctggatccaagggagacgcaggatctacccgcgagagcgttctccctaactccagccgagcgcctccagacgtttattcgtgctattttctatgtggggaaaggtacaagagcccgcccttacgtgcatctctgggaagcgctgggccaccatggtcgaagccgcaaacagggatcacgtagatctcctacacgcagcaaggggacagccatggagtggtggcaggctggccacctgctagtggccggagcttgggggtgtacctgttgcaccgtgcccagcctctccagctggctcaaggcctccgacagctttattccccggacttcgcgccccggtgcagagtgttggggggtcggccacccagcctggggcgagatgtttgagtgcagctcatgccccatgctcactgctgctccaatcagcggctttagacgcggcgtttgcgtctgcgtgtgtgtctgtgtatgcgtgtgtgtgtgcgtgtgtgtctgcgtgtgccgcgagcacccagggagaagccctcccggctag

SEQ ID NO: 98393 - DNA, 1821 bp, Artificial Sequence
  derived and/or modified sequence
agtggcacacccggtggcatcctcccacccgggctcttatcggcggtcccagaccctgcttgagcgcctccgggtgtcaagggcccctgaggacactaaagctctcgaaccccgatgtggacccccgtgcggcgcggggcagcctggctgggaaccctgctcggccctggagaggggccccccgagccgaggggaggagcggcgcatgcccacaagccccccgcgggaagtaggaaatcgaccgaccaggcggtgcgcttcggacccagccagggcatgtgctcggaggcccgcctggctcgcaggttgcgggatgcgctgcgggaggaggagccgtgggcagtagaggagctgctgcgctgcggcgcggaccctaatttggtgctagaggacggcgcagcggctgtgcacttggcggccggagcccggcacccgcgcggcctgcgttgcctcggggccctactgcgccaaggcggggaccccaacgctcgatctgtcgaggcactgacgccgctgcatgtggccgccgcgtggggctgccgccgcggcctggagctgctgctgagccaaggagcggacccggcgctgcgcgaccaggacggactccggccgctggacctggccctgcagcagggacacctggagtgcgcgcgagtcctgcaggatctcgacacgcggaccaggacccggacccggatcggggcagagactcaggagcccgagcctgcacctggcaccccaggcctctctggacctaccgatgagacgctggactccatagcactccaaaagcagccatgcagaggtgacaacagggacattggcttggaggctgacccaggaccccccagcctccctgttccccttgaaactgtggacaaacatgggagctcggcgtcccctccagggcactgggattacagctcagacgcctctttcgtcacagcggttgaggtctctggagctgaggacccagcctcggacactcccccctgggctgggtcattgccaccgaccaggcagggacttctgcatgttgtccatgccaaccagagggtacctaggtctcagggcacggaggcagaactgaatgcccgtctgcaggccctgactctgaccccaccaaatgctgctggcttccagtcctccccttcctccatgcctctcctggacaggagtccagctcatagccccccacggacaccaacccctggagcttctgactgccactgcctgtgggagcaccagacatccattgatagtgacatggccacgctctggctgacagaggatgaggcaagctctacaggtggcagggaacctgtcggcccttgccggcacctgccagtctccactgtgtctgacttggagttgctgaagggactccgagcacttgggagactcaggacctgccagcccgagccttctcactgaccccagctgagcgccttcagactttcatccgtgccatcttctacgtgggcaaagggacgagggcccggccatatgtccacctctgggaggcccttggtcaccatgggcggtcaagaaaacagccccaccaggcctgccccaaggtgcgtcagatcttggacatctgggccagtggttgcggtgttgtgtccctacattgcttccagcacgtggtcgctgtggaggcttatacacgggaggcgtgtattgtggaagccctagggatccagacgctcaccaaccagaagcaagggcactgctatggagtggtggcaggctggccacctgctcgtcgccggcgcttgggggtgcacctgctgcaccgtgccctccttgtcttcctggctg

SEQ ID NO: 98394 - DNA, 1999 bp, Artificial Sequence
  derived and/or modified sequence
gcatgtgctcggaggcccgcctggctcgcaggttgcgggatgcgctgcgggaggaggagccgtgggcagtagaggagctgctgcgctgcggcgcggaccctaatttggtgctagaggacggcgcagcggctgtgcacttggcggccggagcccggcacccgcgcggcctgcgttgcctcggggccctactgcgccaaggcggggaccccaacgctcgatctgtcgaggcactgacgccgctgcatgtggccgccgcgtggggctgccgccgcggcctggagctgctgctgagccaaggagcggacccggcgctgcgcgaccaggacggactccggccgctggacctggccctgcagcagggacacctggagtgcgcgcgagtcctgcaggatctcgacacgcggaccaggacccggacccggatcggggcagagactcaggagcccgagcctgcacctggcaccccaggcctctctggacctaccgatgagacgctggactccatagcactccaaaagcagccatgcagaggtgacaacagggacattggcttggaggctgacccaggaccccccagcctccctgttccccttgaaactgtggacaaacatgggagctcggcgtcccctccagggcactgggattacagctcagacgcctctttcgtcacagcggttgaggtctctggagctgaggacccagcctcggacactcccccctgggctgggtcattgccaccgaccaggcagggacttctgcatgttgtccatgccaaccagagggtacctaggtctcagggcacggaggcagaactgaatgcccgtctgcaggccctgactctgaccccaccaaatgctgctggcttccagtcctccccttcctccatgcctctcctggacaggagtccagctcatagccccccacggacaccaacccctggagcttctgactgccactgcctgtgggagcaccagacatccattgatagtgacatggccacgctctggctgacagaggatgaggcaagctctacaggtggcagggaacctgtcggcccttgccggcacctgccagtctccactgtgtctgacttggagttgctgaagggactccgagcacttggcccagagttttcagggcacagcctagaactggctgcagccctgcggacgggctgtattccagatgtccaggcagatgaagacgcgctggcccagcagtttgagcagccagatcctgccaggaggtggcgggagggggtcgtgaagtctagcttcacctatctgctgctggaccccagggagactcaggacctgccagcccgagccttctcactgaccccagctgagcgccttcagactttcatccgtgccatcttctacgtgggcaaagggacgagggcccggccatatgtccacctctgggaggcccttggtcaccatgggcggtcaagaaaacagggatccagacgctcaccaaccagaagcaagggcactgctatggagtggtggcaggctggccacctgctcgtcgccggcgcttgggggtgcacctgctgcaccgtgccctccttgtcttcctggctgaaggcgagcgacagcttcatccccaggacatccaggcccggggctgagtgctggggagttggccatccagcctggggagaaatgtttgaatgttccagctgccccatgctgacagcagcccccatctctggtttcagaaggggtgtgtgtgtgtgtgtgtgtgtgtgtgtgtgtgtgtgtgtgtgtgtgtgtgtgtgtgtgtgtagggagcacccaggcagatctcccccaggctgagagaggactttgttacagatggtactgctggagaggtagtaagtagtgagctccccatcgtgggaggaggacaagaagggaagcagaaggtgctttggaacagtccggtgcttctgtaagaggcgtttgaacctgggcaactccacctggaataggagctgggtaaaatgaggctg

SEQ ID NO: 98395 - DNA, 1320 bp, Artificial Sequence
  derived and/or modified sequence
atgtggacccccgtacgtcgcggagccgcatggctgggaaccctgctcgggccaggcgagggtcctccagagccaagaggcggtgcggctcacgcccacaaaccgccagccggatctcgcaaaagcaccgatcaagctgttagatttggtccctcccagggtatgtgctcggaggcaaggcttgcccgacgcctgcgggacgctctccgggaagaggagccctgggcagtggaggaactgctgagatgtggggcagatcctaacctcgtgctcgaggacggcgcagcagccgtgcatcttgctgcaggggcacggcaccccagaggtctacggtgcctcggcgcactactccggcagggcggtgatcccaacgcgcgttctgtggaggctctcaccccccttcatgtggccgcagcatgggggtgtcgacgcggtctcgaactgctgcttagccagggcgctgatcccgcactgagggatcaggacggtctgcgaccactggaccttgcgttgcaacagggccatctcgaatgcgccagagtgctgcaggacctggacaccaggacgcggacgcgaaccagaattggagctgagactcaggagccagaaccagctccagggacacccggactgtccggtcctactgacgagactctagacagtattgcattgcaaaagcaaccctgccgcggtgataatcgggatatcggacttgaggccgatcccggtcctccaagcctgcccgtgcctctggaaacagtggataaacacggctcatcagcttcgcctccaggtcactgggattattcatcagatgcttcctttgtgacagccgtggaagtgagcggtgctgaagaccctgcctccgacactccaccttgggcagggtcattacctccaacacgccaggggctccttcacgtagtgcatgccaatcagcgagtcccccgaagtcaggggactgaagctgaattaaacgcaagacttcaagccctgacccttacaccaccaaatgctgcaggatttcaatcgtccccttcatcaatgccgctcctagacaggagcccggctcactctcctcccaggacacctactccaggcgcttccgactgtcactgcctgtgggagcaccagaccagcattgattccgacatggccacactctggttgaccgaagatgaagccagtagcaccgggggacgagaacccgttggtccttgtaggcacttgcccgttagcactgtgtctgacctggaattgctcaaaggtctcagggctctcggcagactccggacctgccagcccgaacccagccactag

SEQ ID NO: 98396 - DNA, 1821 bp, Artificial Sequence
  derived and/or modified sequence
atgtgctccgaggccaggctggcccgacgcttgcgcgacgcattgagagaggaggagccctgggccgtcgaagaactgttaagatgcggagctgaccctaaccttgttctggaggatggcgcagccgctgttcacttagccgcaggagcaagacacccgagaggcctgagatgtctgggagccctgcttaggcagggcggagatcccaatgcaaggagtgttgaggcactcacgcccctacatgtggcggctgcatgggggtgccgcagagggctggagctgcttctaagccagggcgctgacccagctttgcgggaccaagacgggctccggccactcgacttggccctccaacagggacacctggaatgtgccagggtgctgcaggaccttgacacaagaacaaggaccagaactcggattggagctgagacacaggagcccgaacccgctcctggaacaccgggtctctcaggccctaccgatgaaactctggactccattgctctccagaaacagccttgccggggagataaccgggacatcgggctggaggccgaccccggtccaccatcattgcccgtcccgttggagacagtggataagcacgggtcttctgctagtccacccggacactgggactactccagtgacgccagtttcgtcaccgccgtggaggtatcaggagccgaggacccggcatctgacacaccaccatgggcaggaagcttgccccctacccggcagggtttgctccatgtggtgcacgccaatcaaagggtaccccgttcccaggggactgaggccgaactaaacgcccgattgcaggcgctgactctgacccctcccaatgcagccggattccagagttccccttccagtatgcccctgctagatcgatctcccgcacactcgcctccacgcaccccgaccccaggagccagcgattgccactgcctctgggagcaccagacatcaattgattccgacatggccaccttatggcttaccgaggatgaagcctcctcaacagggggtcgcgagccggtcgggccttgcaggcacctgccagtgtccaccgtctcggacctggagctgctcaagggcctcagagccctaggacccgaatttagtggccattccctggagttggccgcagcgcttagaaccggctgtatcccagatgtgcaggccgacgaagacgccctcgcccagcagtttgaacaaccagaccccgctcggcgatggcgggaaggagtggtcaaatcttctttcacctatcttctgctggatcctcgagagacacaagatctgccagcacgcgcattttccctcactccagctgagagactgcagacatttataagggccatattttacgtggggaagggcactcgggcacggccatacgtacacctgtgggaagccctaggccaccacggccgaagtcggaaacaaggatcccggaggtccccaacccgaagcaagggtacggcaatggaatggtggcaagctggacatctacttgtggcaggagcctggggctgtacctgttgtacagttccatcactttcatcctggttgaaggcctccgatagcttcattcctcgcaccagcaggccaggggcagagtgttggggggtcggacaccctgcctggggagagatgttcgagtgcagttcatgcccgatgctcactgctgcaccaatctcaggctttcgtaggggggtgtgcgtgtgcgtgtgtgtgtgcgtatgtgtctgcgtgtgcgtctgcgtgtgtgtgtgcagagagcaccccggtcggtcccccccaggctag

SEQ ID NO: 98397 - DNA, 1320 bp, Artificial Sequence
  derived and/or modified sequence
atgtggacccccgtgagaagaggcgccgcctggctgggcaccctgctgggccccggcgagggcccccccgagcccagaggcggcgccgcccacgcccacaagccccccgccggcagcagaaagagcaccgaccaggccgtgagattcggccccagccagggcatgtgcagcgaggccagactggccagaagactgagagacgccctgagagaggaggagccctgggccgtggaggagctgctgagatgcggcgccgaccccaacctggtgctggaggacggcgccgccgccgtgcacctggccgccggcgccagacaccccagaggcctgagatgcctgggcgccctgctgagacagggcggcgaccccaacgccagaagcgtggaggccctgacccccctgcacgtggccgccgcctggggctgcagaagaggcctggagctgctgctgagccagggcgccgaccccgccctgagagaccaggacggcctgagacccctggacctggccctgcagcagggccacctggagtgcgccagagtgctgcaggacctggacaccagaaccagaaccagaaccagaatcggcgccgagacccaggagcccgagcccgcccccggcacccccggcctgagcggccccaccgacgagaccctggacagcatcgccctgcagaagcagccctgcagaggcgacaacagagacatcggcctggaggccgaccccggcccccccagcctgcccgtgcccctggagaccgtggacaagcacggcagcagcgccagcccccccggccactgggactacagcagcgacgccagcttcgtgaccgccgtggaggtgagcggcgccgaggaccccgccagcgacacccccccctgggccggcagcctgccccccaccagacagggcctgctgcacgtggtgcacgccaaccagagagtgcccagaagccagggcaccgaggccgagctgaacgccagactgcaggccctgaccctgaccccccccaacgccgccggcttccagagcagccccagcagcatgcccctgctggacagaagccccgcccacagcccccccagaacccccacccccggcgccagcgactgccactgcctgtgggagcaccagaccagcatcgacagcgacatggccaccctgtggctgaccgaggacgaggccagcagcaccggcggcagagagcccgtgggcccctgcagacacctgcccgtgagcaccgtgagcgacctggagctgctgaagggcctgagagccctgggcagactgagaacctgccagcccgagcccagccactag

SEQ ID NO: 98398 - DNA, 1821 bp, Artificial Sequence
  derived and/or modified sequence
atgtgcagcgaggccagactggccagaagactgagagacgccctgagagaggaggagccctgggccgtggaggagctgctgagatgcggcgccgaccccaacctggtgctggaggacggcgccgccgccgtgcacctggccgccggcgccagacaccccagaggcctgagatgcctgggcgccctgctgagacagggcggcgaccccaacgccagaagcgtggaggccctgacccccctgcacgtggccgccgcctggggctgcagaagaggcctggagctgctgctgagccagggcgccgaccccgccctgagagaccaggacggcctgagacccctggacctggccctgcagcagggccacctggagtgcgccagagtgctgcaggacctggacaccagaaccagaaccagaaccagaatcggcgccgagacccaggagcccgagcccgcccccggcacccccggcctgagcggccccaccgacgagaccctggacagcatcgccctgcagaagcagccctgcagaggcgacaacagagacatcggcctggaggccgaccccggcccccccagcctgcccgtgcccctggagaccgtggacaagcacggcagcagcgccagcccccccggccactgggactacagcagcgacgccagcttcgtgaccgccgtggaggtgagcggcgccgaggaccccgccagcgacacccccccctgggccggcagcctgccccccaccagacagggcctgctgcacgtggtgcacgccaaccagagagtgcccagaagccagggcaccgaggccgagctgaacgccagactgcaggccctgaccctgaccccccccaacgccgccggcttccagagcagccccagcagcatgcccctgctggacagaagccccgcccacagcccccccagaacccccacccccggcgccagcgactgccactgcctgtgggagcaccagaccagcatcgacagcgacatggccaccctgtggctgaccgaggacgaggccagcagcaccggcggcagagagcccgtgggcccctgcagacacctgcccgtgagcaccgtgagcgacctggagctgctgaagggcctgagagccctgggccccgagttcagcggccacagcctggagctggccgccgccctgagaaccggctgcatccccgacgtgcaggccgacgaggacgccctggcccagcagttcgagcagcccgaccccgccagaagatggagagagggcgtggtgaagagcagcttcacctacctgctgctggaccccagagagacccaggacctgcccgccagagccttcagcctgacccccgccgagagactgcagaccttcatcagagccatcttctacgtgggcaagggcaccagagccagaccctacgtgcacctgtgggaggccctgggccaccacggcagaagcagaaagcagggcagcagaagaagccccaccagaagcaagggcaccgccatggagtggtggcaggccggccacctgctggtggccggcgcctggggctgcacctgctgcaccgtgcccagcctgagcagctggctgaaggccagcgacagcttcatccccagaaccagcagacccggcgccgagtgctggggcgtgggccaccccgcctggggcgagatgttcgagtgcagcagctgccccatgctgaccgccgcccccatcagcggcttcagaagaggcgtgtgcgtgtgcgtgtgcgtgtgcgtgtgcgtgtgcgtgtgcgtgtgcgtgtgcgtgtgcagagagcaccccggcagaagcccccccggctag

SEQ ID NO: 98399 - protein, 840 aa, Artificial Sequence
  derived and/or modified sequence
MAQQGQQGQMASGDSNLNFRMVAEIQNVEGQNLQEQVCPEPIFRFFRENKVEIASAITRPFPFLMGLRDRSFISEQMYEHFQEAFRNLVPVTRVMYCVLSELEKTFGWSHLEALFSRINLMAYPDLNEIYRSFQNVCYEHSPLQMNNVNDLEDRPRLLPYGKQENSNACHEMDDIAVPQEALSSSPRCEPGFSSESCEQLALPKAGGGDAEDAPSLLPGGGVSCKLAIQIDEGESEEMPKLLPYDTEVLESNGMIDAARTYSTAPGEKQGEEEGRNSPRKRNQDKEKYQESPEGRDKETFDLKTPQVTNEGEPEKGLCLLPGEGEEGSDDCSEMCDGEEPQEASSSLARCGSVSCLSAETFDLKTPQVTNEGEPEKELSLLPGEGEVSSELENHPMNEEGESEELASSLLYDNVPGAEQSAYENEKCSCVMCFSEEVPGSPEARTESDQACGTMDTVDIANNSTLGKPKRKRRKKRGHGWSRMRMRRQENSQQNDNSKADGQVVSSEKKANVNLKDLSKIRGRKRGKPGTRFTQSDRAAQKRVRSRASRKHKDETVDFKAPLLPVTCGGVKGILHKKKLQQGILVKCIQTEDGKWFTPTEFEIKGGHARSKNWRLSVRCGGWPLRWLMENGFLPDPPRIRYRKKKRILKSQNNSSVDPCMRNLDECEVCRDGGELFCCDTCSRVFHEDCHIPPVEAERTPWNCIFCRMKESPGSQQCCQESEVLERQMCPEEQLKCEFLLLKVYCCSESSFFAKIPYYYYIREACQGLKEPMWLDKIKKRLNEHGYPQVEGFVQDMRLIFQNHRASYKYKDFGQMGFRLEAEFEKNFKEVFAIQETNGNN

SEQ ID NO: 98400 - DNA, 2523 bp, Artificial Sequence
  derived and/or modified sequence
atggcccagcaaggacagcagggtcagatggcctcaggagactcaaacttgaacttcaggatggtggccgaaatacagaacgtcgagggtcagaacctccaagagcaagtgtgcccagagcccatattcagattctttcgggagaacaaggtcgaaatcgcatcagccatcacccggccatttccattcttaatgggcttgcgagacaggagcttcataagcgagcagatgtacgagcactttcaggaggcatttcgaaaccttgtcccagtcacccgggtgatgtactgtgtgctgtcagaactcgagaaaacattcgggtggtcacacctcgaagccctcttttctagaataaacctgatggcttacccagatctgaatgagatttataggagctttcagaacgtttgctatgagcactctccgctgcagatgaataatgtaaacgacttggaggatcgtcctagattgctgccgtatgggaagcaggagaatagtaacgcttgccacgaaatggatgatatcgctgtcccgcaggaggccctgagcagctctccccggtgtgaacccggctttagcagcgagtcctgtgaacagttagcactccctaaggcaggggggggtgatgccgaagacgctccaagccttctgcccggcggcggggtgtcatgtaagctggcaattcagattgacgaaggagaatcagaagaaatgcctaaactcctcccctacgacactgaggtcttagagtcaaacgggatgatcgacgcagcccgtacctacagtactgctccaggtgagaagcagggcgaggaggaaggcagaaactctccccgtaaacgtaaccaagataaagagaagtaccaggagtctccagaaggcagagacaaagagacatttgacctcaaaacccctcaggttacaaatgaaggagaacccgaaaagggactttgtctcctcccgggtgagggcgaggaggggagcgacgattgctcagagatgtgcgacggcgaagagccacaagaagcaagctcctccctcgcccggtgtggctctgttagttgcctttcagccgagacctttgacctgaagactcctcaggttacaaatgaaggagagcctgaaaaagagttaagcttactgcccggagagggagaagtttcttctgagctggaaaaccatcctatgaatgaggagggcgaaagcgaggagttggcgtctagcctgctgtacgacaatgtgcccggggccgagcagtccgcctacgagaacgaaaaatgttcctgcgttatgtgtttttccgaggaggtgccaggttctccagaggcgcgaactgagtcggatcaggcttgtggcaccatggacacagtcgacattgccaacaatagtacactcggaaagcctaaaaggaagcggagaaaaaagaggggccatgggtggtccaggatgcgcatgagacggcaggaaaactctcagcaaaacgacaattccaaggcagacggacaggttgtgagttccgagaagaaagctaatgtgaatctgaaggatctttcaaagatccgcggtaggaagcgcgggaagcccggaactcggttcacgcagtctgatagggcggcacagaaacgcgtgcgatctcgcgcgagtcgcaaacacaaagacgaaaccgtggattttaaggccccactgctgcctgtcacttgtggcggcgttaaaggcattctgcacaaaaagaagttgcagcaaggcatactggttaagtgtatccagacggaggatgggaagtggttcacccctaccgaatttgagattaagggggggcacgctagatcgaaaaactggagattatcggtccggtgtggtggctggccattgcggtggctgatggaaaatggatttctgcctgatccacctcggatccggtaccgaaaaaaaaagagaatcctcaagtctcagaataattccagtgtcgatccatgcatgaggaacctcgacgagtgcgaagtttgccgggacggcggagagctgttttgctgcgacacctgttctcgggtctttcacgaggattgccacattccacccgtcgaggctgaacggacaccatggaactgcatcttttgcaggatgaaagaaagccctggatcccagcaatgctgtcaggaaagcgaggtgcttgaacgccagatgtgtcctgaagaacagctaaagtgcgagttcttgctgcttaaagtgtactgttgcagcgagtcaagtttctttgcgaaaattccttactactattacatccgcgaagcctgtcagggcctgaaggagcccatgtggctggacaaaattaaaaaaagactcaatgaacacggctacccacaggtcgagggatttgtgcaggatatgcgcctaatctttcagaaccacagggcctcttacaaatacaaggactttggccagatgggattccggttggaagccgagttcgaaaagaatttcaaggaagttttcgctatccaggagacaaatggaaataattag

SEQ ID NO: 98401 - DNA, 2523 bp, Artificial Sequence
  derived and/or modified sequence
atggcccagcagggccagcagggccagatggccagcggggacagcaacctgaacttcaggatggtggccgagatccagaatgtggagggccagaacctgcaggagcaggtgtgcccagagcccatcttccgcttcttccgggagaacaaggtggagatcgccagcgccatcacccggcccttccccttcctgatgggcctgcgggaccgctccttcatcagcgagcagatgtatgagcacttccaggaggccttcaggaacctggtgcctgtgaccagggtgatgtactgtgtgctgtctgagctggagaagaccttcggctggagccacctggaggccctcttcagccgcatcaacctgatggcctacccagacctgaatgagatctaccgctccttccagaatgtgtgctatgagcacagccccctgcagatgaacaacgtgaatgacctggaggaccggccccggctgctgccctacggcaagcaggagaacagcaatgcctgccacgagatggatgacattgctgtgccccaggaggccctgagcagcagcccccgctgtgagcccggcttcagcagcgagagctgtgagcagctggccctgcccaaggccggcggcggagatgctgaagatgcccccagcctgctgcccggcggcggcgtgtcctgcaagctggccatccagattgatgaaggagagagcgaggagatgcccaagctgctgccctatgacacagaggtgctggagagcaatggcatgattgatgctgcccggacctacagcacagcccctggagagaagcagggcgaggaggagggcaggaacagccccaggaagaggaaccaggacaaggagaagtaccaggagagccctgagggccgggacaaggagacctttgacctgaagaccccccaggtgaccaatgaaggagagcctgagaagggcctgtgcctgctgcctggagagggggaggagggcagtgatgactgcagcgagatgtgtgatggagaggagccccaggaggccagcagcagcctggcccgctgtggctctgtgtcctgcctgtctgctgagacctttgacctgaagaccccccaggtgaccaatgaaggagagcctgagaaggagctgagcctgctgcccggggagggggaggtgtcctctgagctggagaaccaccccatgaatgaggagggggagagcgaggagctggccagcagcctgctgtatgacaacgtgcctggagctgagcagagcgcctatgaaaatgagaagtgcagctgtgtgatgtgcttcagcgaggaggtgcccggcagccctgaggccaggacagaaagtgaccaggcctgtggcaccatggacacagtggacatcgccaacaacagcaccctgggcaagcccaagaggaagaggaggaagaagaggggccacggctggagcaggatgaggatgaggcggcaggagaacagccagcagaatgacaacagcaaggcagatggccaggtggtgagcagcgagaagaaggccaacgtgaacctgaaggacctgagcaagatccggggcaggaagaggggcaagccaggcacccgcttcacccagagcgaccgggccgcccagaagagggtgcgcagccgggccagcaggaagcacaaggatgaaacagtggacttcaaggcccccctgctgcctgtgacctgtggcggcgtgaagggcatcctgcacaagaagaagctgcagcagggcatcctggtgaagtgcatccagacagaagatggcaagtggttcacccccacagaatttgagatcaagggcggccacgcccggagcaagaactggaggctgtctgtgcgctgtggcggctggcccctgcgctggctgatggagaatggcttcctgcctgaccccccacgcatccgctacaggaagaagaagaggatcctgaagagccagaacaacagctctgtggacccctgcatgaggaacctggatgaatgtgaggtgtgcagagatggaggagagctgttctgctgtgacacctgcagcagggtcttccacgaggactgccacatcccccctgtggaggccgagaggaccccctggaactgcatcttctgcaggatgaaggagagccctggcagccagcagtgctgccaggagagcgaggtgctggagcggcagatgtgcccagaggagcagctgaagtgtgagttcctgctgctgaaggtgtactgctgcagcgagagcagcttctttgccaagatcccctactactactacatccgggaggcctgccagggcctgaaggagcccatgtggctggacaagatcaagaagaggctgaatgagcacggctacccccaggtggagggctttgtgcaggacatgaggctcatcttccagaaccaccgggccagctacaagtacaaggactttggccagatgggcttccggctggaggccgagtttgagaagaacttcaaggaggtgtttgccatccaggagaccaatggaaacaactag

SEQ ID NO: 98402 - DNA, 2523 bp, Artificial Sequence
  derived and/or modified sequence
atggcccagcagggccagcagggccagatggccagcggcgacagcaaccttaacttccgtatggtcgcagaaatccagaacgttgaaggacagaacctgcaggaacaggtgtgtccagagcctattttcagattctttcgagagaataaagtcgagattgcttccgcgattacacgtcctttcccctttctaatgggactgagagataggtcctttatcagcgaacagatgtatgaacacttccaggaagcttttagaaatctcgtcccagtgacacgcgtcatgtactgcgtcctgtccgaacttgagaagacgtttgggtggagccatctcgaagccctgtttagccgtatcaacctcatggcatacccagacctcaacgagatttatcgttccttccagaacgtgtgctacgaacacagccccttgcaaatgaataatgtgaatgatctcgaggacagacctcgactgcttccctatggcaaacaagaaaactccaacgcttgccatgaaatggacgacatcgctgttccccaggaagcattgtcttctagcccgcggtgtgaacctggattcagctcagagtcctgtgagcagctagcactgcccaaagcaggcggaggagatgccgaagatgccccatcactgctgcctggcgggggcgtgagctgcaagctggcaatacaaatcgatgaaggcgaatcagaggagatgcccaaattgctgccctacgacactgaagttttggaatctaatgggatgattgacgccgccagaacctactcaactgcaccgggcgagaaacaaggtgaagaggaaggccgcaattctccgcgtaagcggaaccaggacaaggagaaataccaggagagccccgagggccgcgacaaggagaccttcgacctgaaaacgccccaggtcacgaatgaaggcgagcccgagaaaggtctctgcctgcttcccggcgagggcgaggaagggagtgatgattgttcagaaatgtgcgatggagaggagccgcaagaagcctcctcaagtctggcacggtgcggatcagtgagttgtctatccgccgaaacattcgatttgaaaactccccaggtgacaaatgagggggaaccagagaaggagctttcactccttcccggggagggtgaggtgtccagcgaactggaaaaccatcctatgaatgaagagggggagagcgaggagttagcatcaagccttctgtacgacaacgtaccaggggccgaacaatctgcctacgagaatgagaaatgctcttgtgttatgtgtttttctgaggaagtccctgggagcccagaagccaggactgagagcgaccaggcttgcgggactatggacaccgtcgatatcgcaaacaattctaccctaggcaaacccaagaggaagcgaagaaagaagagaggacacggttggtcaagaatgcggatgaggagacaagaaaactctcagcagaacgataattctaaagctgacggccaggtcgtgtcttccgagaagaaggcaaacgtgaaccttaaggacctaagtaagattcgcggtaggaaacgggggaagccagggacccgattcacccagagcgaccgcgccgctcagaaaagagttcgctctagggcaagtagaaaacataaggatgagacagtagatttcaaggcccccctcctccccgtcacctgtggcggcgtcaagggtattcttcacaagaagaagctccaacagggcattctcgtgaaatgcattcagaccgaggatggtaagtggttcacaccaacagagttcgaaattaaaggcgggcatgcacggtcaaaaaattggcgattgtctgtgcgatgcggcggttggcccctgcgctggcttatggaaaacgggttcttgcctgatcccccaagaattaggtataggaagaaaaaaaggatcctcaagagtcagaataattccagtgtcgacccctgcatgaggaacctagacgagtgcgaggtgtgtcgcgatggcggggaacttttttgttgcgacacatgtagtagagtgttccatgaagactgccatattccacccgttgaggctgagcggacgccttggaactgtatcttctgccgaatgaaggagtcacctggttcccaacagtgttgccaggagagtgaggtcctcgagcgacagatgtgccctgaggagcagctgaagtgtgagttcctgctgctaaaagtgtactgttgctctgaaagtagcttcttcgcaaagattccatactactattacatacgagaagcctgccagggattaaaggaacccatgtggctcgacaaaattaaaaagagattaaatgagcatgggtatccccaggttgaaggatttgtgcaggatatgcgactgatttttcagaatcaccgtgcctcctataagtacaaggacttcgggcagatgggattccgcctcgaagcggaatttgaaaaaaattttaaagaagtgttcgccattcaggaaacaaatggaaacaattag

SEQ ID NO: 98403 - DNA, 3009 bp, Artificial Sequence
  derived and/or modified sequence
tttgactgagcaccgaggggcagttggcagcttcacctcagagctgcaggaaggaacggggcagtgaaaatcgaatcgggtgtgatcctaggccaagctcatggcccagcagggccagcaggggcagatggcaagtggagacagcaatctcaacttcaggatggtcgcagagatccagaacgtagagggtcagaacctgcaggagcaggtttgccctgagcccattttcaggttcttcagagaaaacaaggtggagattgcaagtgcaataacaaggccatttcctttccttatgggcctccgagaccgctccttcatctccgagcagatgtatgaacattttcaagaagcttttagaaacctggtcccagtgacaagagtgatgtattgtgtactcagtgaactggagaagacatttggctggtcacatctggaagcattgttcagcaggattaacctgatggcctatcctgatttaaacgagatttacagaagcttccagaatgtatgctatgaacactcacctctccaaatgaataatgtaaacgatttagaagatagacccagattactaccatatggtaaacaagagaacagcaatgcctgtcatgaaatggatgatatagcagtgcctcaggaagccttgagctcctcgccaaggtgtgagccaggtttctcttcagagtcttgtgagcagttagctctcccaaaggctggtggaggagatgctgaagatgcacccagcctactaccaggtgggggagtgtcctgtaaacttgctatacaaatagatgaaggagaatcagaagaaatgcccaagttactgccttatgatacagaagttctagaaagcaacgggatgatagatgcggcaaggacatacagcacagcaccaggggagaaacagggagaggaggaaggcaggaacagtcccagaaaaagaaaccaagacaaggagaagtaccaagagagtccagagggaagagacaaagagacctttgatctaaaaactccccaagtcactaatgaaggagaaccagagaaggggctctgtctactaccaggtgaaggagaagagggcagtgatgactgttcagaaatgtgtgatggagaagagccccaggaagcctctagctccctagcaagatgtgggtcagtttcttgtttatctgcagagacctttgatctaaagactccccaagtcactaatgaaggagaaccagagaaggagctcagtctactaccaggtgaaggagaagtgtctagtgaactagaaaatcacccaatgaatgaagaaggagaatcagaagagcttgcttctagcctgctatatgataatgtaccaggagcggagcaatcagcatatgaaaatgagaagtgttcctgtgtcatgtgtttctcagaagaggtgccaggaagcccagaagcaaggacggaaagtgatcaagcgtgtggcacaatggatactgtggatattgcaaacaactccactttgggaaaacccaagaggaaaagaagaaaaaagagggggcatggctggagcagaatgagaatgagaaggcaggaaaacagccaacaaaatgataatagcaaagccgacggccaggtggtctccagtgaaaagaaggcgaacgtgaatctgaaagacctttccaagattagggggagaaagagaggcaaacctggaacccgcttcactcagagtgacagagctgcacagaaaagagtccgatcaagagcttcaagaaagcacaaagatgaaactgtggattttaaggctcctttgcttccagtgacctgtggtggggtgaagggaattttacataagaagaaattgcagcaaggaatcttggtgaagtgtatacagactgaggatggaaaatggttcacccccacggaatttgaaatcaaaggaggccatgcaagatcaaagaactggaggctgagtgtgcgctgtggcgggtggcccctacgatggctgatggagaatggatttctgcctgatcctccaagaatacgttacaggaaaaaaaagagaatactgaagtctcaaaacaatagctcagttgacccttgtatgagaaacctggatgagtgtgaggtgtgccgggacggaggggagctgttctgttgcgacacttgttcaagagtcttccatgaggactgtcacatcccgcctgtggaagctgagaggaccccgtggaattgcatcttctgcaggatgaaggagtctccgggaagccaacagtgttgtcaggaatctgaggtcctggagaggcagatgtgtcctgaggaacagttgaaatgtgagttcctcctcttgaaagtctattgctgttctgagagctccttttttgccaagattccatactattattatattagagaggcgtgtcaaggcctgaaggagcccatgtggttggataaaatcaagaaaaggctgaatgagcacggttacccccaagtggaggggtttgtacaagacatgcgcctcatcttccagaaccacagggcctcttacaagtacaaggattttggccaaatgggatttagactggaggctgagtttgagaagaatttcaaggaagtgtttgctattcaggaaacaaatgggaacaattgactggattagtggatgctgaaagcattcagcaaatggcaccctaaaatatgccgctggtttgccactgacttcaaaatgaggtcacttgggcacagcacatgcagggaggggcttttctctgagcctccttcatctgcccaaagacaaatcctcaaaaggaaattcaatcatcatgaatcacaaccccaagtatctcatcagccagggaagagtaagtgggatcacagggaaggatgttggcagcgacaccatcccatacaggctcttacctcttctcctgagggctgctccagacaacatttattacccagaagaccttttgtctgaaaaccagccaagctttattcaggacacacttcttgccttcactttcccacttccgtggc

SEQ ID NO: 98404 - DNA, 2523 bp, Artificial Sequence
  derived and/or modified sequence
atggcacaacagggacagcaaggccagatggctagtggcgactcaaatcttaattttagaatggttgccgaaatacaaaatgttgaaggacagaacctgcaggagcaagtgtgtccagagccaattttccgcttcttcagagagaacaaggtggagattgcctcagctatcacccggccatttccttttctgatgggtctacgggatcgtagttttatctctgaacaaatgtacgagcattttcaagaggctttccgtaatctggtgccggtcacgcgagttatgtattgtgtgttgagtgagctagagaaaacctttggctggagtcaccttgaagctctgttctccagaataaatctgatggcctatccagatctcaatgaaatttataggagtttccagaacgtgtgctacgagcatagtccactgcagatgaacaacgtgaatgatttagaagaccggccacgcctcctgccatacggtaagcaggaaaactccaatgcatgtcacgaaatggacgatatagccgtcccccaggaggcactcagcagctccccgagatgcgaacccggattctccagtgaaagctgcgagcaactggcattacccaaggccggaggcggtgatgccgaggatgcaccctcactgctccccggaggtggggtgtcttgcaagctcgcgatccaaattgacgaaggagagtccgaggagatgcctaagctgctgccctacgatactgaggtgctggagtctaacggaatgatagatgcagccagaacttattcgactgcgccaggggagaagcagggtgaggaggagggacgtaattcacccagaaagcgaaaccaggacaaggagaagtaccaagaaagccccgagggcagggacaaggaaacctttgacctgaagacacctcaggttaccaacgagggggagcctgaaaaaggactatgtctcctgccaggcgagggggaggaaggaagcgacgattgtagcgagatgtgtgatggggaggaaccacaggaggctagctcatctctggcacgctgtgggtcggtctcctgtctttcagcagaaaccttcgacctgaagacaccgcaagttacaaacgagggagagcccgagaaagaactctccttgttgccgggagagggagaggtgagcagtgagctggagaatcacccaatgaacgaagaaggagaatctgaggagctggcgtcaagcttactgtacgacaacgtgcctggcgctgaacagagcgcctatgagaacgaaaagtgttcttgtgtcatgtgcttcagtgaggaggtgcccggttcacccgaggcaaggaccgaatctgaccaagcttgcggcacgatggatactgtcgacatagcgaataactccactctgggcaagcctaaacggaagcgcagaaaaaaaaggggccacggctggtcccgtatgcgaatgagaagacaggaaaattcccagcagaacgacaacagtaaggctgacggccaagtcgtgagcagtgagaagaaggccaatgtaaacctgaaggatctttccaaaatcagagggcgtaaacgaggaaagccagggactcggtttacacaatcagaccgggctgcccagaagcgggtaaggtcccgggcaagtagaaagcacaaagacgagactgtcgattttaaagccccacttctgcctgtgacctgtggcggagtcaaaggcatcctacataaaaagaagctgcaacagggcattttggtaaaatgcattcagacagaagacgggaaatggtttactcccactgagttcgaaatcaaaggaggacatgcccgatctaagaactggcgtctgagcgtgcgatgtggcggatggccgcttcgttggctgatggaaaacggattcctcccagacccccctcgtatccgataccggaaaaagaagcgaatcttgaagtcgcagaacaatagtagcgttgatccatgcatgcggaacctggacgaatgcgaggtgtgcagagacgggggagagcttttctgctgcgacacttgctccagggttttccatgaggactgtcacatcccacccgtcgaggctgagaggactccgtggaactgtattttctgtcgcatgaaggagtcccccggttcccagcaatgctgccaagagagtgaagtgctggagagacaaatgtgccccgaagagcagcttaaatgcgaattcttactcctcaaagtgtattgttgtagtgaatcatccttcttcgcaaagattccctactattactatatccgggaagcttgtcaaggactgaaagagcccatgtggcttgacaagataaagaagagactgaacgagcatgggtacccgcaggttgaaggctttgttcaggacatgcgtctcatcttccagaaccatagggccagttacaagtataaagacttcggacagatgggcttcaggctcgaggctgagttcgagaagaatttcaaggaagtgttcgccatacaggagactaatggtaacaactag

SEQ ID NO: 98405 - DNA, 2523 bp, Artificial Sequence
  derived and/or modified sequence
atggcccagcagggccagcagggccagatggccagcggcgacagcaacctgaacttcagaatggtggccgagatccagaacgtggagggccagaacctgcaggagcaggtgtgccccgagcccatcttcagattcttcagagagaacaaggtggagatcgccagcgccatcaccagacccttccccttcctgatgggcctgagagacagaagcttcatcagcgagcagatgtacgagcacttccaggaggccttcagaaacctggtgcccgtgaccagagtgatgtactgcgtgctgagcgagctggagaagaccttcggctggagccacctggaggccctgttcagcagaatcaacctgatggcctaccccgacctgaacgagatctacagaagcttccagaacgtgtgctacgagcacagccccctgcagatgaacaacgtgaacgacctggaggacagacccagactgctgccctacggcaagcaggagaacagcaacgcctgccacgagatggacgacatcgccgtgccccaggaggccctgagcagcagccccagatgcgagcccggcttcagcagcgagagctgcgagcagctggccctgcccaaggccggcggcggcgacgccgaggacgcccccagcctgctgcccggcggcggcgtgagctgcaagctggccatccagatcgacgagggcgagagcgaggagatgcccaagctgctgccctacgacaccgaggtgctggagagcaacggcatgatcgacgccgccagaacctacagcaccgcccccggcgagaagcagggcgaggaggagggcagaaacagccccagaaagagaaaccaggacaaggagaagtaccaggagagccccgagggcagagacaaggagaccttcgacctgaagaccccccaggtgaccaacgagggcgagcccgagaagggcctgtgcctgctgcccggcgagggcgaggagggcagcgacgactgcagcgagatgtgcgacggcgaggagccccaggaggccagcagcagcctggccagatgcggcagcgtgagctgcctgagcgccgagaccttcgacctgaagaccccccaggtgaccaacgagggcgagcccgagaaggagctgagcctgctgcccggcgagggcgaggtgagcagcgagctggagaaccaccccatgaacgaggagggcgagagcgaggagctggccagcagcctgctgtacgacaacgtgcccggcgccgagcagagcgcctacgagaacgagaagtgcagctgcgtgatgtgcttcagcgaggaggtgcccggcagccccgaggccagaaccgagagcgaccaggcctgcggcaccatggacaccgtggacatcgccaacaacagcaccctgggcaagcccaagagaaagagaagaaagaagagaggccacggctggagcagaatgagaatgagaagacaggagaacagccagcagaacgacaacagcaaggccgacggccaggtggtgagcagcgagaagaaggccaacgtgaacctgaaggacctgagcaagatcagaggcagaaagagaggcaagcccggcaccagattcacccagagcgacagagccgcccagaagagagtgagaagcagagccagcagaaagcacaaggacgagaccgtggacttcaaggcccccctgctgcccgtgacctgcggcggcgtgaagggcatcctgcacaagaagaagctgcagcagggcatcctggtgaagtgcatccagaccgaggacggcaagtggttcacccccaccgagttcgagatcaagggcggccacgccagaagcaagaactggagactgagcgtgagatgcggcggctggcccctgagatggctgatggagaacggcttcctgcccgacccccccagaatcagatacagaaagaagaagagaatcctgaagagccagaacaacagcagcgtggacccctgcatgagaaacctggacgagtgcgaggtgtgcagagacggcggcgagctgttctgctgcgacacctgcagcagagtgttccacgaggactgccacatcccccccgtggaggccgagagaaccccctggaactgcatcttctgcagaatgaaggagagccccggcagccagcagtgctgccaggagagcgaggtgctggagagacagatgtgccccgaggagcagctgaagtgcgagttcctgctgctgaaggtgtactgctgcagcgagagcagcttcttcgccaagatcccctactactactacatcagagaggcctgccagggcctgaaggagcccatgtggctggacaagatcaagaagagactgaacgagcacggctacccccaggtggagggcttcgtgcaggacatgagactgatcttccagaaccacagagccagctacaagtacaaggacttcggccagatgggcttcagactggaggccgagttcgagaagaacttcaaggaggtgttcgccatccaggagaccaacggcaacaactag

SEQ ID NO: 98406 - protein, 736 aa, Artificial Sequence
  derived and/or modified sequence
MVAEIQNVEGQNLQEQVCPEPIFRFFRENKVEIASAITRPFPFLMGLRDRSFISEQMYEHFQEAFRNLVPVTRVMYCVLSELEKTFGWSHLEALFSRINLMAYPDLNEIYRSFQNVCYEHSPLQMNNVNDLEDRPRLLPYGKQENSNACHEMDDIAVPQEALSSSPRCEPGFSSESCEQLALPKAGGGDAEDAPSLLPGGGVSCKLAIQIDEGESEEMPKLLPYDTEETFDLKTPQVTNEGEPEKGLCLLPGEGEEGSDDCSEMCDGEERQEASSSLARRGSVSSELENHPMNEEGESEELASSLLYDNVPGAEQSAYENEKCSCVMCFSEEVPGSPEARTESDQACGTMDTVDIANNSTLGKPKRKRRKKRGHGWSRMRMRRQENSQQNDNSKADGQVVSSEKKANVNLKDLSKIRGRKRGKPGTRFTQSDRAAQKRVRSRASRKHKDETVDFKAPLLPVTCGGVKGILHKKKLQQGILVKCIQTEDGKWFTPTEFEIKGGHARSKNWRLSVRCGGWPLRWLMENGFLPDPPRIRYRKKKRILKSQNNSSVDPCMRNLDECEVCRDGGELFCCDTCSRVFHEDCHIPPVEAERTPWNCIFCRMKESPGSQQCCQESEVLERQMCPEEQLKCEFLLLKVYCCSESSFFAKIPYYYYIREACQGLKEPMWLDKIKKRLNEHGYPQVEGFVQDMRLIFQNHRASYKYKDFGQMGFRLEAEFEKNFKEVFAIQETNGNN

SEQ ID NO: 98407 - DNA, 2211 bp, Artificial Sequence
  derived and/or modified sequence
atggtagctgagatccagaacgtggagggacaaaatctgcaggagcaggtctgtcccgagcccatttttcgattcttccgggagaacaaagtggaaatcgcatccgctatcacgcgtccgttcccgttcctgatgggactgcgagacagaagtttcatttccgaacaaatgtacgagcattttcaggaagcattccggaacctggtacccgtaactcgggtgatgtattgcgtcctgagtgagcttgagaagacgttcggatggtcccacctcgaggctttgttcagccgaattaatctgatggcctatcccgacctgaacgagatctacaggtccttccagaatgtatgctatgagcacagccctctccaaatgaacaatgtcaatgatcttgaggacagaccccgcctgctaccctacggaaagcaggagaacagcaacgcttgtcacgaaatggacgatatcgcagtgccacaggaggcactcagctcctcccccagatgtgagcctggtttctctagtgagtcgtgcgaacaattggctctgcccaaggcaggtggaggagacgcggaagatgccccgtccctgctgcccggagggggagtaagctgcaaactggctattcagatagacgagggcgaaagcgaagaaatgcctaagttgttaccgtatgacaccgaggagaccttcgacctaaaaactcctcaggttactaacgagggcgagccagaaaagggcctttgcctgctgcccggggaaggtgaggagggctcagacgactgctccgagatgtgtgatggagaagagagacaggaggctagctcctctctcgccagacggggatctgtgtcgtccgagctcgagaatcacccaatgaacgaggagggggagtcagaggaactggctagcagcttgctctacgataatgtgcccggtgccgaacagagcgcctacgaaaatgagaagtgcagctgcgtgatgtgcttcagtgaggaggtacccggtagccccgaagcaagaactgagagcgaccaggcctgtggcacgatggatacggtggatatagccaacaactccacgctggggaagccgaaacgcaagcggaggaaaaagcggggccatgggtggtctcggatgaggatgagaaggcaggagaacagccagcaaaacgataattctaaagcagatggccaggttgtcagcagtgagaaaaaggccaacgttaatctgaaggatctatccaagatcaggggccggaagagagggaaacctgggacccgcttcacgcagtctgatcgcgccgcccagaagcgcgtacgatctcgggcatcacgtaaacacaaggatgagaccgtagatttcaaggcaccactgctgccagttacgtgtggcggagtgaaagggatcttgcataagaaaaagctccagcaggggattctcgtgaagtgcatacaaaccgaggatggtaaatggtttactcccactgagtttgaaatcaaaggcggtcacgcacgctccaagaattggagactgagcgtccgctgtggtggatggcccctaaggtggctgatggagaatggtttcctgcccgacccaccacgaattagatataggaaaaaaaagcgtattctgaagagccagaataacagctccgtcgacccctgcatgagaaacctcgatgaatgtgaggtctgccgagatggtggtgaactcttctgttgtgacacgtgtagtagggtatttcacgaagactgccacattccacctgtcgaagcggagcgtaccccgtggaactgtatcttctgcagaatgaaggaatccccgggcagccagcaatgttgtcaggaatccgaggtcctggagcggcaaatgtgcccggaggaacagctgaaatgcgagttcctgctcttgaaagtgtattgttgttctgagtcttctttcttcgcaaagatcccttattactactatatccgcgaggcctgccagggtcttaaagaacccatgtggctggataagatcaagaaacggttgaacgaacatgggtaccctcaagtcgagggatttgtgcaggacatgagactgattttccagaatcaccgggcctcttataaatacaaggattttggacagatgggatttagacttgaagccgagttcgagaagaatttcaaagaggtcttcgcaattcaggagacaaatggaaacaattag

SEQ ID NO: 98408 - DNA, 2211 bp, Artificial Sequence
  derived and/or modified sequence
atggtggccgagatccagaatgtggagggccagaacctgcaggagcaggtgtgcccagagcccatcttccgcttcttccgggagaacaaggtggagatcgccagcgccatcacccggcccttccccttcctgatgggcctgcgggaccgctccttcatcagcgagcagatgtatgagcacttccaggaggccttcaggaacctggtgcctgtgaccagggtgatgtactgtgtgctgtctgagctggagaagaccttcggctggagccacctggaggccctcttcagccgcatcaacctgatggcctacccagacctgaatgagatctaccgctccttccagaatgtgtgctatgagcacagccccctgcagatgaacaacgtgaatgacctggaggaccggccccggctgctgccctacggcaagcaggagaacagcaatgcctgccacgagatggatgacattgctgtgccccaggaggccctgagcagcagcccccgctgtgagcccggcttcagcagcgagagctgtgagcagctggccctgcccaaggccggcggcggagatgctgaagatgcccccagcctgctgcccggcggcggcgtgtcctgcaagctggccatccagattgatgaaggagagagcgaggagatgcccaagctgctgccctatgacacagaggagacctttgacctgaagaccccccaggtgaccaatgaaggagagcctgagaagggcctgtgcctgctgcctggagagggggaggagggcagtgatgactgcagcgagatgtgtgatggagaggagcggcaggaggccagcagcagcctggcccggcggggctctgtgtcctctgagctggagaaccaccccatgaatgaggagggggagagcgaggagctggccagcagcctgctgtatgacaacgtgcctggagctgagcagagcgcctatgaaaatgagaagtgcagctgtgtgatgtgcttcagcgaggaggtgcccggcagccctgaggccaggacagaaagtgaccaggcctgtggcaccatggacacagtggacatcgccaacaacagcaccctgggcaagcccaagaggaagaggaggaagaagaggggccacggctggagcaggatgaggatgaggcggcaggagaacagccagcagaatgacaacagcaaggcagatggccaggtggtgagcagcgagaagaaggccaacgtgaacctgaaggacctgagcaagatccggggcaggaagaggggcaagccaggcacccgcttcacccagagcgaccgggccgcccagaagagggtgcgcagccgggccagcaggaagcacaaggatgaaacagtggacttcaaggcccccctgctgcctgtgacctgtggcggcgtgaagggcatcctgcacaagaagaagctgcagcagggcatcctggtgaagtgcatccagacagaagatggcaagtggttcacccccacagaatttgagatcaagggcggccacgcccggagcaagaactggaggctgtctgtgcgctgtggcggctggcccctgcgctggctgatggagaatggcttcctgcctgaccccccacgcatccgctacaggaagaagaagaggatcctgaagagccagaacaacagctctgtggacccctgcatgaggaacctggatgaatgtgaggtgtgcagagatggaggagagctgttctgctgtgacacctgcagcagggtcttccacgaggactgccacatcccccctgtggaggccgagaggaccccctggaactgcatcttctgcaggatgaaggagagccctggcagccagcagtgctgccaggagagcgaggtgctggagcggcagatgtgcccagaggagcagctgaagtgtgagttcctgctgctgaaggtgtactgctgcagcgagagcagcttctttgccaagatcccctactactactacatccgggaggcctgccagggcctgaaggagcccatgtggctggacaagatcaagaagaggctgaatgagcacggctacccccaggtggagggctttgtgcaggacatgaggctcatcttccagaaccaccgggccagctacaagtacaaggactttggccagatgggcttccggctggaggccgagtttgagaagaacttcaaggaggtgtttgccatccaggagaccaatggaaacaactag

SEQ ID NO: 98409 - DNA, 2211 bp, Artificial Sequence
  derived and/or modified sequence
atggtggccgagatccagaacgtggagggccagaacctgcaggagcaggtctgtccagaacccatctttaggttttttcgggagaataaggtagagatcgcatcagcaatcactaggccatttcctttcttaatgggcctcagggaccggtcattcatttcagaacagatgtacgaacacttccaggaggcttttaggaacctggttcccgttacaagagttatgtactgtgttttatccgagttagagaagactttcgggtggtcccaccttgaggccctcttttcaagaattaatcttatggcttatccagatctgaacgaaatataccgaagtttccaaaatgtatgttatgaacacagtcctctgcagatgaacaacgtaaacgacctggaggaccgacctcgcctgctcccctacgggaaacaggaaaactccaacgcctgtcacgaaatggacgatattgctgtcccccaggaagccctgagcagctccccaagatgtgagcctggcttcagctcggaatcttgcgaacaacttgccctgcccaaagccggggggggcgatgccgaagacgccccatcattactgccgggcggaggcgtttcttgcaagctagccattcagatcgacgagggtgagtctgaggaaatgccaaagcttctgccctacgacactgaagagacctttgaccttaaaacaccccaggtgacaaatgaaggagagcctgagaaaggattgtgtctgctgccgggagaaggagaagaggggtctgacgactgctctgagatgtgtgacggcgaagaaagacaggaagcctccagtagcttagcccgtcggggctccgtaagctccgaacttgagaatcaccccatgaatgaagagggggagtctgaggagctggctagctcactgctatacgacaatgtgccaggagctgagcagagcgcttacgagaacgaaaaatgcagctgcgtaatgtgcttttctgaggaggttccaggctcaccagaagcccgcaccgagtccgaccaggcctgcggaaccatggataccgtcgacatcgcaaataatagtacgctaggcaaaccaaagcgcaagcgtcggaaaaagaggggccacggatggtctaggatgaggatgagacgacaggagaattcccaacagaacgacaacagcaaggccgacggccaggtggtgagctccgagaaaaaggctaatgtgaacttgaaagatcttagtaaaattcggggtcgcaaacgtggcaagcccggaactaggtttactcagtctgatagagccgcccagaagcgtgtgagatctcgggcatctaggaagcacaaagatgagactgtggacttcaaggccccgctattacccgtgacatgcggaggggttaaaggaatcctgcacaagaaaaagcttcaacagggtatattggttaagtgtattcagacagaagatgggaaatggtttactcctaccgaatttgagatcaaaggaggccacgccagaagtaaaaattggcggctgtctgtgcggtgtgggggatggccacttaggtggttgatggaaaatggttttctgcctgatcccccaaggattcggtaccggaaaaagaaacggatcttgaaatcgcagaacaattccagcgtggacccttgcatgaggaacctggatgagtgcgaggtttgtcgagatggcggggaacttttctgttgtgatacgtgttcaagggtgttccacgaggattgccatataccacctgtggaagctgagaggacaccttggaactgtattttctgccgcatgaaggagtcacctggaagccaacaatgctgtcaagagtctgaagtcttggagcgccagatgtgccctgaggagcagcttaagtgcgaatttctgctgctgaaggtgtactgctgctctgaaagcagctttttcgcaaagatcccttattactattacatccgggaggcttgccagggactcaaagaaccaatgtggctggataaaattaaaaagcgactgaatgaacacggctatcctcaggtggagggcttcgtgcaggacatgcgccttatcttccaaaaccatcgcgctagttataaatataaggattttggccagatgggttttcgattggaggccgaattcgaaaaaaacttcaaagaggtgttcgctatccaggaaacaaatggcaacaattag

SEQ ID NO: 98410 - DNA, 2917 bp, Artificial Sequence
  derived and/or modified sequence
acttttcttttcctctttgactgagcaccgaggggcagttggcagcttcacctcagagctgcaggaaggaacggggcagtgaaaatcgaatcgggtgtgatcctaggccaagctcatggcccagcagggccagcaggggcagatggcaagtggagacagcaatctcaacttcaggatggtcgcagagatccagaacgtagagggtcagaacctgcaggagcaggtttgccctgagcccattttcaggttcttcagagaaaacaaggtggagattgcaagtgcaataacaaggccatttcctttccttatgggcctccgagaccgctccttcatctccgagcagatgtatgaacattttcaagaagcttttagaaacctggtcccagtgacaagagtgatgtattgtgtactcagtgaactggagaagacatttggctggtcacatctggaagcattgttcagcaggattaacctgatggcctatcctgatttaaacgagatttacagaagcttccagaatgtatgctatgaacactcacctctccaaatgaataatgtaaacgatttagaagatagacccagattactaccatatggtaaacaagagaacagcaatgcctgtcatgaaatggatgatatagcagtgcctcaggaagccttgagctcctcgccaaggtgtgagccaggtttctcttcagagtcttgtgagcagttagctctcccaaaggctggtggaggagatgctgaagatgcacccagcctactaccaggtgggggagtgtcctgtaaacttgctatacaaatagatgaaggagaatcagaagaaatgcccaagttactgccttatgatacagaagagacctttgatctaaaaactccccaagtcactaatgaaggagaaccagagaaggggctctgtctactaccaggtgaaggagaagagggcagtgatgactgttcggaaatgtgtgatggagaagagcgccaggaagcctctagctccctagcaagacgtgggtcagtgtctagtgaactagaaaatcacccaatgaatgaagaaggagaatcagaagagcttgcttctagcctgctatatgataatgtaccaggagcggagcaatcagcatatgaaaatgagaagtgttcctgtgtcatgtgtttctcagaagaggtgccaggaagcccagaagcaaggacggaaagtgatcaagcgtgtggcacaatggatactgtggatattgcaaacaactccactttgggaaaacccaagaggaaaagaagaaaaaagagggggcatggctggagcagaatgagaatgagaaggcaggaaaacagccaacaaaatgataatagcaaagccgacggccaggtggtctccagtgaaaagaaggcgaacgtgaatctgaaagacctttccaagattagggggagaaagagaggcaaacctggaacccgcttcactcagagtgacagagctgcacagaaaagagtccgatcaagagcttcaagaaagcacaaagatgaaactgtggattttaaggctcctttgcttccagtgacctgtggtggggtgaagggaattttacataagaagaaattgcagcaaggaatcttggtgaagtgtatacagactgaggatggaaaatggttcacccccacggaatttgaaatcaaaggaggccatgcaagatcaaagaactggaggctgagtgtgcgctgtggcgggtggcccctacgatggctgatggagaatggatttctgcctgatcctccaagaatacgttacaggaaaaaaaagagaatactgaagtctcaaaacaatagctcagttgacccttgtatgagaaacctggatgagtgtgaggtgtgccgggacggaggggagctgttctgttgcgacacttgttcaagagtcttccatgaggactgtcacatcccgcctgtggaagctgagaggaccccgtggaattgcatcttctgcaggatgaaggagtctccgggaagccaacagtgttgtcaggaatctgaggtcctggagaggcagatgtgtcctgaggaacagttgaaatgtgagttcctcctcttgaaagtctattgctgttctgagagctccttttttgccaagattccatactattattatattagagaggcgtgtcaaggcctgaaggagcccatgtggttggataaaatcaagaaaaggctgaatgagcacggttacccccaagtggaggggtttgtacaagacatgcgcctcatcttccagaaccacagggcctcttacaagtacaaggattttggccaaatgggatttagactggaggctgagtttgagaagaatttcaaggaagtgtttgctattcaggaaacaaatgggaacaattgactggattagtggatgctgaaagcattcagcaaatggcaccctaaaatatgccgctggtttgccactgacttcaaaatgaggtcacttgggcacagcacatgcagggaggggcttttctctgagcctccttcatctgcccaaagacaaatcctcaaaaggaaattcaatcatcatgaatcacaaccccaagtatctcatcagccagggaagagtaagtgggatcacagggaaggatgttggcagcgacaccatcccatacaggctcttacctcttctcctgagggctgctccagacaacatttattacccagaagaccttttgtctgaaaaccagccaagctttattcaggacacacttcttgccttcactttcccacttccgtggccacctccatgcagaagccctaagcccacattctttcgatagctcacggtggtgcatgagtgtccatcatctgactcttctcggagtctcatattttgtgggactcctgtgcaaacatatgttattaaaatttttttcctcctgtt

SEQ ID NO: 98411 - DNA, 2211 bp, Artificial Sequence
  derived and/or modified sequence
atggttgctgagatacagaatgttgaaggacaaaatctgcaagagcaggtttgtcctgagcctattttcagattctttcgcgaaaacaaggttgagattgcttccgcaattacccgtccatttccattcttgatgggcctgcgtgatcgtagctttatctccgagcaaatgtatgagcacttccaggaagctttccgaaacctagtcccagtgacgcgggtaatgtattgtgtgctctctgagctggagaaaacttttgggtggtcacacctggaggcgcttttttcacggatcaatctgatggcttatcctgacctgaatgagatttacagatcctttcagaatgtgtgctatgagcacagcccgctccagatgaataacgtcaacgacttggaagatagacccaggttgttaccttatgggaaacaggaaaactctaatgcttgccatgaaatggacgacattgcagtgccccaggaagcgttaagttctagtcctcgatgtgagcccggattcagctcagagtcatgcgaacagttggccctcccgaaagcagggggtggagacgcagaggacgcgcctagtctacttccaggtggcggtgtgagctgcaaacttgccatacagatcgatgagggtgaatcggaggaaatgccgaagctgctgccctacgatactgaggagacctttgacctgaaaactcctcaagtcacaaatgagggcgagcctgaaaaaggactctgcctgcttcccggtgaaggcgaagaagggagcgacgattgttccgaaatgtgcgatggcgaggaacggcaggaggcatcatccagcctggcacggaggggcagcgtcagctcagaattggagaatcaccccatgaatgaagaaggtgaatcagaagaactggccagctccctgctgtatgataacgttcccggtgcagaacagagcgcctatgagaacgagaaatgcagctgtgtgatgtgtttcagcgaagaagttccagggtcacccgaagcacggaccgagtctgaccaagcatgcgggaccatggatacggttgacattgcaaacaactccactctggggaaacccaagagaaaacggagaaaaaagcggggacacggctggtcccgaatgaggatgcgtcgccaggaaaacagccaacagaacgataactcaaaagccgatggccaggtggtgagctccgaaaagaaggccaatgtgaatctcaaggatctgtctaagattagagggagaaagcgtggtaagcctgggaccagatttactcagagtgaccgggcagcacagaaaagggtgcgtagcagagccagtaggaagcacaaggacgagaccgtggatttcaaggcccctctccttcccgttacatgcgggggagtcaaggggatactccataagaaaaaacttcagcaggggatcttggtcaagtgcatacaaaccgaagacggaaaatggtttacccctacagaatttgaaattaagggagggcatgctagaagtaagaattggagactgagcgtgcgttgcggcggttggcccttgaggtggttgatggagaacggcttcctgccggaccccccaagaattaggtatcgcaagaagaagaggatcttgaagtcacagaacaattctagcgtcgatccctgcatgagaaatctagatgaatgcgaggtttgcagggacggcggtgaactgttttgttgcgatacatgcagccgagtgttccatgaggactgtcatattccccctgtcgaggccgaacgaaccccatggaattgtatcttctgcaggatgaaggaaagccccggatctcagcagtgttgccaggagtctgaagtgttagagcggcagatgtgccccgaagaacagctaaaatgtgaattcctcctcctaaaagtttactgttgctccgagtcaagcttcttcgcgaagatcccatattattactatatccgagaagcatgccagggtctaaaggaacctatgtggctcgataaaatcaagaagcgtttaaacgagcacggctatccccaggtagagggattcgtccaggatatgcgcctgatcttccaaaaccacagagctagctataaatacaaagatttcgggcaaatggggtttcgattggaggcagagtttgagaagaattttaaggaagttttcgcaatacaggagactaacgggaacaactag

SEQ ID NO: 98412 - DNA, 2211 bp, Artificial Sequence
  derived and/or modified sequence
atggtggccgagatccagaacgtggagggccagaacctgcaggagcaggtgtgccccgagcccatcttcagattcttcagagagaacaaggtggagatcgccagcgccatcaccagacccttccccttcctgatgggcctgagagacagaagcttcatcagcgagcagatgtacgagcacttccaggaggccttcagaaacctggtgcccgtgaccagagtgatgtactgcgtgctgagcgagctggagaagaccttcggctggagccacctggaggccctgttcagcagaatcaacctgatggcctaccccgacctgaacgagatctacagaagcttccagaacgtgtgctacgagcacagccccctgcagatgaacaacgtgaacgacctggaggacagacccagactgctgccctacggcaagcaggagaacagcaacgcctgccacgagatggacgacatcgccgtgccccaggaggccctgagcagcagccccagatgcgagcccggcttcagcagcgagagctgcgagcagctggccctgcccaaggccggcggcggcgacgccgaggacgcccccagcctgctgcccggcggcggcgtgagctgcaagctggccatccagatcgacgagggcgagagcgaggagatgcccaagctgctgccctacgacaccgaggagaccttcgacctgaagaccccccaggtgaccaacgagggcgagcccgagaagggcctgtgcctgctgcccggcgagggcgaggagggcagcgacgactgcagcgagatgtgcgacggcgaggagagacaggaggccagcagcagcctggccagaagaggcagcgtgagcagcgagctggagaaccaccccatgaacgaggagggcgagagcgaggagctggccagcagcctgctgtacgacaacgtgcccggcgccgagcagagcgcctacgagaacgagaagtgcagctgcgtgatgtgcttcagcgaggaggtgcccggcagccccgaggccagaaccgagagcgaccaggcctgcggcaccatggacaccgtggacatcgccaacaacagcaccctgggcaagcccaagagaaagagaagaaagaagagaggccacggctggagcagaatgagaatgagaagacaggagaacagccagcagaacgacaacagcaaggccgacggccaggtggtgagcagcgagaagaaggccaacgtgaacctgaaggacctgagcaagatcagaggcagaaagagaggcaagcccggcaccagattcacccagagcgacagagccgcccagaagagagtgagaagcagagccagcagaaagcacaaggacgagaccgtggacttcaaggcccccctgctgcccgtgacctgcggcggcgtgaagggcatcctgcacaagaagaagctgcagcagggcatcctggtgaagtgcatccagaccgaggacggcaagtggttcacccccaccgagttcgagatcaagggcggccacgccagaagcaagaactggagactgagcgtgagatgcggcggctggcccctgagatggctgatggagaacggcttcctgcccgacccccccagaatcagatacagaaagaagaagagaatcctgaagagccagaacaacagcagcgtggacccctgcatgagaaacctggacgagtgcgaggtgtgcagagacggcggcgagctgttctgctgcgacacctgcagcagagtgttccacgaggactgccacatcccccccgtggaggccgagagaaccccctggaactgcatcttctgcagaatgaaggagagccccggcagccagcagtgctgccaggagagcgaggtgctggagagacagatgtgccccgaggagcagctgaagtgcgagttcctgctgctgaaggtgtactgctgcagcgagagcagcttcttcgccaagatcccctactactactacatcagagaggcctgccagggcctgaaggagcccatgtggctggacaagatcaagaagagactgaacgagcacggctacccccaggtggagggcttcgtgcaggacatgagactgatcttccagaaccacagagccagctacaagtacaaggacttcggccagatgggcttcagactggaggccgagttcgagaagaacttcaaggaggtgttcgccatccaggagaccaacggcaacaactag

SEQ ID NO: 98413 - protein, 1233 aa, Artificial Sequence
  derived and/or modified sequence
MPPSWSPLMCGRAAEAAASSRTPGREMGQAVTRRLGAGARAAPRRAMDGRTPRPQDAPARREIAGSWRKPKAKAPLPPAETKYTDVSSAADSVESTAFIMEQKENMIDKDVELSVVLPGDIIKSTTVHGSKPMMDLLIFLCAQYHLNPSSYTIDLLSAEQNHIKFKPNTPIGMLEVEKVILKPKMLDKKKPTPIIPEKTVRVVINFKKTQKTIVRVSPHASLQELAPIICSKCEFDPLHTLLLKDYQSQEPLDLTKSLNDLGLRELYAMDVNRATSVTVFSKSSLQESCQISQNLDIMKEKENKGFFSFFQRSKKKRDQTASAPATPLVNKHRPTFTRSNTISKPYISNTLPSDAPKKRRAPLPPMPASQSVPQDLAHIQERPASCIVKSMSVDETDKSPCEAGRVRAGSLQLSSMSAGNSSLRRTKRKAPSPPSKIPPHQSDENSRVTALQPVDGVPPDSASEANSPEELSSPETFHPGLSSQEQCTAPKLMEETSVFECPGTPEAAITSLTSGISSDYSLEEIDEKEELSEVPKVEAENISPKSQDIPFVSTDIINTLKNDPDSALGNGSGEFSQNSMEEKQETKSTDGQEPHSVVYDTSNGKKVVDSIRNLKSLGPNQENVVQNEIIVYPENTEDNMKNGVKKTEINVEGVAKNNNIDMEVERPSNSEAHETDTAISYKENHLAASSVPDQKLNQPSAEKTKDAAIQTTPSCNSFDGKHQDHNLSDSKVEECVQTSNNNISTQHSCLSSQDSVNTSREFRSQGTLIIHSEDPLTVKDPICAHGNDDLLPPVDRIDKNSTASYLKNYPLYRQDYNPKPKPSNEITREYIPKIGMTTYKIVPPKSLEISKDWQSETIEYKDDQDMHALGKKHTHENVKETAIQTEDSAISESPEEPLPNLKPKPNLRTEHQVPSSVSSPDDAMVSPLKPAPKMTRDTGTAPFAPNLEEINNILESKFKSRASNAQAKPSSFFLQMQKRVSGHYVTSAAAKSVHAAPNPAPKELTNKEAERDMLPSPEQTLSPLSKMPHSVPQPLVEKTDDDVIGQAPAEASPPPIAPKPVTIPASQVSTQNLKTLKTFGAPRPYSSSGPSPFALAVVKRSQSFSKERTESPSASALVQPPANTEEGKTHSVNKFVDIPQLGVSDKENNSAHNEQNSQIPTPTDGPSFTVMRQSSLTFQSSDPEQMRQSLLTAIRSGEAAAKLKRVTIPSNTISVNGRSRLSHSMSPDAQDGH

SEQ ID NO: 98414 - protein, 1204 aa, Artificial Sequence
  derived and/or modified sequence
MCGRAAEAAASSRTPGREMGQAVTRRLGAGARAAPRRAMDGRTPRPQDAPARRKPKAKAPLPPAETKYTDVSSAADSVESTAFIMEQKENMIDKDVELSVVLPGDIIKSTTVHGSKPMMDLLIFLCAQYHLNPSSYTIDLLSAEQNHIKFKPNTPIGMLEVEKVILKPKMLDKKKPTPIIPEKTVRVVINFKKTQKTIVRVSPHASLQELAPIICSKCEFDPLHTLLLKDYQSQEPLDLTKSLNDLGLRELYAMDVNRESCQISQNLDIMKEKENKGFFSFFQRSKKKRDQTASAPATPLVNKHRPTFTRSNTISKPYISNTLPSDAPKKRRAPLPPMPASQSVPQDLAHIQERPASCIVKSMSVDETDKSPCEAGRVRAGSLQLSSMSAGNSSLRRTKRKAPSPPSKIPPHQSDENSRVTALQPVDGVPPDSASEANSPEELSSPETFHPGLSSQEQCTAPKLMEETSVFECPGTPEAAITSLTSGISSDYSLEEIDEKEELSEVPKVEAENISPKSQDIPFVSTDIINTLKNDPDSALGNGSGEFSQNSMEEKQETKSTDGQEPHSVVYDTSNGKKVVDSIRNLKSLGPNQENVQNEIIVYPENTEDNMKNGVKKTEINVEGVAKNNNIDMEVERPSNSEAHETDTAISYKENHLAASSVPDQKLNQPSAEKTKDAAIQTTPSCNSFDGKHQDHNLSDSKVEECVQTSNNNISTQHSCLSSQDSVNTSREFRSQGTLIIHSEDPLTVKDPICAHGNDDLLPPVDRIDKNSTASYLKNYPLYRQDYNPKPKPSNEITREYIPKIGMTTYKIVPPKSLEISKDWQSETIEYKDDQDMHALGKKHTHENVKETAIQTEDSAISESPEEPLPNLKPKPNLRTEHQVPSSVSSPDDAMVSPLKPAPKMTRDTGTAPFAPNLEEINNILESKFKSRASNAQAKPSSFFLQMQKRVSGHYVTSAAAKSVHAAPNPAPKELTNKEAERDMLPSPEQTLSPLSKMPHSVPQPLVEKTDDDVIGQAPAEASPPPIAPKPVTIPASQVSTQNLKTLKTFGAPRPYSSSGPSPFALAVVKRSQSFSKERTESPSASALVQPPANTEEGKTHSVNKFVDIPQLGVSDKENNSAHNEQNSQIPTPTDGPSFTVMRQSSLTFQSSDPEQMRQSLLTAIRSGEAAAKLKRVTIPSNTISVNGRSRLSHSMSPDAQDGH

SEQ ID NO: 98415 - DNA, 3702 bp, Artificial Sequence
  derived and/or modified sequence
atgccccccagctggagccccctgatgtgcggcagagccgccgaggccgccgccagcagcagaacccccggcagagagatgggccaggccgtgaccagaagactgggcgccggcgccagagccgcccccagaagagccatggacggcagaacccccagaccccaggacgcccccgccagaagagagatcgccggcagctggagaaagcccaaggccaaggcccccctgccccccgccgagaccaagtacaccgacgtgagcagcgccgccgacagcgtggagagcaccgccttcatcatggagcagaaggagaacatgatcgacaaggacgtggagctgagcgtggtgctgcccggcgacatcatcaagagcaccaccgtgcacggcagcaagcccatgatggacctgctgatcttcctgtgcgcccagtaccacctgaaccccagcagctacaccatcgacctgctgagcgccgagcagaaccacatcaagttcaagcccaacacccccatcggcatgctggaggtggagaaggtgatcctgaagcccaagatgctggacaagaagaagcccacccccatcatccccgagaagaccgtgagagtggtgatcaacttcaagaagacccagaagaccatcgtgagagtgagcccccacgccagcctgcaggagctggcccccatcatctgcagcaagtgcgagttcgaccccctgcacaccctgctgctgaaggactaccagagccaggagcccctggacctgaccaagagcctgaacgacctgggcctgagagagctgtacgccatggacgtgaacagagccaccagcgtgaccgtgttcagcaagagcagcctgcaggagagctgccagatcagccagaacctggacatcatgaaggagaaggagaacaagggcttcttcagcttcttccagagaagcaagaagaagagagaccagaccgccagcgcccccgccacccccctggtgaacaagcacagacccaccttcaccagaagcaacaccatcagcaagccctacatcagcaacaccctgcccagcgacgcccccaagaagagaagagcccccctgccccccatgcccgccagccagagcgtgccccaggacctggcccacatccaggagagacccgccagctgcatcgtgaagagcatgagcgtggacgagaccgacaagagcccctgcgaggccggcagagtgagagccggcagcctgcagctgagcagcatgagcgccggcaacagcagcctgagaagaaccaagagaaaggcccccagcccccccagcaagatccccccccaccagagcgacgagaacagcagagtgaccgccctgcagcccgtggacggcgtgccccccgacagcgccagcgaggccaacagccccgaggagctgagcagccccgagaccttccaccccggcctgagcagccaggagcagtgcaccgcccccaagctgatggaggagaccagcgtgttcgagtgccccggcacccccgaggccgccatcaccagcctgaccagcggcatcagcagcgactacagcctggaggagatcgacgagaaggaggagctgagcgaggtgcccaaggtggaggccgagaacatcagccccaagagccaggacatccccttcgtgagcaccgacatcatcaacaccctgaagaacgaccccgacagcgccctgggcaacggcagcggcgagttcagccagaacagcatggaggagaagcaggagaccaagagcaccgacggccaggagccccacagcgtggtgtacgacaccagcaacggcaagaaggtggtggacagcatcagaaacctgaagagcctgggccccaaccaggagaacgtggtgcagaacgagatcatcgtgtaccccgagaacaccgaggacaacatgaagaacggcgtgaagaagaccgagatcaacgtggagggcgtggccaagaacaacaacatcgacatggaggtggagagacccagcaacagcgaggcccacgagaccgacaccgccatcagctacaaggagaaccacctggccgccagcagcgtgcccgaccagaagctgaaccagcccagcgccgagaagaccaaggacgccgccatccagaccacccccagctgcaacagcttcgacggcaagcaccaggaccacaacctgagcgacagcaaggtggaggagtgcgtgcagaccagcaacaacaacatcagcacccagcacagctgcctgagcagccaggacagcgtgaacaccagcagagagttcagaagccagggcaccctgatcatccacagcgaggaccccctgaccgtgaaggaccccatctgcgcccacggcaacgacgacctgctgccccccgtggacagaatcgacaagaacagcaccgccagctacctgaagaactaccccctgtacagacaggactacaaccccaagcccaagcccagcaacgagatcaccagagagtacatccccaagatcggcatgaccacctacaagatcgtgccccccaagagcctggagatcagcaaggactggcagagcgagaccatcgagtacaaggacgaccaggacatgcacgccctgggcaagaagcacacccacgagaacgtgaaggagaccgccatccagaccgaggacagcgccatcagcgagagccccgaggagcccctgcccaacctgaagcccaagcccaacctgagaaccgagcaccaggtgcccagcagcgtgagcagccccgacgacgccatggtgagccccctgaagcccgcccccaagatgaccagagacaccggcaccgcccccttcgcccccaacctggaggagatcaacaacatcctggagagcaagttcaagagcagagccagcaacgcccaggccaagcccagcagcttcttcctgcagatgcagaagagagtgagcggccactacgtgaccagcgccgccgccaagagcgtgcacgccgcccccaaccccgcccccaaggagctgaccaacaaggaggccgagagagacatgctgcccagccccgagcagaccctgagccccctgagcaagatgccccacagcgtgccccagcccctggtggagaagaccgacgacgacgtgatcggccaggcccccgccgaggccagccccccccccatcgcccccaagcccgtgaccatccccgccagccaggtgagcacccagaacctgaagaccctgaagaccttcggcgcccccagaccctacagcagcagcggccccagccccttcgccctggccgtggtgaagagaagccagagcttcagcaaggagagaaccgagagccccagcgccagcgccctggtgcagccccccgccaacaccgaggagggcaagacccacagcgtgaacaagttcgtggacatcccccagctgggcgtgagcgacaaggagaacaacagcgcccacaacgagcagaacagccagatccccacccccaccgacggccccagcttcaccgtgatgagacagagcagcctgaccttccagagcagcgaccccgagcagatgagacagagcctgctgaccgccatcagaagcggcgaggccgccgccaagctgaagagagtgaccatccccagcaacaccatcagcgtgaacggcagaagcagactgagccacagcatgagccccgacgcccaggacggccactag

SEQ ID NO: 98416 - DNA, 3615 bp, Artificial Sequence
  derived and/or modified sequence
atgtgcggcagagccgccgaggccgccgccagcagcagaacccccggcagagagatgggccaggccgtgaccagaagactgggcgccggcgccagagccgcccccagaagagccatggacggcagaacccccagaccccaggacgcccccgccagaagaaagcccaaggccaaggcccccctgccccccgccgagaccaagtacaccgacgtgagcagcgccgccgacagcgtggagagcaccgccttcatcatggagcagaaggagaacatgatcgacaaggacgtggagctgagcgtggtgctgcccggcgacatcatcaagagcaccaccgtgcacggcagcaagcccatgatggacctgctgatcttcctgtgcgcccagtaccacctgaaccccagcagctacaccatcgacctgctgagcgccgagcagaaccacatcaagttcaagcccaacacccccatcggcatgctggaggtggagaaggtgatcctgaagcccaagatgctggacaagaagaagcccacccccatcatccccgagaagaccgtgagagtggtgatcaacttcaagaagacccagaagaccatcgtgagagtgagcccccacgccagcctgcaggagctggcccccatcatctgcagcaagtgcgagttcgaccccctgcacaccctgctgctgaaggactaccagagccaggagcccctggacctgaccaagagcctgaacgacctgggcctgagagagctgtacgccatggacgtgaacagagagagctgccagatcagccagaacctggacatcatgaaggagaaggagaacaagggcttcttcagcttcttccagagaagcaagaagaagagagaccagaccgccagcgcccccgccacccccctggtgaacaagcacagacccaccttcaccagaagcaacaccatcagcaagccctacatcagcaacaccctgcccagcgacgcccccaagaagagaagagcccccctgccccccatgcccgccagccagagcgtgccccaggacctggcccacatccaggagagacccgccagctgcatcgtgaagagcatgagcgtggacgagaccgacaagagcccctgcgaggccggcagagtgagagccggcagcctgcagctgagcagcatgagcgccggcaacagcagcctgagaagaaccaagagaaaggcccccagcccccccagcaagatccccccccaccagagcgacgagaacagcagagtgaccgccctgcagcccgtggacggcgtgccccccgacagcgccagcgaggccaacagccccgaggagctgagcagccccgagaccttccaccccggcctgagcagccaggagcagtgcaccgcccccaagctgatggaggagaccagcgtgttcgagtgccccggcacccccgaggccgccatcaccagcctgaccagcggcatcagcagcgactacagcctggaggagatcgacgagaaggaggagctgagcgaggtgcccaaggtggaggccgagaacatcagccccaagagccaggacatccccttcgtgagcaccgacatcatcaacaccctgaagaacgaccccgacagcgccctgggcaacggcagcggcgagttcagccagaacagcatggaggagaagcaggagaccaagagcaccgacggccaggagccccacagcgtggtgtacgacaccagcaacggcaagaaggtggtggacagcatcagaaacctgaagagcctgggccccaaccaggagaacgtgcagaacgagatcatcgtgtaccccgagaacaccgaggacaacatgaagaacggcgtgaagaagaccgagatcaacgtggagggcgtggccaagaacaacaacatcgacatggaggtggagagacccagcaacagcgaggcccacgagaccgacaccgccatcagctacaaggagaaccacctggccgccagcagcgtgcccgaccagaagctgaaccagcccagcgccgagaagaccaaggacgccgccatccagaccacccccagctgcaacagcttcgacggcaagcaccaggaccacaacctgagcgacagcaaggtggaggagtgcgtgcagaccagcaacaacaacatcagcacccagcacagctgcctgagcagccaggacagcgtgaacaccagcagagagttcagaagccagggcaccctgatcatccacagcgaggaccccctgaccgtgaaggaccccatctgcgcccacggcaacgacgacctgctgccccccgtggacagaatcgacaagaacagcaccgccagctacctgaagaactaccccctgtacagacaggactacaaccccaagcccaagcccagcaacgagatcaccagagagtacatccccaagatcggcatgaccacctacaagatcgtgccccccaagagcctggagatcagcaaggactggcagagcgagaccatcgagtacaaggacgaccaggacatgcacgccctgggcaagaagcacacccacgagaacgtgaaggagaccgccatccagaccgaggacagcgccatcagcgagagccccgaggagcccctgcccaacctgaagcccaagcccaacctgagaaccgagcaccaggtgcccagcagcgtgagcagccccgacgacgccatggtgagccccctgaagcccgcccccaagatgaccagagacaccggcaccgcccccttcgcccccaacctggaggagatcaacaacatcctggagagcaagttcaagagcagagccagcaacgcccaggccaagcccagcagcttcttcctgcagatgcagaagagagtgagcggccactacgtgaccagcgccgccgccaagagcgtgcacgccgcccccaaccccgcccccaaggagctgaccaacaaggaggccgagagagacatgctgcccagccccgagcagaccctgagccccctgagcaagatgccccacagcgtgccccagcccctggtggagaagaccgacgacgacgtgatcggccaggcccccgccgaggccagccccccccccatcgcccccaagcccgtgaccatccccgccagccaggtgagcacccagaacctgaagaccctgaagaccttcggcgcccccagaccctacagcagcagcggccccagccccttcgccctggccgtggtgaagagaagccagagcttcagcaaggagagaaccgagagccccagcgccagcgccctggtgcagccccccgccaacaccgaggagggcaagacccacagcgtgaacaagttcgtggacatcccccagctgggcgtgagcgacaaggagaacaacagcgcccacaacgagcagaacagccagatccccacccccaccgacggccccagcttcaccgtgatgagacagagcagcctgaccttccagagcagcgaccccgagcagatgagacagagcctgctgaccgccatcagaagcggcgaggccgccgccaagctgaagagagtgaccatccccagcaacaccatcagcgtgaacggcagaagcagactgagccacagcatgagccccgacgcccaggacggccactag

SEQ ID NO: 98417 - DNA, 3868 bp, Artificial Sequence
  derived and/or modified sequence
ctttcggttcagcttccccagccggaccccaaagacccgaagccctgggggaaggaaattccaacttgctcccggcccacccccgccccgttcctctctccggctcgctgcttccctcgctccaatgccgccgagctggtccccacttatgtgcggccgtgctgcagaggcggcggcgagctcccggactccgggcagggaaatggggcaggcagtgacgcgccgcctgggagctggagcccgcgcagcgccccgcagggcgatggacggccgaaccccgcgcccgcaggacgccccagccaggagagagattgctgggtcatggagaaaaccaaaagccaaggcaccacttcctccagctgagaccaaatatactgatgtctcttcagctgctgattctgtagaatccactgctttcatcatggaacagaaagaaaacatgatagataaagacgttgaactctcagtggtcctacctggggatattatcaaatctactactgttcatggcagtaaacctatgatggacttgttgatattcctttgtgcacagtatcacttaaatccatcaagttacacaatcgatctgttgtcagctgaacagaaccacattaaatttaagccaaacacaccaataggaatgttggaggtagagaaggtaattttaaagccaaaaatgttggataagaaaaaacctacacctataataccagagaaaactgtgagagtagtgattaattttaagaaaacacagaagaccatagtgagagtgagtccacatgcatcgcttcaagagcttgcccctattatatgtagcaaatgtgagtttgatccgttgcatacactattgttgaaagattatcaatcgcaggagcctcttgacttgacaaaatctcttaatgacctgggactaagagaattatatgcgatggatgtcaacagagccacttctgttactgtcttcagtaagtcatctttacaagagtcctgccaaatatcacaaaacctagatattatgaaggagaaagaaaataaagggtttttcagtttttttcaacgcagtaagaaaaagcgagaccaaactgcaagtgcccctgcaacccctctagtaaataagcaccgcccaacttttacaaggtccaataccatttccaaaccatatatttccaacaccctgccgtcggatgcacccaagaagaggcgggctccactgcccccgatgccagcatctcagagtgtcccccaagaccttgcacacatccaggagaggcctgcttcttgtatagtgaaatccatgagcgtggatgagacagataagagtccctgtgaagcaggaagagtgagggcaggttcactgcagctcagcagcatgtctgcagggaattcatctttgagaaggacaaagcgaaaagcaccttccccaccctccaaaatacccccgcatcaaagtgatgaaaatagtcgtgtgactgccttacagccagtagatggagttcctccagacagtgcttcagaagcaaactctcctgaggagctatccagcccagaaacctttcaccctgggctttccagtcaggagcagtgcactgcgcccaaactgatggaggaaacctctgtctttgagtgccctgggacacctgaggcagccataacatcattgacatctggaataagctctgattatagccttgaagagatagatgaaaaggaagaactgagtgaagtgcctaaagttgaagctgaaaatatttctccgaagtcacaagatattccttttgtatctactgatataataaatacactgaaaaatgatcctgactcagcccttggcaatggtagtggagagttctcacaaaactccatggaagaaaaacaagaaactaaaagcacagatggacaagaaccacacagtgtagtatatgatacaagcaatggaaagaaggtagttgacagtataagaaacttgaagtcgttgggcccaaaccaagagaatgtagttcaaaatgaaataattgtctatccagagaacacagaagacaatatgaaaaatggagtgaagaaaacagaaatcaatgtagaaggtgttgccaaaaataacaacattgatatggaagttgagagaccatcaaactctgaggcacatgaaactgatactgctataagttacaaggaaaaccatctagcagcttcatcagtaccagatcaaaaactgaatcaacccagtgcagaaaagacaaaagatgcagcaattcagacaaccccttcttgtaacagttttgatgggaaacaccaagatcataatttatctgactccaaagttgaagaatgtgtgcaaacttcaaataacaacatatcaactcaacactcatgcttaagttcacaagattctgtaaatacctcaagggaattcaggagtcaaggcaccctaattatacattcagaagatccgcttaccgtaaaagatccaatttgtgcacatggtaatgatgatcttttgcctcctgtagataggattgacaaaaattccactgcttcttacctaaagaattacccactttatagacaggactacaatcccaagccaaaaccttcaaatgaaattacacgagagtatatacccaaaattggcatgactacttataaaatagtgcctcccaaatccttggaaatatcgaaagactggcaatcagaaaccatagagtataaagatgatcaggacatgcatgctttagggaaaaagcacactcatgagaatgtgaaagaaactgccatccaaacagaagattctgctatttctgaaagcccagaagagccactgccaaaccttaaaccgaagcctaacctgagaacagagcatcaagtgcccagttctgtgagctcacctgatgatgccatggttagtcctctgaaacctgctcccaaaatgacaagagacactggcacagctccttttgcaccaaatttggaagaaataaacaatattttggaatcaaaatttaaatctcgggcttcaaatgcccaggccaaacccagctctttttttttgcagatgcagaagagagtatcgggtcactatgtgacatctgcagctgccaagagtgtccatgctgcccctaatcctgctccaaaagaactgacaaataaagaggcagaaagggatatgctgccttctccggagcagactctttctcccttaagtaaaatgcctcactctgttccacaaccccttgttgaaaaaactgatgatgatgtcatcggtcaggctcctgctgaagcctcccctcctcccatagctccaaaacctgtgacaattcctgctagtcaggtatccacacaaaatctgaagactttgaaaacttttggtgccccacgaccatactcaagttctggtccttcaccgtttgctcttgctgtagtgaaaaggtcacagtctttcagtaaagagcgcaccgagtcacctagtgccagtgcattggtccaacctccagccaacacagaggaagggaagactcattctgtaaataaatttgtggacatcccacagcttggtgtgtctgataaggaaaataactctgcacataatgaacagaattcccaaataccaactccaactgatggcccatcattcactgttatgagacaaagttctttaacattccaaagctctgacccagaacagatgcgacagagtttgctgactgcaatccgttcgggagaggctgctgccaaattgaaaagggttaccattccatcaaatacaatatctgtgaatggaaggtcaagactcagccattccatgtcccctgatgcccaggacggccattaaatgttaccctgccacaccactgcacttcacttccacttcaga

SEQ ID NO: 98418 - DNA, 4749 bp, Artificial Sequence
  derived and/or modified sequence
cacttatgtgcggccgtgctgcagaggcggcggcgagctcccggactccgggcagggaaatggggcaggcagtgacgcgccgcctgggagctggagcccgcgcagcgccccgcagggcgatggacggccgaaccccgcgcccgcaggacgccccagccaggagaaaaccaaaagccaaggcaccacttcctccagctgagaccaaatatactgatgtctcttcagctgctgattctgtagaatccactgctttcatcatggaacagaaagaaaacatgatagataaagacgttgaactctcagtggtcctacctggggatattatcaaatctactactgttcatggcagtaaacctatgatggacttgttgatattcctttgtgcacagtatcacttaaatccatcaagttacacaatcgatctgttgtcagctgaacagaaccacattaaatttaagccaaacacaccaataggaatgttggaggtagagaaggtaattttaaagccaaaaatgttggataagaaaaaacctacacctataataccagagaaaactgtgagagtagtgattaattttaagaaaacacagaagaccatagtgagagtgagtccacatgcatcgcttcaagagcttgcccctattatatgtagcaaatgtgagtttgatccgttgcatacactattgttgaaagattatcaatcgcaggagcctcttgacttgacaaaatctcttaatgacctgggactaagagaattatatgcgatggatgtcaacagagagtcctgccaaatatcacaaaacctagatattatgaaggagaaagaaaataaagggtttttcagtttttttcaacgcagtaagaaaaagcgagaccaaactgcaagtgcccctgcaacccctctagtaaataagcaccgcccaacttttacaaggtccaataccatttccaaaccatatatttccaacaccctgccgtcggatgcacccaagaagaggcgggctccactgcccccgatgccagcatctcagagtgtcccccaagaccttgcacacatccaggagaggcctgcttcttgtatagtgaaatccatgagcgtggatgagacagataagagtccctgtgaagcaggaagagtgagggcaggttcactgcagctcagcagcatgtctgcagggaattcatctttgagaaggacaaagcgaaaagcaccttccccaccctccaaaatacccccgcatcaaagtgatgaaaatagtcgtgtgactgccttacagccagtagatggagttcctccagacagtgcttcagaagcaaactctcctgaggagctatccagcccagaaacctttcaccctgggctttccagtcaggagcagtgcactgcgcccaaactgatggaggaaacctctgtctttgagtgccctgggacacctgaggcagccataacatcattgacatctggaataagctctgattatagccttgaagagatagatgaaaaggaagaactgagtgaagtgcctaaagttgaagctgaaaatatttctccgaagtcacaagatattccttttgtatctactgatataataaatacactgaaaaatgatcctgactcagcccttggcaatggtagtggagagttctcacaaaactccatggaagaaaaacaagaaactaaaagcacagatggacaagaaccacacagtgtagtatatgatacaagcaatggaaagaaggtagttgacagtataagaaacttgaagtcgttgggcccaaaccaagagaatgttcaaaatgaaataattgtctatccagagaacacagaagacaatatgaaaaatggagtgaagaaaacagaaatcaatgtagaaggtgttgccaaaaataacaacattgatatggaagttgagagaccatcaaactctgaggcacatgaaactgatactgctataagttacaaggaaaaccatctagcagcttcatcagtaccagatcaaaaactgaatcaacccagtgcagaaaagacaaaagatgcagcaattcagacaaccccttcttgtaacagttttgatgggaaacaccaagatcataatttatctgactccaaagttgaagaatgtgtgcaaacttcaaataacaacatatcaactcaacactcatgcttaagttcacaagattctgtaaatacctcaagggaattcaggagtcaaggcaccctaattatacattcagaagatccgcttaccgtaaaagatccaatttgtgcacatggtaatgatgatcttttgcctcctgtagataggattgacaaaaattccactgcttcttacctaaagaattacccactttatagacaggactacaatcccaagccaaaaccttcaaatgaaattacacgagagtatatacccaaaattggcatgactacttataaaatagtgcctcccaaatccttggaaatatcgaaagactggcaatcagaaaccatagagtataaagatgatcaggacatgcatgctttagggaaaaagcacactcatgagaatgtgaaagaaactgccatccaaacagaagattctgctatttctgaaagcccagaagagccactgccaaaccttaaaccgaagcctaacctgagaacagagcatcaagtgcccagttctgtgagctcacctgatgatgccatggttagtcctctgaaacctgctcccaaaatgacaagagacactggcacagctccttttgcaccaaatttggaagaaataaacaatattttggaatcaaaatttaaatctcgggcttcaaatgcccaggccaaacccagctctttttttttgcagatgcagaagagagtatcgggtcactatgtgacatctgcagctgccaagagtgtccatgctgcccctaatcctgctccaaaagaactgacaaataaagaggcagaaagggatatgctgccttctccggagcagactctttctcccttaagtaaaatgcctcactctgttccacaaccccttgttgaaaaaactgatgatgatgtcatcggtcaggctcctgctgaagcctcccctcctcccatagctccaaaacctgtgacaattcctgctagtcaggtatccacacaaaatctgaagactttgaaaacttttggtgccccacgaccatactcaagttctggtccttcaccgtttgctcttgctgtagtgaaaaggtcacagtctttcagtaaagagcgcaccgagtcacctagtgccagtgcattggtccaacctccagccaacacagaggaagggaagactcattctgtaaataaatttgtggacatcccacagcttggtgtgtctgataaggaaaataactctgcacataatgaacagaattcccaaataccaactccaactgatggcccatcattcactgttatgagacaaagttctttaacattccaaagctctgacccagaacagatgcgacagagtttgctgactgcaatccgttcgggagaggctgctgccaaattgaaaagggttaccattccatcaaatacaatatctgtgaatggaaggtcaagactcagccattccatgtcccctgatgcccaggacggccattaaatgttaccctgccacaccactgcacttcacttccacttcagaccaacttcatactaatggaacattttggcaaatgtatattcagatgtacactaatatattatctattaaaatattagaatttgtgttgtggcttttaatgccagaagaaaagttaccagaatttataatttatagtaattttttgatcttttttttgccttaagagttgaatatgctgctttagaactttaaaacaaggtgtaaatgattttcattttttacaaatgaaaaataattcctttgtattgatttcacttaccagcacattctctacaatggtgacttagacaaaagtataagattcatagactttatatttgtatgacatacaactaggacaaacatagatatgacatttgctgcctcagtgtagcaattggaaatatttataagttatatgaaagcctgttttgggctgaaagaatgatttagaaaactagtgataccaaataagtatattcagttcaataattattttcaatgatgaatcacttagtgtgaaagacttgccttgtgtattctttatgtaattacaaatcactgtcaattttatgggaagctcatagtattttaatattttattaacatggaactcttgtttttttaatctttagaacttaaattctacaagaattttaaatattttctgtatataattatgacattgtcacacagaaattacacattttatgtgccagaagccttaaacatctttctgtgaaaatgctgatatattgtgacagttatttcacatttgatatgtagagaggaataggggttagtttatgtttatattgaaaaactttaaagactatttggaagttccagaaattctggttttaattcaagtaaaatgataaaatagtcattatatagttcagatgctaatattctaagtaataatatatatttacattgaagctaaaactgttaagcaaaacaatgcccatttgtcggcttacagctcttccggagtctagagcctgttggtgttctgtccctactttaagaatttaattgctcacttattctgaaagctttgttcaaacaagatgatattaaatttgttttcactaaaactactggg

SEQ ID NO: 98419 - DNA, 3702 bp, Artificial Sequence
  derived and/or modified sequence
atgcctcctagttggagcccgttgatgtgtgggcgagctgcagaggccgccgcaagctctagaactccaggcagggagatggggcaggctgttacacggagacttggtgccggggcacgggctgcacccaggcgagcaatggatggaagaacccctcggccccaggacgccccagcgcgcagagaaattgccggctcctggagaaagcctaaagctaaagcaccactcccgcctgctgagactaaatacactgatgttagctctgcagcagactctgtcgagtcgacagcttttatcatggagcaaaaagagaacatgatcgacaaagacgtggaattatccgtcgtgctgccaggcgacatcatcaaatcaaccactgtgcacggctctaaaccaatgatggatttgctgatctttctttgtgcacaataccatctcaacccatcatcctatacaatcgatctgctgtccgcagagcagaaccatatcaagttcaagcccaacacaccaataggaatgctggaagtggagaaagtgattctcaaacctaaaatgctggacaaaaagaaaccaaccccaatcattcctgagaagaccgtgagggtggttataaatttcaagaagacacagaaaactatcgttcgagtcagtccgcacgcaagcctgcaggaattggctcctatcatctgctctaagtgcgaatttgacccactgcacactctgctgctgaaggactaccaaagccaggaacccctggacctgacgaaatctctcaatgatttgggtctacgcgagctgtacgctatggacgtgaaccgagccacttcagtaaccgtattctccaagtcgtcattacaagagagctgccaaatctcacagaatttggacatcatgaaagagaaagagaacaagggattctttagcttttttcagcgaagcaaaaagaagagggatcaaaccgcctccgctcccgctaccccactcgtgaacaagcatcgacccaccttcacacggtctaacaccatctctaagccttatatctctaatactctgccctccgacgctccgaaaaagaggcgcgctcctctcccccccatgcctgcctcgcaatccgtgcctcaggacctggcacatatacaggagcggccggctagttgcatcgtgaaatccatgtccgttgatgaaacagacaagtccccttgcgaggcagggagggtcagggccggttctctccagctctcatccatgagtgcggggaactcatcactgaggcgaacaaaacgaaaggccccgtcaccaccctctaagatacctcctcaccagagcgacgaaaactcgagagtcactgccctgcagccagtggacggggtgccacccgactcagcctcagaggctaactcccccgaggaactgagttctccagaaacctttcacccaggtctcagtagccaagagcagtgcaccgccccgaagctcatggaggagacgtccgtgtttgagtgtccaggcacgccggaggctgccatcacatcccttacaagcggaatctcatccgactactctctggaggaaatcgacgaaaaggaagaactgagcgaggtgcctaaagttgaagcagaaaacatcagtccaaagtctcaggacataccatttgtatcaaccgatattatcaacacgttgaagaacgatcctgactccgctctgggaaatggcagcggggaatttagccagaactccatggaggagaaacaggagaccaagtctaccgatgggcaggagccccatagtgtcgtgtacgacacatctaacggtaagaaggtcgtggactccatcaggaatctcaagagcctcggcccgaatcaggagaacgttgttcagaatgagatcatcgtgtaccccgaaaataccgaagataatatgaaaaatggggtgaagaaaaccgagattaatgtcgagggagttgccaagaacaataacatcgacatggaggtcgaaagaccgtctaattctgaagcccatgagacagacaccgctatctcttacaaggagaaccatttagccgctagcagcgtaccggaccagaaactgaatcagccttccgcagagaagacaaaggatgccgccatacagactacaccttcctgtaattcgttcgacggcaagcaccaggatcataacctgagtgacagcaaagtcgaggagtgtgtccagacaagtaacaataacatcagtactcaacacagctgcttgtcatctcaggattctgtaaacacctccagagaatttcgctcgcaagggaccctcattattcactcggaggaccccttgacggttaaagatccgatctgtgcgcatgggaacgatgacctcctgccaccggtagacagaattgacaagaatagcacagcctcatacctcaaaaattatccactttacaggcaggactacaacccaaagcctaaaccatctaatgagattacacgggagtacattccgaaaattggtatgaccacatataaaatcgtgccaccaaagtccctggaaattagcaaggattggcaaagtgaaacgatcgaatataaggatgaccaggatatgcatgcccttggaaagaagcatacacacgaaaacgtgaaagagacagcaatccagactgaagattcggctataagtgagtcccctgaagaaccattaccaaatctgaagcccaaacccaaccttaggaccgagcatcaggtcccgtctagtgtgtcttctcctgatgatgcgatggtatctcccctgaaacccgcaccaaagatgactagagatacaggcactgctccttttgctcccaatctggaggagatcaataacatcctggagtctaaattcaaatctcgtgccagcaatgcccaggcgaagccttcttccttttttctccaaatgcaaaagagggtcagcgggcactacgtcacgagcgccgccgccaagtccgtgcacgcggctcccaaccctgccccgaaagaactgaccaacaaagaagctgagcgagacatgctgccttcccccgagcaaactctttctcccttgtctaaaatgccacacagtgtcccgcaaccgctggtagaaaaaacagatgatgatgtaattgggcaagcccccgctgaagcctcaccccccccaatcgcacccaaacctgtgacaatcccagcatcacaggtttcgacacagaatcttaaaaccctcaagaccttcggggctcccaggccgtactctagcagtggaccatcacccttcgccctggccgtcgtgaagagatcccagtcttttagcaaagagagaacagagagtcccagtgcctccgcactggttcagcctcccgcgaataccgaggaggggaaaactcactccgtgaacaagtttgtggacattccacaacttggtgttagtgataaagaaaataattctgcacacaatgagcaaaattcccagatccctacacctaccgacggcccgtcatttacagtcatgcggcagagttccctgactttccaatcatcagaccccgagcagatgagacagagtttgctcactgccatccgtagcggagaagccgccgctaagctaaagcgcgttaccataccatccaacactatctctgttaatgggcggtcgcgactctcccacagcatgtcaccggacgcacaagatgggcattag

SEQ ID NO: 98420 - DNA, 3615 bp, Artificial Sequence
  derived and/or modified sequence
atgtgcggtagggccgcagaagctgcagccagttcaagaacacccggacgagagatgggacaggcagtgacccgtcggctgggagccggagctcgggccgcgccgcggagggccatggatgggagaacaccacgcccccaggacgcacccgcccgaaggaagccaaaggcaaaggcccccttgccccctgcagaaacgaagtatactgacgtatcgtcagcagctgacagcgtggagagtaccgcatttattatggagcaaaaagagaatatgatcgataaggatgtggagctgtcagttgttcttcctggcgatatcataaaatccactaccgttcacgggtcgaagcctatgatggacctgctcatcttcttatgtgcccagtatcaccttaatcccagtagttacactatcgatctgttgtctgctgagcagaaccacatcaaatttaagcccaatacaccaatcggtatgctcgaggtcgaaaaggtgattctcaagccaaaaatgctagataaaaagaaaccaacaccaattatacctgagaagacagttcgtgtggtcattaatttcaaaaagacccagaaaacaatcgtcagagtgtccccacacgctagtctgcaggaactggcacctataatctgtagcaaatgtgaatttgaccccttacacacattgctgctgaaggattaccaatcccaggagccactagatctgactaagagtctgaacgacctgggtctcagggagctatacgctatggatgtgaaccgggagtcctgccaaatctcacagaatctcgatatcatgaaggaaaaggagaataaagggttctttagtttcttccaacgcagcaaaaagaaacgggatcagaccgctagtgccccggctaccccccttgtgaacaagcatagacccacgtttacacgtagtaatacaatatctaaaccttacatatcaaacacacttcctagcgatgctcccaagaagcggagggcccctctgccccccatgcctgcgagccagagtgtgccacaggatctggctcacatccaggagcgccctgccagttgtattgtgaagtccatgtctgtcgatgaaactgacaagtcaccttgtgaggccgggcgggttagagccggctctctccagctctcatccatgtccgcgggaaactcctccctgagacgcacaaaaaggaaggccccaagtcccccctccaaaattccaccccatcagtctgatgagaattctagagtgacagcgctacagccggtggacggcgtaccgcccgattctgcctccgaagcaaactctcccgaagaattgtcatccccagagacattccaccctggattgtcatcccaggaacagtgcactgcgccaaagttaatggaggagacctctgtttttgagtgtccaggcacccccgaggccgccatcacaagcttgacttcgggcatttcctccgactactccctggaggaaattgatgaaaaggaagaactttctgaggttcccaaagtggaggctgagaatatcagccctaagagtcaggacatcccatttgtaagcacagatatcataaacacactgaagaatgatcctgatagcgcactgggcaatggatctggtgagtttagtcagaactccatggaagagaagcaggaaacaaaaagcaccgatgggcaagagccacactccgtcgtgtatgatacatcaaatgggaaaaaggtggtcgattccatacgcaaccttaaaagtctgggacccaatcaggaaaacgtccagaacgagatcatagtatatcctgagaacacagaagacaacatgaagaacggtgttaagaaaactgaaattaacgtggagggtgtggcaaaaaataacaatatcgacatggaggttgaacggccttctaattccgaggcccatgagactgataccgcgattagttacaaggagaaccacctagcagcctcaagcgttcccgaccaaaagttgaatcagccttctgccgaaaagaccaaggatgctgccatccaaaccacccccagctgcaacagttttgacgggaaacatcaagatcataatctgagcgattctaaagtagaagagtgcgtgcagaccagcaataataatatcagcacacagcactcatgtctctcttctcaggatagcgtgaatacttctagggaattccgtagtcaaggcacccttataattcattccgaggaccctctaaccgtaaaagaccctatctgcgcccatgggaacgatgacttgctgcctcctgtcgaccggatagataagaactcaacagcatcatacctgaagaattacccgctgtatcgtcaggattacaaccccaaacctaaaccctctaatgaaattacgcgggaatatataccgaaaattggaatgacgacctacaagattgtgccccctaagtcactggagatatcgaaggattggcagtcagaaacaatcgagtataaagacgaccaggatatgcatgctttaggcaagaaacatacacatgaaaacgtcaaagaaacggcaatccagacagaagatagtgctattagcgagtcaccagaggaacccctgccaaatttaaagcccaagccaaacctgagaacagaacaccaggtgcccagttctgtgtcttcaccagatgatgcaatggtttctcctctcaagccggcaccgaaaatgaccagggacacagggactgccccgttcgccccgaatcttgaggagatcaacaacatcctagagagtaaattcaaatcaagagcttccaatgcccaggcgaaaccttcctctttcttccttcagatgcagaagcgggtctctggacactatgtgacttccgcagcagcgaagtcagtgcatgcagcacctaatccagcgcccaaagagttgacaaacaaggaggccgaacgcgatatgctgccaagccccgaacagacactttctcctcttagcaagatgccacattcagtcccgcagcctttagtcgagaaaacggatgatgacgtcattggacaagcccccgccgaggcgtcgccgcctccaattgcccctaaaccagtaaccataccggctagccaggtctccacccagaacctgaagacccttaagaccttcggcgctcctagaccctatagcagcagcggaccttcacctttcgcattagccgtggttaagcgctctcagtctttttctaaggagcgcaccgaatctccctccgccagcgcactggttcagcctccagccaacactgaggagggcaagactcactcagttaataagttcgtggatattcctcagctcggtgtgagcgacaaggaaaacaattccgctcataacgaacagaattcccagataccaacgcccaccgacggcccatcttttacggtgatgcgccaatcctccctgacctttcagtcctccgatcctgagcagatgcgacagtctctcctcaccgctattcgctctggagaggccgctgccaaacttaaacgcgtgactataccctcaaatacaatcagcgtgaatggccgcagtcgtcttagccactccatgtctcccgatgcgcaggacgggcattag

SEQ ID NO: 98421 - DNA, 3702 bp, Artificial Sequence
  derived and/or modified sequence
atgccacccagctggagccccctgatgtgtggccgggctgctgaggccgccgccagcagcaggaccccaggccgggagatgggccaggccgtgacccggcggctgggcgctggggcccgggccgccccccggcgggccatggatggccgcaccccccggccccaggatgccccagcccggcgggagattgctggctcctggaggaagcccaaggccaaggcccccctgcccccagctgagaccaagtacacagatgtgagcagcgctgctgacagcgtggagagcacagccttcatcatggagcagaaggagaacatgattgacaaggatgtggagctgtctgtggtgctgcccggggacatcatcaagagcaccaccgtgcacggcagcaagcccatgatggacctgctgatcttcctgtgtgcccagtaccacctgaaccccagcagctacaccatcgacctgctgtctgctgagcagaaccacatcaagttcaagcccaacacccccatcggcatgctggaggtggagaaggtgatcctgaagcccaagatgctggacaagaagaagcccacccccatcatccctgagaagacagtgcgggtggtgatcaacttcaagaagacccagaagaccatcgtgcgggtgagcccccacgccagcctgcaggagctggcccccatcatctgcagcaaatgtgaatttgaccccctgcacaccctgctgctgaaggactaccagagccaggagcccctggacctgaccaagagcctgaatgacctgggcctgcgggagctgtatgccatggatgtgaacagagccacctctgtgaccgtcttcagcaagagcagcctgcaggagagctgccagatcagccagaacctggacatcatgaaggagaaggagaacaagggcttcttctccttcttccagaggagcaagaagaagagggaccagacagccagcgccccagccacccccctggtgaacaagcaccggcccaccttcaccaggagcaacaccatcagcaagccctacatcagcaacaccctgcccagtgatgcccccaagaagagaagagcccccctgccccccatgcctgccagccagagcgtgccccaggacctggcccacatccaggagaggcctgccagctgcatcgtgaagtccatgtctgtggatgaaacagacaagagcccctgtgaggccggccgggtgcgggccggcagcctgcagctgagctccatgtctgctggcaacagcagcctgcggaggaccaagaggaaggcccccagcccccccagcaagatccccccccaccagagtgatgagaacagccgggtgacagccctgcagcctgtggatggagtgcccccagattctgccagcgaggccaacagccctgaggagctgagcagccctgagaccttccaccctggcctgagcagccaggagcagtgcacagcccccaagctgatggaggagacctctgtgtttgagtgccccggcaccccagaggccgccatcaccagcctgaccagcggcatcagcagtgactacagcctggaggagattgatgagaaggaggagctgtctgaggtgcccaaggtggaggccgagaacatcagccccaagagccaggacatcccctttgtgtccacagacatcatcaacaccctgaagaatgaccctgacagcgccctgggcaatggcagcggggagttcagccagaacagcatggaggagaagcaggagaccaagagcacagatggccaggagccccacagcgtggtgtatgacaccagcaatggcaagaaggtggtggacagcatccggaacctgaagagcctgggccccaaccaggagaatgtggtgcagaatgagatcatcgtgtacccagagaacacagaggacaacatgaagaatggagtgaagaagacagagatcaacgtggagggcgtggccaagaacaacaacatcgacatggaggtggagcggcccagcaacagcgaggcccatgaaacagacacagccatctcctacaaggagaaccacctggccgccagctctgtgcctgaccagaagctgaaccagcccagcgctgagaagaccaaggatgctgccatccagaccacccccagctgcaacagctttgatggcaagcaccaggaccacaacctgagtgacagcaaggtggaggagtgtgtgcagaccagcaacaacaacatcagcacccagcacagctgcctgagcagccaggacagcgtgaacaccagccgggagttccgcagccagggcaccctcatcatccacagcgaggaccccctgactgtgaaggaccccatctgtgcccatggaaatgatgacctgctgccccctgtggacagaattgacaagaacagcacagccagctacctgaagaactaccccctgtaccggcaggactacaaccccaagcccaagcccagcaatgagatcacccgggagtacatccccaagattggcatgaccacctacaagatcgtgccccccaagagcctggagatcagcaaggactggcagagcgagaccatcgagtacaaggatgaccaggacatgcacgccctgggcaagaagcacacccatgaaaatgtgaaggagacagccatccagacagaggacagcgccatcagcgagagccctgaggagcccctgcccaacctgaagcccaagcccaacctgaggacagagcaccaggtgcccagctctgtgagcagcccagatgatgccatggtgagccccctgaagccagcccccaagatgacccgggacaccggcacagccccctttgcccccaacctggaggagatcaacaacatcctggagagcaagttcaagagccgggccagcaatgcccaggccaagcccagcagcttcttcctgcagatgcagaagagggtgtctggccactacgtgaccagcgctgctgccaagtctgtgcatgctgcccccaacccagcccccaaggagctgaccaacaaggaggccgagcgggacatgctgcccagccctgagcagaccctgagccccctgagcaagatgccccacagcgtgccccagcccctggtggagaagacagatgatgatgtgattggccaggccccagctgaggccagccccccacccatcgcccccaagcctgtgaccatcccagccagccaggtgtccacccagaacctgaagaccctgaagacctttggagccccccggccctacagcagcagcggccccagcccctttgccctggccgtggtgaagaggagccagagcttcagcaaggagaggacagagagccccagcgccagcgccctggtgcagcccccagccaacacagaggagggcaagacccacagcgtgaacaagtttgtggacatcccccagctgggcgtgtctgacaaggagaacaacagcgcccacaatgagcagaacagccagatccccacccccacagatggccccagcttcaccgtgatgaggcagagcagcctgaccttccagagcagtgaccctgagcagatgaggcagagcctgctgacagccatccgcagcggggaggccgccgccaagctgaagagggtgaccatccccagcaacaccatctctgtgaatggccgcagccggctgagccacagcatgagcccagatgcccaggacggccactag

SEQ ID NO: 98422 - DNA, 3615 bp, Artificial Sequence
  derived and/or modified sequence
atgtgtggccgggctgctgaggccgccgccagcagcaggaccccaggccgggagatgggccaggccgtgacccggcggctgggcgctggggcccgggccgccccccggcgggccatggatggccgcaccccccggccccaggatgccccagcccggaggaagcccaaggccaaggcccccctgcccccagctgagaccaagtacacagatgtgtcctctgctgctgacagcgtggagagcacagccttcatcatggagcagaaggagaacatgattgacaaggatgtggagctgtctgtggtgctgcccggggacatcatcaagagcaccaccgtgcacggcagcaagcccatgatggacctgctgatcttcctgtgtgcccagtaccacctgaaccccagcagctacaccatcgacctgctgtctgctgagcagaaccacatcaagttcaagcccaacacccccatcggcatgctggaggtggagaaggtgatcctgaagcccaagatgctggacaagaagaagcccacccccatcatccctgagaagacagtgcgggtggtgatcaacttcaagaagacccagaagaccatcgtgcgggtgagcccccacgccagcctgcaggagctggcccccatcatctgcagcaaatgtgaatttgaccccctgcacaccctgctgctgaaggactaccagagccaggagcccctggacctgaccaagagcctgaatgacctgggcctgcgggagctgtatgccatggatgtgaaccgggagagctgccagatcagccagaacctggacatcatgaaggagaaggagaacaagggcttcttctccttcttccagaggagcaagaagaagagggaccagacagccagcgccccagccacccccctggtgaacaagcaccggcccaccttcaccaggagcaacaccatcagcaagccctacatcagcaacaccctgcccagtgatgcccccaagaagagaagagcccccctgccccccatgcctgccagccagagcgtgccccaggacctggcccacatccaggagaggcctgccagctgcatcgtgaagtccatgtctgtggatgaaacagacaagagcccctgtgaggccggccgggtgcgggccggcagcctgcagctgagctccatgtctgctggcaacagcagcctgcggaggaccaagaggaaggcccccagcccccccagcaagatccccccccaccagagtgatgagaacagccgggtgacagccctgcagcctgtggatggagtgcccccagattctgccagcgaggccaacagccctgaggagctgagcagccctgagaccttccaccctggcctgagcagccaggagcagtgcacagcccccaagctgatggaggagacctctgtgtttgagtgccccggcaccccagaggccgccatcaccagcctgaccagcggcatcagcagtgactacagcctggaggagattgatgagaaggaggagctgtctgaggtgcccaaggtggaggccgagaacatcagccccaagagccaggacatcccctttgtgtccacagacatcatcaacaccctgaagaatgaccctgacagcgccctgggcaatggcagcggggagttcagccagaacagcatggaggagaagcaggagaccaagagcacagatggccaggagccccacagcgtggtgtatgacaccagcaatggcaagaaggtggtggacagcatccggaacctgaagagcctgggccccaaccaggagaatgtgcagaatgagatcatcgtgtacccagaaaatacagaggacaacatgaagaatggagtgaagaagacagagatcaacgtggagggcgtggccaagaacaacaacatcgacatggaggtggagcggcccagcaacagcgaggcccacgagacagacacagccatctcctacaaggagaaccacctggccgccagctctgtgcctgaccagaagctgaaccagcccagcgctgagaagaccaaggatgctgccatccagaccacccccagctgcaacagctttgatggcaagcaccaggaccacaacctgagtgacagcaaggtggaggagtgtgtgcagaccagcaacaacaacatcagcacccagcacagctgcctgagcagccaggacagcgtgaacaccagccgggagttccgcagccagggcaccctcatcatccacagcgaggaccccctgactgtgaaggaccccatctgtgcccacggcaatgatgacctgctgccccctgtggacagaattgacaagaacagcacagccagctacctgaagaactaccccctgtaccggcaggactacaaccccaagcccaagcccagcaatgagatcacccgggagtacatccccaagattggcatgaccacctacaagatcgtgccccccaagagcctggagatcagcaaggactggcagagcgagaccatcgagtacaaggatgaccaggacatgcacgccctgggcaagaagcacacccatgaaaatgtgaaggagacagccatccagacagaagattctgccatcagcgagagccctgaggagcccctgcccaacctgaagcccaagcccaacctgaggacagagcaccaggtgcccagctctgtgagcagcccagatgatgccatggtgagccccctgaagccagcccccaagatgacccgggacacaggaacagccccctttgcccccaacctggaggagatcaacaacatcctggagagcaagttcaagagccgggccagcaatgcccaggccaagcccagcagcttcttcctgcagatgcagaagagggtgtctggccactacgtgaccagcgctgctgccaagtctgtgcacgccgcccccaacccagcccccaaggagctgaccaacaaggaggccgagcgggacatgctgcccagccctgagcagaccctgagccccctgagcaagatgccccacagcgtgccccagcccctggtggagaagacagatgatgatgtgattggccaggccccagctgaggccagccccccacccatcgcccccaagcctgtgaccatcccagccagccaggtgtccacccagaacctgaagaccctgaagaccttcggggccccccggccctacagcagcagcggccccagcccctttgccctggccgtggtgaagaggagccagagcttcagcaaggagaggacagagagccccagcgccagcgccctggtgcagcccccagccaacacagaggagggcaagacccacagcgtgaacaagtttgtggacatcccccagctgggcgtgtctgacaaggagaacaacagcgcccacaatgagcagaacagccagatccccacccccacagatggccccagcttcaccgtgatgaggcagagcagcctgaccttccagagcagtgaccctgagcagatgaggcagagcctgctgacagccatccgctctggagaggccgccgccaagctgaagagggtgaccatccccagcaacaccatctctgtgaatggccgcagccggctgagccacagcatgagcccagatgcccaggacggccactag

SEQ ID NO: 98423 - DNA, 3702 bp, Artificial Sequence
  derived and/or modified sequence
atgccccccagctggagccccctgatgtgcggccgggccgccgaggctgcggcaagctcaaggacaccaggtcgtgagatgggtcaagcagtgacccgacgactgggtgccggcgccagagctgcccctcgccgcgccatggatggacgaacacctcggccccaagatgcccctgctaggcgggagattgccggttcgtggcgcaaaccaaaggccaaagcccctctccctccagctgagactaaatacaccgacgtgtccagtgctgccgatagcgtcgagagtacagcgttcatcatggagcagaaggagaacatgatcgacaaggatgtcgaactgtcagtggtgttacctggggatatcatcaaatccactacagttcatggatcaaaacctatgatggacctgctgatcttcctgtgcgcccagtaccatctcaaccccagtagctacaccattgatctcttatccgctgaacagaaccatatcaagttcaagcccaacacgcctattgggatgctggaagttgagaaggttatactgaaaccaaagatgttagataaaaagaaacccacaccaattatcccagagaagacagtcagggtggttattaactttaagaagacccaaaagacgatcgtgcgggtatcacctcacgcatcattacaggaactggcccccatcatatgtagtaagtgtgagtttgaccctctccatactttgctgttgaaagactatcagtcgcaggagcctctggacctaacgaaatcgctaaacgacttaggcttacgggagctgtatgctatggatgtgaatcgcgcgacctctgttactgtattttcgaaaagcagtctccaagaaagctgccagatcagtcagaacctggacatcatgaaagaaaaggaaaataagggtttttttagcttcttccaacggtccaagaagaagagagatcagacggcttctgcacctgccactccactggttaataaacaccgccctaccttcactcggagcaatacaatctccaaaccctacatttctaacactcttccaagcgacgcccctaagaagaggagggctcccctacccccgatgcctgcatctcagagcgttcctcaggatttagcccacattcaggagagaccggctagctgcatcgtcaaaagcatgtcagtcgacgagacggacaagagcccctgtgaggccggcagggtcagggctggttccctgcagctgagctctatgtccgcgggcaatagttcacttagaagaactaagagaaaggccccctcccccccaagcaaaatccctcctcatcagtcagacgaaaacagcagggtaaccgcactgcagccagtcgatggagttccacccgattctgcaagtgaagctaacagtccagaagaattgtcctcacctgagacatttcacccagggcttagctcacaagagcagtgtacagctccgaagctgatggaagagaccagcgtgttcgagtgccccggcactccagaggccgctatcacctccttgacatctggcatcagttcagattactcattggaagaaattgatgaaaaagaagaactgtctgaagtgccaaaagtagaggccgaaaacataagtcctaagtcccaggacatccctttcgtgagtactgatatcattaacactcttaagaacgatcccgattcagctttgggaaatggatcaggtgaattcagccagaacagcatggaggaaaagcaggaaaccaagagcaccgacggacaggagccccatagcgttgtctacgatacctccaacggtaaaaaggtggtcgactctatcaggaatttaaaatcactcggtcccaatcaggagaatgtagtccagaatgaaatcattgtgtacccagagaatacggaagacaacatgaagaacggcgtcaagaagacagaaattaatgtggagggtgtggccaagaacaataatatcgatatggaggtcgagaggccctccaattcagaagctcacgaaacggatactgccatcagctataaggagaatcatctggctgcgagctccgtgcctgatcagaagctaaatcagcccagtgccgagaagactaaagacgccgctatacagacaacaccctcttgtaactcctttgacggcaagcatcaggaccataacttatctgactctaaggtcgaggagtgcgtccagacttctaacaataatatctccacccaacactcctgcctgtcctcccaggactctgtcaatacgtcccgggagttccgctctcagggcacacttattatccacagcgaggaccccttaacagtcaaagacccgatttgcgcccatgggaacgatgacttactcccaccagtagatcgaatagacaaaaattctaccgcttcctacctaaaaaattaccccctgtacaggcaggattacaatcctaaacccaaacctagtaatgaaattacgcgggaatacatacccaagattgggatgacaacctacaaaatagtcccccccaagagcctagagatctctaaagactggcaatccgaaaccatagaatacaaggacgatcaggacatgcacgctctcggtaaaaagcacactcatgagaacgtgaaagagacagccattcagacagaagactccgccattagtgagtcccccgaagagcctcttcccaacctcaagcccaaacccaatcttagaactgagcaccaggtgccttccagcgttagtagcccggacgatgccatggtttctcctctcaaacctgctcccaagatgaccagagataccggaaccgccccgttcgcccccaatctcgaagagataaataatattttggagagcaaatttaaatcccgggcttctaacgcccaggcaaagccaagcagttttttcctgcagatgcagaagagagtgtccggtcattatgttacatctgccgcggccaagtccgtacatgcggcccctaacccagctccgaaggaactgactaacaaagaagccgaaagggacatgctcccaagcccggagcagacgcttagccccctttccaaaatgccccattcagtgcctcagcctttggtggaaaagactgatgatgatgtgatcggccaagcgcccgcagaggcatcaccacctcccattgcccccaagcccgtgacgatccccgctagtcaggtttcaacccagaacctaaagacactgaaaacctttggagcaccacgcccgtattcaagttcaggacctagcccctttgccttggctgtcgtgaaaaggtctcagagctttagcaaagagaggaccgaatctccaagcgcaagtgctctggtgcagccacctgctaatactgaggaagggaaaacacacagcgttaacaaattcgtagacattccgcagttaggggtgtctgacaaagagaacaactcagcgcacaatgagcagaattctcagattcccacccctactgacggcccgagcttcactgtgatgcggcagagttcactgacattccaaagctctgatcctgaacagatgcgacagtccctgctcacagcgatcagaagtggggaggcggccgccaagctcaagagggtgactattcccagtaatacaatcagcgtgaatggacggtctcgcctgtcccacagcatgagccctgacgctcaggatgggcactag

SEQ ID NO: 98424 - DNA, 3615 bp, Artificial Sequence
  derived and/or modified sequence
atgtgcggccgggccgccgaggccgccgccagcagccggacccccggccgcgagatgggccaggctgtcacccgccggctgggtgcaggggcccgtgcagcgcctcggagggctatggatggccgcacccctcgccctcaagacgcccctgcacggaggaagccaaaagctaaagcccccctgccgcccgcagaaaccaaatacaccgatgtatccagtgctgccgatagtgttgaaagcaccgcctttattatggaacagaaagaaaatatgatcgataaggatgtcgaactctcagtcgtgctacctggggatattataaaatccacaactgtccacggtagtaaaccaatgatggatctgctaatcttcttgtgcgcgcagtatcatctcaatccgtccagctacactatagacctcctgagtgctgagcagaaccatatcaagtttaaaccaaatactcctatagggatgctcgaagtggaaaaggtcatcctgaaaccaaagatgctggataaaaaaaagcccacaccaattatcccagaaaaaactgtacgcgtggtgatcaactttaagaaaacccagaaaacaattgtaagggtatctccccacgccagcctacaagaactggcgccaatcatctgttcaaaatgtgaattcgatccattgcacaccttgcttctaaaagactaccagtcacaggagccgctcgacctcacaaagagccttaacgacttgggactcagggagctgtacgcaatggacgtcaaccgggaatcctgccaaattagtcagaacttggacattatgaaagagaaggagaataagggatttttctcattctttcagcgctctaaaaagaagcgtgaccagactgcttcagcccccgccacaccgctggtgaataagcaccgcccaacctttactagaagcaacaccataagcaagccgtacatctccaatactcttccttctgacgcccccaagaaacgaagggcgccactgccccccatgcctgcatcacaaagcgtcccccaagacctggcccatatccaggaacgaccggcctcctgcatagtcaagtcaatgagcgtggacgagaccgacaaatctccatgcgaggccgggagagtcagagctgggtccctccaattgagttccatgtcagcaggaaattcatcgctgaggaggaccaagaggaaggctcccagcccaccttccaagattcccccccatcaatctgatgagaatagtcgtgtcaccgccctgcaaccagtggatggggtcccccctgattctgcaagtgaggccaactcccccgaagaactcagcagcccagagacctttcatccaggactgtcgagccaggagcagtgcactgcaccaaagcttatggaagaaacctcagttttcgagtgtcccggaacccccgaggcagccatcacttccctgacctctggaatctcaagtgactatagtctggaggagatagatgaaaaagaggaactctctgaagtcccaaaagtggaggctgagaatatcagtccgaaatctcaggatatcccttttgtaagcaccgacattattaacactctcaaaaacgatccagattctgcactgggcaatggtagcggagagttttcgcaaaactctatggaggagaagcaggaaacgaagagcacagacggccaggagccccatagtgtggtgtatgataccagcaatggaaagaaggtggtggattccattagaaatctcaaatcgctgggaccgaatcaggagaatgttcagaacgagataatagtttacccggaaaatacagaggataatatgaagaacggcgtcaagaaaacagaaattaatgtcgagggagtggctaaaaataataacattgatatggaggtagaaagaccttctaacagtgaggcccacgaaactgataccgccattagctacaaggaaaaccacttggccgcttccagcgtacctgatcaaaaacttaatcagccatccgccgagaagactaaggacgccgctatacagaccactccgtcttgtaattcattcgatggaaagcaccaggatcataacttgtccgactccaaagtagaggagtgtgttcagacttccaacaacaacatatcaactcagcactcgtgcttgagctcccaggattcggtcaatacaagtcgtgagtttcgtagtcaaggaacgctgataatacacagcgaagatcctcttaccgtcaaggaccctatctgcgcgcatgggaatgacgacctccttccacccgtcgaccggattgataagaattctaccgcatcttatctgaaaaactatccactgtataggcaagactacaatcccaaacccaagccgtccaacgaaattacccgggaatacattcctaaaattggcatgacgacttataaaatcgtgcctccaaagtcccttgaaatatcaaaggactggcaatctgaaactatcgagtacaaggatgaccaggacatgcatgctctgggcaagaaacatacccacgaaaacgtgaaggagaccgccattcaaacagaagatagcgcgattagcgagtccccagaagaacctcttcccaacttgaaaccaaaaccgaacttaagaactgagcaccaagtcccatcgtcggtttcttctccagatgacgcaatggtgagccccctgaagccggcacccaagatgactagagacacaggcacagccccatttgcaccgaatctagaggaaatcaacaatattctcgaatcgaagttcaaatcccgggccagcaacgcacaggcgaagccctccagcttcttcctgcaaatgcagaagagggtgagtggccactacgtgacgagcgccgctgccaaatccgttcatgccgcgccgaaccctgcgccaaaagaactgacgaacaaggaagctgagcgagacatgctgccctccccggagcagacgttatcccctctgagcaaaatgccccactctgtgccgcagcctttagtggaaaagactgatgatgacgtgatcgggcaggcaccagctgaggcatcaccccctcccatagccccgaagcctgtcacaatcccagctagtcaggtgtccacacagaacctgaagacgctcaagacctttggcgccccccgcccgtattctagtagtggtccaagcccatttgcactggcagtagtcaaacgcagtcagtctttttctaaagagcgcaccgaatctccttccgctagtgccttagtccaaccaccagcaaatactgaggaaggaaagacccactccgtgaacaaatttgtggacatcccccagcttggggtgtctgacaaggagaacaatagtgcacataatgaacagaactcacaaattcccactcctacagacggcccttctttcaccgtgatgaggcagagctccctgactttccaatcctccgatccggaacagatgcgccagtccctgttaacagctatccgttccggagaagccgccgccaaacttaagcgggtgactattccgtctaacaccattagtgttaatgggaggtcaaggctttcacactctatgagtcctgatgctcaggatggtcactag

SEQ ID NO: 98425 - DNA, 3702 bp, Artificial Sequence
  derived and/or modified sequence
atgcctccatcttggtctcctttaatgtgtggcagagctgcagaggccgctgcttcaagcagaactcctgggagagaaatgggccaggcggtgacccgaagactgggagccggagcccgagcagctccccgaagagctatggacggcaggaccccaaggccccaggacgctcccgctcggagagagatcgccggaagttggcggaaaccaaaggcaaaggcaccgctgccgccagcagaaactaaatacacagacgtctcttctgcagctgacagcgtcgaaagcacagctttcatcatggagcagaaggagaatatgatagacaaggacgtcgagctgagcgtggtcctgcccggtgatatcatcaaatccacaacggtgcatggcagcaaacccatgatggacctgcttatctttctgtgtgcccagtaccacctgaaccctagctcctatacgatcgacctcttgtcggccgagcagaaccatattaaattcaagccaaacacacctataggaatgctcgaagtggaaaaagtgatcctgaaacccaagatgctagataagaaaaagcccaccccaataatcccagaaaaaaccgtgcgggtcgtcatcaattttaagaagacacaaaagaccatcgttcgcgtgtcaccacatgcgagccttcaggaattggcccctatcatttgctctaaatgcgaattcgatccgctccataccctactgctcaaggattatcagtcccaagaacccctagacctgactaaaagtttgaatgatttgggcctccgggaactgtatgccatggacgttaaccgcgctaccagtgttaccgtgttcagcaagtcgtccctgcaggaatcatgccagatctcccaaaacctcgatataatgaaggaaaaagagaacaaaggtttcttcagcttttttcaaagaagcaaaaaaaagagggaccagaccgcctcagctcccgctacccccctggttaataaacatcggccaacctttacaaggtcaaacacaatctccaagccttacatttctaacacccttcctagtgacgcccctaagaagcgacgggcaccactccccccaatgcccgcatcccaatccgtgcctcaggatctggcgcatatacaagaacggccagcatcttgcatcgtgaaaagcatgtccgtagacgaaacagacaagtcaccctgtgaagccggtagagtccgggcaggatccctgcagctgagttctatgtccgcaggaaattccagtctgcgcagaaccaaacgaaaagcaccgtcccccccttccaagatccccccacaccagagcgacgaaaatagtagagttacagctctccagccagtagatggagtgcctcctgatagcgcttccgaggcaaacagtccagaagaacttagcagccctgagactttccatcccggattgtccagccaggaacaatgcactgctcccaagctgatggaagagaccagcgtgtttgaatgcccagggacgccggaagcagccatcacctccctcacctcagggatctccagcgattactcgttagaagagatcgacgagaaagaagagcttagtgaggtacccaaggtggaggctgaaaacatcagtccaaagagtcaggatataccattcgtttctactgatattataaacactctgaagaacgatcccgattctgccctggggaatggctccggtgagttcagtcagaatagtatggaggagaagcaagagaccaagtcgacggacgggcaggaaccgcacagcgtcgtgtacgatacctcgaacggcaaaaaggtggtcgactccatcaggaatctgaagtcgctggggccaaatcaggaaaacgttgtgcagaatgaaattattgtgtaccccgagaataccgaagacaacatgaaaaatggcgtcaagaagactgagataaatgtggagggtgtggcaaagaataacaacattgatatggaggtcgagcgaccctcaaacagcgaggcccatgagactgacactgcgataagctataaggaaaaccacctcgctgccagttccgtgccagatcagaagctgaaccagcctagcgccgaaaaaacaaaagacgccgctatccagaccacaccaagctgcaactccttcgatgggaagcaccaggaccacaacttgtccgactccaaggtggaagagtgcgtgcagactagtaacaacaacatttcaacccaacatagctgtcttagctcacaagacagtgtgaacactagccgggagttcaggagccaaggtaccctgattatccactccgaggatcctttgacggtcaaagaccctatatgcgcccacggcaacgacgacttgttaccccctgtcgacagaattgataagaactctaccgccagttacctcaagaattatccgttgtaccgccaggactataaccctaaacccaagccatccaacgaaattacacgggagtatatccctaaaattggcatgaccacgtacaagatcgtgcctcctaaatctcttgagatttctaaagattggcaatctgagacaatcgagtataaagacgatcaagatatgcacgcattgggcaagaagcacacacatgagaacgtgaaggagacagctattcagacagaagacagcgctatctcggagtccccagaagagcctctgccgaacttgaagcccaagcccaacctgcgaactgagcatcaggtgccatcgagcgtgagctcccctgatgatgctatggtgtcgccactcaaacccgcacctaagatgacaagggacaccggtaccgcgccattcgcgcctaacttggaagaaatcaacaatatcctcgaatcaaaattcaagtcacgcgcaagtaacgcccaagcaaaaccttctagttttttcctgcaaatgcagaaacgtgtttccggtcattatgtgactagcgctgcggctaaaagcgtgcacgccgctcccaatcccgctccgaaagagctgaccaacaaagaagctgagcgtgacatgttgccctccccagaacagacactatctcctttgagcaagatgcctcattccgtgccccagcccctggtggaaaagacagacgacgacgttatcggtcaggcacccgctgaggcctcccccccacctatcgcacccaagcccgtgaccataccagcctcccaggtctcaacgcagaacttaaaaacactaaagacatttggagcaccccgtccgtactccagttcaggtccgagtcctttcgcgctggcggtcgtgaagagatcccagagctttagcaaggaacgcacagagagcccctctgcctctgctctggtccagcccccagccaataccgaggaaggtaaaacacattcggtgaacaaattcgttgatattcctcagctgggcgtctcagataaagagaacaatagcgcacacaacgagcagaacagccagatcccaactcccactgacggcccttcattcacagtgatgcgccaaagttcccttacatttcaaagcagtgaccccgaacagatgcgccagagtctactgaccgcaatcaggtcaggcgaggccgcagccaagcttaaaagggtgaccattcctagcaatacaatctccgttaacgggagaagccgcctgagccacagcatgtcgcccgacgctcaggatggtcactag

SEQ ID NO: 98426 - DNA, 3615 bp, Artificial Sequence
  derived and/or modified sequence
atgtgtggcagggctgccgaggcagctgctagctcaaggacccctggcagagagatgggccaggccgtgacaaggcgattgggagccggagccagagcagctcctaggcgggctatggatgggagaaccccaagaccccaggatgcccctgctcgacggaaaccaaaagccaaagccccactgccacctgccgagacaaagtacacagatgtaagttctgctgctgacagtgtcgagtctaccgccttcataatggagcagaaggagaacatgattgacaaagatgtggaactcagcgtggttctccccggtgacatcataaagtcaaccacagtgcatggttctaaaccaatgatggatctcctgattttcttgtgtgcccagtaccatttaaatccatcttcctatacaatcgacctcctcagtgcagaacagaaccacatcaaatttaagccaaacacccccattggaatgttggaggtggaaaaggtaatcctaaaaccaaaaatgctggacaagaagaagccaactcctattatcccagaaaagacggtccgcgtcgttatcaattttaaaaaaacacaaaaaactattgtaagggttagtccccacgcctcgttgcaggaactcgccccaatcatatgcagcaaatgtgagtttgaccctctgcacacattattactcaaagactaccaaagtcaggaacccctggatttaaccaaatcactgaatgacttggggctgcgcgaactgtatgccatggacgtgaaccgggagagttgtcagatcagccagaaccttgacattatgaaggaaaaggagaataagggatttttcagcttttttcagagatctaagaaaaaaagagatcagaccgcctctgccccagccacaccgcttgtgaataagcaccggcctacctttacgaggtccaataccataagcaagccctatatatccaacacgcttccatcagatgcgccaaaaaagagacgagccccactgccccctatgccagcctcgcagtctgtcccacaggaccttgctcacattcaggagagaccagctagttgcattgtgaagagcatgtccgtagacgagaccgacaagtcaccttgcgaggcgggacgcgtcagggctgggagcttacagctttcctccatgtctgctggcaactcttccttgcgaagaaccaaacgaaaggccccttcaccaccatccaaaataccccctcatcagtcagatgaaaattcccgggtgaccgcacttcagcccgttgacggcgtcccacccgatagcgcgtccgaggctaattcacctgaggagctcagctcacccgaaactttccaccctggtctgagttctcaagagcaatgcacggcccctaaattaatggaagagacctctgtgtttgaatgtcctgggacccctgaggctgccattactagtctgacttcagggatctcaagcgattactccttggaggagatcgatgagaaggaggagttgagtgaggtgcccaaagtggaagcggagaatatttcacctaagagccaggatataccttttgtttccaccgacatcattaataccctgaaaaatgatcccgatagcgcgctgggtaacggctccggggagttcagccagaattcaatggaagaaaaacaggagacaaagtcgaccgatggacaggagccccactctgtagtgtacgacacaagcaacggtaaaaaagtcgtagacagtattcggaatcttaagtctctgggtccaaaccaggaaaatgtgcagaatgagatcatcgtttacccagagaataccgaggacaatatgaaaaatggagtcaaaaaaacggaaatcaatgtcgagggcgtggctaagaataacaatatcgacatggaggttgagagaccctctaactccgaggcccacgagaccgacacagcaatttcctataaagagaaccacttggcagcctcttccgttcctgatcagaaattgaatcagccatcagccgagaaaacaaaggacgccgcaattcaaaccacacccagctgtaacagttttgatgggaaacaccaagatcacaatctgagcgactccaaagtggaggaatgtgtgcaaacatccaacaacaatatttctacccaacatagctgcttgtctagtcaagatagcgttaatacttcgagagaatttcggtcgcagggtactttgatcatccactctgaggacccactgaccgtgaaagacccgatctgcgcacacgggaatgatgatttactccctccagtcgataggatcgataagaattcaaccgcaagttatcttaaaaactatcccctttaccgccaggattataatcccaaacctaagccaagtaacgagataacaagagagtacatcccaaaaataggcatgacaacatataaaatagtgccacctaaaagcctggaaatatcaaaggattggcagagcgaaacgattgagtacaaggacgaccaggacatgcacgccctagggaagaaacatacgcatgagaacgttaaggagacagccatccagacggaggatagcgccattagtgaatcaccggaggaaccacttccaaacctaaagccaaagcctaacttgcggacagaacaccaagtcccttcttctgtttctagcccagacgatgccatggtctcccccctgaaaccagcaccaaaaatgacaagggacacaggaacagctccattcgcacccaacctcgaggagatcaataatatcctggagtcgaagtttaagagtagagcctccaatgcccaggccaaaccctcctccttcttcttgcagatgcaaaaacgggtctcaggacattacgtaacatcagccgctgcaaagtcggtccatgccgcacccaatcccgcaccgaaggaactaacgaataaggaagcagaacgcgatatgctgccgtcccccgaacagacgctgagccccctgagtaagatgccgcacagtgtgccccaacccctggtcgaaaaaacggatgacgatgtgatcggacaagcaccggctgaagcctcgccaccgcctattgcccctaagccagtaaccatccctgccagccaggtctctacacagaaccttaagaccttgaagacattcggagcccctaggccctatagctcaagcggccctagccctttcgcccttgctgtagtgaagagaagccagagcttctcaaaggagaggaccgagtccccgagtgcctctgcattagtgcagccacccgcaaatacagaagaaggaaaaacccattcagtcaacaagttcgtggacatcccccagctgggcgtgtccgacaaggaaaacaactcagcgcacaacgagcaaaacagccagattccaacacccaccgacggtccttcttttaccgtcatgcggcagagcagcctaacattccagtcctcagacccagaacagatgcgccaaagcctgctaacagccattcgatccggagaggctgctgcgaaactcaaaagagtgaccattccatccaataccattagcgttaatggtcgttctagactgagtcattccatgtcgcctgatgcccaggatggtcactag

SEQ ID NO: 98427 - protein, 1128 aa, Artificial Sequence
  derived and/or modified sequence
MDGRTPRPQDAPARRKPKAKAPLPPAETKYTDVSSAADSVESTAFIMEQKENMIDKDVELSVVLPGDIIKSTTVHGSKPMMDLLIFLCAQYHLNPSSYTIDLLSAEQNHIKFKPNTPIGMLEVEKVILKPKMLDKKKPTPIIPEKTVRVVINFKKTQKTIVRVSPHASLQELAPIICSKCEFDPLHTLLLKDYQSQEPLDLTKSLNDLGLRELYAMDVNRESCQISQNLDIMKEKENKGFFSFFQRSKKKRDQTASAPATPLVNKHRPTFTRSNTISKPYISNTLPSDAPKKRRAPLPPMPASQSVPQDLAHIQERPASCIVKSMSVDETDKSPCEAGRVRAGSLQLSSMSAGNSSLRRTKRKAPSPPSKIPPHQSDENSRVTALQPVDGVPPDSASEANSPEELSSPAGISSDYSLEEIDEKEELSEVPKVEAENISPKSQDIPFVSTDIINTLKNDPDSALGNGSGEFSQNSMEEKQETKSTDGQEPHSVVYDTSNGKKVVDSIRNLKSLGPNQENVVQNEIIVYPENTEDNMKNGVKKTEINVEGVAKNNNIDMEVERPSNSEAHETDTAISYKENHLAASSVPDQKLNQPSAEKTKDAAIQTTPSCNSFDGKHQDHNLSDSKVEECVQTSNNNISTQHSCLSSQDSVNTSREFRSQGTLIIHSEDPLTVKDPICAHGNDDLLPPVDRIDKNSTASYLKNYPLYRQDYNPKPKPSNEITREYIPKIGMTTYKIVPPKSLEISKDWQSETIEYKDDQDMHALGKKHTHENVKETAIQTEDSAISESPEEPLPNLKPKPNLRTEHQVPSSVSSPDDAMVSPLKPAPKMTRDTGTAPFAPNLEEINNILESKFKSRASNAQAKPSSFFLQMQKRVSGHYVTSAAAKSVHAAPNPAPKELTNKEAERDMLPSPEQTLSPLSKMPHSVPQPLVEKTDDDVIGQAPAEASPPPIAPKPVTIPASQVSTQNLKTLKTFGAPRPYSSSGPSPFALAVVKRSQSFSKERTESPSASALVQPPANTEEGKTHSVNKFVDIPQLGVSDKENNSAHNEQNSQIPTPTDGPSFTVMRQSSLTFQSSDPEQMRQSLLTAIRSGEAAAKLKRVTIPSNTISVNGRSRLSHSMSPDAQDGH

SEQ ID NO: 98428 - protein, 1166 aa, Artificial Sequence
  derived and/or modified sequence
MCGRAAEAAASSRTPGREMGQAVTRRLGAGARAAPRRAMDGRTPRPQDAPARRKPKAKAPLPPAETKYTDVSSAADSVESTAFIMEQKENMIDKDVELSVVLPGDIIKSTTVHGSKPMMDLLIFLCAQYHLNPSSYTIDLLSAEQNHIKFKPNTPIGMLEVEKVILKPKMLDKKKPTPIIPEKTVRVVINFKKTQKTIVRVSPHASLQELAPIICSKCEFDPLHTLLLKDYQSQEPLDLTKSLNDLGLRELYAMDVNRESCQISQNLDIMKEKENKGFFSFFQRSKKKRDQTASAPATPLVNKHRPTFTRSNTISKPYISNTLPSDAPKKRRAPLPPMPASQSVPQDLAHIQERPASCIVKSMSVDETDKSPCEAGRVRAGSLQLSSMSAGNSSLRRTKRKAPSPPSKIPPHQSDENSRVTALQPVDGVPPDSASEANSPEELSSPAGISSDYSLEEIDEKEELSEVPKVEAENISPKSQDIPFVSTDIINTLKNDPDSALGNGSGEFSQNSMEEKQETKSTDGQEPHSVVYDTSNGKKVVDSIRNLKSLGPNQENVVQNEIIVYPENTEDNMKNGVKKTEINVEGVAKNNNIDMEVERPSNSEAHETDTAISYKENHLAASSVPDQKLNQPSAEKTKDAAIQTTPSCNSFDGKHQDHNLSDSKVEECVQTSNNNISTQHSCLSSQDSVNTSREFRSQGTLIIHSEDPLTVKDPICAHGNDDLLPPVDRIDKNSTASYLKNYPLYRQDYNPKPKPSNEITREYIPKIGMTTYKIVPPKSLEISKDWQSETIEYKDDQDMHALGKKHTHENVKETAIQTEDSAISESPEEPLPNLKPKPNLRTEHQVPSSVSSPDDAMVSPLKPAPKMTRDTGTAPFAPNLEEINNILESKFKSRASNAQAKPSSFFLQMQKRVSGHYVTSAAAKSVHAAPNPAPKELTNKEAERDMLPSPEQTLSPLSKMPHSVPQPLVEKTDDDVIGQAPAEASPPPIAPKPVTIPASQVSTQNLKTLKTFGAPRPYSSSGPSPFALAVVKRSQSFSKERTESPSASALVQPPANTEEGKTHSVNKFVDIPQLGVSDKENNSAHNEQNSQIPTPTDGPSFTVMRQSSLTFQSSDPEQMRQSLLTAIRSGEAAAKLKRVTIPSNTISVNGRSRLSHSMSPDAQDGH

SEQ ID NO: 98429 - protein, 157 aa, Artificial Sequence
  derived and/or modified sequence
MDGRTPRPQDAPARRKPKAKAPLPPAETKYTDVSSAADSVESTAFIMEQKENMIDKDVELSVVLPGDIIKSTTVHGSKPMMDLLIFLCAQYHLNPSSYTIDLLSAEQNHIKFKPNTPIGMLEVEKVILKPKMLDKKKPTPIIPEKTVRVVINFKKTQ

SEQ ID NO: 98430 - DNA, 3387 bp, Artificial Sequence
  derived and/or modified sequence
atggacggcagaacccccagaccccaggacgcccccgccagaagaaagcccaaggccaaggcccccctgccccccgccgagaccaagtacaccgacgtgagcagcgccgccgacagcgtggagagcaccgccttcatcatggagcagaaggagaacatgatcgacaaggacgtggagctgagcgtggtgctgcccggcgacatcatcaagagcaccaccgtgcacggcagcaagcccatgatggacctgctgatcttcctgtgcgcccagtaccacctgaaccccagcagctacaccatcgacctgctgagcgccgagcagaaccacatcaagttcaagcccaacacccccatcggcatgctggaggtggagaaggtgatcctgaagcccaagatgctggacaagaagaagcccacccccatcatccccgagaagaccgtgagagtggtgatcaacttcaagaagacccagaagaccatcgtgagagtgagcccccacgccagcctgcaggagctggcccccatcatctgcagcaagtgcgagttcgaccccctgcacaccctgctgctgaaggactaccagagccaggagcccctggacctgaccaagagcctgaacgacctgggcctgagagagctgtacgccatggacgtgaacagagagagctgccagatcagccagaacctggacatcatgaaggagaaggagaacaagggcttcttcagcttcttccagagaagcaagaagaagagagaccagaccgccagcgcccccgccacccccctggtgaacaagcacagacccaccttcaccagaagcaacaccatcagcaagccctacatcagcaacaccctgcccagcgacgcccccaagaagagaagagcccccctgccccccatgcccgccagccagagcgtgccccaggacctggcccacatccaggagagacccgccagctgcatcgtgaagagcatgagcgtggacgagaccgacaagagcccctgcgaggccggcagagtgagagccggcagcctgcagctgagcagcatgagcgccggcaacagcagcctgagaagaaccaagagaaaggcccccagcccccccagcaagatccccccccaccagagcgacgagaacagcagagtgaccgccctgcagcccgtggacggcgtgccccccgacagcgccagcgaggccaacagccccgaggagctgagcagccccgccggcatcagcagcgactacagcctggaggagatcgacgagaaggaggagctgagcgaggtgcccaaggtggaggccgagaacatcagccccaagagccaggacatccccttcgtgagcaccgacatcatcaacaccctgaagaacgaccccgacagcgccctgggcaacggcagcggcgagttcagccagaacagcatggaggagaagcaggagaccaagagcaccgacggccaggagccccacagcgtggtgtacgacaccagcaacggcaagaaggtggtggacagcatcagaaacctgaagagcctgggccccaaccaggagaacgtggtgcagaacgagatcatcgtgtaccccgagaacaccgaggacaacatgaagaacggcgtgaagaagaccgagatcaacgtggagggcgtggccaagaacaacaacatcgacatggaggtggagagacccagcaacagcgaggcccacgagaccgacaccgccatcagctacaaggagaaccacctggccgccagcagcgtgcccgaccagaagctgaaccagcccagcgccgagaagaccaaggacgccgccatccagaccacccccagctgcaacagcttcgacggcaagcaccaggaccacaacctgagcgacagcaaggtggaggagtgcgtgcagaccagcaacaacaacatcagcacccagcacagctgcctgagcagccaggacagcgtgaacaccagcagagagttcagaagccagggcaccctgatcatccacagcgaggaccccctgaccgtgaaggaccccatctgcgcccacggcaacgacgacctgctgccccccgtggacagaatcgacaagaacagcaccgccagctacctgaagaactaccccctgtacagacaggactacaaccccaagcccaagcccagcaacgagatcaccagagagtacatccccaagatcggcatgaccacctacaagatcgtgccccccaagagcctggagatcagcaaggactggcagagcgagaccatcgagtacaaggacgaccaggacatgcacgccctgggcaagaagcacacccacgagaacgtgaaggagaccgccatccagaccgaggacagcgccatcagcgagagccccgaggagcccctgcccaacctgaagcccaagcccaacctgagaaccgagcaccaggtgcccagcagcgtgagcagccccgacgacgccatggtgagccccctgaagcccgcccccaagatgaccagagacaccggcaccgcccccttcgcccccaacctggaggagatcaacaacatcctggagagcaagttcaagagcagagccagcaacgcccaggccaagcccagcagcttcttcctgcagatgcagaagagagtgagcggccactacgtgaccagcgccgccgccaagagcgtgcacgccgcccccaaccccgcccccaaggagctgaccaacaaggaggccgagagagacatgctgcccagccccgagcagaccctgagccccctgagcaagatgccccacagcgtgccccagcccctggtggagaagaccgacgacgacgtgatcggccaggcccccgccgaggccagccccccccccatcgcccccaagcccgtgaccatccccgccagccaggtgagcacccagaacctgaagaccctgaagaccttcggcgcccccagaccctacagcagcagcggccccagccccttcgccctggccgtggtgaagagaagccagagcttcagcaaggagagaaccgagagccccagcgccagcgccctggtgcagccccccgccaacaccgaggagggcaagacccacagcgtgaacaagttcgtggacatcccccagctgggcgtgagcgacaaggagaacaacagcgcccacaacgagcagaacagccagatccccacccccaccgacggccccagcttcaccgtgatgagacagagcagcctgaccttccagagcagcgaccccgagcagatgagacagagcctgctgaccgccatcagaagcggcgaggccgccgccaagctgaagagagtgaccatccccagcaacaccatcagcgtgaacggcagaagcagactgagccacagcatgagccccgacgcccaggacggccactag

SEQ ID NO: 98431 - DNA, 3501 bp, Artificial Sequence
  derived and/or modified sequence
atgtgcggcagagccgccgaggccgccgccagcagcagaacccccggcagagagatgggccaggccgtgaccagaagactgggcgccggcgccagagccgcccccagaagagccatggacggcagaacccccagaccccaggacgcccccgccagaagaaagcccaaggccaaggcccccctgccccccgccgagaccaagtacaccgacgtgagcagcgccgccgacagcgtggagagcaccgccttcatcatggagcagaaggagaacatgatcgacaaggacgtggagctgagcgtggtgctgcccggcgacatcatcaagagcaccaccgtgcacggcagcaagcccatgatggacctgctgatcttcctgtgcgcccagtaccacctgaaccccagcagctacaccatcgacctgctgagcgccgagcagaaccacatcaagttcaagcccaacacccccatcggcatgctggaggtggagaaggtgatcctgaagcccaagatgctggacaagaagaagcccacccccatcatccccgagaagaccgtgagagtggtgatcaacttcaagaagacccagaagaccatcgtgagagtgagcccccacgccagcctgcaggagctggcccccatcatctgcagcaagtgcgagttcgaccccctgcacaccctgctgctgaaggactaccagagccaggagcccctggacctgaccaagagcctgaacgacctgggcctgagagagctgtacgccatggacgtgaacagagagagctgccagatcagccagaacctggacatcatgaaggagaaggagaacaagggcttcttcagcttcttccagagaagcaagaagaagagagaccagaccgccagcgcccccgccacccccctggtgaacaagcacagacccaccttcaccagaagcaacaccatcagcaagccctacatcagcaacaccctgcccagcgacgcccccaagaagagaagagcccccctgccccccatgcccgccagccagagcgtgccccaggacctggcccacatccaggagagacccgccagctgcatcgtgaagagcatgagcgtggacgagaccgacaagagcccctgcgaggccggcagagtgagagccggcagcctgcagctgagcagcatgagcgccggcaacagcagcctgagaagaaccaagagaaaggcccccagcccccccagcaagatccccccccaccagagcgacgagaacagcagagtgaccgccctgcagcccgtggacggcgtgccccccgacagcgccagcgaggccaacagccccgaggagctgagcagccccgccggcatcagcagcgactacagcctggaggagatcgacgagaaggaggagctgagcgaggtgcccaaggtggaggccgagaacatcagccccaagagccaggacatccccttcgtgagcaccgacatcatcaacaccctgaagaacgaccccgacagcgccctgggcaacggcagcggcgagttcagccagaacagcatggaggagaagcaggagaccaagagcaccgacggccaggagccccacagcgtggtgtacgacaccagcaacggcaagaaggtggtggacagcatcagaaacctgaagagcctgggccccaaccaggagaacgtggtgcagaacgagatcatcgtgtaccccgagaacaccgaggacaacatgaagaacggcgtgaagaagaccgagatcaacgtggagggcgtggccaagaacaacaacatcgacatggaggtggagagacccagcaacagcgaggcccacgagaccgacaccgccatcagctacaaggagaaccacctggccgccagcagcgtgcccgaccagaagctgaaccagcccagcgccgagaagaccaaggacgccgccatccagaccacccccagctgcaacagcttcgacggcaagcaccaggaccacaacctgagcgacagcaaggtggaggagtgcgtgcagaccagcaacaacaacatcagcacccagcacagctgcctgagcagccaggacagcgtgaacaccagcagagagttcagaagccagggcaccctgatcatccacagcgaggaccccctgaccgtgaaggaccccatctgcgcccacggcaacgacgacctgctgccccccgtggacagaatcgacaagaacagcaccgccagctacctgaagaactaccccctgtacagacaggactacaaccccaagcccaagcccagcaacgagatcaccagagagtacatccccaagatcggcatgaccacctacaagatcgtgccccccaagagcctggagatcagcaaggactggcagagcgagaccatcgagtacaaggacgaccaggacatgcacgccctgggcaagaagcacacccacgagaacgtgaaggagaccgccatccagaccgaggacagcgccatcagcgagagccccgaggagcccctgcccaacctgaagcccaagcccaacctgagaaccgagcaccaggtgcccagcagcgtgagcagccccgacgacgccatggtgagccccctgaagcccgcccccaagatgaccagagacaccggcaccgcccccttcgcccccaacctggaggagatcaacaacatcctggagagcaagttcaagagcagagccagcaacgcccaggccaagcccagcagcttcttcctgcagatgcagaagagagtgagcggccactacgtgaccagcgccgccgccaagagcgtgcacgccgcccccaaccccgcccccaaggagctgaccaacaaggaggccgagagagacatgctgcccagccccgagcagaccctgagccccctgagcaagatgccccacagcgtgccccagcccctggtggagaagaccgacgacgacgtgatcggccaggcccccgccgaggccagccccccccccatcgcccccaagcccgtgaccatccccgccagccaggtgagcacccagaacctgaagaccctgaagaccttcggcgcccccagaccctacagcagcagcggccccagccccttcgccctggccgtggtgaagagaagccagagcttcagcaaggagagaaccgagagccccagcgccagcgccctggtgcagccccccgccaacaccgaggagggcaagacccacagcgtgaacaagttcgtggacatcccccagctgggcgtgagcgacaaggagaacaacagcgcccacaacgagcagaacagccagatccccacccccaccgacggccccagcttcaccgtgatgagacagagcagcctgaccttccagagcagcgaccccgagcagatgagacagagcctgctgaccgccatcagaagcggcgaggccgccgccaagctgaagagagtgaccatccccagcaacaccatcagcgtgaacggcagaagcagactgagccacagcatgagccccgacgcccaggacggccactag

SEQ ID NO: 98432 - DNA, 9367 bp, Artificial Sequence
  derived and/or modified sequence
cggcggcggcgcccgcgggctgggagccggggcccgcaggtggaagcgcacccgggaggcgggccggccggggctggagcggctcgggcgggctcttgacgctcagccagcttcgctccggcctcgggaaggcgcgcgtcccgccctgacccgccggcctctcccaccccagcagtgacgcgccgcctgggagctggagcccgcgcagcgccccgcagggcgatggacggccgaaccccgcgcccgcaggacgccccagccaggagaaaaccaaaagccaaggcaccacttcctccagctgagaccaaatatactgatgtctcttcagctgctgattctgtagaatccactgctttcatcatggaacagaaagaaaacatgatagataaagacgttgaactctcagtggtcctacctggggatattatcaaatctactactgttcatggcagtaaacctatgatggacttgttgatattcctttgtgcacagtatcacttaaatccatcaagttacacaatcgatctgttgtcagctgaacagaaccacattaaatttaagccaaacacaccaataggaatgttggaggtagagaaggtaattttaaagccaaaaatgttggataagaaaaaacctacacctataataccagagaaaactgtgagagtagtgattaattttaagaaaacacagaagaccatagtgagagtgagtccacatgcatcgcttcaagagcttgcccctattatatgtagcaaatgtgagtttgatccgttgcatacactattgttgaaagattatcaatcgcaggagcctcttgacttgacaaaatctcttaatgacctgggactaagagaattatatgcgatggatgtcaacagagagtcctgccaaatatcacaaaacctagatattatgaaggagaaagaaaataaagggtttttcagtttttttcaacgcagtaagaaaaagcgagaccaaactgcaagtgcccctgcaacccctctagtaaataagcaccgcccaacttttacaaggtccaataccatttccaaaccatatatttccaacaccctgccgtcggatgcacccaagaagaggcgggctccactgcccccgatgccagcatctcagagtgtcccccaagaccttgcacacatccaggagaggcctgcttcttgtatagtgaaatccatgagcgtggatgagacagataagagtccctgtgaagcaggaagagtgagggcaggttcactgcagctcagcagcatgtctgcagggaattcatctttgagaaggacaaagcgaaaagcaccttccccaccctccaaaatacccccgcatcaaagtgatgaaaatagtcgtgtgactgccttacagccagtagatggagttcctccagacagtgcttcagaagcaaactctcctgaggagctatccagcccagctggaataagctctgattatagccttgaagagatagatgaaaaggaagaactgagtgaagtgcctaaagttgaagctgaaaatatttctccgaagtcacaagatattccttttgtatctactgatataataaatacactgaaaaatgatcctgactcagcccttggcaatggtagtggagagttctcacaaaactccatggaagaaaaacaagaaactaaaagcacagatggacaagaaccacacagtgtagtatatgatacaagcaatggaaagaaggtagttgacagtataagaaacttgaagtcgttgggcccaaaccaagagaatgtagttcaaaatgaaataattgtctatccagagaacacagaagacaatatgaaaaatggagtgaagaaaacagaaatcaatgtagaaggtgttgccaaaaataacaacattgatatggaagttgagagaccatcaaactctgaggcacatgaaactgatactgctataagttacaaggaaaaccatctagcagcttcatcagtaccagatcaaaaactgaatcaacccagtgcagaaaagacaaaagatgcagcaattcagacaaccccttcttgtaacagttttgatgggaaacaccaagatcataatttatctgactccaaagttgaagaatgtgtgcaaacttcaaataacaacatatcaactcaacactcatgcttaagttcacaagattctgtaaatacctcaagggaattcaggagtcaaggcaccctaattatacattcagaagatccgcttaccgtaaaagatccaatttgtgcacatggtaatgatgatcttttgcctcctgtagataggattgacaaaaattccactgcttcttacctaaagaattacccactttatagacaggactacaatcccaagccaaaaccttcaaatgaaattacacgagagtatatacccaaaattggcatgactacttataaaatagtgcctcccaaatccttggaaatatcgaaagactggcaatcagaaaccatagagtataaagatgatcaggacatgcatgctttagggaaaaagcacactcatgagaatgtgaaagaaactgccatccaaacagaagattctgctatttctgaaagcccagaagagccactgccaaaccttaaaccgaagcctaacctgagaacagagcatcaagtgcccagttctgtgagctcacctgatgatgccatggttagtcctctgaaacctgctcccaaaatgacaagagacactggcacagctccttttgcaccaaatttggaagaaataaacaatattttggaatcaaaatttaaatctcgggcttcaaatgcccaggccaaacccagctctttttttttgcagatgcagaagagagtatcgggtcactatgtgacatctgcagctgccaagagtgtccatgctgcccctaatcctgctccaaaagaactgacaaataaagaggcagaaagggatatgctgccttctccggagcagactctttctcccttaagtaaaatgcctcactctgttccacaaccccttgttgaaaaaactgatgatgatgtcatcggtcaggctcctgctgaagcctcccctcctcccatagctccaaaacctgtgacaattcctgctagtcaggtatccacacaaaatctgaagactttgaaaacttttggtgccccacgaccatactcaagttctggtccttcaccgtttgctcttgctgtagtgaaaaggtcacagtctttcagtaaagagcgcaccgagtcacctagtgccagtgcattggtccaacctccagccaacacagaggaagggaagactcattctgtaaataaatttgtggacatcccacagcttggtgtgtctgataaggaaaataactctgcacataatgaacagaattcccaaataccaactccaactgatggcccatcattcactgttatgagacaaagttctttaacattccaaagctctgacccagaacagatgcgacagagtttgctgactgcaatccgttcgggagaggctgctgccaaattgaaaagggttaccattccatcaaatacaatatctgtgaatggaaggtcaagactcagccattccatgtcccctgatgcccaggacggccattaaatgttaccctgccacaccactgcacttcacttccacttcagaccaacttcatactaatggaacattttggcaaatgtatattcagatgtacactaatatattatctattaaaatattagaatttgtgttgtggcttttaatgccagaagaaaagttaccagaatttataatttatagtaattttttgatcttttttttgccttaagagttgaatatgctgctttagaactttaaaacaaggtgtaaatgattttcattttttacaaatgaaaaataattcctttgtattgatttcacttaccagcacattctctacaatggtgacttagacaaaagtataagattcatagactttatatttgtatgacatacaactaggacaaacatagatatgacatttgctgcctcagtgtagcaattggaaatatttataagttatatgaaagcctgttttgggctgaaagaatgatttagaaaactagtgataccaaataagtatattcagttcaataattattttcaatgatgaatcacttagtgtgaaagacttgccttgtgtattctttatgtaattacaaatcactgtcaattttatgggaagctcatagtattttaatattttattaacatggaactcttgtttttttaatctttagaacttaaattctacaagaattttaaatattttctgtatataattatgacattgtcacacagaaattacacattttatgtgccagaagccttaaacatctttctgtgaaaatgctgatatattgtgacagttatttcacatttgatatgtagagaggaataggggttagtttatgtttatattgaaaaactttaaagactatttggaagttccagaaattctggttttaattcaagtaaaatgataaaatagtcattatatagttcagatgctaatattctaagtaataatatatatttacattgaagctaaaactgttaagcaaaacaatgcccatttgtcggcttacagctcttccggagtctagagcctgttggtgttctgtccctactttaagaatttaattgctcacttattctgaaagctttgttcaaacaagatgatattaaatttgttttcactaaaactactgggatatctgcctcttggggatttttttttcaatttaataaaagcaagttgtatatttggggtgctttttaaaatatatagtttgtgtcaaccagcatatttatttcccttacctgatgcatacatttctattagccagtgaacaaacaagaaatttgtaagatttaccatttatcagggatccctagtgtacatttaagccctggcattctgactccaaaatgcatggtctaagcatttaaaatgtttagcatagttcctgatacatggcatggccatcttaaatgctaaatgttgctgctgttttccttgaatcagttggagagaccctcatatatagatacttaagttatgttgttataagcaagtagagaaaggagtgaattttttttaaaaaattgtgttgtcataattatctacttataaaaatataaatttggatccctaatttaaaccttcatatattttgagttggattgaagacttaaagacaagcgacatgtaagatgttttcaatatattaatatataagaaaggcttaatttatgaagatatgaaagttcctacaactcatgataagtctacctaatagaaatatcagcacattattcttacaagaggaaattcaaaaggccaacaaacatggaaaaaaaatactcttcactgataatcagggaaatacaagttaaaaacatggaaaggtaccacatcaaattagcaaaaacggaagtttcaaaatagcaagtgttgtcaggaacatcaaacagtgggaactctactgttggtgggaaaatacactggcataactaccagttctgcaatatctagtaaaattaaagattccttaccatgttaccttaaataagtacttatgcacatgcataaggagacatctgcaaaaatgttcacggcagccttgtgtaaaacagcagaaaggggtcctaacccgtgctcagctttagtaatgcatatattcatatgatagacttccacacagcagtccaaatgaacaagctagagctatatatgtcagcatgaatacatctcaaaaacaagtgacaagagtgagtggtggaacaagtcgtgttttatgaaattagttacataaagtataaatataaaaaatgatactataaattatggctgtatatgtaggaaaaaaatttgctggtggttacctgtgggaaccaagaaagactgaattgagatttataagaggcatcaattgtgttcgtagtattttataaactgctgtttgaaaacaagtgcttattatattctaaattctagtatacttgtagtttataattataataaaataatgttttaaaggtcacataggatttagggggctatgtatataaaccattaatacatgtatgttctgaaaagttgccttatcgacaccattttaggagaacatgtgctatcctgtcaatggggaaagaaatttgtgacaagtagttttcactcatcatatcctaaaataacagcacaaggaagatacaggaatggtctagaaccaacttttgactttcatgtataatttttagcatctaggcattttgcttttccttctttcctccaatcaagttatttatttatataatattaaaattataattcagattacatatatatgatagagtataaaatacattctttttcatccccagcatcccactctcctctccaaagatagctgttaatattttgatatgaagccctatatagatgtatttatatgaagtacatgtgtgcaggtttgttgggggcttttgtgtgtgtgtgtgtgtgtgtgtgtgtgtgtgtgtatgtgtgtttcttaacatgaaaggaggtcacactctaatactatgtaacaacttgccttttataccagcagtgttctggaagagcttttctttttacacatacagatcgatcgtatttctgttagccattctattgtttcttgctgcggtacataatgttggctggagtgaagagattggggttcagatcacaagtctgccacttatgagtcatgggatcttgggcaaattactttctctatgcttcattttctcttctgaaaaatgaattaatatgaataaaaatgaaccttattttaaaaacggcaggcaattcatcttttaaagttacctgatgtcaatactataagtgaacaggtattatttgcctaatatactccctattctttgaggagtgacccttcttccgatttcacctcttcatgaactgccagatctggccttggccactaggcactggcaacagcatacacactctgtcatcttatccaagtccttgaaatgagaccaatctttgtcctgagacttagttacttataggtgcttaaaacccaaagcgtcccaattgatacaattatgtatgtgtctaattccagtttactttgtacccactaccagtagagaaaataagtatcaaagaactaagaatcaaactcatcatttttaaaatctactgattttgataactgacttgaaagaaaagaacttgcaattagaggtcatagtgaagatttccagggtcaaagtgatttctgaggttttagatgtaaaaatatctcctatttatttgctatttcagagttgacaacaagatttttatttgatccacatatttaaaaggtgtgcaaagattgctactttacaaaggtcacagaagcagaggagtctcagagtcccacatccaattactaatttgttcttccccatgactaaatgtagcaaatgatgaagaaactggtgctagatttcaagggataccagaataggaagttatttgttctgaatcttcagttggttttccttttctcttaaatgttaccactttcctgcaaatttccatccttaatatgttagactgttcatatagatacattgtgtttacaacaaggaaaaaatgccaccatgtgctcagaacttttttgacaggtattttgagaagagttgtggaacattctggtaatttgtagagatctgttggcatctctgcttcacaaactggaaaaaatcatttgtaagtcttgctaattacttttcttggagaagaaaaaaaatgctacagttgcaaacaaatgtatagttttcaaaaagaagcaacttttttgctccccagtttattcttagtttccagcccacgccttgcgatagcgataggcatagtgatggcctcaattctttctctcttgcatccataccttttgctgtgatagcagtgatggcctcagttctttccctctcttgcatccgtaccttttgctgtgtgactttgcagctcctctcattaaagaggcagagccccctctcccacccataggagcaggttttgagagtaacagaatgaagtgaaaatgacactgtgccagttctaagaccagccctcaaaggttcatgtgtttctgcttgctttcactgtatttgaaatgttgctgtgagaaagacatctctgaaacagctgaatggtcctaagaaaaggatgagagatgcagggagcagagctcccaactgaggccagcctagatcacctaagagccaggcccccagtttactctgatgtgtaagcaataaatgcttaccccagcaataccaccaaggtttgtggttggtttatatacagcattaatgtggcaataggtgcaatacaccctgttaaacaaaccatacacatatgactctaaccctaatcataaattgattcagtctgttcagttccacaacgctgtttcctccagaatctcacagatgacttactaaatccaacacaaatacacctcagactttctgtctagctcccaaccagttaaaagcaattctaaatattttttttcttagtcgtagtgcaaaagtatattctctccctttctctatagttttctctcattttgtcttcagacctagaagcatgagagcccagctgtcaaagtcatctagacccccttcagaaggtcattaaatttgtctatttcacaggattgcaagataaaatacagaatgcccagttaaatttgaacttcggataaacaacaaatttttttttagtataagcatatcccatacaatatttgggatatacttatatttttatattgtttatctgacgttcaagctaactaggcatcctgtatttttcttagctaaatctggcaactgtgctatttcattgaaaacctgaaagtgtacaaagaaggaagaagcagaatctgccatatgagtaatagaagtgagcaggcccaggactccctaagtcaagaaaccaagaggcgtcattacggaaaagagtaactcaccctgtgtgctccttggtagttctccctcagcgatgcccccatgttatgaatggggaaaagttcactgaagggttcatagtgaagaaactttttggatgatttctgttggtgggttttggataccttcaagggatcagaaaataatatacttaggaaattttggtaatgtcatcattactctctacattattattatgacggttacaattgttaaatctaggtggtgggtatgtgggttatattgtacatgatttttaacttgtctgcatgtttgaaattataataaagtcaataaataaattattgagacactcctg

SEQ ID NO: 98433 - DNA, 4636 bp, Artificial Sequence
  derived and/or modified sequence
cacttatgtgcggccgtgctgcagaggcggcggcgagctcccggactccgggcagggaaatggggcaggcagtgacgcgccgcctgggagctggagcccgcgcagcgccccgcagggcgatggacggccgaaccccgcgcccgcaggacgccccagccaggagaaaaccaaaagccaaggcaccacttcctccagctgagaccaaatatactgatgtctcttcagctgctgattctgtagaatccactgctttcatcatggaacagaaagaaaacatgatagataaagacgttgaactctcagtggtcctacctggggatattatcaaatctactactgttcatggcagtaaacctatgatggacttgttgatattcctttgtgcacagtatcacttaaatccatcaagttacacaatcgatctgttgtcagctgaacagaaccacattaaatttaagccaaacacaccaataggaatgttggaggtagagaaggtaattttaaagccaaaaatgttggataagaaaaaacctacacctataataccagagaaaactgtgagagtagtgattaattttaagaaaacacagaagaccatagtgagagtgagtccacatgcatcgcttcaagagcttgcccctattatatgtagcaaatgtgagtttgatccgttgcatacactattgttgaaagattatcaatcgcaggagcctcttgacttgacaaaatctcttaatgacctgggactaagagaattatatgcgatggatgtcaacagagagtcctgccaaatatcacaaaacctagatattatgaaggagaaagaaaataaagggtttttcagtttttttcaacgcagtaagaaaaagcgagaccaaactgcaagtgcccctgcaacccctctagtaaataagcaccgcccaacttttacaaggtccaataccatttccaaaccatatatttccaacaccctgccgtcggatgcacccaagaagaggcgggctccactgcccccgatgccagcatctcagagtgtcccccaagaccttgcacacatccaggagaggcctgcttcttgtatagtgaaatccatgagcgtggatgagacagataagagtccctgtgaagcaggaagagtgagggcaggttcactgcagctcagcagcatgtctgcagggaattcatctttgagaaggacaaagcgaaaagcaccttccccaccctccaaaatacccccgcatcaaagtgatgaaaatagtcgtgtgactgccttacagccagtagatggagttcctccagacagtgcttcagaagcaaactctcctgaggagctatccagcccagctggaataagctctgattatagccttgaagagatagatgaaaaggaagaactgagtgaagtgcctaaagttgaagctgaaaatatttctccgaagtcacaagatattccttttgtatctactgatataataaatacactgaaaaatgatcctgactcagcccttggcaatggtagtggagagttctcacaaaactccatggaagaaaaacaagaaactaaaagcacagatggacaagaaccacacagtgtagtatatgatacaagcaatggaaagaaggtagttgacagtataagaaacttgaagtcgttgggcccaaaccaagagaatgtagttcaaaatgaaataattgtctatccagagaacacagaagacaatatgaaaaatggagtgaagaaaacagaaatcaatgtagaaggtgttgccaaaaataacaacattgatatggaagttgagagaccatcaaactctgaggcacatgaaactgatactgctataagttacaaggaaaaccatctagcagcttcatcagtaccagatcaaaaactgaatcaacccagtgcagaaaagacaaaagatgcagcaattcagacaaccccttcttgtaacagttttgatgggaaacaccaagatcataatttatctgactccaaagttgaagaatgtgtgcaaacttcaaataacaacatatcaactcaacactcatgcttaagttcacaagattctgtaaatacctcaagggaattcaggagtcaaggcaccctaattatacattcagaagatccgcttaccgtaaaagatccaatttgtgcacatggtaatgatgatcttttgcctcctgtagataggattgacaaaaattccactgcttcttacctaaagaattacccactttatagacaggactacaatcccaagccaaaaccttcaaatgaaattacacgagagtatatacccaaaattggcatgactacttataaaatagtgcctcccaaatccttggaaatatcgaaagactggcaatcagaaaccatagagtataaagatgatcaggacatgcatgctttagggaaaaagcacactcatgagaatgtgaaagaaactgccatccaaacagaagattctgctatttctgaaagcccagaagagccactgccaaaccttaaaccgaagcctaacctgagaacagagcatcaagtgcccagttctgtgagctcacctgatgatgccatggttagtcctctgaaacctgctcccaaaatgacaagagacactggcacagctccttttgcaccaaatttggaagaaataaacaatattttggaatcaaaatttaaatctcgggcttcaaatgcccaggccaaacccagctctttttttttgcagatgcagaagagagtatcgggtcactatgtgacatctgcagctgccaagagtgtccatgctgcccctaatcctgctccaaaagaactgacaaataaagaggcagaaagggatatgctgccttctccggagcagactctttctcccttaagtaaaatgcctcactctgttccacaaccccttgttgaaaaaactgatgatgatgtcatcggtcaggctcctgctgaagcctcccctcctcccatagctccaaaacctgtgacaattcctgctagtcaggtatccacacaaaatctgaagactttgaaaacttttggtgccccacgaccatactcaagttctggtccttcaccgtttgctcttgctgtagtgaaaaggtcacagtctttcagtaaagagcgcaccgagtcacctagtgccagtgcattggtccaacctccagccaacacagaggaagggaagactcattctgtaaataaatttgtggacatcccacagcttggtgtgtctgataaggaaaataactctgcacataatgaacagaattcccaaataccaactccaactgatggcccatcattcactgttatgagacaaagttctttaacattccaaagctctgacccagaacagatgcgacagagtttgctgactgcaatccgttcgggagaggctgctgccaaattgaaaagggttaccattccatcaaatacaatatctgtgaatggaaggtcaagactcagccattccatgtcccctgatgcccaggacggccattaaatgttaccctgccacaccactgcacttcacttccacttcagaccaacttcatactaatggaacattttggcaaatgtatattcagatgtacactaatatattatctattaaaatattagaatttgtgttgtggcttttaatgccagaagaaaagttaccagaatttataatttatagtaattttttgatcttttttttgccttaagagttgaatatgctgctttagaactttaaaacaaggtgtaaatgattttcattttttacaaatgaaaaataattcctttgtattgatttcacttaccagcacattctctacaatggtgacttagacaaaagtataagattcatagactttatatttgtatgacatacaactaggacaaacatagatatgacatttgctgcctcagtgtagcaattggaaatatttataagttatatgaaagcctgttttgggctgaaagaatgatttagaaaactagtgataccaaataagtatattcagttcaataattattttcaatgatgaatcacttagtgtgaaagacttgccttgtgtattctttatgtaattacaaatcactgtcaattttatgggaagctcatagtattttaatattttattaacatggaactcttgtttttttaatctttagaacttaaattctacaagaattttaaatattttctgtatataattatgacattgtcacacagaaattacacattttatgtgccagaagccttaaacatctttctgtgaaaatgctgatatattgtgacagttatttcacatttgatatgtagagaggaataggggttagtttatgtttatattgaaaaactttaaagactatttggaagttccagaaattctggttttaattcaagtaaaatgataaaatagtcattatatagttcagatgctaatattctaagtaataatatatatttacattgaagctaaaactgttaagcaaaacaatgcccatttgtcggcttacagctcttccggagtctagagcctgttggtgttctgtccctactttaagaatttaattgctcacttattctgaaagctttgttcaaacaagatgatattaaatttgttttcactaaaactactggga

SEQ ID NO: 98434 - DNA, 3387 bp, Artificial Sequence
  derived and/or modified sequence
atggacgggcgcacaccgaggccgcaggacgccccagctcgacggaagccgaaggccaaggctcctttaccccccgccgagaccaagtatactgatgtatcaagtgccgctgactctgtcgaatctaccgcctttatcatggaacagaaagagaatatgatcgacaaagatgtagaacttagcgtagtgctgcctggcgatataattaagagcacaacagtgcatgggtcaaagccgatgatggacctgcttatcttcctgtgtgcccagtaccacctcaatcctagcagttacacgatcgacctgctgtctgccgagcaaaatcatatcaagttcaagccaaatacacccatcgggatgctggaagtagaaaaagtgattctgaaaccgaagatgctcgacaagaagaaaccaacacctataattccagagaaaactgttagagttgtgatcaactttaaaaaaactcaaaaaacaatagtgagagtgagtcctcatgcctccttacaggagctggcacccatcatatgcagcaaatgcgagtttgatcccttgcacacgctgctgctcaaggattatcagagtcaggagcccctcgaccttaccaagtctctcaatgacctaggactgagagagttgtacgccatggacgttaaccgcgagtcttgtcagatcagccagaaccttgacattatgaaagagaaagagaacaaaggcttcttcagcttcttccagcgaagcaagaaaaagagggatcagacagcctcagccccagctaccccactggtcaacaaacatcggcccacctttactagatctaacaccatctctaagccgtatatctctaacacactccctagcgatgctcctaagaaacgaagagctcctttgcccccaatgcctgcaagccagagtgtgccacaggacctggcccacattcaggagaggccggcctcttgtatcgttaagagcatgagcgtggatgaaaccgacaagtctccgtgcgaggctggcagagtgcgcgccggctcactgcagttgtcctctatgtctgccggtaatagtagcttacgccgcacaaagcggaaagccccgagcccccctagcaagattcccccccaccagagcgacgagaactcgcgagtgacagcactccaacctgtggatggggtcccacctgactccgcgtcagaggcaaactccccagaggagttgtcatcgcctgctgggattagctccgactattcacttgaggaaatcgacgagaaagaagagttaagcgaggtacccaaggtggaggcagaaaatatttcacccaagtcacaggatatcccatttgtttcaacagacatcattaataccttaaaaaatgaccccgattccgcactgggcaatggctcaggcgaattcagccaaaatagtatggaagagaaacaggaaacaaaatcaacggatgggcaggaaccccactctgtggtgtatgacacctcgaacggaaagaaggtcgtggatagcattcgaaatctgaaaagccttggaccgaatcaggagaacgtggtgcagaatgagatcatagtgtaccccgaaaacactgaagacaacatgaagaatggggtgaaaaagaccgaaatcaacgtggagggcgtggccaaaaataacaatattgacatggaagtcgaaaggccctccaattctgaagcccacgaaacggataccgctatctcatacaaggagaatcacctggccgcctcgagcgtccccgaccaaaagctgaatcagccttcggctgaaaagacaaaggacgccgctatccaaacgaccccaagctgcaactcttttgatggaaaacatcaagaccacaacctctcagactcaaaggtcgaagaatgcgtccagactagcaataacaacatctctacgcagcatagttgcctaagcagtcaggatagcgtgaacacgtcccgggagttcaggtcccagggtaccctcatcatacatagcgaggaccctctgaccgtcaaagaccctatttgcgcacatggaaacgatgacctgcttccacctgtcgataggattgataaaaatagcacagccagctacctgaagaattatccattgtatcgtcaggactacaaccccaaacccaagccgtccaacgagattacaagagagtatatcccaaagattgggatgacaacctacaaaattgtgccacctaaaagtctggaaattagcaaagactggcagtctgagacaatagagtataaggatgatcaagacatgcatgctcttggaaagaagcacactcacgagaacgtcaaggagactgccatacagacagaagactccgctatctccgagtcacctgaggagcccctgccgaatttaaagccaaaaccaaatttgagaacagaacaccaggtgcctagctctgtgtcctcgcccgacgacgccatggtctcccctctgaagcccgccccaaaaatgacaagagacactgggactgccccctttgcccccaacttggaggagattaataatattttggagagtaagttcaaatccagagccagcaatgcacaagctaaacccagctcattctttctgcaaatgcaaaagagggtttcagggcattacgtgacctctgccgctgctaaaagcgtccatgccgctcctaatcccgctcccaaagagttgaccaacaaggaagccgaacgggacatgctgccaagtcccgagcagaccctgagccctctgtcaaagatgccacattcggtaccacagccattagtcgaaaaaaccgatgacgatgtgatcggccaggctccagcagaagccagcccccccccaattgcaccgaagcctgtgaccatccctgcttctcaggtaagtacacagaacctgaaaacgctcaagacatttggggcaccccgaccatatagtagttcagggccgtccccgtttgccttagccgtcgttaaacggtcccagtcattctcaaaagagaggactgaatcaccgtccgcctctgctctagtccagcctcctgcaaacaccgaggaaggcaagacccatagtgtgaataagttcgtcgacatacctcagctaggtgtgagtgataaagagaataactctgcacataacgagcaaaactcacagatcccgaccccaaccgacggccctagctttactgtcatgagacagtccagcctcacctttcagtcctccgatccagagcagatgcggcagagcctgctcacagccatccggtccggggaggcagccgctaagttaaagcgcgtcaccatcccaagcaacaccatcagcgtcaacggcagaagtaggctaagccactccatgtcacccgatgcacaagatggacactag

SEQ ID NO: 98435 - DNA, 3501 bp, Artificial Sequence
  derived and/or modified sequence
atgtgtggtagggctgcagaggcagccgcaagctcccgcaccccgggccgtgaaatgggacaggctgtcacacggcgcctcggcgctggagccagggccgctccgaggcgcgcgatggacggccggaccccccgacctcaggatgcacccgctagacggaagccaaaggccaaagccccgcttccccctgcagaaaccaagtacactgacgtgtcctccgcggccgattcagtggaaagtaccgctttcattatggagcagaaagagaacatgatcgataaagacgtcgagctctcagtagtgttgcctggtgatatcattaaaagcacgaccgtacacggttccaagcccatgatggatttgctcattttcttatgtgcccaataccatttaaatcccagttcctacaccattgatctgctgtctgccgagcagaaccatatcaagttcaaaccaaatacccctattggaatgttggaggtggagaaggtgatcttaaagccaaagatgctggataaaaagaaacccacaccgatcatcccagagaaaaccgtgcgtgtggttatcaacttcaaaaagacacagaagacaattgtgagggtctctcctcatgccagccttcaggagctggctcccattatctgttccaaatgcgaattcgatcccctacacacgctgcttctgaaagattatcagagtcaggaaccactggatctgactaaaagcttaaacgaccttggtctgagggaactatatgccatggacgtgaatagagaatcctgtcaaatctctcagaacctggacataatgaaagagaaagaaaacaaagggttcttcagcttctttcagcggtccaagaaaaagagagatcaaaccgcatctgctcccgctaccccgctcgttaataaacaccgaccaactttcacaaggtcaaataccatctctaagccttacatctcaaacaccctgccaagtgacgcaccgaaaaagcggcgagcaccacttcccccaatgccagcaagccaaagtgtgcctcaagatctggcacatatccaggagcgccccgcatcctgtattgtaaaaagcatgtcagtggacgagacagacaaatctccatgcgaggccggaagagtgcgggccggttctcttcagttatcatcaatgtccgcaggaaattcttccttgaggcgtaccaaaagaaaagcccccagcccgccttctaagataccccctcaccagtcggacgagaattccagggtgacagccctgcagcccgtggacggagtgccaccggactctgcttctgaggctaattctccagaggaactctctagccccgctggaatctcctctgactattcactcgaggagatcgacgaaaaggaggagctgtctgaagtccccaaagtcgaagctgaaaacatctctccaaaatcacaggatatcccattcgtctctaccgacataatcaacaccctcaaaaacgatcccgacagcgctctcgggaatgggtctggtgaattctcccaaaatagtatggaggagaagcaagagacaaaatccacagatggtcaggaaccacattcggtggtgtatgacaccagtaatggtaagaaagtggtggattctatcagaaacctgaaatcccttggccctaaccaagagaacgtcgtgcaaaacgaaattatagtgtaccctgagaatacagaggataatatgaaaaacggggtcaaaaaaacggagatcaacgtcgaaggggttgcaaagaacaacaacatcgacatggaggtggagcggccgagcaactctgaggcacacgaaacagacacagcaatttcctataaggagaaccacctcgcagcttccagtgtccctgaccagaaattaaaccagccatcagccgagaagactaaggacgcggcaatccagactacaccctcctgcaatagcttcgatggaaagcatcaagaccacaatctgagtgactccaaagtcgaggagtgcgtacaaactagtaacaacaacatcagcacacagcattcttgcctctcgtcccaggacagtgtgaatacttcaagggaatttaggtctcagggaaccctgattattcacagtgaggatcccctgacagtgaaggatcccatttgcgcacacgggaacgatgaccttctgcccccagtagacaggatagataagaactcaacagcaagctacctgaagaattatcctctgtatcgacaggactataacccgaaaccaaagccttcaaacgagataactcgagagtatatccccaagatcggaatgaccacatataaaattgttccccctaagagtctggagattagcaaggattggcagtccgagaccatcgagtataaagacgatcaggacatgcacgccttaggcaagaaacatacacatgagaacgtgaaagagaccgccattcagaccgaagattccgccatatctgagtcccctgaggaaccactgccgaatttgaagcctaaaccgaacctcaggactgagcatcaggtcccatcctctgtcagtagccccgatgacgcaatggtgtcacctctaaagcccgcacccaaaatgaccagagacactgggaccgcaccatttgcacctaatctcgaagagattaataatattttagaaagcaagttcaagtcccgggcctctaatgcccaggcaaagccctcttctttcttcctgcagatgcagaaacgcgtctccgggcattacgtgacatccgctgccgccaagtcagtacacgcggctccaaacccagcacctaaggagttgacaaataaagaggccgagcgtgatatgctgccaagtccagaacagaccctgtcccctctgtcgaaaatgccgcatagcgtccctcaacctctggtagagaaaaccgacgatgacgtcatcggccaggcgcctgcggaggcttcaccgcctcccattgctccaaagccagttacaatccccgccagccaggtctcaactcagaatttgaaaactttgaaaacattcggcgcaccgcgcccttacagcagcagtggccctagccctttcgcccttgccgtggtcaagcggagccagtccttttctaaagagcgcacagaatctcccagtgcaagtgccttggtgcagcctcccgctaataccgaggagggaaaaacacactctgtgaacaaatttgttgatatcccacagctaggcgtttctgataaagagaacaattccgctcacaacgagcaaaattcacagatccctaccccaaccgatggtccatcattcactgtgatgcgccagtcgagtctgacatttcagtcatctgatccagagcagatgcggcaaagcttgctgacagccattcgatccggagaggcggccgcaaaactgaagagagtgacaattccgagtaacaccatttccgtgaacggtcgcagccgcttaagtcactcgatgagccctgatgcgcaggacggccattag

SEQ ID NO: 98436 - DNA, 3387 bp, Artificial Sequence
  derived and/or modified sequence
atggatggccgcaccccccggccccaggatgccccagcccggaggaagcccaaggccaaggcccccctgcccccagctgagaccaagtacacagatgtgtcctctgctgctgacagcgtggagagcacagccttcatcatggagcagaaggagaacatgattgacaaggatgtggagctgtctgtggtgctgcccggggacatcatcaagagcaccaccgtgcacggcagcaagcccatgatggacctgctgatcttcctgtgtgcccagtaccacctgaaccccagcagctacaccatcgacctgctgtctgctgagcagaaccacatcaagttcaagcccaacacccccatcggcatgctggaggtggagaaggtgatcctgaagcccaagatgctggacaagaagaagcccacccccatcatccctgagaagacagtgcgggtggtgatcaacttcaagaagacccagaagaccatcgtgcgggtgagcccccacgccagcctgcaggagctggcccccatcatctgcagcaaatgtgaatttgaccccctgcacaccctgctgctgaaggactaccagagccaggagcccctggacctgaccaagagcctgaatgacctgggcctgcgggagctgtatgccatggatgtgaaccgggagagctgccagatcagccagaacctggacatcatgaaggagaaggagaacaagggcttcttctccttcttccagaggagcaagaagaagagggaccagacagccagcgccccagccacccccctggtgaacaagcaccggcccaccttcaccaggagcaacaccatcagcaagccctacatcagcaacaccctgcccagtgatgcccccaagaagagaagagcccccctgccccccatgcctgccagccagagcgtgccccaggacctggcccacatccaggagaggcctgccagctgcatcgtgaagtccatgtctgtggatgaaacagacaagagcccctgtgaggccggccgggtgcgggccggcagcctgcagctgagctccatgtctgctggcaacagcagcctgcggaggaccaagaggaaggcccccagcccccccagcaagatccccccccaccagagtgatgagaacagccgggtgacagccctgcagcctgtggatggagtgcccccagattctgccagcgaggccaacagccctgaggagctgagcagccctgctggcatcagcagtgactacagcctggaggagattgatgagaaggaggagctgtctgaggtgcccaaggtggaggccgagaacatcagccccaagagccaggacatcccctttgtgtccacagacatcatcaacaccctgaagaatgaccctgattctgccctgggcaatggaagtggagagttcagccagaacagcatggaggagaagcaggagaccaagagcacagatggccaggagccccacagcgtggtgtatgacaccagcaatggcaagaaggtggtggacagcatccggaacctgaagagcctgggccccaaccaggagaatgtggtgcagaatgagatcatcgtgtacccagaaaatacagaggacaacatgaagaatggagtgaagaagacagagatcaacgtggagggcgtggccaagaacaacaacatcgacatggaggtggagcggcccagcaacagcgaggcccacgagacagacacagccatctcctacaaggagaaccacctggccgccagctctgtgcctgaccagaagctgaaccagcccagcgctgagaagaccaaggatgctgccatccagaccacccccagctgcaacagctttgatggcaagcaccaggaccacaacctgagtgacagcaaggtggaggagtgtgtgcagaccagcaacaacaacatcagcacccagcacagctgcctgagcagccaggacagcgtgaacaccagccgggagttccgcagccagggcaccctcatcatccacagcgaggaccccctgactgtgaaggaccccatctgtgcccacggcaatgatgacctgctgccccctgtggacagaattgacaagaacagcacagccagctacctgaagaactaccccctgtaccggcaggactacaaccccaagcccaagcccagcaatgagatcacccgggagtacatccccaagattggcatgaccacctacaagatcgtgccccccaagagcctggagatcagcaaggactggcagagcgagaccatcgagtacaaggatgaccaggacatgcacgccctgggcaagaagcacacccatgaaaatgtgaaggagacagccatccagacagaagattctgccatcagcgagagccctgaggagcccctgcccaacctgaagcccaagcccaacctgaggacagagcaccaggtgcccagctctgtgagcagcccagatgatgccatggtgagccccctgaagccagcccccaagatgacccgggacacaggaacagccccctttgcccccaacctggaggagatcaacaacatcctggagagcaagttcaagagccgggccagcaatgcccaggccaagcccagcagcttcttcctgcagatgcagaagagggtgtctggccactacgtgaccagcgctgctgccaagtctgtgcacgccgcccccaacccagcccccaaggagctgaccaacaaggaggccgagcgggacatgctgcccagccctgagcagaccctgagccccctgagcaagatgccccacagcgtgccccagcccctggtggagaagacagatgatgatgtgattggccaggccccagctgaggccagccccccacccatcgcccccaagcctgtgaccatcccagccagccaggtgtccacccagaacctgaagaccctgaagaccttcggggccccccggccctacagcagcagcggccccagcccctttgccctggccgtggtgaagaggagccagagcttcagcaaggagaggacagagagccccagcgccagcgccctggtgcagcccccagccaacacagaggagggcaagacccacagcgtgaacaagtttgtggacatcccccagctgggcgtgtctgacaaggagaacaacagcgcccacaatgagcagaacagccagatccccacccccacagatggccccagcttcaccgtgatgaggcagagcagcctgaccttccagagcagtgaccctgagcagatgaggcagagcctgctgacagccatccgctctggagaggccgccgccaagctgaagagggtgaccatccccagcaacaccatctctgtgaatggccgcagccggctgagccacagcatgagcccagatgcccaggacggccactag

SEQ ID NO: 98437 - DNA, 3501 bp, Artificial Sequence
  derived and/or modified sequence
atgtgtggccgggctgctgaggccgccgccagcagcaggaccccaggccgggagatgggccaggccgtgacccggcggctgggcgctggggcccgggccgccccccggcgggccatggatggccgcaccccccggccccaggatgccccagcccggaggaagcccaaggccaaggcccccctgcccccagctgagaccaagtacacagatgtgtcctctgctgctgacagcgtggagagcacagccttcatcatggagcagaaggagaacatgattgacaaggatgtggagctgtctgtggtgctgcccggggacatcatcaagagcaccaccgtgcacggcagcaagcccatgatggacctgctgatcttcctgtgtgcccagtaccacctgaaccccagcagctacaccatcgacctgctgtctgctgagcagaaccacatcaagttcaagcccaacacccccatcggcatgctggaggtggagaaggtgatcctgaagcccaagatgctggacaagaagaagcccacccccatcatccctgagaagacagtgcgggtggtgatcaacttcaagaagacccagaagaccatcgtgcgggtgagcccccacgccagcctgcaggagctggcccccatcatctgcagcaaatgtgaatttgaccccctgcacaccctgctgctgaaggactaccagagccaggagcccctggacctgaccaagagcctgaatgacctgggcctgcgggagctgtatgccatggatgtgaaccgggagagctgccagatcagccagaacctggacatcatgaaggagaaggagaacaagggcttcttctccttcttccagaggagcaagaagaagagggaccagacagccagcgccccagccacccccctggtgaacaagcaccggcccaccttcaccaggagcaacaccatcagcaagccctacatcagcaacaccctgcccagtgatgcccccaagaagagaagagcccccctgccccccatgcctgccagccagagcgtgccccaggacctggcccacatccaggagaggcctgccagctgcatcgtgaagtccatgtctgtggatgaaacagacaagagcccctgtgaggccggccgggtgcgggccggcagcctgcagctgagctccatgtctgctggcaacagcagcctgcggaggaccaagaggaaggcccccagcccccccagcaagatccccccccaccagagtgatgagaacagccgggtgacagccctgcagcctgtggatggagtgcccccagattctgccagcgaggccaacagccctgaggagctgagcagccctgctggcatcagcagtgactacagcctggaggagattgatgagaaggaggagctgtctgaggtgcccaaggtggaggccgagaacatcagccccaagagccaggacatcccctttgtgtccacagacatcatcaacaccctgaagaatgaccctgattctgccctgggcaatggaagtggagagttcagccagaacagcatggaggagaagcaggagaccaagagcacagatggccaggagccccacagcgtggtgtatgacaccagcaatggcaagaaggtggtggacagcatccggaacctgaagagcctgggccccaaccaggagaatgtggtgcagaatgagatcatcgtgtacccagaaaatacagaggacaacatgaagaatggagtgaagaagacagagatcaacgtggagggcgtggccaagaacaacaacatcgacatggaggtggagcggcccagcaacagcgaggcccacgagacagacacagccatctcctacaaggagaaccacctggccgccagctctgtgcctgaccagaagctgaaccagcccagcgctgagaagaccaaggatgctgccatccagaccacccccagctgcaacagctttgatggcaagcaccaggaccacaacctgagtgacagcaaggtggaggagtgtgtgcagaccagcaacaacaacatcagcacccagcacagctgcctgagcagccaggacagcgtgaacaccagccgggagttccgcagccagggcaccctcatcatccacagcgaggaccccctgactgtgaaggaccccatctgtgcccacggcaatgatgacctgctgccccctgtggacagaattgacaagaacagcacagccagctacctgaagaactaccccctgtaccggcaggactacaaccccaagcccaagcccagcaatgagatcacccgggagtacatccccaagattggcatgaccacctacaagatcgtgccccccaagagcctggagatcagcaaggactggcagagcgagaccatcgagtacaaggatgaccaggacatgcacgccctgggcaagaagcacacccatgaaaatgtgaaggagacagccatccagacagaagattctgccatcagcgagagccctgaggagcccctgcccaacctgaagcccaagcccaacctgaggacagagcaccaggtgcccagctctgtgagcagcccagatgatgccatggtgagccccctgaagccagcccccaagatgacccgggacacaggaacagccccctttgcccccaacctggaggagatcaacaacatcctggagagcaagttcaagagccgggccagcaatgcccaggccaagcccagcagcttcttcctgcagatgcagaagagggtgtctggccactacgtgaccagcgctgctgccaagtctgtgcacgccgcccccaacccagcccccaaggagctgaccaacaaggaggccgagcgggacatgctgcccagccctgagcagaccctgagccccctgagcaagatgccccacagcgtgccccagcccctggtggagaagacagatgatgatgtgattggccaggccccagctgaggccagccccccacccatcgcccccaagcctgtgaccatcccagccagccaggtgtccacccagaacctgaagaccctgaagaccttcggggccccccggccctacagcagcagcggccccagcccctttgccctggccgtggtgaagaggagccagagcttcagcaaggagaggacagagagccccagcgccagcgccctggtgcagcccccagccaacacagaggagggcaagacccacagcgtgaacaagtttgtggacatcccccagctgggcgtgtctgacaaggagaacaacagcgcccacaatgagcagaacagccagatccccacccccacagatggccccagcttcaccgtgatgaggcagagcagcctgaccttccagagcagtgaccctgagcagatgaggcagagcctgctgacagccatccgctctggagaggccgccgccaagctgaagagggtgaccatccccagcaacaccatctctgtgaatggccgcagccggctgagccacagcatgagcccagatgcccaggacggccactag

SEQ ID NO: 98438 - DNA, 3387 bp, Artificial Sequence
  derived and/or modified sequence
atggacggccggaccccccggccccaggacgcccccgcccggcggaagccaaaagccaaagccccgctgccccctgctgagaccaagtacactgacgtatcctctgccgccgattccgtggaaagtacagcatttatcatggaacagaaagagaacatgatagataaggatgtggaactgagtgtggttctgccaggtgacattatcaagtctacaactgtccacggaagtaaaccgatgatggatttattaatatttttatgtgcccagtatcatctgaacccttcatcctacacgatagacctgttatcagctgagcagaatcacattaagttcaaacccaacactccgatcggcatgctggaggtggagaaagtgatactgaaaccaaagatgttagataagaagaagcccactcccatcatccccgaaaaaactgtccgcgtcgtcatcaactttaagaagacacagaagacgatagtgcgtgtgagtccgcatgcctcattgcaggagctcgcccctatcatatgctccaaatgtgaatttgatcctttgcatacgctgcttctgaaagattaccaatcccaggagccgctggacttgacaaaaagcctcaatgatctgggattacgcgaactctacgcgatggatgtgaacagagaatcttgtcagatttcacagaatctggacatcatgaaggagaaagaaaacaaaggcttcttctcgttttttcagcggtccaagaagaagagggatcagaccgcatccgcaccagccacccccttagtaaacaagcatagacccactttcacacgaagcaacacaatatccaaaccttacatctctaacacgctgccatcagatgctcctaaaaagaggagggctccgctcccccccatgccagcatcccaaagcgtgccccaggacctggcccatattcaggaacgcccagctagttgcattgtcaagtctatgtctgtggatgaaaccgataaaagcccctgtgaggcaggaagggtgagagctgggtctctgcaactgagctcaatgagtgcgggcaatagctccttacgccgtactaagagaaaagccccctcccccccgagcaagatcccacctcatcagagcgacgagaatagccgcgtgaccgccctgcagcctgtggatggggtgcctcccgacagtgcgtcagaagcaaactcccctgaggagctaagttctcctgctggcatcagctcggactactcattagaggaaattgacgaaaaggaggaactaagcgaagttcccaaagtcgaggccgaaaatatctcacctaagtcacaggacattccatttgtctcaacagatatcataaacactttgaaaaacgatcctgatagcgcactggggaacggatctggcgaatttagccagaatagcatggaggagaaacaggagaccaagtcaaccgatgggcaagaacctcattccgtcgtctacgatacatccaacgggaagaaagttgtggattcaataagaaacctgaaatcacttggcccaaaccaggagaatgtcgtgcagaatgaaattatagtgtatcctgaaaacacagaggataatatgaaaaatggggtgaagaaaaccgagatcaacgtcgaaggcgtggcaaaaaataacaacattgacatggaagtggagcgcccatccaactctgaggcacacgagaccgacaccgccatctcttacaaggagaaccacctggccgcctcttccgtccctgatcagaaattaaaccagccttcagctgaaaaaaccaaagatgccgcaattcagacaacaccctcctgcaacagcttcgacggtaagcaccaggatcacaatctctctgattcgaaggtggaggagtgtgtgcaaacctctaataataatatatcaactcagcatagctgtctcagctcacaagatagtgtcaatacatcaagagagttccggtctcaaggaactttgattattcattccgaagaccctttgactgttaaggacccaatttgcgcccacgggaacgatgacctattgccccctgtcgaccggatcgataagaacagcactgcctcatatctcaaaaactacccgctgtatcggcaggactataaccctaagcctaagcccagcaacgagatcactcgtgagtatattcctaaaattggcatgactacttacaaaatcgtgcctccgaaatcattagagatttccaaggactggcagtctgagactattgagtacaaggatgatcaggacatgcacgcactggggaagaaacatactcacgagaacgtgaaggaaacagcaatccaaactgaagactccgctatctcagagtcccccgaagaaccgcttcccaacctaaagcctaaacctaatcttcgcactgaacatcaggtgccctcctcagtctcaagcccagatgatgctatggtgtcccctctgaagccagctccgaaaatgacgagggacacgggtaccgcaccttttgctccaaatctggaggagatcaacaacatcctggagtccaaattcaaatctcgagcatccaacgctcaggctaagcctagcagcttctttctccagatgcaaaagagagtgtcaggtcactacgtcacgagcgcggccgcaaagtcggtacatgctgcacctaaccccgccccgaaagagctgaccaacaaggaggccgaaagagatatgcttccaagcccggaacagacactgagcccactatcgaagatgccgcacagcgtgccacagcccctggtcgaaaagacggatgacgacgttataggtcaagctcctgctgaggcaagtcctccccctatcgcccccaagcccgttactattcctgcgtcccaggtgtccacacagaatctcaaaacgcttaagaccttcggagctccacgcccttattctagttccggcccctccccgttcgcgttggctgttgtcaaaagatcccagagcttttcaaaggagagaaccgaatccccttccgcatccgcccttgtacagcccccagcaaatacggaagagggcaagacccactccgtgaacaaattcgtggacatcccccaactcggcgtgtctgacaaggagaacaattctgctcacaatgaacaaaactcgcagatcccaactccgactgacggtcctagcttcaccgtgatgagacaaagctctctcacattccagagttccgatccagaacagatgcgccagagcttgctgacagccatcagatcgggggaagccgctgctaaattaaaacgcgttacaatcccaagcaacaccatctccgttaatggaaggagccggctgtctcactccatgagccctgatgctcaagacggccactag

SEQ ID NO: 98439 - DNA, 3501 bp, Artificial Sequence
  derived and/or modified sequence
atgtgcggccgggccgccgaggccgccgccagcagccggacccccggacgcgagatgggacaggctgttaccagacgcctaggagcaggggctcgtgcagccccacgaagggccatggatggacgcactcctcggccccaggatgctccagcacgccgcaaaccaaaggcaaaggcacctttgcccccagcagagacgaagtacaccgacgtgagctccgctgcggattctgttgaatcaactgcgtttatcatggagcaaaaggagaacatgattgataaagacgtcgagctatctgtggtgctcccaggagatattattaaaagtacaaccgtccatgggagtaagccgatgatggacttactcatcttcctgtgcgctcagtaccatctcaacccaagctcatatactattgatctgttatcagctgagcagaaccatattaagttcaaaccaaacactcctattgggatgctggaggtggaaaaggtcattctaaaaccgaagatgctcgacaagaagaagcctacccctatcattcctgagaaaaccgtccgggtggtgatcaattttaaaaagacccagaagacaattgtgcgtgtaagccctcacgcatcgcttcaagagctggcccccattatctgctcaaaatgtgagttcgatcctctacatacacttctgctgaaggactaccagtctcaagagccgcttgatttgacaaagagcttgaacgacctgggcttgagagaattatacgctatggacgtgaaccgcgagtcgtgccaaatcagccaaaatcttgatataatgaaagagaaagaaaataaggggtttttcagtttcttccagagaagtaagaagaaaagggatcagactgcgtctgcccccgctaccccactcgtaaataaacatcggcccaccttcacaaggtccaatacgattagcaaaccttatatatctaataccctgccttcagacgcacccaaaaagcgcagagcgcctttacctcctatgcctgcgtcccagtcagtaccacaggaccttgcccatatccaggaacggcccgcatcctgcatcgtgaaaagcatgtcggtggatgagactgacaagtcgccatgtgaggctggtagagtgagagctggctccctgcagctttcctctatgagcgcaggaaacagttctctccggcggaccaaaaggaaagcgccatcaccaccatcaaagatacccccacaccagagcgatgagaacagccgggtgactgccctgcagccagtcgacggcgtaccaccagattcagcctcagaggccaactcccccgaggagctgtccagcccagccggcatctcctccgactattctttagaagaaatcgatgaaaaggaagagctgagcgaggtccctaaggtggaggctgagaacatcagccctaagtctcaggacatcccatttgtgtctactgatataataaacacccttaaaaatgaccctgacagcgctttaggcaatggctccggagaattttctcagaacagcatggaggagaagcaagaaacaaagtcgactgatggacaggagccgcatagtgtggtgtatgacacttccaatggcaagaaggtggtagactcaattcgtaatctgaagagtctgggccctaatcaggagaacgtggtgcaaaatgaaatcatcgtgtacccagagaataccgaagacaatatgaagaatggggtgaaaaagacagaaatcaacgtggagggcgtcgccaagaacaacaatatagacatggaggtcgagcgcccgagcaactctgaggctcatgagaccgacaccgccatatcttacaaggagaaccatctcgcagcctcctccgtgccagaccagaagctcaaccagccttctgccgaaaagacaaaggacgctgccattcagacgactccgagttgtaattctttcgatggcaaacatcaggaccacaaccttagcgacagtaaggttgaggagtgcgtgcagacttcaaacaataatatttccactcaacattcatgcctgagcagccaagatagtgtcaatacttctagagaatttcgctcacagggcactcttattattcacagcgaggaccccttaaccgtgaaagatcccatctgtgcacacggcaacgacgacctattaccacctgttgaccggatcgataagaactccacagcaagctacttgaaaaattacccattatataggcaggactataatccaaagccgaaaccctcgaatgagattactagggaatacatcccaaaaataggcatgaccacttataagatcgtccctcctaaatctctggaaatctctaaggactggcaaagtgagactatcgagtacaaggacgaccaggacatgcacgctctcgggaagaagcacacacacgaaaacgtcaaggaaacagcgatccagacggaagactctgccatcagtgaaagcccagaggagcctcttccaaacctaaagcctaaacccaatctgcggaccgaacaccaagtgccatctagcgtctcttcacctgacgacgctatggtcagtccgctgaagccggctccgaagatgacgagagacaccggtactgctccgtttgctcctaacctcgaggagattaataacatcctggaaagtaagttcaaatctcgtgctagcaacgcacaggctaaaccttcctcgttttttctacagatgcagaagcgtgttagcgggcactacgtcacctccgcagcggccaaaagcgtgcacgcagcaccaaaccctgcccccaaagagctgaccaacaaagaggcggagcgcgatatgctcccctcccctgaacagacactgagcccgctgagcaagatgcctcattccgtccctcagccattggtggagaagaccgacgacgatgtgattgggcaagctccagccgaagcttccccaccaccaatagcccctaagccagttacaattccagcctcacaggtgtctactcagaaccttaagaccttgaagacttttggtgcgcccaggccatactcttcttccgggccctccccgttcgcactagccgtcgtgaaacgttcccagtcattttccaaagagcgaacagagtcaccgtccgcatcagccctcgtgcagcccccagcaaacaccgaagagggcaaaacacactcagtgaacaaattcgtcgacatccctcaactgggagtgtcagataaggagaacaattctgcccacaacgagcaaaattcccagattcccactcccacagatggcccgagctttactgtcatgagacaaagcagtctgacctttcagtcttccgaccctgaacagatgcgccaatcccttctcactgccatacgctcaggagaggccgccgcaaaactgaagcgcgtcaccattcctagcaacacaatctcagtcaacggaaggtcaaggctgagccactctatgtcccccgacgctcaagacggacactag

SEQ ID NO: 98440 - DNA, 3387 bp, Artificial Sequence
  derived and/or modified sequence
atggatgggagaactcctcgtcctcaagacgccccagctcgtagaaagcccaaagcaaaagcaccactccctcccgctgaaacgaaatatacggacgtgtcctcagcagccgatagtgtcgagagcactgcgtttattatggagcagaaggagaacatgatagacaaggacgtggagctgagtgtggtgctccctggggacatcataaagtcaactacagtacacggaagcaagcccatgatggatctactgattttcctgtgtgcacagtatcatctgaacccatctagttacacaatcgatctcttatctgccgagcaaaatcacatcaaatttaagccaaatacccccatcggcatgttggaagtagagaaggtgatactgaaacctaaaatgctggacaagaagaagccaacaccgatcatccccgagaaaacagtcagagtggtaattaattttaaaaagacccagaagaccattgtaagggtttccccacacgcctcactgcaggaacttgccccaattatctgcagcaagtgtgagttcgatccactgcataccttactactcaaggactatcagagtcaggaacccctcgatcttaccaaatcactgaacgacctgggcttacgggaattgtacgcaatggacgttaaccgtgaaagctgtcagatctcacaaaacttagatattatgaaagagaaagaaaacaaaggattttttagcttcttccagcgctccaaaaagaagcgggatcagacggcctcagcccctgctacaccccttgtgaataagcataggccgacattcacccgctccaacaccatttctaagccatatattagtaacactttgccctcggacgccccaaagaaacggagagctcccctgcctccaatgcccgctagtcagtccgtgccccaggatctggcacacattcaggaacgcccagcctcttgtattgttaagagcatgtcggtggacgaaacagacaagtctccttgcgaggctgggcgagtgcgggcaggctcactgcaactgagctcaatgagcgccggaaactcttcattgcgccgaactaagagaaaagcaccgtcccccccaagcaaaattccgcctcaccagagcgacgagaattcccgcgtgactgctctgcagccagtggacggagttcctcctgattcagcctctgaggccaatagtcccgaggaactgtcatctccggctggaattagcagcgattattccctggaggagattgatgagaaagaagagctcagcgaggtacccaaagtagaagcagaaaacatcagccctaagagtcaggatattccttttgtcagcaccgacattattaatactctcaagaatgacccagatagcgctctgggtaatgggtcgggcgaattctctcagaattccatggaggaaaagcaggaaactaagtctaccgatggccaagagccgcacagtgtagtgtacgacacttcgaatggcaaaaaagttgtggactcaatccggaacctcaagagtctcggccctaaccaggaaaacgtcgtgcaaaacgaaattatcgtgtaccctgaaaatacagaagataacatgaaaaacggcgtgaagaagaccgagataaacgttgagggcgtcgccaagaataacaatattgatatggaggtggaaaggccgtccaatagtgaagcccacgaaacagatacggcgatatcctataaggagaatcatttagccgcatccagcgttcctgaccagaaacttaaccagccctccgcagaaaagacaaaggacgctgccatccaaaccaccccttcctgcaactcatttgatgggaagcaccaagaccataatttgtctgattctaaagtagaggagtgtgttcaaacatctaacaacaacattagtacccagcattcatgtctcagctcccaggattcagttaatacttcaagagagtttcggtcccaaggaaccctgattatacactcggaggatccactcactgttaaggatcccatttgcgcccacggcaacgatgaccttttgcctccggtggaccgcatcgacaaaaacagtacggccagctacctcaaaaattatcctctgtatcggcaggactacaaccctaagcctaaaccctctaatgagatcaccagggaatacattcctaaaatcgggatgacaacttacaagatcgttcctcctaaaagcctcgaaatctccaaggactggcagtcggagaccattgagtacaaagacgaccaagatatgcacgccttgggaaaaaaacatacccacgagaacgtgaaagagacagctattcaaaccgaggacagcgcgatctcagaatccccagaggagccccttcctaacctgaagcctaaacccaacctacggaccgagcatcaggtgcctagcagcgtgagtagccccgatgatgctatggtgagtcccctgaagcctgcccctaaaatgacaagagacactggcacagccccatttgccccaaatctggaagagattaacaacatactcgagagcaagttcaagtcccgagccagtaatgctcaggcaaaacctagcagctttttcttgcagatgcagaagcgggtctcgggccattacgtcacgtccgccgctgctaagtcagtccatgccgctccgaatccagccccaaaagaattaactaacaaggaggccgagcgagacatgttaccctcgcctgaacagactctctccccactcagcaagatgccacacagcgttcctcagccactggtggaaaaaaccgacgatgatgtcatcggtcaggcccctgccgaagccagccctcccccaattgctcccaagcctgtcactatcccagcatcacaggtgtcgactcagaatttaaaaaccctcaaaacttttggcgcacctagaccctacagctcctctggtcccagcccctttgccttggccgttgtaaagaggagtcagagctttagtaaggagaggacagagagcccatctgcgagcgccctcgttcagccacctgccaataccgaagaagggaagactcacagtgtaaataagttcgtggatataccacaacttggcgtgagcgacaaggagaataattctgcccataacgaacagaacagtcaaattcctaccccaactgatgggccttcctttaccgttatgcggcagtcttcattgacattccagtcatctgaccctgaacagatgagacagtctctgttaactgccatccgctccggtgaagcagctgccaaactgaaacgggtcactattcctagcaataccatatccgtgaacggacggtcccgtcttagtcactccatgtcaccagacgctcaggatggtcattag

SEQ ID NO: 98441 - DNA, 3501 bp, Artificial Sequence
  derived and/or modified sequence
atgtgtggcagagctgccgaggccgcagcctcctcaagaacacctgggagagagatggggcaggccgttactcgcagactgggagcaggagcccgtgccgctccacggagagccatggacggcaggactccgaggccccaagacgccccagcccgtcgtaaacccaaagccaaggctcctctgcccccagcggaaactaagtatactgatgtgtctagtgccgcagatagcgtagaaagtaccgcctttattatggagcagaaagaaaacatgattgacaaggacgtggaactgtctgtggtgctccccggagacatcattaaatctaccacggtgcacggatcaaagcccatgatggacctgcttatcttcttatgtgcccagtaccatctcaatccctcttcctacacaatcgacctcttgagcgccgagcagaatcatataaagttcaagcccaatacaccaataggaatgctcgaagttgagaaagtcatcctcaagcctaaaatgcttgacaaaaagaagccaacccctatcattcctgaaaagaccgtgagagtggtcattaactttaagaagacccagaagactatcgttagggttagcccacatgcctctttgcaggagctcgctcccatcatctgctcaaaatgcgaattcgaccctctacatactctcctactgaaggattaccagtcacaggagcctctggacctgactaaaagtctgaacgacctcggactccgcgaactttatgcaatggacgttaatagagaaagctgccagatctctcagaatcttgatattatgaaggagaaggaaaacaaaggtttcttttctttcttccagcgctccaagaagaagagggatcagacagcctccgcccctgccacgcctctggtcaacaagcacagaccgacttttaccaggtccaacacgatcagtaagccatacatctcaaacaccctgccgtccgatgcccctaaaaagcggcgagcccctctgcctcccatgcccgcatcgcagtccgtgccacaggacctagctcacattcaggagagaccagcttcctgcatcgtcaagtcaatgtctgtcgatgagactgacaaatctccatgtgaagctggtcgggtgcgcgctggatctttgcagttgagctccatgagtgcaggaaactcctcacttaggcgaactaaacgtaaagccccaagccccccttcaaagatacccccacaccaatcggacgagaatagccgggtgactgctctgcagcccgtcgacggtgttcccccagactctgcttcagaagccaactctcccgaggagctcagttcgcccgctgggatttcctccgactactctctggaggaaatcgacgagaaagaggagctctcagaggtccccaaggtggaagccgagaacatcagtccgaaatcccaggacattccatttgtgtccactgatataattaataccttaaagaacgatcctgactctgcgctgggtaacggctccggcgagttttctcagaattctatggaggagaaacaggaaactaagagtacagacgggcaggagcctcacagtgtcgtttatgacacatccaatggaaagaaagttgttgattccataaggaatcttaagtctctgggacccaatcaagaaaatgtcgtgcaaaacgagataattgtttacccggagaatactgaagataatatgaaaaatggagtgaagaaaaccgagataaacgtggagggggtcgcgaaaaataacaatatcgatatggaagtagagagaccttctaacagcgaggcccatgaaaccgacaccgctataagctacaaggagaatcatttagcggcatcctctgtacctgatcagaagctgaatcagccctctgccgagaagacaaaggatgctgccatccaaactactccatcttgcaattcgttcgatggcaagcaccaagaccataacctctccgactcaaaggttgaagaatgtgtgcagacaagtaacaataacattagcacgcagcactcctgtctctctagccaagactctgtcaacacctctcgcgaattcaggtcacagggtaccctgatcattcactctgaagatcccctcacagtgaaggaccccatctgtgcacacgggaacgacgatctgctgcccccagtggacagaatcgataaaaattctactgccagttatttaaaaaattatccactttatagacaggactacaatcctaaacccaagcccagcaacgagattacacgggagtacattcctaagatcgggatgactacatataagatagtcccgccaaagagcctggaaatcagtaaggattggcagagcgagaccatcgagtataaagacgaccaggacatgcacgccttaggaaagaagcatacccacgagaacgtaaaagaaactgccattcaaacagaggactccgcaatttctgagtcaccagaggaacccctgccaaaccttaagcccaaacccaatctcagaactgagcatcaggtgccatcctccgtgtcctcccccgatgacgcgatggtgagccctctgaaaccagcccctaaaatgactcgggacactggcactgccccattcgcaccaaacctggaggagatcaacaatatcctagagagcaaattcaagagcagggccagtaacgcccaggctaagccctcctctttcttcctgcagatgcagaagcgtgtgagcggccactatgtcacatccgcggctgccaaaagcgttcacgccgctcccaacccagcaccaaaagagctaacaaataaggaggccgagcgggacatgttacctagccccgagcagactctgtcacccctgagtaagatgcctcattcagttccccagcccttagtcgagaagactgacgatgacgttatcggccaggcccctgcggaggcttccccacccccaattgcacctaagccagtgacaatccccgcatcccaggtgtctactcagaacctcaagacgcttaaaacattcggcgctcctcggccatactcttctagtgggccatcgccatttgcattggctgtcgttaaaagaagtcagtcctttagtaaagagagaaccgagtctccatcagccagcgcattggttcagcctcctgccaacaccgaagaggggaaaactcattcagtgaacaaattcgtcgacataccccagctgggagtgtccgataaggagaataatagtgctcacaacgagcaaaacagccagatccccacccctaccgatggaccatcctttaccgtcatgagacagtcgtcactgacattccaatcaagtgaccccgaacagatgcggcagagcctcctaaccgctatacggtctggagaagccgctgcaaagctgaagcgtgttacgatcccctccaacacaatttcagtcaacgggagaagccggttgtcccacagcatgagtccggacgcccaagatggacactag

SEQ ID NO: 98442 - protein, 139 aa, Artificial Sequence
  derived and/or modified sequence
MDGRTPRPQDAPARRKPKAKAPLPPAETKYTDVSSAADSVESTAFIMEQKENMIDKDVELSVVLPGDIIKSTTVHGSKPMMDLLIFLCAQYHLNPSSYTIDLLSAEQNHIKFKPNTPIGMLEVEKVILKPKMLDKKKPT

SEQ ID NO: 98443 - DNA, 420 bp, Artificial Sequence
  derived and/or modified sequence
atggacggcagaacccccagaccccaggacgcccccgccagaagaaagcccaaggccaaggcccccctgccccccgccgagaccaagtacaccgacgtgagcagcgccgccgacagcgtggagagcaccgccttcatcatggagcagaaggagaacatgatcgacaaggacgtggagctgagcgtggtgctgcccggcgacatcatcaagagcaccaccgtgcacggcagcaagcccatgatggacctgctgatcttcctgtgcgcccagtaccacctgaaccccagcagctacaccatcgacctgctgagcgccgagcagaaccacatcaagttcaagcccaacacccccatcggcatgctggaggtggagaaggtgatcctgaagcccaagatgctggacaagaagaagcccacctag

SEQ ID NO: 98444 - DNA, 474 bp, Artificial Sequence
  derived and/or modified sequence
atggacggcagaacccccagaccccaggacgcccccgccagaagaaagcccaaggccaaggcccccctgccccccgccgagaccaagtacaccgacgtgagcagcgccgccgacagcgtggagagcaccgccttcatcatggagcagaaggagaacatgatcgacaaggacgtggagctgagcgtggtgctgcccggcgacatcatcaagagcaccaccgtgcacggcagcaagcccatgatggacctgctgatcttcctgtgcgcccagtaccacctgaaccccagcagctacaccatcgacctgctgagcgccgagcagaaccacatcaagttcaagcccaacacccccatcggcatgctggaggtggagaaggtgatcctgaagcccaagatgctggacaagaagaagcccacccccatcatccccgagaagaccgtgagagtggtgatcaacttcaagaagacccagtag

SEQ ID NO: 98445 - DNA, 575 bp, Artificial Sequence
  derived and/or modified sequence
gagcctcgcaggggttgccgcttctccattcaagtcctggcttgagagccgagcggcaagagcgcgggccggggaagggaagagtaggagaggaagccgcgagggagaacagtgacgcgccgcctgggagctggagcccgcgcagcgccccgcagggcgatggacggccgaaccccgcgcccgcaggacgccccagccaggagaaaaccaaaagccaaggcaccacttcctccagctgagaccaaatatactgatgtctcttcagctgctgattctgtagaatccactgctttcatcatggaacagaaagaaaacatgatagataaagacgttgaactctcagtggtcctacctggggatattatcaaatctactactgttcatggcagtaaacctatgatggacttgttgatattcctttgtgcacagtatcacttaaatccatcaagttacacaatcgatctgttgtcagctgaacagaaccacattaaatttaagccaaacacaccaataggaatgttggaggtagagaaggtaattttaaagccaaaaatgttggataagaaaaaacctac

SEQ ID NO: 98446 - DNA, 549 bp, Artificial Sequence
  derived and/or modified sequence
aggaccagaaggaggacagcaaaaagtgcagtgacgcgccgcctgggagctggagcccgcgcagcgccccgcagggcgatggacggccgaaccccgcgcccgcaggacgccccagccaggagaaaaccaaaagccaaggcaccacttcctccagctgagaccaaatatactgatgtctcttcagctgctgattctgtagaatccactgctttcatcatggaacagaaagaaaacatgatagataaagacgttgaactctcagtggtcctacctggggatattatcaaatctactactgttcatggcagtaaacctatgatggacttgttgatattcctttgtgcacagtatcacttaaatccatcaagttacacaatcgatctgttgtcagctgaacagaaccacattaaatttaagccaaacacaccaataggaatgttggaggtagagaaggtaattttaaagccaaaaatgttggataagaaaaaacctacacctataataccagagaaaactgtgagagtagtgattaattttaagaaaacacag

SEQ ID NO: 98447 - DNA, 420 bp, Artificial Sequence
  derived and/or modified sequence
atggacggaaggacgcctcgtccccaggacgcacctgccagaaggaagcccaaagccaaggcacctcttccccccgccgagacgaaatatacggacgttagctcggctgcagattccgtggaatcgacggcatttattatggagcagaaagaaaatatgatcgacaaggatgtggagttgagcgtggtccttccaggggacattattaaaagtacgactgtgcacggtagcaaacccatgatggacctgctgatcttcctgtgcgcacagtaccacctgaatccttcttcttacaccattgacctcttgtctgctgaacagaatcacataaaattcaagccgaacacgccaataggtatgctagaggtggagaaagtgatactgaaaccaaagatgctcgacaagaagaagcccacttag

SEQ ID NO: 98448 - DNA, 474 bp, Artificial Sequence
  derived and/or modified sequence
atggatggtagaaccccacgcccccaggatgctccagcacggaggaagcctaaagctaaagctcccctgccccccgcggagacaaaatacacggatgtatcaagcgcagccgatagtgtggagagcaccgcgttcatcatggaacagaaggagaacatgatcgacaaggatgttgagctgagcgtcgtgttgccaggcgatattataaagagtaccacagtccacggaagcaaacctatgatggacctgctcatcttcttgtgcgcccagtatcacctcaatccttcctcctatacaatcgatctgcttagtgctgaacagaatcatattaagtttaaacccaatactccgatagggatgctcgaagttgagaaggtaattctaaaacctaagatgctggataaaaagaaaccgaccccaattatcccagagaaaactgtgagggtggtcatcaacttcaagaagacccaatag

SEQ ID NO: 98449 - DNA, 420 bp, Artificial Sequence
  derived and/or modified sequence
atggatggccgcaccccccggccccaggatgccccagcccggaggaagcccaaggccaaggcccccctgcccccagctgagaccaagtacacagatgtgtcctctgctgctgacagcgtggagagcacagccttcatcatggagcagaaggagaacatgattgacaaggatgtggagctgtctgtggtgctgcccggggacatcatcaagagcaccaccgtgcacggcagcaagcccatgatggacctgctgatcttcctgtgtgcccagtaccacctgaaccccagcagctacaccatcgacctgctgtctgctgagcagaaccacatcaagttcaagcccaacacccccatcggcatgctggaggtggagaaggtgatcctgaagcccaagatgctggacaagaagaagcccacctag

SEQ ID NO: 98450 - DNA, 474 bp, Artificial Sequence
  derived and/or modified sequence
atggatggccgcaccccccggccccaggatgccccagcccggaggaagcccaaggccaaggcccccctgcccccagctgagaccaagtacacagatgtgtcctctgctgctgacagcgtggagagcacagccttcatcatggagcagaaggagaacatgattgacaaggatgtggagctgtctgtggtgctgcccggggacatcatcaagagcaccaccgtgcacggcagcaagcccatgatggacctgctgatcttcctgtgtgcccagtaccacctgaaccccagcagctacaccatcgacctgctgtctgctgagcagaaccacatcaagttcaagcccaacacccccatcggcatgctggaggtggagaaggtgatcctgaagcccaagatgctggacaagaagaagcccacccccatcatccctgagaagacagtgcgggtggtgatcaacttcaagaagacccagtag

SEQ ID NO: 98451 - DNA, 420 bp, Artificial Sequence
  derived and/or modified sequence
atggacggccggaccccccggccccaggacgcccccgcccggcggaagcctaaggccaaggctcccttaccgccagcggaaactaagtataccgacgtgagcagcgcggccgactccgtggaatctactgcattcatcatggaacagaaggaaaatatgatcgataaggacgttgagctttctgtcgtcctccccggggatatcatcaagagcactactgtgcacggctccaaaccgatgatggatttgctgatctttctgtgtgctcaataccaccttaaccccagcagttataccatcgacttattgtctgccgaacaaaatcacattaaatttaaacccaatacgcccattggtatgttggaggttgaaaaggttattctcaaaccgaaaatgttagacaaaaagaagccgacctag

SEQ ID NO: 98452 - DNA, 474 bp, Artificial Sequence
  derived and/or modified sequence
atggacggccggaccccccggccccaggacgcccccgcccggcggaagccaaaggccaaagccccactgcctccagcagagactaagtacactgatgtgtcgagcgctgcggatagtgtggagtccaccgcttttatcatggagcaaaaagagaatatgatcgataaagacgtggagctgagtgtggtgctgccaggcgacatcatcaaaagcacaactgtgcacggcagtaaacccatgatggaccttctcatctttctctgtgcccagtaccatttgaacccaagtagctataccatcgatctcctgtcagctgagcagaaccatataaagtttaagccaaacactcctatcggaatgctagaggtcgagaaggttatcctaaagcccaagatgcttgataaaaaaaagcccaccccaatcatcccggagaaaaccgtcagggttgtgattaacttcaagaaaacacagtag

SEQ ID NO: 98453 - DNA, 420 bp, Artificial Sequence
  derived and/or modified sequence
atggacggacggacgccacggcctcaggatgctccggctcggcgaaagcctaaggccaaggccccacttcctccagccgagaccaaatataccgacgtgagctcagccgcagatagcgtagaatcaactgccttcatcatggaacagaaggaaaacatgatagataaagacgttgagctgtctgtggttctgccaggagacattataaagagcacaacagtgcatgggtccaaaccaatgatggatctgttgatattcctgtgcgcacagtaccacctgaaccctagttcctacactatagatctacttagtgcggagcagaaccacatcaagtttaagcccaacacccccatcggaatgctggaagtggagaaagttatacttaagcccaagatgctggacaaaaagaagcctacgtag

SEQ ID NO: 98454 - DNA, 474 bp, Artificial Sequence
  derived and/or modified sequence
atggacggaagaactccccgacctcaggatgctccagcacggagaaaaccaaaggccaaggctccacttccacccgcagagactaaatatacagacgtgagttctgcagccgatagcgtggaatctaccgccttcattatggagcagaaagagaatatgatagataaggacgtggagcttagcgttgtgctcccaggagacataatcaagagtaccactgtgcatggctctaaacccatgatggacctgctgattttcctgtgtgcacagtaccacctgaacccctcaagctatactattgacctgttgtccgccgagcagaaccatattaaatttaagcccaataccccaatcggaatgttggaggtggagaaggtcattctgaagcccaaaatgctggataaaaaaaagcccacccccattattcctgaaaaaactgtgcgcgtcgttattaacttcaaaaagacccagtag

SEQ ID NO: 98455 - protein, 321 aa, Artificial Sequence
  derived and/or modified sequence
MCNTNMSVPTDGAVTTSQIPASEQETLVRPKPLLLKLLKSVGAQKDTYTMKEDLDAGVSEHSGDWLDQDSVSDQFSVEFEVESLDSEDYSLSEEGQELSDEDDEVYQVTVYQAGESDTDSFEEDPEISLADYWKCTSCNEMNPPLPSHCNRCWALRENWLPEDKGKDKGEISEKAKLENSTQAEEGFDVPDCKKTIVNDSRESCVEENDDKITQASQSQESEDYSQPSTSSSIIYSSQEDVKEFEREETQDKEESVESSLPLNAIEPCVICQGRPKNGCIVHGKTGHLMACFTCAKKLKKRNKPCPVCRQPIQMIVLTYFP

SEQ ID NO: 98456 - protein, 159 aa, Artificial Sequence
  derived and/or modified sequence
MCNTNMSVPTDGAVTTSQIPASEQETLVRPKPLLLKLLKSVGAQKDTYTMKEDLDAGVSEHSGDWLDQDSVSDQFSVEFEVESLDSEDYSLSEEGQELSDEDDEVYQVTVYQAGESDTDSFEEDPEISLADYWKCLKKRNKPCPVCRQPIQMIVLTYFP

SEQ ID NO: 98457 - protein, 296 aa, Artificial Sequence
  derived and/or modified sequence
MCNTNMSVPTDGAVTTSQIPASEQETLDLDAGVSEHSGDWLDQDSVSDQFSVEFEVESLDSEDYSLSEEGQELSDEDDEVYQVTVYQAGESDTDSFEEDPEISLADYWKCTSCNEMNPPLPSHCNRCWALRENWLPEDKGKDKGEISEKAKLENSTQAEEGFDVPDCKKTIVNDSRESCVEENDDKITQASQSQESEDYSQPSTSSSIIYSSQEDVKEFEREETQDKEESVESSLPLNAIEPCVICQGRPKNGCIVHGKTGHLMACFTCAKKLKKRNKPCPVCRQPIQMIVLTYFP

SEQ ID NO: 98458 - DNA, 966 bp, Artificial Sequence
  derived and/or modified sequence
atgtgcaacaccaacatgagcgtgcccaccgacggcgccgtgaccaccagccagatccccgccagcgagcaggagaccctggtgagacccaagcccctgctgctgaagctgctgaagagcgtgggcgcccagaaggacacctacaccatgaaggaggacctggacgccggcgtgagcgagcacagcggcgactggctggaccaggacagcgtgagcgaccagttcagcgtggagttcgaggtggagagcctggacagcgaggactacagcctgagcgaggagggccaggagctgagcgacgaggacgacgaggtgtaccaggtgaccgtgtaccaggccggcgagagcgacaccgacagcttcgaggaggaccccgagatcagcctggccgactactggaagtgcaccagctgcaacgagatgaacccccccctgcccagccactgcaacagatgctgggccctgagagagaactggctgcccgaggacaagggcaaggacaagggcgagatcagcgagaaggccaagctggagaacagcacccaggccgaggagggcttcgacgtgcccgactgcaagaagaccatcgtgaacgacagcagagagagctgcgtggaggagaacgacgacaagatcacccaggccagccagagccaggagagcgaggactacagccagcccagcaccagcagcagcatcatctacagcagccaggaggacgtgaaggagttcgagagagaggagacccaggacaaggaggagagcgtggagagcagcctgcccctgaacgccatcgagccctgcgtgatctgccagggcagacccaagaacggctgcatcgtgcacggcaagaccggccacctgatggcctgcttcacctgcgccaagaagctgaagaagagaaacaagccctgccccgtgtgcagacagcccatccagatgatcgtgctgacctacttcccctag

SEQ ID NO: 98459 - DNA, 480 bp, Artificial Sequence
  derived and/or modified sequence
atgtgcaacaccaacatgagcgtgcccaccgacggcgccgtgaccaccagccagatccccgccagcgagcaggagaccctggtgagacccaagcccctgctgctgaagctgctgaagagcgtgggcgcccagaaggacacctacaccatgaaggaggacctggacgccggcgtgagcgagcacagcggcgactggctggaccaggacagcgtgagcgaccagttcagcgtggagttcgaggtggagagcctggacagcgaggactacagcctgagcgaggagggccaggagctgagcgacgaggacgacgaggtgtaccaggtgaccgtgtaccaggccggcgagagcgacaccgacagcttcgaggaggaccccgagatcagcctggccgactactggaagtgcctgaagaagagaaacaagccctgccccgtgtgcagacagcccatccagatgatcgtgctgacctacttcccctag

SEQ ID NO: 98460 - DNA, 891 bp, Artificial Sequence
  derived and/or modified sequence
atgtgcaacaccaacatgagcgtgcccaccgacggcgccgtgaccaccagccagatccccgccagcgagcaggagaccctggacctggacgccggcgtgagcgagcacagcggcgactggctggaccaggacagcgtgagcgaccagttcagcgtggagttcgaggtggagagcctggacagcgaggactacagcctgagcgaggagggccaggagctgagcgacgaggacgacgaggtgtaccaggtgaccgtgtaccaggccggcgagagcgacaccgacagcttcgaggaggaccccgagatcagcctggccgactactggaagtgcaccagctgcaacgagatgaacccccccctgcccagccactgcaacagatgctgggccctgagagagaactggctgcccgaggacaagggcaaggacaagggcgagatcagcgagaaggccaagctggagaacagcacccaggccgaggagggcttcgacgtgcccgactgcaagaagaccatcgtgaacgacagcagagagagctgcgtggaggagaacgacgacaagatcacccaggccagccagagccaggagagcgaggactacagccagcccagcaccagcagcagcatcatctacagcagccaggaggacgtgaaggagttcgagagagaggagacccaggacaaggaggagagcgtggagagcagcctgcccctgaacgccatcgagccctgcgtgatctgccagggcagacccaagaacggctgcatcgtgcacggcaagaccggccacctgatggcctgcttcacctgcgccaagaagctgaagaagagaaacaagccctgccccgtgtgcagacagcccatccagatgatcgtgctgacctacttcccctag

SEQ ID NO: 98461 - DNA, 966 bp, Artificial Sequence
  derived and/or modified sequence
atgtgtaacactaatatgtcagtgcccactgacggtgctgtcactacctcccagatcccagcatcagaacaggagacattggtacggcccaagcccctgctgcttaagttgttgaaaagcgttggtgcacagaaggacacttacaccatgaaggaggatctcgatgctggtgtgagcgaacatagcggagattggctggatcaggattcagtctcagaccagttttcggtggaatttgaagtagagagtctggacagcgaagattatagcctctccgaggaaggtcaggagctgtcagatgaggacgacgaagtttaccaggtaaccgtctaccaagctggtgagagcgatacagatagtttcgaagaagaccctgagatctcactggccgattactggaagtgtacatcttgcaacgagatgaatcctcctttaccgtcgcattgcaatagatgctgggctctgcgggaaaattggctgccggaagataagggtaaagacaagggagaaatttctgagaaagcgaaacttgagaatagcactcaggccgaagagggattcgatgttcctgactgtaaaaaaaccattgttaacgactcacgggagagttgtgtggaagaaaatgacgacaaaattacacaggccagtcagagccaggagagtgaagactacagtcaaccttcgacctcttccagcattatttactcatcccaggaggacgtcaaggaattcgaacgagaggaaactcaggacaaagaggagtccgttgagtcgagcctgccactgaacgcaattgagccttgcgtaatatgccaggggcgacccaagaatggatgcattgtccatggcaagacagggcacctcatggcctgctttacttgtgccaaaaagctgaagaaaagaaacaaaccctgtcccgtgtgtaggcagcctatccagatgattgtcctcacgtattttccctag

SEQ ID NO: 98462 - DNA, 966 bp, Artificial Sequence
  derived and/or modified sequence
atgtgcaatacaaatatgtccgtgcccaccgacggcgccgttaccacgtcacagatccctgcctccgaacaggaaaccctggttcgaccaaagccattactcttgaaactgcttaaatccgttggtgcacagaaagacacctacaccatgaaggaagacctggatgctggtgttagtgaacactctggggattggttagatcaggattccgtctccgaccagtttagcgtcgagtttgaagtcgagagcttggactccgaggactactctctgtcagaagagggacaggaactctcagacgaagatgatgaggtttaccaggtcactgtgtatcaggccggtgaatcagataccgatagcttcgaggaggacccagagatcagtttggccgattattggaaatgtactagctgcaatgagatgaacccacctttaccctcacactgcaatcggtgttgggcgctgcgggagaattggcttcccgaagataaaggtaaggacaaaggcgagatcagcgagaaggcaaagctggagaactctacccaggctgaggaggggttcgacgtccccgactgcaagaagaccattgtaaacgactccagagagtcctgcgtcgaagagaatgatgacaagataacacaagcttctcagtctcaggaatccgaagactactcccagccttcaacgtcctcttccatcatctactcatctcaggaggacgtaaaagagttcgagcgtgaggagacacaggacaaggaggagagcgtggagtccagcctgccccttaacgccatcgaaccatgtgtgatctgccaaggccgaccaaagaatggctgcatcgtgcatgggaaaacgggtcacctgatggcctgctttacttgtgctaagaagctgaagaaaaggaacaagccctgtcccgtttgcaggcagcctatccagatgatagtgcttacctactttccatag

SEQ ID NO: 98463 - DNA, 480 bp, Artificial Sequence
  derived and/or modified sequence
atgtgcaacactaatatgtccgtgcctacagacggagctgtaactacctcccaaatcccagcctcagaacaggagacgttggtcaggcctaaacccctgctcctgaagttgctaaagtccgtgggtgctcagaaggacacctatacgatgaaagaagatcttgacgccggcgtgtccgagcacagcggcgactggctggatcaagattcagtgtccgatcagttcagtgtagaatttgaagtcgagagcttagattcagaggattactccctttccgaagagggccaggagctgagcgacgaagatgacgaagtttatcaggtcactgtgtaccaggcaggggagtctgacacagatagcttcgaggaggatccagaaatttctctggcagattattggaaatgcctgaaaaaacgcaacaagccatgcccagtctgcagacagcccatacaaatgatcgtgctcacttacttcccctag

SEQ ID NO: 98464 - DNA, 891 bp, Artificial Sequence
  derived and/or modified sequence
atgtgcaataccaatatgagtgtgcctactgacggagctgtgacaaccagccagatcccagccagcgagcaggaaacattagacttagatgcaggagtgagcgagcacagcggtgactggctggaccaggactccgtgagtgaccagttctctgttgaatttgaggtggagtccctggatagcgaagattatagtctaagtgaggagggacaggagctgtctgatgaagacgacgaggtgtaccaggtgaccgtttatcaggcgggcgagagtgatacggattctttcgaggaagaccctgaaataagtctggcggactattggaaatgcacctcatgtaacgaaatgaatccgcccctgccaagtcactgcaatcgatgttgggccttgcgtgagaactggcttccagaggataaaggtaaggacaaaggcgagatctctgagaaagctaagctggaaaactcaacgcaggccgaggaaggatttgatgtgcctgactgcaaaaagactatcgtcaacgattcaagggaaagctgcgtagaggagaacgacgataagataacccaggcctcccaaagtcaagaatcagaggattacagccaacccagcacaagttcgtcaatcatttactcatcccaggaggatgtgaaggagttcgagcgagaagagacccaagataaagaggagagtgtggaaagctctctgccactgaatgcaattgaaccctgcgttatttgccagggaaggccaaaaaatgggtgcatcgtccacggcaagactggccacctgatggcctgtttcacttgcgcgaagaagttgaaaaaaaggaacaagccatgcccagtgtgtaggcagcccatccagatgatcgtactgacttatttcccttag

SEQ ID NO: 98465 - DNA, 891 bp, Artificial Sequence
  derived and/or modified sequence
atgtgcaacacgaacatgtcagtgcccacagatggggctgtgactaccagccaaatccccgcttctgagcaggaaactctggatttggacgccggggtgtcagagcattccggtgattggcttgatcaggattccgtgtccgaccagttttcagtagaattcgaggtggagtcgctggacagcgaggattacagtctgtcagaggagggacaggagctgtccgatgaagacgacgaggtgtaccaggtgacagtttatcaggccggcgagagcgatacagattcattcgaggaggatcccgaaattagtctcgccgattactggaagtgtacgagctgcaacgaaatgaaccctcccctgccatcccactgcaatcggtgctgggctttgagggaaaattggctgccggaggataaaggcaaggataagggggaaataagcgaaaaggcaaaactggaaaattctactcaggccgaagagggatttgatgtgcctgattgcaaaaagacaattgttaacgactctcgtgagtcctgcgtggaagaaaacgacgataaaatcacacaagcaagccagtctcaggagtcagaagattactcacagcccagcacatctagcagcataatttatagctcacaggaggacgtgaaagaatttgagcgggaggagacacaggataaagaggaatcagttgagtcaagtctcccgctgaacgccattgagccatgcgtcatatgccagggtcgcccaaaaaacgggtgtatcgtacacggcaaaactggccaccttatggcctgtttcacctgtgcaaaaaaattgaagaaacggaataagccctgtcctgtgtgccggcaacctatacaaatgatagtgctgacttattttccatag

SEQ ID NO: 98466 - DNA, 966 bp, Artificial Sequence
  derived and/or modified sequence
atgtgcaacaccaacatgtctgtgcccacagatggagctgtgaccaccagccagatcccagccagcgagcaggagaccctggtgcggcccaagcccctgctgctgaagctgctgaagtctgtgggcgcccagaaggacacctacaccatgaaggaggacctggatgctggggtgtctgagcacagcggggactggctggaccaggacagcgtgtctgaccagttctctgtggagtttgaggtggagagcctggacagcgaggactacagcctgtctgaggagggccaggagctgagtgatgaagatgatgaggtgtaccaggtgacagtgtaccaggccggggagagtgacacagacagctttgaagaagatcctgagatcagcctggccgactactggaagtgcaccagctgcaatgagatgaacccccccctgcccagccactgcaaccgctgctgggccctgcgggagaactggctgcctgaggacaagggcaaggacaagggggagatcagcgagaaggccaagctggagaacagcacccaggccgaggagggctttgatgtgcctgactgcaagaagaccatcgtgaatgacagccgggagagctgtgtggaggagaatgatgacaagatcacccaggccagccagagccaggagagcgaggactacagccagcccagcaccagcagcagcatcatctacagcagccaggaggatgtgaaggagtttgagcgggaggagacccaggacaaggaggagagcgtggagagcagcctgcccctgaatgccatcgagccctgcgtcatctgccagggccggcccaagaatggctgcatcgtgcacggcaagacaggccacctgatggcctgcttcacctgtgccaagaagctgaagaagaggaacaagccctgccctgtgtgccggcagcccatccagatgattgtgctgacctacttcccctag

SEQ ID NO: 98467 - DNA, 480 bp, Artificial Sequence
  derived and/or modified sequence
atgtgcaacaccaacatgtctgtgcccacagatggagctgtgaccaccagccagatcccagccagcgagcaggagaccctggtgcggcccaagcccctgctgctgaagctgctgaagtctgtgggcgcccagaaggacacctacaccatgaaggaggacctggatgctggggtgtctgagcacagcggggactggctggaccaggacagcgtgtctgaccagttctctgtggagtttgaggtggagagcctggacagcgaggactacagcctgtctgaggagggccaggagctgagtgatgaagatgatgaggtgtaccaggtgacagtgtaccaggccggggagagtgacacagacagctttgaagaagatcctgagatcagcctggccgactactggaagtgcctgaagaagaggaacaagccctgccctgtgtgccggcagcccatccagatgattgtgctgacctacttcccctag

SEQ ID NO: 98468 - DNA, 891 bp, Artificial Sequence
  derived and/or modified sequence
atgtgcaacaccaacatgtctgtgcccacagatggagctgtgaccaccagccagatcccagccagcgagcaggagaccctggacctggatgctggggtgtctgagcacagcggggactggctggaccaggacagcgtgtctgaccagttctctgtggagtttgaggtggagagcctggacagcgaggactacagcctgtctgaggagggccaggagctgagtgatgaagatgatgaggtgtaccaggtgacagtgtaccaggccggggagagtgacacagacagctttgaggaggaccctgagatcagcctggccgactactggaagtgcaccagctgcaatgagatgaacccccccctgcccagccactgcaaccgctgctgggccctgcgggagaactggctgcctgaagataaaggcaaggacaagggggagatcagcgagaaggccaagctggagaacagcacccaggccgaggagggctttgatgtgcctgactgcaagaagaccatcgtgaatgacagccgggagagctgtgtggaggagaatgatgacaagatcacccaggccagccagagccaggagagcgaggactacagccagcccagcaccagcagcagcatcatctacagcagccaggaggatgtgaaggagtttgagcgggaggagacccaggacaaggaggagagcgtggagagcagcctgcccctgaatgccatcgagccctgtgtgatctgccagggccggcccaagaatggctgcatcgtgcacggcaagacaggccacctgatggcctgcttcacctgtgccaagaagctgaagaagaggaacaagccctgccctgtgtgccggcagcccatccagatgattgtgctgacctacttcccctag

SEQ ID NO: 98469 - DNA, 966 bp, Artificial Sequence
  derived and/or modified sequence
atgtgcaataccaacatgtctgtacctactgatggtgctgtaaccacctcacagattccagcttcggaacaagagaccctggttagaccaaagccattgcttttgaagttattaaagtctgttggtgcacaaaaagacacttatactatgaaagaggatcttgatgctggtgtaagtgaacattcaggtgattggttggatcaggattcagtttcagatcagtttagtgtagaatttgaagttgaatctctcgactcagaagattatagccttagtgaagaaggacaagaactctcagatgaagatgatgaggtatatcaagttactgtgtatcaggcaggggagagtgatacagattcatttgaagaagatcctgaaatttccttagctgactattggaaatgcacttcatgcaatgaaatgaatcccccccttccatcacattgcaacagatgttgggcccttcgtgagaattggcttcctgaagataaagggaaagataaaggggaaatctctgagaaagccaaactggaaaactcaacacaagctgaagagggctttgatgttcctgattgtaaaaaaactatagtgaatgattccagagagtcatgtgttgaggaaaatgatgataaaattacacaagcttcacaatcacaagaaagtgaagactattctcagccatcaacttctagtagcattatttatagcagccaagaagatgtgaaagagtttgaaagggaagaaacccaagacaaagaagagagtgtggaatctagtttgccccttaatgccattgaaccttgtgtgatttgtcaaggtcgacctaaaaatggttgcattgtccatggcaaaacaggacatcttatggcctgctttacatgtgcaaagaagctaaagaaaaggaataagccctgcccagtatgtagacaaccaattcaaatgattgtgctaacttatttcccctag

SEQ ID NO: 98470 - DNA, 6853 bp, Artificial Sequence
  derived and/or modified sequence
gcaccgcggcgagcttggctgcttctggggcctgtgtggccctgtgtgtcggaaagatggagcaagaagccgagcccgaggggcggccgcgacccctctgaccgagatcctgctgctttcgcagccaggagcaccgtccctccccggattagtgcgtacgagcgcccagtgccctggcccggagagtggaatgatccccgaggcccagggcgtcgtgcttccgcgcgccccgtgaaggaaactggggagtcttgagggacccccgactccaagcgcgaaaaccccggatggtgaggagcaggcaaatgtgcaataccaacatgtctgtacctactgatggtgctgtaaccacctcacagattccagcttcggaacaagagaccctggttagaccaaagccattgcttttgaagttattaaagtctgttggtgcacaaaaagacacttatactatgaaagaggatcttgatgctggtgtaagtgaacattcaggtgattggttggatcaggattcagtttcagatcagtttagtgtagaatttgaagttgaatctctcgactcagaagattatagccttagtgaagaaggacaagaactctcagatgaagatgatgaggtatatcaagttactgtgtatcaggcaggggagagtgatacagattcatttgaagaagatcctgaaatttccttagctgactattggaaatgcacttcatgcaatgaaatgaatcccccccttccatcacattgcaacagatgttgggcccttcgtgagaattggcttcctgaagataaagggaaagataaaggggaaatctctgagaaagccaaactggaaaactcaacacaagctgaagagggctttgatgttcctgattgtaaaaaaactatagtgaatgattccagagagtcatgtgttgaggaaaatgatgataaaattacacaagcttcacaatcacaagaaagtgaagactattctcagccatcaacttctagtagcattatttatagcagccaagaagatgtgaaagagtttgaaagggaagaaacccaagacaaagaagagagtgtggaatctagtttgccccttaatgccattgaaccttgtgtgatttgtcaaggtcgacctaaaaatggttgcattgtccatggcaaaacaggacatcttatggcctgctttacatgtgcaaagaagctaaagaaaaggaataagccctgcccagtatgtagacaaccaattcaaatgattgtgctaacttatttcccctagttgacctgtctataagagaattatatatttctaactatataaccctaggaatttagacaacctgaaatttattcacatatatcaaagtgagaaaatgcctcaattcacatagatttcttctctttagtataattgacctactttggtagtggaatagtgaatacttactataatttgacttgaatatgtagctcatcctttacaccaactcctaattttaaataatttctactctgtcttaaatgagaagtacttggtttttttttttcttaaatatgtatatgacatttaaatgtaacttattattttttttgagaccgagtcttgctctgttacccaggctggagtgcagtggcgtgatcttggctcactgcaagctctgcctcccgggttcgcaccattctcctgcctcagcctcccaattagcttggcctacagtcatctgccaccacacctggctaattttttgtacttttagtagagacagggtttcaccgtgttagccaggatggtctcgatctcctgacctcgtgatccgcccacctcggcctcccaaagtgctgggattacaggcatgagccaccgcgtccggcctaaatgtcacttagtacctttgatataaagagaaaatgtgtgaaagatttagttttttgtttttttgtttgtttgtttgtttgtttgttttgagatgagtctctctgtcgcccaggctggagtgcagtgtcatgatctagcagtctccgcttcccgggttcaagccattctcctggctcagcctctggagcagctgggattacaggcatgcaccaccatgcccagctaatttttgtatttttagtagagatagggtttcaccatgttggccaggctggtcacgaactcctgacctcaagtgaggtcacccgcctcggcctcccgaagtgctgggattgcagatgtgagccaccatgtccagccaagaattagtatttaaattttagatactctttttttttttttttttttttttttttgagacagagtcttgctccatcacccatgctagagtgcagtggagtgatctcggctcactgcaacttccgccttctgggttcaagctattctcctgcctcagccttccaagtaactgggattacaggcatgtaccaccataccagctgatttttttgtatttttagtaaagacagggtttcaccatgttagccaggctgatcttgaactcctaaactcaagtgatctactcacctcagcctcccaaaatgctgggattacagatgtgaggcacctggcctcagatttttgatactcttaaaccttctgatccttagtttctctctccaaaatactctttctaggttaaaaaaaaaaaggctcttatatttggtgctatgtaaatgaaaatgttttttaggttttcttgatttaacaatagagacagggtctccctgtgttgcccaggctggtctcgaactcctgggctcaagagatcctcctgtcttggcctcgcaaagtgctaagtaggattacaggcgttagccaccacacccggctgtaaaaatgtacttattctccagcctcttttgtataaaccatagtaagggatgggagtaatgatgttatctgtgaaaatagccaccatttacccgtaagacaaaacttgttaaagcctcctgagtctaacctagattacatcaggccctttttcacacacaaaaaaatcctttatgggatttaatggaatctgttgtttccccctaagttgaaaaacaactctaagacactttaaagtaccttcttggcctgggttacatggttcccagcctaggtttcagacttttgcttaaggccagttttagaaacccgtgaattcagaaaagttaattcagaaatttgataaacagaattgttatttaaaaactaactggaaagattgttaagttctttctgaattattcagaaattatgcatcattttccttcaagaatgacagggtcagcatgtggaattccaagatacctcttgacttcctctcaagctccgtgtttggtcagtggaggcccatccgagctcagcactgagaagtgttagtttctttgggacccatctaccctgaccacatcatgatgttcatctgcagctgttgcaaggtgttcagattgtataaacataaatgtcacaaaaactttaaaagaagtgcaattctcaaaaggttaggtggactaaagcattctgtaaagcaactgctaataatgagcttacagtggatttgaatttgaaaaatatagtaacaagcctgtcaaatatctgcaagaactatggaataaaactactgatgcagtgaagacagttgaaaagatcaaacaaatgccaagctatatttataatgaacaaattcaagaaaaaggactacggaaagttcaggacatcaaagaagtcaggcaaaactcatcttgacccctgttgcaggcaaaggaacgcagctggaagaaaagatgatataacagttaacaggatgcagacatggcagaggtttcctaaaaatctcattatctataaccatttctatatttacatttgaaaatctcctttggagacttagaacctctaaattattgacttattttttatataaggtcactccgatgaaaggtgattacaaaatcatctacattgctgtctacaaaacagataatatggatgtttgatcgcatctcattgttaactctttactgatatgtttgtaaatacagaagtgaaatgtggacataaaatagttacgctatttggttaatggtactagacaacatgtaattaatgacattcaaaaatttatggctagtgatatatataaagtaaaattttctttgcagtaaaatatgccctttattatagaagggaggatataaggaaccaacagtttgtatgaaaatagctcaaataatatcttttattttgattttaatatttcttattttggtttattagtgtcttagaacaaaatggccttatataatgaagcctagttatgctggactgttttgatctcttttaattgttctgacagatagttggggatgagagccgaataaggtttgcctgaaataactgacactatataatttctgctttggcaaatactaagttctaacttgtcattcctggtagaacaagctttatttttcgagcctagcaatgatctagaagcagatgttatctcagtgccttttgcaatttgttgtgtgggtttttttttttttaaagccacacaataattttggaaaacaatgtatgggtagaacatgtgtctgttaattgcacacaaaaccacttttaatgggtacagagttaaatttgaaggaataagttctagctgaagtattatgaactccaaataatgctttgaggacctccaaaggtaaaagtactaatccctttggccatttattgagagagagagagagagagagtagggtgactatagttaatgtattgaatgttcttgctacaaataaatgatatttgagctgatgggtgtgctaattacactgatttgatcaatacccattgtatgtgaaacagtacatacaccatatttacaattatgtatttaacatttaaaatttctaatataagtatctctcaaactgtggattaacttcttgatttatatttaaatatgaatcttaagcaaaacagtgaaaataaccatcttgatttagtgtttttctcccatatgtgaattgtatatacttaggtgaagacaataaaatcaactgaactgtaagcttagaataggactgaggtaattctgcacagcaactttactaatggtacattgttgcttcaaaactctctctctctctctctgtctgtctcaataaatggccaaagggattagtagtttacctgtggaggtcctccaagcattatttggagttgataatacttcagctacaaccaagcagaatctcttttttttggaggtcctcgaagcattatttggagttgataatacttcagcttcaatttggagttgataatatttcagctagaacctagtagaatctgtttttttcctttggaggtcctcaaagcattattggagttcataatactgaagctagaaccaagcagaatctgtttttttctgaggagtatcggtagcataaatgtgattataaacatagtacacttgatatatggaggcagtgacagctatttttacaaaatttaaatctgcaaatggattcaacatgtttatgggttattaaaattgtctgatttcttaggttctttatagtacacgtgttgaaaataaatgattaagaattgtttcaagaatgcaattatttgatcttaaatttttatgagttgttaaaatagaaattatttgaatatcatatatttgggtaacaaaaggcacaagtctgaatgtgtttctttttctggaatggccatgcctgcccactttagaaatacaaatatcactgggcagcttgaagcagttgggagcctccaatgagagcaacttgagagaatgatgttgcaagttagtaggagtaagaaatgctgtgttctccctgtcttctcttaggtcacatggcagcctggcctaagtgatcgtgaatggtctataagggaggtagctgggacagggaggggagtttgggctagccaccgtaccacttgtcagcgtgaaaagtaagattgtaattgcctgtttagttttctgcctcatctttgaaagttccaccaagctgggaacctcttgattgtgaggcacaaatgtaagtacatcagaaaaaaacaaaaaaactggctttaaagcaggagcttgtgggcccctaagccagacggggactagcttttggcattatataattaagattttttaaatccttaataagggttttattttatttttatttattttttgagacggagtcttgctctgtggctcaggctggagtacagtggtgcaatcttggctcactgcaacctctgcctcctggctgtgttcaagtggttctgcttcagcctcccaagtagctggggttagagcaccctgtcaccacgccccgctaatttttgtatttctagcagagatgaagtttcactatgttggccaggctgggctcaaactcctgacctcaagtgatctgcccgccttggccccccaaagtgctgtgattacaggcgtgagccgccacgcccagcctaataagggttttaaagataattagtgtgtaggtctgtaggcttatgatggtaaccacaagttgttaatggcattgtgaaaagtttttagttgcgctttatgggtggatgctgaattacattttgatttgatacttataaaaagaaaaagtatttcttcagcttaaaaaattgtttaaaagtttgtgatcatattgtctaccatgtagccagctttcaattatatgtaagagggactttttgacatttacaaataatactttgaggtagatatctgaaagcaccagcacttggaaggtgttcagaagtaacaaattataaaatgagctaacaaacgaaaggcaaaataaaaccgtaaagcaagc

SEQ ID NO: 98471 - DNA, 754 bp, Artificial Sequence
  derived and/or modified sequence
ctgtgtggccctgtgtgtcggaaagatggagcaagaagccgagcccgaggggcggccgcgacccctctgaccgagatcctgctgctttcgcagccaggagcaccgtccctccccggattagtgcgtacgagcgcccagtgccctggcccggagagtggaatgatccccgaggcccagggcgtcgtgcttccgcgcgccccgtgaaggaaactggggagtcttgagggacccccgactccaagcgcgaaaaccccggatggtgaggagcaggcaaatgtgcaataccaacatgtctgtacctactgatggtgctgtaaccacctcacagattccagcttcggaacaagagaccctggttagaccaaagccattgcttttgaagttattaaagtctgttggtgcacaaaaagacacttatactatgaaagaggatcttgatgctggtgtaagtgaacattcaggtgattggttggatcaggattcagtttcagatcagtttagtgtagaatttgaagttgaatctctcgactcagaagattatagccttagtgaagaaggacaagaactctcagatgaagatgatgaggtatatcaagttactgtgtatcaggcaggggagagtgatacagattcatttgaagaagatcctgaaatttccttagctgactattggaaatgcctaaagaaaaggaataagccctgcccagtatgtagacaaccaattcaaatgattgtgctaacttatttcccctag

SEQ ID NO: 98472 - DNA, 891 bp, Artificial Sequence
  derived and/or modified sequence
atgtgcaataccaacatgtctgtacctactgatggtgctgtaaccacctcacagattccagcttcggaacaagagaccctggatcttgatgctggtgtaagtgaacattcaggtgattggttggatcaggattcagtttcagatcagtttagtgtagaatttgaagttgaatctctcgactcagaagattatagccttagtgaagaaggacaagaactctcagatgaagatgatgaggtatatcaagttactgtgtatcaggcaggggagagtgatacagattcatttgaagaagatcctgaaatttccttagctgactattggaaatgcacttcatgcaatgaaatgaatcccccccttccatcacattgcaacagatgttgggcccttcgtgagaattggcttcctgaagataaagggaaagataaaggggaaatctctgagaaagccaaactggaaaactcaacacaagctgaagagggctttgatgttcctgattgtaaaaaaactatagtgaatgattccagagagtcatgtgttgaggaaaatgatgataaaattacacaagcttcacaatcacaagaaagtgaagactattctcagccatcaacttctagtagcattatttatagcagccaagaagatgtgaaagagtttgaaagggaagaaacccaagacaaagaagagagtgtggaatctagtttgccccttaatgccattgaaccttgtgtgatttgtcaaggtcgacctaaaaatggttgcattgtccatggcaaaacaggacatcttatggcctgctttacatgtgcaaagaagctaaagaaaaggaataagccctgcccagtatgtagacaaccaattcaaatgattgtgctaacttatttcccctag

SEQ ID NO: 98473 - DNA, 6778 bp, Artificial Sequence
  derived and/or modified sequence
gcaccgcggcgagcttggctgcttctggggcctgtgtggccctgtgtgtcggaaagatggagcaagaagccgagcccgaggggcggccgcgacccctctgaccgagatcctgctgctttcgcagccaggagcaccgtccctccccggattagtgcgtacgagcgcccagtgccctggcccggagagtggaatgatccccgaggcccagggcgtcgtgcttccgcgcgccccgtgaaggaaactggggagtcttgagggacccccgactccaagcgcgaaaaccccggatggtgaggagcaggcaaatgtgcaataccaacatgtctgtacctactgatggtgctgtaaccacctcacagattccagcttcggaacaagagaccctggatcttgatgctggtgtaagtgaacattcaggtgattggttggatcaggattcagtttcagatcagtttagtgtagaatttgaagttgaatctctcgactcagaagattatagccttagtgaagaaggacaagaactctcagatgaagatgatgaggtatatcaagttactgtgtatcaggcaggggagagtgatacagattcatttgaagaagatcctgaaatttccttagctgactattggaaatgcacttcatgcaatgaaatgaatcccccccttccatcacattgcaacagatgttgggcccttcgtgagaattggcttcctgaagataaagggaaagataaaggggaaatctctgagaaagccaaactggaaaactcaacacaagctgaagagggctttgatgttcctgattgtaaaaaaactatagtgaatgattccagagagtcatgtgttgaggaaaatgatgataaaattacacaagcttcacaatcacaagaaagtgaagactattctcagccatcaacttctagtagcattatttatagcagccaagaagatgtgaaagagtttgaaagggaagaaacccaagacaaagaagagagtgtggaatctagtttgccccttaatgccattgaaccttgtgtgatttgtcaaggtcgacctaaaaatggttgcattgtccatggcaaaacaggacatcttatggcctgctttacatgtgcaaagaagctaaagaaaaggaataagccctgcccagtatgtagacaaccaattcaaatgattgtgctaacttatttcccctagttgacctgtctataagagaattatatatttctaactatataaccctaggaatttagacaacctgaaatttattcacatatatcaaagtgagaaaatgcctcaattcacatagatttcttctctttagtataattgacctactttggtagtggaatagtgaatacttactataatttgacttgaatatgtagctcatcctttacaccaactcctaattttaaataatttctactctgtcttaaatgagaagtacttggtttttttttttcttaaatatgtatatgacatttaaatgtaacttattattttttttgagaccgagtcttgctctgttacccaggctggagtgcagtggcgtgatcttggctcactgcaagctctgcctcccgggttcgcaccattctcctgcctcagcctcccaattagcttggcctacagtcatctgccaccacacctggctaattttttgtacttttagtagagacagggtttcaccgtgttagccaggatggtctcgatctcctgacctcgtgatccgcccacctcggcctcccaaagtgctgggattacaggcatgagccaccgcgtccggcctaaatgtcacttagtacctttgatataaagagaaaatgtgtgaaagatttagttttttgtttttttgtttgtttgtttgtttgtttgttttgagatgagtctctctgtcgcccaggctggagtgcagtgtcatgatctagcagtctccgcttcccgggttcaagccattctcctggctcagcctctggagcagctgggattacaggcatgcaccaccatgcccagctaatttttgtatttttagtagagatagggtttcaccatgttggccaggctggtcacgaactcctgacctcaagtgaggtcacccgcctcggcctcccgaagtgctgggattgcagatgtgagccaccatgtccagccaagaattagtatttaaattttagatactctttttttttttttttttttttttttttgagacagagtcttgctccatcacccatgctagagtgcagtggagtgatctcggctcactgcaacttccgccttctgggttcaagctattctcctgcctcagccttccaagtaactgggattacaggcatgtaccaccataccagctgatttttttgtatttttagtaaagacagggtttcaccatgttagccaggctgatcttgaactcctaaactcaagtgatctactcacctcagcctcccaaaatgctgggattacagatgtgaggcacctggcctcagatttttgatactcttaaaccttctgatccttagtttctctctccaaaatactctttctaggttaaaaaaaaaaaggctcttatatttggtgctatgtaaatgaaaatgttttttaggttttcttgatttaacaatagagacagggtctccctgtgttgcccaggctggtctcgaactcctgggctcaagagatcctcctgtcttggcctcgcaaagtgctaagtaggattacaggcgttagccaccacacccggctgtaaaaatgtacttattctccagcctcttttgtataaaccatagtaagggatgggagtaatgatgttatctgtgaaaatagccaccatttacccgtaagacaaaacttgttaaagcctcctgagtctaacctagattacatcaggccctttttcacacacaaaaaaatcctttatgggatttaatggaatctgttgtttccccctaagttgaaaaacaactctaagacactttaaagtaccttcttggcctgggttacatggttcccagcctaggtttcagacttttgcttaaggccagttttagaaacccgtgaattcagaaaagttaattcagaaatttgataaacagaattgttatttaaaaactaactggaaagattgttaagttctttctgaattattcagaaattatgcatcattttccttcaagaatgacagggtcagcatgtggaattccaagatacctcttgacttcctctcaagctccgtgtttggtcagtggaggcccatccgagctcagcactgagaagtgttagtttctttgggacccatctaccctgaccacatcatgatgttcatctgcagctgttgcaaggtgttcagattgtataaacataaatgtcacaaaaactttaaaagaagtgcaattctcaaaaggttaggtggactaaagcattctgtaaagcaactgctaataatgagcttacagtggatttgaatttgaaaaatatagtaacaagcctgtcaaatatctgcaagaactatggaataaaactactgatgcagtgaagacagttgaaaagatcaaacaaatgccaagctatatttataatgaacaaattcaagaaaaaggactacggaaagttcaggacatcaaagaagtcaggcaaaactcatcttgacccctgttgcaggcaaaggaacgcagctggaagaaaagatgatataacagttaacaggatgcagacatggcagaggtttcctaaaaatctcattatctataaccatttctatatttacatttgaaaatctcctttggagacttagaacctctaaattattgacttattttttatataaggtcactccgatgaaaggtgattacaaaatcatctacattgctgtctacaaaacagataatatggatgtttgatcgcatctcattgttaactctttactgatatgtttgtaaatacagaagtgaaatgtggacataaaatagttacgctatttggttaatggtactagacaacatgtaattaatgacattcaaaaatttatggctagtgatatatataaagtaaaattttctttgcagtaaaatatgccctttattatagaagggaggatataaggaaccaacagtttgtatgaaaatagctcaaataatatcttttattttgattttaatatttcttattttggtttattagtgtcttagaacaaaatggccttatataatgaagcctagttatgctggactgttttgatctcttttaattgttctgacagatagttggggatgagagccgaataaggtttgcctgaaataactgacactatataatttctgctttggcaaatactaagttctaacttgtcattcctggtagaacaagctttatttttcgagcctagcaatgatctagaagcagatgttatctcagtgccttttgcaatttgttgtgtgggtttttttttttttaaagccacacaataattttggaaaacaatgtatgggtagaacatgtgtctgttaattgcacacaaaaccacttttaatgggtacagagttaaatttgaaggaataagttctagctgaagtattatgaactccaaataatgctttgaggacctccaaaggtaaaagtactaatccctttggccatttattgagagagagagagagagagagtagggtgactatagttaatgtattgaatgttcttgctacaaataaatgatatttgagctgatgggtgtgctaattacactgatttgatcaatacccattgtatgtgaaacagtacatacaccatatttacaattatgtatttaacatttaaaatttctaatataagtatctctcaaactgtggattaacttcttgatttatatttaaatatgaatcttaagcaaaacagtgaaaataaccatcttgatttagtgtttttctcccatatgtgaattgtatatacttaggtgaagacaataaaatcaactgaactgtaagcttagaataggactgaggtaattctgcacagcaactttactaatggtacattgttgcttcaaaactctctctctctctctctgtctgtctcaataaatggccaaagggattagtagtttacctgtggaggtcctccaagcattatttggagttgataatacttcagctacaaccaagcagaatctcttttttttggaggtcctcgaagcattatttggagttgataatacttcagcttcaatttggagttgataatatttcagctagaacctagtagaatctgtttttttcctttggaggtcctcaaagcattattggagttcataatactgaagctagaaccaagcagaatctgtttttttctgaggagtatcggtagcataaatgtgattataaacatagtacacttgatatatggaggcagtgacagctatttttacaaaatttaaatctgcaaatggattcaacatgtttatgggttattaaaattgtctgatttcttaggttctttatagtacacgtgttgaaaataaatgattaagaattgtttcaagaatgcaattatttgatcttaaatttttatgagttgttaaaatagaaattatttgaatatcatatatttgggtaacaaaaggcacaagtctgaatgtgtttctttttctggaatggccatgcctgcccactttagaaatacaaatatcactgggcagcttgaagcagttgggagcctccaatgagagcaacttgagagaatgatgttgcaagttagtaggagtaagaaatgctgtgttctccctgtcttctcttaggtcacatggcagcctggcctaagtgatcgtgaatggtctataagggaggtagctgggacagggaggggagtttgggctagccaccgtaccacttgtcagcgtgaaaagtaagattgtaattgcctgtttagttttctgcctcatctttgaaagttccaccaagctgggaacctcttgattgtgaggcacaaatgtaagtacatcagaaaaaaacaaaaaaactggctttaaagcaggagcttgtgggcccctaagccagacggggactagcttttggcattatataattaagattttttaaatccttaataagggttttattttatttttatttattttttgagacggagtcttgctctgtggctcaggctggagtacagtggtgcaatcttggctcactgcaacctctgcctcctggctgtgttcaagtggttctgcttcagcctcccaagtagctggggttagagcaccctgtcaccacgccccgctaatttttgtatttctagcagagatgaagtttcactatgttggccaggctgggctcaaactcctgacctcaagtgatctgcccgccttggccccccaaagtgctgtgattacaggcgtgagccgccacgcccagcctaataagggttttaaagataattagtgtgtaggtctgtaggcttatgatggtaaccacaagttgttaatggcattgtgaaaagtttttagttgcgctttatgggtggatgctgaattacattttgatttgatacttataaaaagaaaaagtatttcttcagcttaaaaaattgtttaaaagtttgtgatcatattgtctaccatgtagccagctttcaattatatgtaagagggactttttgacatttacaaataatactttgaggtagatatctgaaagcaccagcacttggaaggtgttcagaagtaacaaattataaaatgagctaacaaacgaaaggcaaaataaaaccgtaaagcaagc

SEQ ID NO: 98474 - DNA, 966 bp, Artificial Sequence
  derived and/or modified sequence
atgtgcaacaccaacatgagcgtgcccaccgacggcgccgtgaccactagtcagatacctgcatctgagcaagagacactggtgaggcctaagccccttctgctgaagctgctcaagtccgtgggggcccagaaggacacctacacgatgaaggaggatctggacgcgggcgtgagtgagcacagcggagattggctagaccaagactctgtgagcgaccagttcagtgtggagttcgaggtcgagtccctggactctgaggattacagcctctctgaggagggccaggaactgtcagacgaggacgacgaggtgtatcaggtgactgtgtaccaggccggtgagtctgataccgacagcttcgaggaagaccccgagatctcccttgcagactactggaaatgtacttcttgtaacgaaatgaatccgccgctcccttcacattgcaatcgctgctgggctcttcgggagaattggttacctgaggacaaaggtaaagataaaggggaaattagtgaaaaagcgaaactggagaacagcacgcaagctgaggaggggtttgatgttccggactgcaaaaaaactattgtaaacgactccagggaaagctgtgtagaggagaatgacgacaaaatcacacaggcatcccagagccaagagagcgaagattattcacagccaagcacgtcttctagtatcatttatagctcgcaagaggacgttaaagaattcgaacgggaggagactcaagataaggaagaatcagttgagagcagcctgcccctcaatgcgatcgaaccctgcgtcatatgtcaaggccgacctaaaaacggttgcatagtccacggcaagaccggtcatctgatggcatgtttcacttgcgctaaaaaattgaaaaaacgaaacaaaccatgtcctgtctgtcgacagccaatacagatgatcgtattgacctacttcccatag

SEQ ID NO: 98475 - DNA, 966 bp, Artificial Sequence
  derived and/or modified sequence
atgtgcaacaccaacatgagcgtgcccaccgacggcgccgtgaccacatctcagatcccagcaagcgagcaggaaaccttggtgagacctaaacctctgctcctgaagctcctgaagtccgtcggggcccagaaggacacatacactatgaaggaggatcttgatgctggagtcagcgagcactcaggagactggcttgaccaagacagcgttagcgatcagttctccgtggaatttgaggtagaatcccttgatagcgaggattacagtctgtccgaagaggggcaggaactgagcgacgaggatgacgaagtctaccaggtcactgtctatcaggctggcgagagtgacaccgactcattcgaggaagaccccgaaatctcgctggccgattactggaagtgcacatcatgcaacgaaatgaatcccccattgccttcgcattgtaatcgatgttgggcgctacgggaaaactggctgccagaagacaagggaaaggataaaggggaaatcagcgaaaaagctaaactggagaatagtacgcaagccgaagaaggttttgatgttcccgactgcaagaaaacgatcgtgaatgattcccgcgaatcgtgcgttgaagagaacgatgacaagatcacccaggcatcacagtcccaggagagcgaggactactcccagccatcaacctctagttcaattatctacagctcacaggaggatgtgaaagagttcgagagagaagagactcaagataaggaagagtctgtagaatcgtcgctgccccttaacgcgattgaaccttgcgtgatctgtcaaggcaggcccaaaaacggttgtatcgtgcatggcaagactggacatttgatggcatgcttcacttgcgcgaaaaagctcaagaaacgcaacaagccatgccccgtctgtagacagcccatccagatgattgtgctcacatatttcccttag

SEQ ID NO: 98476 - DNA, 480 bp, Artificial Sequence
  derived and/or modified sequence
atgtgcaacaccaacatgagcgtgcccaccgacggcgccgtgaccacgtctcagatccccgctagcgagcaagagactctggtaaggcctaagcccctccttctgaagctgctcaagagcgtcggggctcagaaggatacttacaccatgaaggaagaccttgacgctggcgttagcgagcatagcggagactggttagatcaggacagtgtctcagatcagttctcggtggagtttgaagtggagtctctcgattccgaggactacagtttgtctgaagagggccaggagctgtccgacgaggacgacgaggtctaccaagtgaccgtgtaccaggccggtgagagtgatacagactctttcgaagaggaccccgagataagcttagccgattactggaaatgcctgaaaaagaggaataaaccttgtcctgtctgccgccagccaatccagatgattgtattgacatacttcccttag

SEQ ID NO: 98477 - DNA, 891 bp, Artificial Sequence
  derived and/or modified sequence
atgtgcaacaccaacatgagcgtgcccaccgacggcgccgtgaccacatcacagatccctgccagtgagcaggagaccctcgaccttgatgccggcgtcagcgagcactctggcgattggttggatcaagattccgtctctgaccaattcagcgtcgaatttgaggttgaatccctggactctgaggattactcacttagcgaagaaggtcaggaactcagtgatgaggacgacgaggtgtaccaggtgaccgtctaccaggcaggcgaatccgataccgacagctttgaggaagaccctgaaatcagccttgctgactactggaagtgcaccagctgcaacgagatgaacccacctctgccaagccattgtaataggtgctgggccctgcgcgaaaattggcttcccgaagataagggaaaggacaaaggcgagatttcagagaaagctaagttagaaaattcaacacaagctgaagaaggtttcgatgtgcccgactgcaagaaaaccatcgtcaatgactcccgcgaaagctgcgtggaggagaatgacgacaaaatcacccaggccagccaatcccaggagtcagaggattattcacagccaagcacgtcttccagcataatatactccagccaggaagatgtgaaagagtttgaaagagaagagacacaggataaagaagaaagcgtggagagctctctgcctctcaacgccatcgaaccttgcgttatatgccaagggagaccgaagaacggttgcatcgtgcatggcaagaccggccacctgatggcttgcttcacctgtgccaagaaactcaagaagaggaacaagccttgcccagtgtgtaggcagccaattcagatgattgtcctgacatacttcccatag

SEQ ID NO: 98478 - DNA, 891 bp, Artificial Sequence
  derived and/or modified sequence
atgtgcaacaccaacatgagcgtgcccaccgacggcgccgtgaccacatcccaaatcccagcgtccgagcaggaaaccctggatctggacgccggagtgtcagagcatagtggcgactggcttgaccaggattcggttagtgatcagtttagcgtcgagttcgaagtcgaatcacttgacagcgaagactacagcctttccgaagagggtcaggaactgtccgatgaagatgatgaagtttaccaggtgacagtataccaggctggtgaaagcgatactgacagcttcgaagaggacccagagataagtctggccgactactggaaatgtacctcctgtaacgagatgaaccctcctctgccatcgcactgtaacagatgttgggctttaagggaaaattggctgccggaagacaagggcaaggacaaaggtgaaatcagcgaaaaggcgaaactggagaattctactcaagcagaggaaggatttgacgtgcctgactgcaaaaagacaatcgtcaatgattcccgtgagtcctgtgtggaagaaaacgatgacaaaattacacaagcctctcagtctcaggagtccgaggactattcacaacccagcacaagttctagtatcatttactccagccaagaagacgtcaaggagttcgagagggaggaaacccaggacaaagaggaatctgtggaatccagccttcctcttaacgcgattgagccctgcgttatatgtcagggccgcccaaaaaacggatgtattgtgcatgggaagacgggacatctaatggcttgtttcacatgcgcaaaaaaattgaagaaacggaataagccatgccccgtgtgtaggcagcccattcagatgattgtgctcacatactttccctag

SEQ ID NO: 98479 - DNA, 966 bp, Artificial Sequence
  derived and/or modified sequence
atgtgcaacacaaatatgagcgtgcccacagatggtgctgtcaccacttctcagattcccgcaagcgagcaagaaaccctggtgcgcccaaaacctctgctgctgaagctgttgaagtcagtaggcgcacagaaagacacttataccatgaaagaggatctggatgcaggagtttcagagcactccggagactggctggatcaggattctgttagcgaccaatttagcgtagagttcgaagtcgaatctttggactccgaggattattctctttccgaagagggccaagaattaagcgacgaggatgatgaagtctatcaggttactgtttatcaagcaggagagagcgacaccgattcattcgaagaggaccctgagatttcactggcagattactggaaatgcacctcctgcaatgaaatgaaccctccactgccaagtcactgcaaccggtgctgggccctcagggaaaactggcttccagaagacaagggcaaggacaaaggcgaaatctccgaaaaagctaaactagagaacagcacacaggcggaagaggggtttgatgtcccagattgtaagaaaaccatcgtgaacgattcaagggagagttgcgtcgaagagaacgacgacaagataactcaggcatcgcaaagtcaggagtcggaagactattcccaaccgagtacgagttcttctatcatttactcatctcaggaggacgtgaaggagtttgagcgcgaggagacacaagacaaagaggaatccgtagagtccagtctacccctgaacgctatcgagccttgtgtgatctgtcagggacgcccaaaaaatggttgtatcgttcacgggaagactggacacctgatggcttgtttcacctgcgccaaaaaactgaaaaagaggaacaagccttgtcccgtgtgtcgccagcctatccagatgatcgtgttaacctattttccatag

SEQ ID NO: 98480 - DNA, 966 bp, Artificial Sequence
  derived and/or modified sequence
atgtgcaacaccaacatgtctgtccccactgacggagctgtaacaacttcgcagatccccgcttctgagcaggaaaccctggtgcgccctaagccgctgctgttaaagcttctcaaaagtgttggggcacaaaaggacacctataccatgaaggaggatctggatgctggcgtttcagaacacagtggagattggttggaccaagactcggtgagcgaccagtttagcgtggaattcgaggtggaaagcctggattctgaggactactctctgagcgaggagggccaagagctttcggacgaagatgacgaggtataccaggtgacggtgtatcaggctggtgaatccgatactgattctttcgaggaggaccctgaaatcagtctggccgactactggaagtgtacctcttgcaacgaaatgaaccccccactgccttcccattgcaataggtgttgggccttgcgtgagaattggctcccagaagataaaggaaaggataaaggtgaaatctccgaaaaagccaagctggagaactcgacacaggcagaagagggatttgacgttcctgattgcaagaagacaatcgtcaatgactctcgcgagagctgcgtggaagaaaacgacgacaaaatcacccaggccagccagtcacaggagtccgaagattacagtcagccttccacgtcctcctcgatcatttactcctctcaggaggatgtcaaagagttcgagcgcgaagagacacaggacaaagaagaatcagtggagagctccctcccactgaatgctatagagccatgtgtcatctgtcaaggcaggccgaagaacggttgtattgtgcatggcaaaacaggccatctcatggcctgcttcacttgtgccaaaaagttaaagaagcgtaataagccatgccccgtgtgtagacaacccatacagatgatcgtcctgacctatttcccatag

SEQ ID NO: 98481 - DNA, 480 bp, Artificial Sequence
  derived and/or modified sequence
atgtgtaacacgaatatgtccgtaccaaccgacggcgctgtaaccacttctcaaatccctgcctcagagcaggagaccctggtcaggcctaagcctctgcttctcaaactcttaaagtctgtgggggcacagaaggatacatacaccatgaaagaggacctcgacgccggtgtgagcgaacattcaggtgattggctggatcaggactctgtgtccgaccaattttcagtcgaatttgaagtggagagcctcgatagcgaggattattcactgagtgaggaaggacaagaactttcagacgaggacgatgaagtgtaccaggtcacagtgtaccaggcaggcgagtcagacaccgattctttcgaagaagacccagagatttctcttgccgattattggaaatgcctgaagaaaagaaataaaccttgcccagtctgtcggcagccaatacagatgattgttctgacatacttcccttag

SEQ ID NO: 98482 - DNA, 891 bp, Artificial Sequence
  derived and/or modified sequence
atgtgcaacactaatatgagcgtccccacagatggagctgtgacaacctcccaaatcccagcgtcagaacaggaaaccctcgatcttgacgccggagtctccgagcacagtggcgattggttggatcaggatagcgtgagtgaccaattttcagtggagtttgaggtggaatcactggattcagaggactattctctgtcagaggaggggcaagagctatcagatgaggacgacgaggtgtaccaagtgacggtgtaccaggcaggtgagtcggataccgacagttttgaggaggatccagagatctctctcgcagattattggaagtgtacaagctgtaacgaaatgaacccccctctcccaagtcactgtaacaggtgctgggccctgcgcgagaactggctgccagaggataaaggtaaagacaagggggaaatatctgaaaaagcaaagctcgaaaactccacccaagccgaagaagggttcgacgtcccagactgcaaaaagacaattgttaacgattcaagagaatcgtgcgtagaggagaatgatgacaagatcacgcaggcctcacaatcccaagagagcgaggactactctcagccatctacgtccagctctataatttactcaagccaggaggacgtcaaagaatttgagagagaggaaactcaggataaggaagaatcggtggaaagcagcctgccccttaacgcaatagagccttgcgtcatttgtcagggtaggcccaaaaacggatgtatcgtccacggcaagactggtcatcttatggcttgttttacttgtgctaaaaagctcaaaaagcggaataagccatgtcccgtctgccgccaaccaattcagatgatcgtcctgacctactttccatag

SEQ ID NO: 98483 - DNA, 891 bp, Artificial Sequence
  derived and/or modified sequence
atgtgcaatacgaacatgagcgtccctacagatggcgcagtgacgacctctcaaatccctgccagcgaacaggaaacactggacctggacgccggagtgtccgagcactctggcgattggctggaccaggactccgtcagtgatcagttcagcgtcgagttcgaagtagaaagtcttgactctgaagattactctctgtctgaggagggacaggagctgtcagatgaagatgatgaggtgtatcaggtgactgtttaccaagcaggcgaatccgacaccgactccttcgaagaggatcccgaaatatctctcgccgactactggaaatgtacctcatgtaacgaaatgaaccccccactgccaagccactgtaacaggtgttgggctttgcgggaaaactggctgcctgaggacaagggtaaagataagggcgagatatcggagaaagctaagttggagaactctacacaggcggaggagggatttgatgtgcccgattgcaagaagactattgtaaatgattcacgcgaaagctgcgtggaagagaatgatgacaagatcacccaagcttcacaatcccaggaatctgaggattacagccaaccgtctactagtagctctatcatttattcaagtcaggaggacgtgaaagagttcgaacgggaagaaacccaagacaaggaggaatctgtggagagctctctcccccttaacgcaattgagccatgcgtcatttgtcagggacgacctaagaacggttgcattgtgcatggaaagaccggacatctcatggcatgcttcacctgcgcaaaaaagctcaaaaagcggaacaaaccctgtccagtctgcagacagccaatccagatgattgtgctcacctattttccttag

SEQ ID NO: 98484 - protein, 725 aa, Artificial Sequence
  derived and/or modified sequence
MEALIPVINKLQDVFNTVGADIIQLPQIVVVGTQSSGKSSVLESLVGRDLLPRGTGIVTRRPLILQLVHVSQEDKRKTTGEENGVEAEEWGKFLHTKNKLYTDFDEIRQEIENETERISGNNKGVSPEPIHLKIFSPNVVNLTLVDLPGMTKVPVGDQPKDIELQIRELILRFISNPNSIILAVTAANTDMATSEALKISREVDPDGRRTLAVITKLDLMDAGTDAMDVLMGRVIPVKLGIIGVVNRSQLDINNKKSVTDSIRDEYAFLQKKYPSLANRNGTKYLARTLNRLLMHHIRDCLPELKTRINVLAAQYQSLLNSYGEPVDDKSATLLQLITKFATEYCNTIEGTAKYIETSELCGGARICYIFHETFGRTLESVDPLGGLNTIDILTAIRNATGPRPALFVPEVSFELLVKRQIKRLEEPSLRCVELVHEEMQRIIQHCSNYSTQELLRFPKLHDAIVEVVTCLLRKRLPVTNEMVHNLVAIELAYINTKHPDFADACGLMNNNIEEQRRNRLARELPSAVSRDKSSKVPSALAPASQEPSPAASAEADGKVASGGGGVGDGVQEPTTGNWRGMLKTSKAEELLAEEKSKPIPIMPASPQKGHAVNLLDVPVPVARKLSAREQRDCEVIERLIKSYFLIVRKNIQDSVPKAVMHFLVNHVKDTLQSELVGQLYKSSLLDDLLTESEDMAQRRKEAADMLKALQGASQIIAEIRETHLW

SEQ ID NO: 98485 - DNA, 2178 bp, Artificial Sequence
  derived and/or modified sequence
atggaagccctgatccccgtgattaataaattgcaggatgtgttcaatacggtaggagcagatataatacaactcccacaaattgtcgtagttggtacccaatcaagtgggaagtcaagcgtactcgaaagcctggtgggtcgtgacctgctaccacgaggcaccggcatcgtgacccgccgaccactgatactccaacttgtacatgtgagtcaggaagacaagcgcaagactactggggaggagaatggggtggaggcagaagaatggggaaaattcctgcacacaaagaacaagttatacacagacttcgatgaaatccgccaggaaatcgagaacgagaccgagcgcatttccggcaacaacaagggtgtctcaccagagcctattcacctgaagattttctctcctaacgtggtgaacctgacactggtggatctgccgggcatgactaaggtgcccgttggggaccagcccaaagatatcgagctccagattcgggaactgatactgagatttatatcaaacccaaattccataatccttgccgtaacggcagccaacaccgatatggcgacatccgaggcgttgaaaattagccgcgaagtagatcctgacggtcggcggaccttagccgtcataacgaaactggacctcatggacgccggaactgacgcaatggatgtgttgatgggccgggtcatacctgtcaaattgggcattatcggcgtggtcaatcgctctcagttagacatcaacaataagaagtctgttactgactccatcagggacgagtatgcctttttgcagaaaaagtacccgtccctggccaaccgcaatggaacaaaatatttggcccgcaccctgaatcggctcctgatgcaccatattagagattgtctgcccgaattaaaaacgcgcattaacgtgctagctgctcagtaccagtctctgctgaactcctacggggaacctgttgatgacaagagcgcgactttgttacaactgattactaagttcgctaccgagtattgtaataccatcgaaggaactgctaagtatatagaaaccagtgagctctgcggcggagccagaatttgttacatctttcacgagacctttgggcgaactctggagagtgtagaccctctgggcggactcaatacaattgatatccttaccgccatccgaaacgccactggcccccggccagcattgtttgttcctgaagtgtcttttgaacttctggtgaagcgccagatcaaacgcctcgaagaaccgagtctgagatgcgtcgagcttgtgcacgaagagatgcagcgcatcatccagcattgcagcaattattctacccaggagttgctgcgctttccaaagcttcacgacgccatcgtggaagtggtcacctgcctcctccgcaaacgcctgcctgttacaaacgagatggtccacaacttagttgccatcgagcttgcgtatatcaatacgaagcaccctgacttcgcggacgcttgcggtctgatgaacaacaatatcgaggaacagagacgaaatagacttgctagagagctcccttcagcggtttcaagagataagtcctccaaagtgccctcagcacttgctcccgcgagtcaggagccctcacctgcagcttctgcggaggcagacggcaaagtcgctagtggaggaggcggagtcggggatggcgtgcaagagcccacaaccggaaactggaggggaatgctcaaaacgtcgaaggcggaggaactgctggctgaagaaaaaagtaaaccaatccctattatgcccgccagtcctcaaaagggccatgccgtgaacctgctcgacgtgcctgtgcctgtcgcccggaaactgagtgcacgcgagcagagagactgcgaggtgatcgaacggttaattaagagctattttctgatcgttagaaagaacatccaggacagcgtacctaaggcggtaatgcacttcctcgtcaatcacgtcaaggacaccctccagtctgagctagtgggacagctgtataaatcaagcctcctcgatgacctcctcaccgagtcagaggacatggcacagaggcggaaggaggcggcagacatgctgaaggcgcttcagggggcctcccagattatcgctgagatcagggaaacccacctctggtag

SEQ ID NO: 98486 - DNA, 2178 bp, Artificial Sequence
  derived and/or modified sequence
atggaggccctgatccctgtgatcaacaagctgcaggatgtgttcaacacagtgggcgctgacatcatccagctgccccagatcgtggtggtgggcacccagagcagcggcaagagctctgtgctggagagcctggtgggccgggacctgctgccccggggcactggaattgtgacccggcggcccctcatcctgcagctggtgcacgtgtcccaggaggacaagaggaagaccactggagaggagaatggagtggaggccgaggagtggggcaagttcctgcacaccaagaacaagctgtacacagactttgatgagatccggcaggagattgaaaatgaaacagagcgcatcagcggcaacaacaagggcgtgtccccagagcccatccacctgaagatcttcagccccaacgtggtgaacctgaccctggtggacctgcccggcatgaccaaggtgcctgtgggggaccagcccaaggacatcgagctgcagatccgggagctgatcctgcgcttcatcagcaaccccaacagcatcatcctggccgtgacagctgccaacacagacatggccaccagcgaggccctgaagatcagccgggaggtggaccctgatggccgccgcaccctggccgtcatcaccaagctggacctgatggatgctggaacagatgccatggatgtgctgatgggccgggtcatccctgtgaagctgggcatcatcggcgtggtgaacagaagccagctggacatcaacaacaagaagtctgtgacagacagcatcagagatgaatatgccttcctgcagaagaagtaccccagcctggccaacagaaatggcaccaagtacctggcccggaccctgaaccggctgctgatgcaccacatccgggactgcctgcctgagctgaagacccgcatcaacgtgctggccgcccagtaccagagcctgctgaacagctatggagagcctgtggatgacaagagcgccaccctgctgcagctgatcaccaagtttgccacagagtactgcaacaccatcgagggcacagccaagtacatcgagaccagcgagctgtgtggcggggcccgcatctgctacatcttccacgagaccttcggccgcaccctggagagcgtggaccccctgggcggcctgaacaccatcgacatcctgacagccatcagaaatgccaccggccccaggcctgccctgtttgtgcctgaggtgtcctttgagctgctggtgaagaggcagatcaagaggctggaggagcccagcctgcgctgtgtggagctggtgcatgaggagatgcagaggatcatccagcactgcagcaactacagcacccaggagctgctgcgcttccccaagctgcatgatgccatcgtggaggtggtgacctgcctgctgaggaagaggctgcctgtgaccaatgagatggtgcacaacctggtggccatcgagctggcctacatcaacaccaagcacccagactttgctgatgcctgtggcctgatgaacaacaacatcgaggagcagaggaggaaccggctggcccgggagctgcccagcgctgtgtcccgggacaagagcagcaaggtgcccagcgccctggccccagccagccaggagcccagccctgctgccagcgctgaggctgatggcaaggtggccagcggcggcggcggcgtgggagatggagtgcaggagcccaccactggaaactggaggggcatgctgaagaccagcaaggccgaggagctgctggccgaggagaagagcaagcccatccccatcatgcctgccagcccccagaagggccatgctgtgaacctgctggatgtgcctgtgcctgtggccaggaagctgagcgcccgggagcagagggactgtgaggtgattgaaagactcatcaagagctacttcctgattgtgaggaagaacatccaggacagcgtgcccaaggctgtgatgcacttcctggtgaaccacgtgaaggacaccctgcagagcgagctggtgggccagctgtacaagagcagcctgctggatgacctgctgacagaaagtgaggacatggcccagaggaggaaggaggccgctgacatgctgaaggccctgcagggcgccagccagatcatcgccgagatccgggagacccacctgtggtag

SEQ ID NO: 98487 - DNA, 2178 bp, Artificial Sequence
  derived and/or modified sequence
atggaggccctgatccccgtgatcaacaagctgcaggacgtgttcaacacagtgggagcagatattatccagcttcctcagatagtggtggtgggtacccaatcgagcgggaaatcctccgtcttggaaagcctcgttggccgggatctcctccctcgagggacaggaatcgtgacccgcaggcccctgatcctccagcttgtgcatgtaagtcaggaggacaagcgcaaaacaaccggcgaggagaacggcgtggaagctgaggaatggggcaagttcctacacaccaagaacaagctttacactgactttgatgaaataaggcaggaaattgagaacgagacagaacggatctctggcaataataagggcgtgtcaccagagccaatacacttaaaaatctttagtccaaacgttgtgaatcttactctagtggatctgccggggatgacaaaagtgcccgtcggcgatcagcctaaggatatcgaactccaaatcagggagctcattctgaggtttatttccaaccctaacagtatcatcctggcagtgacagcagccaatacagacatggcaacctctgaagccctgaaaattagcagagaggtggaccccgatgggcgccgtacgctggctgtaattacaaagctagatttgatggacgccggtacagatgcaatggatgtccttatgggcagggtgatccccgtaaaactgggtatcataggcgtggtgaaccgatcccagctcgatattaacaataaaaagagcgtaactgattcaatccgcgacgagtacgccttcctccagaagaaatatccaagtctcgctaaccgcaacggcaccaaatacctggcaaggactctgaaccggttactgatgcatcatatcagggattgcctgcccgagttgaagactcggatcaatgtactggccgctcaatatcagtcactgctcaatagctatggggaacctgttgacgataagtccgccactctcctgcagctgataactaaattcgccaccgaatattgtaatacaatagagggaacagccaaatatatcgaaacatccgaactgtgtggcggcgcgagaatatgttatatttttcacgagaccttcgggcgcaccctggagagcgttgatcccctgggcggcctgaacactatcgacatcctcacagctatccggaacgccactggtcccaggcctgcgttatttgtgccagaggtctcttttgaactgctggttaaacggcagatcaaaaggcttgaggaacccagcttgcggtgtgtcgagctggttcacgaggagatgcagagaattatccagcattgttctaactattctacacaggagttgctgaggtttcccaagttgcacgacgctattgttgaggtggtaacctgtctgctgagaaagcgtctacctgttactaacgagatggtccacaaccttgtggctatcgaattagcctatattaacactaaacatccagatttcgccgatgcctgtggactcatgaacaataacatcgaagaacaaaggcgcaaccggctggccagggaactgcccagcgcagttagtagggataaatcctctaaagtcccaagtgctctagctcccgcctcccaggaaccttctcccgccgccagcgcagaggccgatgggaaggtggcatccggcggtggtggagttggagatggagtgcaagagcccacaacaggtaattggaggggcatgttgaagacctctaaagccgaggagctgctggctgaagagaaaagcaagcctatccctattatgcccgccagccctcagaaggggcatgcggtcaacttgttagatgtaccggtccctgtcgcccggaaactttccgcccgagagcagcgagactgcgaggttatcgagcgcctcattaaatcttattttctcatagttagaaagaatatacaggattcagttcctaaggcagtgatgcacttccttgtgaatcacgtgaaagacaccctccagtccgaactcgtaggtcaactgtataaatcatccttactagacgatttactgacggagtcagaggatatggcacagagacgaaaggaggccgcagatatgctgaaggcactacagggggccagccagattatcgcagagatccgcgagacccatctctggtag

SEQ ID NO: 98488 - DNA, 2178 bp, Artificial Sequence
  derived and/or modified sequence
atggaagccctgatccctgtcatcaataagctccaggacgtgttcaacacagtcggagccgatattatccaacttccgcagatcgtagttgtcggaacgcagtccagtggcaaaagcagcgttctggagtccctggttggaagagatctcctcccaagaggaaccggcatcgtgacacggagaccattaattctacagttggtgcacgtctctcaggaggacaagcggaagacaactggggaggagaatggcgttgaagcagaggagtgggggaagttcctccataccaagaacaagctctacactgattttgacgagataaggcaggagattgagaacgaaaccgaacgtatcagcggcaacaacaagggagtctccccagagcctatacacctgaagatcttctcaccaaacgtggtcaatctgactctggtggatttacccggaatgacaaaagtgccagtaggagaccaacctaaagacattgaactgcagatcagagagttaattctgcggttcataagcaatccaaattccataattttggccgttacggctgctaacactgatatggccacaagtgaggcattgaaaatctccagggaagttgacccagatggtcggagaacattggctgttattacaaagctcgatttgatggacgcagggactgacgccatggacgttctcatgggtcgtgtgatccctgttaaactggggataatcggggtggtgaacagaagccagctcgacatcaataataagaagtccgtaactgactccatcagggatgagtacgcttttctgcagaagaagtacccaagcttggctaaccgaaacggcacgaaatatctagcacgcacactgaacaggctgctcatgcaccatatcagggactgcctgcccgagctcaagactcgaattaatgttctagctgctcagtaccaatcattactaaactcctacggggaacctgttgacgacaaaagcgcaactctcctgcagctgatcaccaagtttgcgactgagtattgtaatacgatagaggggaccgccaagtacatcgaaactagcgaactctgtggtggggctaggatctgttatattttccatgaaacctttggtcggacacttgagtctgtcgaccctctggggggtctcaatacaattgacatcctgacagccatcaggaatgccacagggcctagaccagctctctttgtgcctgaggtgagctttgagcttcttgtgaaaaggcagatcaaacgccttgaggaacccagccttcggtgcgtggagctcgtccatgaggagatgcagaggattatccagcactgctcaaactactctacccaagaacttctccgttttcctaagctccacgatgctatcgtggaggtggtcacatgtctgctccggaagcgtctgcccgtgaccaatgaaatggttcataatctggtggccatagagttggcttacattaataccaagcatcctgattttgctgacgcttgcggtttgatgaataataacattgaggagcaacgcagaaatcggttggctagggaacttccatctgctgtatctcgagataaaagctcaaaagtgcccagcgccttagctcccgctagccaagagccatcccctgcagcaagcgcagaggctgatggaaaggtggcatcgggtggcggtggagttggggacggcgtgcaggaacctactactggaaactggcgtggcatgctcaagacctctaaggctgaggaactcctggcagaggagaaatcgaagcccatccctatcatgccagcgagtccccaaaaggggcacgccgtgaacctgctggatgttcctgtgcctgttgcgcgaaagttaagcgctcgggaacagcgcgattgtgaagtgattgagcgactgattaaaagctacttcctgattgtgcggaaaaacattcaggacagcgttcccaaagctgtgatgcacttcctggtgaaccatgtcaaagacaccctgcagtctgaacttgtggggcagctgtataagtcatccctcctggatgacctgctgactgagtcagaggacatggcacaacggaggaaggaagcagctgatatgctgaaggctctgcagggagccagccagattatagccgaaattcgagagactcacctatggtag

SEQ ID NO: 98489 - DNA, 2178 bp, Artificial Sequence
  derived and/or modified sequence
atggaggccctgatccccgtgatcaacaagctgcaggacgtgttcaacaccgtgggcgccgacatcatccagctgccccagatcgtggtggtgggcacccagagcagcggcaagagcagcgtgctggagagcctggtgggcagagacctgctgcccagaggcaccggcatcgtgaccagaagacccctgatcctgcagctggtgcacgtgagccaggaggacaagagaaagaccaccggcgaggagaacggcgtggaggccgaggagtggggcaagttcctgcacaccaagaacaagctgtacaccgacttcgacgagatcagacaggagatcgagaacgagaccgagagaatcagcggcaacaacaagggcgtgagccccgagcccatccacctgaagatcttcagccccaacgtggtgaacctgaccctggtggacctgcccggcatgaccaaggtgcccgtgggcgaccagcccaaggacatcgagctgcagatcagagagctgatcctgagattcatcagcaaccccaacagcatcatcctggccgtgaccgccgccaacaccgacatggccaccagcgaggccctgaagatcagcagagaggtggaccccgacggcagaagaaccctggccgtgatcaccaagctggacctgatggacgccggcaccgacgccatggacgtgctgatgggcagagtgatccccgtgaagctgggcatcatcggcgtggtgaacagaagccagctggacatcaacaacaagaagagcgtgaccgacagcatcagagacgagtacgccttcctgcagaagaagtaccccagcctggccaacagaaacggcaccaagtacctggccagaaccctgaacagactgctgatgcaccacatcagagactgcctgcccgagctgaagaccagaatcaacgtgctggccgcccagtaccagagcctgctgaacagctacggcgagcccgtggacgacaagagcgccaccctgctgcagctgatcaccaagttcgccaccgagtactgcaacaccatcgagggcaccgccaagtacatcgagaccagcgagctgtgcggcggcgccagaatctgctacatcttccacgagaccttcggcagaaccctggagagcgtggaccccctgggcggcctgaacaccatcgacatcctgaccgccatcagaaacgccaccggccccagacccgccctgttcgtgcccgaggtgagcttcgagctgctggtgaagagacagatcaagagactggaggagcccagcctgagatgcgtggagctggtgcacgaggagatgcagagaatcatccagcactgcagcaactacagcacccaggagctgctgagattccccaagctgcacgacgccatcgtggaggtggtgacctgcctgctgagaaagagactgcccgtgaccaacgagatggtgcacaacctggtggccatcgagctggcctacatcaacaccaagcaccccgacttcgccgacgcctgcggcctgatgaacaacaacatcgaggagcagagaagaaacagactggccagagagctgcccagcgccgtgagcagagacaagagcagcaaggtgcccagcgccctggcccccgccagccaggagcccagccccgccgccagcgccgaggccgacggcaaggtggccagcggcggcggcggcgtgggcgacggcgtgcaggagcccaccaccggcaactggagaggcatgctgaagaccagcaaggccgaggagctgctggccgaggagaagagcaagcccatccccatcatgcccgccagcccccagaagggccacgccgtgaacctgctggacgtgcccgtgcccgtggccagaaagctgagcgccagagagcagagagactgcgaggtgatcgagagactgatcaagagctacttcctgatcgtgagaaagaacatccaggacagcgtgcccaaggccgtgatgcacttcctggtgaaccacgtgaaggacaccctgcagagcgagctggtgggccagctgtacaagagcagcctgctggacgacctgctgaccgagagcgaggacatggcccagagaagaaaggaggccgccgacatgctgaaggccctgcagggcgccagccagatcatcgccgagatcagagagacccacctgtggtag

SEQ ID NO: 98490 - DNA, 2393 bp, Artificial Sequence
  derived and/or modified sequence
attgccgtggccggcgggcactggggccccgtgttttcagagtcatggaggcgctaattcctgtcataaacaagctccaggacgtcttcaacacggtgggcgccgacatcatccagctgcctcaaatcgtcgtagtgggaacgcagagcagcggaaagagctcagtgctagaaagcctggtggggagggacctgcttcccagaggtactggaattgtcacccggagacctctcattctgcaactggtccatgtttcacaagaagataaacggaaaacaacaggagaagaaaatggggtggaagcagaagaatggggtaaatttcttcacaccaaaaataagctttacacggattttgatgaaattcgacaagaaattgaaaatgaaacagaaagaatttcaggaaataataagggagtaagccctgaaccaattcatcttaagattttttcacccaacgttgtcaatttgacacttgtggatttgccaggaatgaccaaggtgcctgtaggtgatcaacctaaggatattgagcttcaaatcagagagctcattcttcggttcatcagtaatcctaattccattatcctcgctgtcactgctgctaatacagatatggcaacatcagaggcacttaaaatttcaagagaggtagatccagatggtcgcagaaccctagctgtaatcactaaacttgatctcatggatgcgggtactgatgccatggatgtattgatgggaagggttattccagtcaaacttggaataattggagtagttaacaggagccagctagatattaacaacaagaagagtgtaactgattcaatccgtgatgagtatgcttttcttcaaaagaaatatccatctctggccaatagaaatggaacaaagtatcttgctaggactctaaacaggttactgatgcatcacatcagagattgtttaccagagttgaaaacaagaataaatgttctagctgctcagtatcagtctcttctaaatagctacggtgaacccgtggatgataaaagtgctactttactccaacttattaccaaatttgccacagaatattgtaacactattgaaggaactgcaaaatatattgaaacttcggagctatgcggtggtgctagaatttgttatattttccatgagacttttgggcgaaccttagaatctgttgatccacttggtggccttaacactattgacattttgactgccattagaaatgctactggtcctcgtcctgctttatttgtgcctgaggtttcatttgagttactggtgaagcggcaaatcaaacgtctagaagagcccagcctccgctgtgtggaactggttcatgaggaaatgcaaaggatcattcagcactgtagcaattacagtacacaggaattgttacgatttcctaaacttcatgatgccatagttgaagtggtgacttgtcttcttcgtaaaaggttgcctgttacaaatgaaatggtccataacttagtggcaattgaactggcttatatcaacacaaaacatccagactttgctgatgcttgtgggctaatgaacaataatatagaggaacaaaggagaaacaggctagccagagaattaccttcagctgtatcacgagacaagtcttctaaagttccaagtgctttggcacctgcctcccaggagccctcccccgctgcttctgctgaggctgatggcaaggttgcatctggaggtggtggggttggagatggtgttcaagaaccaaccacaggcaactggagaggaatgctgaaaacttcaaaagctgaagagttattagcagaagaaaaatcaaaacccattccaattatgccagccagtccacaaaaaggtcatgccgtgaacctgctagatgtgccagttcctgttgcacgaaaactatctgctcgggaacagcgagattgtgaggttattgaacgactcattaaatcatattttctcattgtcagaaagaatattcaagacagtgtgccaaaggcagtaatgcattttttggttaatcatgtgaaagacactcttcagagtgagctagtaggccagctgtataaatcatccttattggatgatcttctgacagaatctgaggacatggcacagcgcaggaaagaagcagctgatatgctaaaggcattacaaggagccagtcaaattattgctgaaatccgggagactcatctttggtgaagagaactatgtaatactgagactttgttgactcaaaacttgctagttactgcctacctgagtagaatcttatttatgaactcctgtgtattgcaatggtatgaatctgctcatgtggagactggctataaactgaaaagtgtattccaaattgcagaacacatcacacat

SEQ ID NO: 98491 - protein, 749 aa, Artificial Sequence
  derived and/or modified sequence
MEALIPVINKLQDVFNTVGADIIQLPQIVVVGTQSSGKSSVLESLVGRDLLPRGTGIVTRRPLILQLVHVSQEDKRKTTGEENDPATWKNSRHLSKGVEAEEWGKFLHTKNKLYTDFDEIRQEIENETERISGNNKGVSPEPIHLKIFSPNVVNLTLVDLPGMTKVPVGDQPKDIELQIRELILRFISNPNSIILAVTAANTDMATSEALKISREVDPDGRRTLAVITKLDLMDAGTDAMDVLMGRVIPVKLGIIGVVNRSQLDINNKKSVTDSIRDEYAFLQKKYPSLANRNGTKYLARTLNRLLMHHIRDCLPELKTRINVLAAQYQSLLNSYGEPVDDKSATLLQLITKFATEYCNTIEGTAKYIETSELCGGARICYIFHETFGRTLESVDPLGGLNTIDILTAIRNATGPRPALFVPEVSFELLVKRQIKRLEEPSLRCVELVHEEMQRIIQHCSNYSTQELLRFPKLHDAIVEVVTCLLRKRLPVTNEMVHNLVAIELAYINTKHPDFADACGLMNNNIEEQRRNRLARELPSAVSRDKSSKVPSALAPASQEPSPAASAEADGKLIQDSRRETKNVASGGGGVGDGVQEPTTGNWRGMLKTSKAEELLAEEKSKPIPIMPASPQKGHAVNLLDVPVPVARKLSAREQRDCEVIERLIKSYFLIVRKNIQDSVPKAVMHFLVNHVKDTLQSELVGQLYKSSLLDDLLTESEDMAQRRKEAADMLKALQGASQIIAEIRETHLW

SEQ ID NO: 98492 - DNA, 2250 bp, Artificial Sequence
  derived and/or modified sequence
atggaggccctgattccagtcatcaataaattgcaagatgtgtttaacactgtgggtgccgacatcatccagctgcctcagatagttgtcgtgggcactcagagtagcggcaagagtagcgtgcttgagtcccttgtggggagagatctgctaccacggggcactgggatcgttacccgtcgcccactgattcttcagctggtgcatgtgtcgcaggaggacaagcgcaagacaacaggcgaggaaaacgatcccgccacttggaaaaactccaggcacctgagtaaaggagtggaggccgaggagtggggcaaatttctccatactaaaaacaagctctacacagattttgatgagatacgccaagagatagaaaatgagacagaacgtataagtggcaataataagggcgtgagccccgagccaattcatctcaagattttctcaccgaatgtggttaatctgacgctggtcgacttaccaggtatgactaaagttccggtgggtgaccagccaaaggacatcgagttgcagattcgcgagttaatcctccgttttataagcaaccctaattccataattcttgcagtgactgcggcaaacactgatatggccacctctgaagctttgaagatttcccgcgaggttgaccccgacgggagacgcactttggctgtgatcacaaaacttgatttaatggatgctggcacagatgccatggatgtgctcatgggcagggtcattcccgttaagttaggaattatcggcgtcgtaaaccggtctcagctggatatcaataacaagaaatccgttactgactctatcagggacgaatacgcttttctgcagaagaagtatccttcccttgcaaacagaaacgggactaagtacttggcaaggacattgaaccgcttgctgatgcaccatatccgcgattgcttgccagaattaaaaacgcgcatcaatgtactcgctgcgcaataccagagcctgctgaactcttacggcgaaccagtggatgacaagtctgccactctgctgcagctgattacgaagttcgccacagaatactgcaatacgatcgaaggcacagcaaagtacatcgagacctctgagctctgcggcggagcccgaatctgctacatatttcacgagacttttggcaggactctggaatcagtcgaccccctcggaggtcttaatacaatagatatactgacagcgatccgcaatgcgaccggtcctcgacccgctctctttgtgccggaagtgtccttcgaacttctggtgaaacggcaaatcaagcggctggaagaacccagcctaaggtgtgtggaattagtgcatgaggagatgcagcggattatccagcattgcagtaactatagcacacaggagctcctgaggtttcccaagcttcatgatgccatcgtggaagtcgtgacatgtcttctgcgtaaacgcctacccgtgacaaacgaaatggtccacaatctcgtggccatagagctggcttatatcaacacgaagcatcctgactttgctgatgcctgtggcctgatgaataataatattgaagagcagcgcaggaaccgactcgcaagggagctgcccagcgccgtgtccagagataagtcctcaaaggtcccctctgctcttgcccctgcaagtcaggaaccatcacccgctgcgagcgccgaggcggacggaaagctcatacaggattcacggagggaaaccaaaaatgtggccagtggcggagggggggttggggatggcgtccaggaacctacaacgggtaattggcgggggatgctgaaaacctctaaagccgaggagctgctggccgaggaaaagagcaaacccataccaatcatgcccgcctccccgcagaaagggcatgccgtgaacctgctggatgtcccggtgccagtggcccggaagctcagtgcccgagaacaaagggactgcgaagtgatcgagcgcctgattaaatcctactttctgattgtacgcaaaaatattcaagatagcgtgcccaaggcggttatgcacttcctggtaaatcatgtgaaagataccctccagagcgaactcgtcggacagctgtataaaagctcccttctggacgatttactcaccgagagcgaagatatggctcagaggcgaaaagaggccgccgatatgcttaaggcactgcagggggcatcgcagattatagcagagatacgagagacacacctgtggtag

SEQ ID NO: 98493 - DNA, 2250 bp, Artificial Sequence
  derived and/or modified sequence
atggaggccctgatccctgtgatcaacaagctgcaggatgtgttcaacacagtgggcgctgacatcatccagctgccccagatcgtggtggtgggcacccagagcagcggcaagagctctgtgctggagagcctggtgggccgggacctgctgccccggggcactggaattgtgacccggcggcccctcatcctgcagctggtgcacgtgtcccaggaggacaagaggaagaccactggagaggagaatgaccctgccacctggaagaacagccgccacctgagcaagggcgtggaggccgaggagtggggcaagttcctgcacaccaagaacaagctgtacacagactttgatgagatccggcaggagattgaaaatgaaacagagcgcatcagcggcaacaacaagggcgtgtccccagagcccatccacctgaagatcttcagccccaacgtggtgaacctgaccctggtggacctgcccggcatgaccaaggtgcctgtgggggaccagcccaaggacatcgagctgcagatccgggagctgatcctgcgcttcatcagcaaccccaacagcatcatcctggccgtgacagctgccaacacagacatggccaccagcgaggccctgaagatcagccgggaggtggaccctgatggaagaaggaccctggccgtcatcaccaagctggacctgatggatgctggaacagatgccatggatgtgctgatgggccgggtcatccctgtgaagctgggcatcattggagtggtgaacagaagccagctggacatcaacaacaagaagtctgtgacagacagcatcagagatgaatatgccttcctgcagaagaagtaccccagcctggccaacagaaatggcaccaagtacctggcccggaccctgaaccggctgctgatgcaccacatccgggactgcctgcctgagctgaagacccgcatcaacgtgctggccgcccagtaccagagcctgctgaacagctatggagagcctgtggatgacaagagcgccaccctgctgcagctgatcaccaagtttgccacagagtactgcaacaccatcgagggcacagccaagtacatcgagaccagcgagctgtgtggcggggcccgcatctgctacatcttccacgagacctttggaagaaccctggagagcgtggaccccctgggcggcctgaacaccatcgacatcctgacagccatcagaaatgccaccggccccaggcctgccctgtttgtgcctgaggtgtcctttgagctgctggtgaagaggcagatcaagaggctggaggagcccagcctgcgctgtgtggagctggtgcatgaggagatgcagaggatcatccagcactgcagcaactacagcacccaggagctgctgcgcttccccaagctgcatgatgccatcgtggaggtggtgacctgcctgctgaggaagaggctgcctgtgaccaatgagatggtgcacaacctggtggccatcgagctggcctacatcaacaccaagcacccagactttgctgatgcctgtggcctgatgaacaacaacatcgaggagcagaggaggaaccggctggcccgggagctgcccagcgctgtgtcccgggacaagagcagcaaggtgcccagcgccctggccccagccagccaggagcccagccctgctgccagcgctgaggctgatggcaagctgatccaggacagcagaagagagaccaagaatgtggccagcggcggcggcggcgtgggagatggagtgcaggagcccaccactggaaactggaggggcatgctgaagaccagcaaggccgaggagctgctggccgaggagaagagcaagcccatccccatcatgcctgccagcccccagaagggccatgctgtgaacctgctggatgtgcctgtgcctgtggccaggaagctgagcgcccgggagcagagggactgtgaggtgattgaaagactcatcaagagctacttcctgattgtgaggaagaacatccaggacagcgtgcccaaggctgtgatgcacttcctggtgaaccacgtgaaggacaccctgcagagcgagctggtgggccagctgtacaagagcagcctgctggatgacctgctgacagaaagtgaggacatggcccagaggaggaaggaggccgctgacatgctgaaggccctgcagggcgccagccagatcatcgccgagatccgggagacccacctgtggtag

SEQ ID NO: 98494 - DNA, 2250 bp, Artificial Sequence
  derived and/or modified sequence
atggaggccctgatccccgtgatcaacaagctgcaggacgtgttcaacacagtgggggcagacattattcagttgccccagatcgtggtggtggggactcagagcagtggaaagtcctcagtgctggaatctcttgtgggtcgcgatttgctgccacgcggcactggaatcgtgactcgcagacccctgatactgcagctggtccacgtgagccaagaggacaagcggaaaactacgggcgaggagaacgaccctgcgacctggaagaatagccgtcatctcagcaagggggtcgaagccgaggagtggggaaagtttctgcacactaaaaacaaactgtacactgactttgacgagattaggcaagagattgagaacgaaacagaacgaatttcaggaaacaacaaaggcgtctcgccggaacccatccacttgaagatcttttctcctaacgtggttaatctgacactggtggacctgccaggcatgaccaaagtgcccgtgggcgatcagcccaaagacattgaactgcaaattcgggagctcattctgaggttcatttctaaccccaatagcattatcctcgccgtgaccgcagctaacaccgacatggcaactagcgaagctctgaaaatctcccgcgaggtggaccctgacgggcggagaacgctggccgtgataactaaactcgacctgatggacgccgggactgacgctatggatgtgcttatgggccgagtgatcccagtgaaactgggtattataggagttgtgaatagaagccaattggacatcaataacaaaaagagcgtaacggactcaattcgcgatgaatacgctttcttgcagaagaaatatcccagcctggccaaccggaatggcacaaaatatctggcccgcactcttaatcgcctccttatgcatcacatccgtgactgccttcctgaattaaaaacgcgcattaacgttcttgctgctcaataccagtctctcttaaactcttatggtgagccggtggatgataaaagcgccacacttctccaactgattactaaattcgcgaccgaatattgcaacacaattgaggggacagccaagtacatagagacgtccgaactctgtgggggtgccagaatttgttatatctttcatgaaacatttggtagaactctagagagcgtcgatccgctcggcggcttgaacaccattgatattttgacggcgattcggaatgctaccgggcctcggccagcactgtttgttccagaagttagtttcgaactgctggtcaagcgacaaattaaacggctcgaggaacccagcctgagatgtgttgagctggtgcacgaggagatgcagaggattattcagcattgcagcaactattctactcaagagctccttcgcttccccaagctccatgatgccatcgtagaggtggtcacttgtctgctccgaaagcgcttgccagtcactaacgagatggttcacaatttggttgctatcgaactcgcatacatcaacactaagcacccggacttcgctgacgcctgtggccttatgaacaacaacatcgaagaacagcgccgtaatcggctcgccagagaattgcctagcgctgtttccagggataagagtagtaaagtgccctcagccttagcccccgcttcacaagagccttctccggcagctagcgccgaagccgacggcaaattaatccaggactcacgacgagagacaaagaacgtggcctctggggggggcggagtaggtgacggtgtccaggaacctacaacggggaattggagagggatgctcaaaacatcaaaggccgaggagctgctcgccgaagaaaagagtaagcccatcccgatcatgccagcatctcctcaaaaggggcatgccgtcaatctgttggatgtcccagtgcccgtcgcaagaaagctctctgccagggaacagagggactgtgaggtcattgaacgcttgattaagtcctactttttgatcgtccggaagaacatccaggatagtgtgcccaaggcggtcatgcactttctcgtgaaccacgttaaggatactttgcagtccgagctggtgggtcagctctacaaaagttctctgcttgatgatctgctcaccgagtctgaggacatggctcaaaggcggaaagaagccgctgatatgctgaaggccctgcagggcgctagtcagatcatcgccgagatccgagagactcacttatggtag

SEQ ID NO: 98495 - DNA, 2250 bp, Artificial Sequence
  derived and/or modified sequence
atggaggccctcataccagtgattaacaaactgcaagacgtgtttaacaccgtcggcgctgatataatccaactccctcagatcgtggttgttgggacccagagtagcggaaagtcatcagtgttggagtcactggtggggagggatctgttgcctaggggcacaggcatcgttacccggagaccattaatcttgcaattggtacatgtgtctcaggaagacaagagaaagaccacaggagaggaaaacgatcccgctacatggaagaacagccggcatctcagtaagggggtcgaggccgaagagtgggggaagttcctccacacaaagaacaagttgtacactgattttgatgaaatccgccaagagattgagaacgaaaccgagcggatctcaggcaataataaaggcgtcagtcccgaacccatacacctgaagatcttcagtcccaatgtggtaaatcttaccttggtcgatctgcctggtatgaccaaagtgcctgttggggaccaacctaaggatatcgagctgcagattagggaactcattcttagatttatttccaacccgaatagcatcatactggccgtcactgctgcgaataccgatatggcaacaagcgaagcgcttaaaatatccagagaggtcgacccagatggacggagaactctggctgtgatcacaaagctcgatctcatggacgccggtactgacgcgatggacgtcctaatggggcgtgttatcccagtcaagttaggtatcattggggtcgtgaatcggtcccagctcgacattaacaacaaaaagagcgtgactgactcaatcagagatgaatatgcattcttacagaaaaaatacccctcactggccaatagaaatggaaccaagtatctggcgagaactctgaataggctattgatgcaccatattagagactgcctgccagaactgaagactcgcatcaatgtgctggcagcacagtaccagtcgctactcaactcttacggcgaaccggtagatgacaagtctgcaaccctgttgcagctgattacgaaatttgctacggaatactgcaacactattgagggcaccgcaaaatacatcgagacatcagagctgtgcggcggagccaggatctgttacatattccacgagacattcgggagaactttagagtcggtggacccactgggtggactgaatactatcgatatcttaaccgcgattcggaatgccacaggacctcgacccgcactgttcgtccctgaggtcagcttcgaacttctggtgaaacgtcagatcaagagattggaagagcctagtctgcggtgtgtggagctcgtgcacgaggagatgcagcggattattcagcattgctcgaactactcaacacaggagctactgcgttttcctaagctacacgacgcgattgtagaggttgtgacttgtttactgcggaaaaggttgccagtgaccaatgagatggtccacaacctcgtggccattgaactggcctatatcaataccaaacatcctgatttcgctgatgcctgcggcctgatgaataacaacattgaagagcagcgtcgcaaccgactggccagagagctgccgtccgcagtcagccgcgacaagagcagcaaagtgccttcagccctggctcctgcaagccaagagccgagccctgccgcatccgctgaggcagacggaaaactcattcaagactctcggagagaaacaaaaaacgttgcttctggaggcggaggagtgggcgatggcgtgcaggaaccgaccacgggtaactggaggggcatgttaaagacttcaaaggcagaggaactcctagcagaggagaagagtaagccaattcctatcatgcccgcatctcctcagaaaggtcacgcagtgaaccttctggatgttccagtacccgtggcaaggaaactgtcagctagagagcagcgtgattgtgaggttatagaacgactaattaaatcctatttcctgattgtgcggaagaacattcaagattctgttccaaaggcggtcatgcattttctggtcaatcatgtgaaggatacccttcaatccgaactggtcggacagctgtataaatcaagcctgctggatgacctactcaccgagagcgaagatatggctcagagacgtaaagaggctgccgatatgctcaaggccctgcagggggcatcccagatcatagcagagatacgtgagacacatttgtggtag

SEQ ID NO: 98496 - DNA, 2250 bp, Artificial Sequence
  derived and/or modified sequence
atggaggccctgatccccgtgatcaacaagctgcaggacgtgttcaacaccgtgggcgccgacatcatccagctgccccagatcgtggtggtgggcacccagagcagcggcaagagcagcgtgctggagagcctggtgggcagagacctgctgcccagaggcaccggcatcgtgaccagaagacccctgatcctgcagctggtgcacgtgagccaggaggacaagagaaagaccaccggcgaggagaacgaccccgccacctggaagaacagcagacacctgagcaagggcgtggaggccgaggagtggggcaagttcctgcacaccaagaacaagctgtacaccgacttcgacgagatcagacaggagatcgagaacgagaccgagagaatcagcggcaacaacaagggcgtgagccccgagcccatccacctgaagatcttcagccccaacgtggtgaacctgaccctggtggacctgcccggcatgaccaaggtgcccgtgggcgaccagcccaaggacatcgagctgcagatcagagagctgatcctgagattcatcagcaaccccaacagcatcatcctggccgtgaccgccgccaacaccgacatggccaccagcgaggccctgaagatcagcagagaggtggaccccgacggcagaagaaccctggccgtgatcaccaagctggacctgatggacgccggcaccgacgccatggacgtgctgatgggcagagtgatccccgtgaagctgggcatcatcggcgtggtgaacagaagccagctggacatcaacaacaagaagagcgtgaccgacagcatcagagacgagtacgccttcctgcagaagaagtaccccagcctggccaacagaaacggcaccaagtacctggccagaaccctgaacagactgctgatgcaccacatcagagactgcctgcccgagctgaagaccagaatcaacgtgctggccgcccagtaccagagcctgctgaacagctacggcgagcccgtggacgacaagagcgccaccctgctgcagctgatcaccaagttcgccaccgagtactgcaacaccatcgagggcaccgccaagtacatcgagaccagcgagctgtgcggcggcgccagaatctgctacatcttccacgagaccttcggcagaaccctggagagcgtggaccccctgggcggcctgaacaccatcgacatcctgaccgccatcagaaacgccaccggccccagacccgccctgttcgtgcccgaggtgagcttcgagctgctggtgaagagacagatcaagagactggaggagcccagcctgagatgcgtggagctggtgcacgaggagatgcagagaatcatccagcactgcagcaactacagcacccaggagctgctgagattccccaagctgcacgacgccatcgtggaggtggtgacctgcctgctgagaaagagactgcccgtgaccaacgagatggtgcacaacctggtggccatcgagctggcctacatcaacaccaagcaccccgacttcgccgacgcctgcggcctgatgaacaacaacatcgaggagcagagaagaaacagactggccagagagctgcccagcgccgtgagcagagacaagagcagcaaggtgcccagcgccctggcccccgccagccaggagcccagccccgccgccagcgccgaggccgacggcaagctgatccaggacagcagaagagagaccaagaacgtggccagcggcggcggcggcgtgggcgacggcgtgcaggagcccaccaccggcaactggagaggcatgctgaagaccagcaaggccgaggagctgctggccgaggagaagagcaagcccatccccatcatgcccgccagcccccagaagggccacgccgtgaacctgctggacgtgcccgtgcccgtggccagaaagctgagcgccagagagcagagagactgcgaggtgatcgagagactgatcaagagctacttcctgatcgtgagaaagaacatccaggacagcgtgcccaaggccgtgatgcacttcctggtgaaccacgtgaaggacaccctgcagagcgagctggtgggccagctgtacaagagcagcctgctggacgacctgctgaccgagagcgaggacatggcccagagaagaaaggaggccgccgacatgctgaaggccctgcagggcgccagccagatcatcgccgagatcagagagacccacctgtggtag

SEQ ID NO: 98497 - DNA, 2699 bp, Artificial Sequence
  derived and/or modified sequence
gaaggaggcgaactgtgggccccggccccattcattgccgtggccggcgggcactggggccccgtgttttcagagtcatggaggcgctaattcctgtcataaacaagctccaggacgtcttcaacacggtgggcgccgacatcatccagctgcctcaaatcgtcgtagtgggaacgcagagcagcggaaagagctcagtgctagaaagcctggtggggagggacctgcttcccagaggtactggaattgtcacccggagacctctcattctgcaactggtccatgtttcacaagaagataaacggaaaacaacaggagaagaaaatgaccctgctacatggaaaaactcaagacacctttctaaaggggtggaagcagaagaatggggtaaatttcttcacaccaaaaataagctttacacggattttgatgaaattcgacaagaaattgaaaatgaaacagaaagaatttcaggaaataataagggagtaagccctgaaccaattcatcttaagattttttcacccaacgttgtcaatttgacacttgtggatttgccaggaatgaccaaggtgcctgtaggtgatcaacctaaggatattgagcttcaaatcagagagctcattcttcggttcatcagtaatcctaattccattatcctcgctgtcactgctgctaatacagatatggcaacatcagaggcacttaaaatttcaagagaggtagatccagatggtcgcagaaccctagctgtaatcactaaacttgatctcatggatgcgggtactgatgccatggatgtattgatgggaagggttattccagtcaaacttggaataattggagtagttaacaggagccagctagatattaacaacaagaagagtgtaactgattcaatccgtgatgagtatgcttttcttcaaaagaaatatccatctctggccaatagaaatggaacaaagtatcttgctaggactctaaacaggttactgatgcatcacatcagagattgtttaccagagttgaaaacaagaataaatgttctagctgctcagtatcagtctcttctaaatagctacggtgaacccgtggatgataaaagtgctactttactccaacttattaccaaatttgccacagaatattgtaacactattgaaggaactgcaaaatatattgaaacttcggagctatgcggtggtgctagaatttgttatattttccatgagacttttgggcgaaccttagaatctgttgatccacttggtggccttaacactattgacattttgactgccattagaaatgctactggtcctcgtcctgctttatttgtgcctgaggtttcatttgagttactggtgaagcggcaaatcaaacgtctagaagagcccagcctccgctgtgtggaactggttcatgaggaaatgcaaaggatcattcagcactgtagcaattacagtacacaggaattgttacgatttcctaaacttcatgatgccatagttgaagtggtgacttgtcttcttcgtaaaaggttgcctgttacaaatgaaatggtccataacttagtggcaattgaactggcttatatcaacacaaaacatccagactttgctgatgcttgtgggctaatgaacaataatatagaggaacaaaggagaaacaggctagccagagaattaccttcagctgtatcacgagacaagtcttctaaagttccaagtgctttggcacctgcctcccaggagccctcccccgctgcttctgctgaggctgatggcaagttaattcaggacagcagaagagaaactaaaaatgttgcatctggaggtggtggggttggagatggtgttcaagaaccaaccacaggcaactggagaggaatgctgaaaacttcaaaagctgaagagttattagcagaagaaaaatcaaaacccattccaattatgccagccagtccacaaaaaggtcatgccgtgaacctgctagatgtgccagttcctgttgcacgaaaactatctgctcgggaacagcgagattgtgaggttattgaacgactcattaaatcatattttctcattgtcagaaagaatattcaagacagtgtgccaaaggcagtaatgcattttttggttaatcatgtgaaagacactcttcagagtgagctagtaggccagctgtataaatcatccttattggatgatcttctgacagaatctgaggacatggcacagcgcaggaaagaagcagctgatatgctaaaggcattacaaggagccagtcaaattattgctgaaatccgggagactcatctttggtgaagagaactatgtaatactgagactttgttgactcaaaacttgctagttactgcctacctgagtagaatcttatttatgaactcctgtgtattgcaatggtatgaatctgctcatgtggagactggctataaactgaaaagtgtattccaaattgcagaacacatcacacatttaatccaaataataaatggctgtttctaaagtttcccagtatatataaaatacatcaagtctgtcttgtgacagtttcatctgaacttaacttaaaaacaactgttaatgttctagttgtgcaaagcagtttgcctgtggataagatgacctgtgtaataatctttgttagtagtcttaaagctgctgccatagtcctcc

SEQ ID NO: 98498 - protein, 791 aa, Artificial Sequence
  derived and/or modified sequence
MACREGAGSRRARSNGCRLPRRGRRRGGRRRTVGPGPIHCRGRRALGPRVFRVMEALIPVINKLQDVFNTVGADIIQLPQIVVVGTQSSGKSSVLESLVGRDLLPRGTGIVTRRPLILQLVHVSQEDKRKTTGEENDPATWKNSRHLSKGVEAEEWGKFLHTKNKLYTDFDEIRQEIENETERISGNNKGVSPEPIHLKIFSPNVVNLTLVDLPGMTKVPVGDQPKDIELQIRELILRFISNPNSIILAVTAANTDMATSEALKISREVDPDGRRTLAVITKLDLMDAGTDAMDVLMGRVIPVKLGIIGVVNRSQLDINNKKSVTDSIRDEYAFLQKKYPSLANRNGTKYLARTLNRLLMHHIRDCLPELKTRINVLAAQYQSLLNSYGEPVDDKSATLLQLITKFATEYCNTIEGTAKYIETSELCGGARICYIFHETFGRTLESVDPLGGLNTIDILTAIRNATGPRPALFVPEVSFELLVKRQIKRLEEPSLRCVELVHEEMQRIIQHCSNYSTQELLRFPKLHDAIVEVVTCLLRKRLPVTNEMVHNLVAIELAYINTKHPDFADACGLMNNNIEEQRRNRLARELPSAVSRDKSSKVPSALAPASQEPSPAASAEADGKVASGGGGVGDGVQEPTTGNWRGMLKTSKAEELLAEEKSKPIPIMPASPQKGHAVNLLDVPVPVARKLSAREQRDCEVIERLIKSYFLIVRKNIQDSVPKAVMHFLVNHVKDTLQSELVGQLYKSSLLDDLLTESEDMAQRRKEAADMLKALQGASQIIAEIRETHLW

SEQ ID NO: 98499 - DNA, 2376 bp, Artificial Sequence
  derived and/or modified sequence
atggcatgtcgggaaggcgctggcagtaggcgcgcacgctccaatggctgtcgcttaccccgaagaggtcggagacgcggcggtcgccgtcggacggtgggccctggacctattcattgtcgagggaggagagccctgggaccccgcgtattccgcgtcatggaagccttgatccccgtgattaataagcttcaagacgtcttcaacactgttggggctgacatcatccaactgcctcagatcgtggtagttggcacccagtccagtgggaaatcttccgtcctcgagtccctcgtcgggagggacctcctgcccagaggaactgggattgtcacacggcggcccttgatcctccaactggtgcatgttagccaagaagacaagaggaagaccactggggaggaaaatgaccctgcaacctggaagaactccaggcacttaagtaaaggagtagaggctgaagaatggggaaaatttttgcatactaagaataaactgtatactgattttgatgagatccggcaagaaatcgaaaatgagacagaacggatttcgggcaacaataagggtgtttccccggaacccatccacctgaaaattttcagtcctaacgtggtgaatcttactctcgtcgacctgcccggaatgactaaggttcccgttggcgaccagccgaaggatatcgagctccagatcagagaactaatcctccgatttattagtaatcctaactcaataattctcgccgtgactgccgctaacaccgatatggccacctcagaggcgctgaaaattagccgggaggtggacccagacggtagaaggactctggccgtcatcactaagctggatttaatggatgccgggacggatgctatggatgtgctaatgggtcgcgtcatcccagtcaagttggggatcataggtgttgtgaaccgttctcagcttgatatcaacaacaaaaagtctgtgacagatagtattagggatgagtatgccttcctgcaaaagaaatacccttccctggcaaataggaacggaacaaaatacctggctaggacactgaatcgcttgctaatgcaccatattagggattgtttacctgagctaaaaacacggatcaatgtgctcgccgcacagtatcagtctctactgaactcctatggcgaacccgtggatgacaagtcagcgactcttttacagctgatcacgaagtttgctacggagtattgcaacaccatcgaggggacagccaaatatatcgagacatctgaactgtgcggtggagcacgaatctgttacatctttcacgagactttcggcaggactctggaaagcgtcgatcccttaggcgggctcaacaccatcgatatcctgacagccatcaggaatgctacgggccctcgtcccgcacttttcgtgcccgaggtctccttcgaactgctggtgaaaagacaaattaagcgtctagaagaaccttccctcaggtgcgtagagcttgtccatgaggagatgcagagaattatacagcactgcagcaattactctacccaggagctcctgcgcttcccaaagctgcacgacgccattgttgaggttgttacatgcctattgcgcaagcgtctacccgtcaccaatgagatggttcataatttggtggcaattgaacttgcttatataaataccaagcaccccgatttcgccgatgcttgtggcctcatgaacaataacatcgaagagcagaggaggaatcggctggccagggagttgccatcagctgtaagccgggataaaagcagtaaagtgccttccgctctggcgcccgcttcacaggaacccagccctgccgccagtgccgaggctgacggcaaagtcgcctccggcggcggcggcgtcggcgacggggtccaggagcctacgaccggcaattggcgaggaatgctgaaaacctccaaagccgaggagctcctcgctgaagagaagagcaaacccatccctattatgccagcctcccctcagaaagggcacgctgtgaacctcttggacgtgccggtgccagtcgctaggaagctgagcgccagggagcaacgcgactgtgaggttatcgagcgtctgataaagagttatttcctgattgtacgcaaaaacatccaggacagcgtacctaaggctgtgatgcatttcctggttaatcacgtcaaagacaccttacagtccgagctggtcgggcaactctacaaaagtagtctgctagacgatctgctcacagagtcagaagacatggcccagagaagaaaagaagcagcagacatgttaaaggctctccagggcgccagtcagattatcgcagaaatcagagaaactcacctctggtag

SEQ ID NO: 98500 - DNA, 2376 bp, Artificial Sequence
  derived and/or modified sequence
atggcctgccgggagggcgccggcagccggcgggcccggagcaatggctgccgcctgccccggcggggcagaagaagaggaggaagaagaagaacagtgggccctggccccatccactgccggggcagaagagccctgggccccagggtcttccgggtgatggaggccctgatccctgtgatcaacaagctgcaggatgtgttcaacacagtgggcgctgacatcatccagctgccccagatcgtggtggtgggcacccagagcagcggcaagagctctgtgctggagagcctggtgggccgggacctgctgccccggggcaccggcatcgtgacccggcggcccctcatcctgcagctggtgcacgtgtcccaggaggacaagaggaagaccaccggggaggagaatgaccctgccacctggaagaacagccgccacctgagcaaaggagtggaggccgaggagtggggcaagttcctgcacaccaagaacaagctgtacacagactttgatgagatccggcaggagattgaaaatgaaacagagcgcatcagcggcaacaacaagggcgtgtccccagagcccatccacctgaagatcttcagccccaacgtggtgaacctgaccctggtggacctgcccggcatgaccaaggtgcctgtgggggaccagcccaaggacatcgagctgcagatccgggagctgatcctgcgcttcatcagcaaccccaacagcatcatcctggccgtgacagctgccaacacagacatggccaccagcgaggccctgaagatcagccgggaggtggaccctgatggccgccgcaccctggccgtcatcaccaagctggacctgatggatgctggaacagatgccatggatgtgctgatgggccgggtcatccctgtgaagctgggcatcatcggcgtggtgaacagaagccagctggacatcaacaacaagaagtctgtgacagacagcatcagagatgaatatgccttcctgcagaagaagtaccccagcctggccaacagaaatggcaccaagtacctggcccggaccctgaaccggctgctgatgcaccacatccgggactgcctgcctgagctgaagacccgcatcaacgtgctggccgcccagtaccagagcctgctgaacagctatggagagcctgtggatgacaagagcgccaccctgctgcagctgatcaccaagtttgccacagagtactgcaacaccatcgagggcacagccaagtacatcgagaccagcgagctgtgtggcggggcccgcatctgctacatcttccacgagaccttcggccgcaccctggagagcgtggaccccctgggcggcctgaacaccatcgacatcctgacagccatcagaaatgccaccggccccaggcctgccctgtttgtgcctgaggtgtcctttgagctgctggtgaagaggcagatcaagaggctggaggagcccagcctgcgctgtgtggagctggtgcatgaggagatgcagaggatcatccagcactgcagcaactacagcacccaggagctgctgcgcttccccaagctgcatgatgccatcgtggaggtggtgacctgcctgctgaggaagaggctgcctgtgaccaatgagatggtgcacaacctggtggccatcgagctggcctacatcaacaccaagcacccagactttgctgatgcctgtggcctgatgaacaacaacatcgaggagcagaggaggaaccggctggcccgggagctgcccagcgctgtgtcccgggacaagagcagcaaggtgcccagcgccctggccccagccagccaggagcccagccctgctgccagcgctgaggctgatggcaaggtggccagcggcggcggcggcgtgggagatggagtgcaggagcccaccactggaaactggaggggcatgctgaagaccagcaaggccgaggagctgctggccgaggagaagagcaagcccatccccatcatgcctgccagcccccagaagggccatgctgtgaacctgctggatgtgcctgtgcctgtggccaggaagctgagcgcccgggagcagagggactgtgaggtgattgaaagactcatcaagagctacttcctgattgtgaggaagaacatccaggacagcgtgcccaaggctgtgatgcacttcctggtgaaccacgtgaaggacaccctgcagagcgagctggtgggccagctgtacaagagcagcctgctggatgacctgctgacagaaagtgaggacatggcccagaggaggaaggaggccgctgacatgctgaaggccctgcagggcgccagccagatcatcgccgagatccgggagacccacctgtggtag

SEQ ID NO: 98501 - DNA, 2376 bp, Artificial Sequence
  derived and/or modified sequence
atggcctgccgggagggcgccggcagccggcgggcccggagcaacggctgccggcttcctcgcagagggcgtagacggggcggcagaagaaggaccgtcgggcctggacccatccattgtcgggggcggcgggctctgggcccaagggtgttccgggtcatggaggcactgatacccgtgatcaataagcttcaggacgtgtttaatacagtcggggccgacattattcaactgccccagatagttgtggttggaacccagtcatctgggaagtcttctgtcttggaaagcttagtagggcgggatctcctgccgcggggaacaggcattgtgactcgtcgtcccctgatactgcagctggtgcacgtaagccaggaagacaagaggaagaccaccggcgaggagaatgatccagcaacgtggaaaaacagtcggcacctcagcaaaggcgtggaggcagaggagtggggcaaatttctccacacaaaaaacaagctctataccgactttgacgagataagacaggagatcgagaacgagaccgagagaataagtggaaacaacaaaggggtgagtccagaacctatccatcttaagatcttcagccccaacgtggtcaacctgactctggtcgacctgccaggaatgaccaaggtgcccgtgggtgaccagcccaaagatatagaattgcagattcgggaacttattcttagattcatctcaaacccaaatagcataatactggcggtgacagcggccaacacagatatggctacaagtgaggcccttaagatcagcagggaggtggatcccgacggtcgaagaaccttggcagttatcacaaaactggatctgatggatgcaggcaccgacgcaatggatgtgctgatgggccgggtcattccagtgaagctggggattataggagtggttaaccggtcacagcttgatatcaataacaaaaaatctgtcaccgacagcattagggacgagtacgcatttcttcaaaaaaaatatccctcgcttgccaacagaaatggaaccaaatatctggctcgcaccctgaatagacttctgatgcatcatatacgcgactgtttgccagaactaaagaccaggatcaacgtcttagctgcacagtaccagagcttactcaacagttatggcgaacccgtggacgataagtccgccaccctgctgcaattgatcacaaaattcgcaactgaatattgtaacacgattgaaggcacggccaagtacattgagaccagcgaattgtgtggtggagccagaatatgctacattttccatgagacattcggcaggaccctggaatcagtggatccacttggaggactgaacactatcgatatcctgacggctatccgcaacgccacagggccccgccccgcactgttcgtgcctgaagtctctttcgagctcctcgtaaagcgccaaattaaacggttggaagaacctagcttgcgatgtgtggagctggtacacgaggaaatgcaaaggatcattcagcactgttccaattatagcactcaggagctgttgcgctttcctaagttgcacgacgcaattgtcgaggtggtaacgtgtctgttgagaaagcgattgcctgtcacaaacgaaatggtccacaatctcgtggcgatcgagctcgcatatattaacactaaacatcccgactttgcggatgcctgtggactgatgaataataacatagaagaacagcggaggaaccgcctcgcccgcgagcttccctccgccgtctccagggataaaagctccaaagtgcccagtgccctggcacctgcaagtcaggagcctagtcctgctgcgtcggcggaggcagacggtaaagtggcctcgggaggaggaggtgtgggtgacggtgtacaggagcccaccactggcaactggcgtgggatgctcaaaactagcaaagcagaggagctgcttgccgaagagaaaagcaaacctattcctataatgccagcgtctccccagaaggggcatgccgtgaacctgctggatgtacctgtgcccgtagcccgcaagctgtctgcccgtgagcagcgagactgtgaagtgattgagcggttaatcaagtcttatttcctgattgtacggaaaaatatacaggacagtgtcccaaaagccgtcatgcatttcctcgttaaccatgttaaagatactctgcagtctgaactggtcggccaactgtacaaatctagtctgttggatgacctgttgactgagagtgaagacatggctcaaagacgaaaggaagcagctgacatgctgaaggctttgcagggcgcctcgcagatcattgctgaaatacgggaaacgcatctgtggtag

SEQ ID NO: 98502 - DNA, 2376 bp, Artificial Sequence
  derived and/or modified sequence
atggcttgtcgagaaggagctggatcccgacgcgctcgatcaaatggctgccggttgcccagacgcggtcggagacgcggagggaggaggcgcacagtcggccctggtcctattcactgcagaggacgccgagctctcggtcccagggtttttagggttatggaggccctgattcctgtaataaacaaactacaggacgtgtttaacacagttggtgccgacattatacaactccctcaaatcgtcgtagtgggaacgcagtcctccggtaaatcgtccgtgttagagtcactcgtgggtcgcgatctgctcccacgaggtaccggcatcgtgacccgaagaccactcatcctgcagctggtccacgtgtctcaagaagacaaaagaaaaacaacgggagaggaaaacgacccagccacatggaagaactcccgacacctgagcaaaggagtagaggccgaagaatggggcaagttcttgcacacgaagaataagctgtacacggacttcgatgaaattcggcaagagattgagaacgagacagaacgcatttcgggtaataataagggagtgagccctgaacccattcatttgaagattttctccccaaatgtagttaacttgactctcgtggacctgccagggatgacaaaagtgccggtgggtgaccagcccaaagatatcgaattacaaatacgggagctcatcctgcggttcatctctaatccaaactccataatcctggctgtgacagccgctaataccgacatggccactagcgaggctctgaaaatctcacgcgaggtggaccccgacggtcggagaactttggccgttattactaagcttgaccttatggatgcaggtacagacgcaatggacgtgctcatggggagagtaataccagtgaaactcggaatcatcggcgtggtgaataggtcccagttggatattaacaataaaaagagtgtgaccgactcaatcagagacgagtatgcatttttacagaagaaatatcctagcttggctaaccgtaatggaacaaaatacctggctcggaccttaaatcggctgctgatgcatcacattagagattgtctccctgagctcaagacacggattaatgtgctcgccgctcagtatcaatccttgttgaacagctacggggagcccgttgatgataagtctgccacactactgcagctgatcaccaaatttgccacggagtactgtaatacaatcgagggcaccgcaaaatatatcgaaacgtctgagctgtgtggaggcgctagaatctgctatatcttccacgagactttcgggcgaacactggaaagcgtggacccgctgggcggactgaataccatcgatatcttaaccgccattcgcaatgccacgggaccccgtcccgcactattcgtgcctgaggtcagttttgaactacttgtgaaaaggcaaataaagcgtcttgaagagcctagtttgcgctgcgtcgaactggtgcacgaggagatgcagaggattattcaacactgtagtaactatagcacgcaagagctcttgcgattccctaagttacatgatgctatcgtggaggtggtcacgtgcctcctgagaaagcgcctgccggtgactaatgaaatggtgcacaacttagtagcaatcgagctggcctacatcaacactaagcatcctgactttgctgacgcttgcggccttatgaataataacatcgaagaacaacgcagaaatcgcctggccagggagctcccctctgcagtatctcgggacaagagctccaaagtcccttcagcactggcacctgcttcacaggaacccagtccagctgccagcgccgaggctgacggcaaggttgcctcgggagggggtggagtgggggacggtgtccaggagccgacgacaggaaattggaggggaatgctgaagacaagcaaagcagaggagttgctagctgaagaaaagagcaaacctatacccatcatgccagccagtccacagaaaggacatgctgtgaacctgctggacgtgcccgtcccggtagcacggaagctgtcagcaagggagcagagggattgtgaagtaattgaacggctcatcaagtcgtacttcctcatagtccgaaagaatatccaggacagcgtgcccaaagccgttatgcactttctggtcaaccacgtgaaggataccttacagtctgaactggtaggccaactttataaatcatctcttctggatgatctgctgactgagtccgaagatatggcacagcgccgtaaagaagctgcagacatgctgaaggcactacagggcgctagccagatcatcgccgaaatccgcgaaactcatctatggtag

SEQ ID NO: 98503 - DNA, 2376 bp, Artificial Sequence
  derived and/or modified sequence
atggcctgcagagagggcgccggcagcagaagagccagaagcaacggctgcagactgcccagaagaggcagaagaagaggcggcagaagaagaaccgtgggccccggccccatccactgcagaggcagaagagccctgggccccagagtgttcagagtgatggaggccctgatccccgtgatcaacaagctgcaggacgtgttcaacaccgtgggcgccgacatcatccagctgccccagatcgtggtggtgggcacccagagcagcggcaagagcagcgtgctggagagcctggtgggcagagacctgctgcccagaggcaccggcatcgtgaccagaagacccctgatcctgcagctggtgcacgtgagccaggaggacaagagaaagaccaccggcgaggagaacgaccccgccacctggaagaacagcagacacctgagcaagggcgtggaggccgaggagtggggcaagttcctgcacaccaagaacaagctgtacaccgacttcgacgagatcagacaggagatcgagaacgagaccgagagaatcagcggcaacaacaagggcgtgagccccgagcccatccacctgaagatcttcagccccaacgtggtgaacctgaccctggtggacctgcccggcatgaccaaggtgcccgtgggcgaccagcccaaggacatcgagctgcagatcagagagctgatcctgagattcatcagcaaccccaacagcatcatcctggccgtgaccgccgccaacaccgacatggccaccagcgaggccctgaagatcagcagagaggtggaccccgacggcagaagaaccctggccgtgatcaccaagctggacctgatggacgccggcaccgacgccatggacgtgctgatgggcagagtgatccccgtgaagctgggcatcatcggcgtggtgaacagaagccagctggacatcaacaacaagaagagcgtgaccgacagcatcagagacgagtacgccttcctgcagaagaagtaccccagcctggccaacagaaacggcaccaagtacctggccagaaccctgaacagactgctgatgcaccacatcagagactgcctgcccgagctgaagaccagaatcaacgtgctggccgcccagtaccagagcctgctgaacagctacggcgagcccgtggacgacaagagcgccaccctgctgcagctgatcaccaagttcgccaccgagtactgcaacaccatcgagggcaccgccaagtacatcgagaccagcgagctgtgcggcggcgccagaatctgctacatcttccacgagaccttcggcagaaccctggagagcgtggaccccctgggcggcctgaacaccatcgacatcctgaccgccatcagaaacgccaccggccccagacccgccctgttcgtgcccgaggtgagcttcgagctgctggtgaagagacagatcaagagactggaggagcccagcctgagatgcgtggagctggtgcacgaggagatgcagagaatcatccagcactgcagcaactacagcacccaggagctgctgagattccccaagctgcacgacgccatcgtggaggtggtgacctgcctgctgagaaagagactgcccgtgaccaacgagatggtgcacaacctggtggccatcgagctggcctacatcaacaccaagcaccccgacttcgccgacgcctgcggcctgatgaacaacaacatcgaggagcagagaagaaacagactggccagagagctgcccagcgccgtgagcagagacaagagcagcaaggtgcccagcgccctggcccccgccagccaggagcccagccccgccgccagcgccgaggccgacggcaaggtggccagcggcggcggcggcgtgggcgacggcgtgcaggagcccaccaccggcaactggagaggcatgctgaagaccagcaaggccgaggagctgctggccgaggagaagagcaagcccatccccatcatgcccgccagcccccagaagggccacgccgtgaacctgctggacgtgcccgtgcccgtggccagaaagctgagcgccagagagcagagagactgcgaggtgatcgagagactgatcaagagctacttcctgatcgtgagaaagaacatccaggacagcgtgcccaaggccgtgatgcacttcctggtgaaccacgtgaaggacaccctgcagagcgagctggtgggccagctgtacaagagcagcctgctggacgacctgctgaccgagagcgaggacatggcccagagaagaaaggaggccgccgacatgctgaaggccctgcagggcgccagccagatcatcgccgagatcagagagacccacctgtggtag

SEQ ID NO: 98504 - DNA, 4618 bp, Artificial Sequence
  derived and/or modified sequence
gcatggcctgccgggagggggcaggtagccggcgggcccggtccaatgggtgccggcttccgaggagagggcggaggagaggaggaaggaggcgaactgtgggccccggccccattcattgccgtggccggcgggcactggggccccgtgttttcagagtcatggaggcgctaattcctgtcataaacaagctccaggacgtcttcaacacggtgggcgccgacatcatccagctgcctcaaatcgtcgtagtgggaacgcagagcagcggaaagagctcagtgctagaaagcctggtggggagggacctgcttcccagaggtactggaattgtcacccggagacctctcattctgcaactggtccatgtttcacaagaagataaacggaaaacaacaggagaagaaaatgaccctgctacatggaaaaactcaagacacctttctaaaggggtggaagcagaagaatggggtaaatttcttcacaccaaaaataagctttacacggattttgatgaaattcgacaagaaattgaaaatgaaacagaaagaatttcaggaaataataagggagtaagccctgaaccaattcatcttaagattttttcacccaacgttgtcaatttgacacttgtggatttgccaggaatgaccaaggtgcctgtaggtgatcaacctaaggatattgagcttcaaatcagagagctcattcttcggttcatcagtaatcctaattccattatcctcgctgtcactgctgctaatacagatatggcaacatcagaggcacttaaaatttcaagagaggtagatccagatggtcgcagaaccctagctgtaatcactaaacttgatctcatggatgcgggtactgatgccatggatgtattgatgggaagggttattccagtcaaacttggaataattggagtagttaacaggagccagctagatattaacaacaagaagagtgtaactgattcaatccgtgatgagtatgcttttcttcaaaagaaatatccatctctggccaatagaaatggaacaaagtatcttgctaggactctaaacaggttactgatgcatcacatcagagattgtttaccagagttgaaaacaagaataaatgttctagctgctcagtatcagtctcttctaaatagctacggtgaacccgtggatgataaaagtgctactttactccaacttattaccaaatttgccacagaatattgtaacactattgaaggaactgcaaaatatattgaaacttcggagctatgcggtggtgctagaatttgttatattttccatgagacttttgggcgaaccttagaatctgttgatccacttggtggccttaacactattgacattttgactgccattagaaatgctactggtcctcgtcctgctttatttgtgcctgaggtttcatttgagttactggtgaagcggcaaatcaaacgtctagaagagcccagcctccgctgtgtggaactggttcatgaggaaatgcaaaggatcattcagcactgtagcaattacagtacacaggaattgttacgatttcctaaacttcatgatgccatagttgaagtggtgacttgtcttcttcgtaaaaggttgcctgttacaaatgaaatggtccataacttagtggcaattgaactggcttatatcaacacaaaacatccagactttgctgatgcttgtgggctaatgaacaataatatagaggaacaaaggagaaacaggctagccagagaattaccttcagctgtatcacgagacaagtcttctaaagttccaagtgctttggcacctgcctcccaggagccctcccccgctgcttctgctgaggctgatggcaaggttgcatctggaggtggtggggttggagatggtgttcaagaaccaaccacaggcaactggagaggaatgctgaaaacttcaaaagctgaagagttattagcagaagaaaaatcaaaacccattccaattatgccagccagtccacaaaaaggtcatgccgtgaacctgctagatgtgccagttcctgttgcacgaaaactatctgctcgggaacagcgagattgtgaggttattgaacgactcattaaatcatattttctcattgtcagaaagaatattcaagacagtgtgccaaaggcagtaatgcattttttggttaatcatgtgaaagacactcttcagagtgagctagtaggccagctgtataaatcatccttattggatgatcttctgacagaatctgaggacatggcacagcgcaggaaagaagcagctgatatgctaaaggcattacaaggagccagtcaaattattgctgaaatccgggagactcatctttggtgaagagaactatgtaatactgagactttgttgactcaaaacttgctagttactgcctacctgagtagaatcttatttatgaactcctgtgtattgcaatggtatgaatctgctcatgtggagactggctataaactgaaaagtgtattccaaattgcagaacacatcacacatttaatccaaataataaatggctgtttctaaagtttcccagtatatataaaatacatcaagtctgtcttgtgacagtttcatctgaacttaacttaaaaacaactgttaatgttctagttgtgcaaagcagtttgcctgtggataagatgacctgtgtaataatctttgttagtagtcttaaagctgctgccatagtcctccaagaagaaagcaccaagacaacatttcatatgactataatgcatgtactatataagctgatctggctttgaaagatgtgagttggcaagttcctcacatagagtcattgtattccacctgtccttcaatttagttttttctgagcttctttgcagcctttgatgtgtttttaagaaagctgaatgcacaagaggatctgtgacactgacatggctgtggtgtgcatactgtgtagttacatagcccttccaattctgggtccatttgcactagcaaattaaaatatgctttgattcatacttaaacctgaaagcaggaatgcctacattaattcctacattaaaaacagccatctacccttgattatctagaaagacttggtaatgatggtcagttccttttagatttcagaaaatcaaatgatgacctaaatttcccttaatttgcaaatacagtagtaattaaggtacatctctaaagtggagcacttacaccaggctctaagattcactttgaggtggaacttaaaaccagtgtactgtatgtatgcattggtaatagctacttttgcttcatagcttcataccaacaaaatatatttattagaatagtatgaaagtactggaggagctgaaagaaaaacacccaaggctgggcgtggtggcacacgcctgtaatcccagcactttgggaggccgaggcaggtggatcacctgaggttgggagttggagaccagcttgaccaacatggagaaaccccgtctctactaaaaatacaaaattggccgggcgtggtggcgcatgcctgtaatcccagctactcgggagggtgaggcaggagaattgcttgaccctgggaggtggaggttgtggtgagctaagatcgtgccattgcactccagccttggcaacaagagcgaaactccgtctcaaaaaaaaaaaataaaacaacacccagatagatacacatactccttcagacttacagacctaagctgcatttatggggtagtgatgaggtttagaacatatacatattttgttaaaattccccagatgattcttggtatgaacgactatattataaattttaagatgtacttagaaatccttaagacatctagccccgtctctaatagacaacacatttatattgcagatattacttttttttcagtttatgaccaggtatttatgaaggactattggcagggaaaatatgaatatgttaactttagcttatggcatcaatttactaaggaacaacaggctcaccaactgatgtcaaacataaaaacccccacatcagtctgatacgatatggtactactttgaatctgttactagtaccatcttgacagaggatacatgctcccaaaacgtttgttaccacacttaaaaatcactgccatcattaagcatcagtttcaaaattatagccattcatgatttactttttccagatgactatcattattctagtcctttgaatttgtaaggggaaaaaaaacaaaaacaaaaacttacgatgcacttttctccagcacatcagatttcaaattgaaaattaaagacatgctatggtaatgcacttgctagtactacacactttgtacaacaaaaaacagaggcaagaaacaacggaaagagaaaagccttcctttgttggcccttaaactgagtcaagatctgaaatgtagagatgatctctgacgatacctgtatgttcttattgtgtaaataaaattgctggtatgaaatgacactaaagtttgtcaaaaaatgaattcttaacttttctcccagagaaagggagacaaaaggagctttttaatacctaatctactttggaacataaccgtatagag

SEQ ID NO: 98505 - protein, 533 aa, Artificial Sequence
  derived and/or modified sequence
MFHKKINGKQQEKKMTLLHGKTQDTFLKGWKQKNGVNFFTPKIRSQLDINNKKSVTDSIRDEYAFLQKKYPSLANRNGTKYLARTLNRLLMHHIRDCLPELKTRINVLAAQYQSLLNSYGEPVDDKSATLLQLITKFATEYCNTIEGTAKYIETSELCGGARICYIFHETFGRTLESVDPLGGLNTIDILTAIRNATGPRPALFVPEVSFELLVKRQIKRLEEPSLRCVELVHEEMQRIIQHCSNYSTQELLRFPKLHDAIVEVVTCLLRKRLPVTNEMVHNLVAIELAYINTKHPDFADACGLMNNNIEEQRRNRLARELPSAVSRDKSSKVPSALAPASQEPSPAASAEADGKLIQDSRRETKNVASGGGGVGDGVQEPTTGNWRGMLKTSKAEELLAEEKSKPIPIMPASPQKGHAVNLLDVPVPVARKLSAREQRDCEVIERLIKSYFLIVRKNIQDSVPKAVMHFLVNHVKDTLQSELVGQLYKSSLLDDLLTESEDMAQRRKEAADMLKALQGASQIIAEIRETHLW

SEQ ID NO: 98506 - DNA, 1602 bp, Artificial Sequence
  derived and/or modified sequence
atgttccacaaaaaaataaatggaaaacagcaagagaagaaaatgaccctgctccacggaaagactcaggacactttcctgaagggatggaagcagaaaaatggggttaattttttcacgccgaagattaggtcccagctggatatcaataacaaaaagagtgtcaccgactctattcgagacgagtatgccttcctgcagaagaagtacccatccctggcgaataggaacggtaccaaatacctggccagaacactgaacaggttgctcatgcatcatattagggactgccttccagaactgaagaccaggatcaatgtcttggccgcacagtatcagagcttgctaaactcttatggcgaaccagtggatgacaagagcgccacattacttcagcttatcacaaaattcgccacagagtattgtaacaccattgagggaacggctaagtacatcgagacctcagaactctgtggcggagcccgcatctgctatatctttcacgaaactttcgggcgcactctcgagtccgtggatccactgggcggcctgaatacgatagatatattgacagcgattaggaatgctacaggtccccgaccagcactgttcgtgcctgaagtctcctttgagctgctggtgaagcggcagattaaacgattagaggaaccaagtctgagatgcgtcgaactggtgcacgaagagatgcaaaggatcatacagcattgtagtaactatagcacccaggagctgctcagatttcctaagctgcatgacgcaattgtggaggtggtgacctgcctgctcaggaagcgcttaccggttactaatgagatggtccataacctcgttgccatcgaactcgcttatattaataccaagcatcctgatttcgctgatgcttgtggcctgatgaacaataatatcgaggaacagaggagaaatagactcgcccgagagctccccagtgcagtgtcgagagacaagtccagtaaggtgccgtccgcgctcgctcccgccagccaggagccctctcccgctgctagtgccgaggccgatggaaaactcattcaggacagtcggagagaaaccaaaaacgtggcctccggcggcgggggagtgggagatggagtccaggagccgactacaggtaactggcgtggtatgctgaagaccagcaaggcagaggaactgcttgctgaggagaagagcaaaccgatccctatcatgcctgcttctccccagaagggccacgcagtcaacttactggacgtaccagtgccggtcgcgcgcaagttgtccgcgcgcgaacagagagattgcgaagtgatagagcgacttatcaagtcctattttctgatcgttaggaaaaatatacaggactctgtgccaaaggcggttatgcattttctcgtgaaccatgtaaaggacactctacagtcagaattggtcggacaactgtacaaatcaagccttctcgatgatttattaactgagtccgaggacatggcccagaggcgaaaagaggcagctgacatgctaaaggctctgcagggggcttctcagattatagctgagatcagagaaactcatttgtggtag

SEQ ID NO: 98507 - DNA, 1602 bp, Artificial Sequence
  derived and/or modified sequence
atgttccacaagaagatcaatggcaagcagcaggagaagaagatgaccctgctgcacggcaagacccaggacaccttcctgaagggctggaagcagaagaatggagtgaacttcttcacccccaagatccgcagccagctggacatcaacaacaagaagtctgtgacagacagcatcagagatgaatatgccttcctgcagaagaagtaccccagcctggccaacagaaatggcaccaagtacctggcccggaccctgaaccggctgctgatgcaccacatccgggactgcctgcctgagctgaagacccgcatcaacgtgctggccgcccagtaccagagcctgctgaacagctatggagagcctgtggatgacaagagcgccaccctgctgcagctgatcaccaagtttgccacagagtactgcaacaccatcgagggcacagccaagtacatcgagaccagcgagctgtgtggcggggcccgcatctgctacatcttccacgagacctttggaagaaccctggagagcgtggaccccctgggcggcctgaacaccatcgacatcctgacagccatcagaaatgccaccggccccaggcctgccctgtttgtgcctgaggtgtcctttgagctgctggtgaagaggcagatcaagaggctggaggagcccagcctgcgctgtgtggagctggtgcatgaggagatgcagaggatcatccagcactgcagcaactacagcacccaggagctgctgcgcttccccaagctgcatgatgccatcgtggaggtggtgacctgcctgctgaggaagaggctgcctgtgaccaatgagatggtgcacaacctggtggccatcgagctggcctacatcaacaccaagcacccagactttgctgatgcctgtggcctgatgaacaacaacatcgaggagcagaggaggaaccggctggcccgggagctgcccagcgctgtgtcccgggacaagagcagcaaggtgcccagcgccctggccccagccagccaggagcccagccctgctgccagcgctgaggctgatggcaagctgatccaggacagcagaagagagaccaagaatgtggccagcggcggcggcggcgtgggagatggagtgcaggagcccaccactggaaactggaggggcatgctgaagaccagcaaggccgaggagctgctggccgaggagaagagcaagcccatccccatcatgcctgccagcccccagaagggccatgctgtgaacctgctggatgtgcctgtgcctgtggccaggaagctgagcgcccgggagcagagggactgtgaggtgattgaaagactcatcaagagctacttcctgattgtgaggaagaacatccaggacagcgtgcccaaggctgtgatgcacttcctggtgaaccacgtgaaggacaccctgcagagcgagctggtgggccagctgtacaagagcagcctgctggatgacctgctgacagaaagtgaggacatggcccagaggaggaaggaggccgctgacatgctgaaggccctgcagggcgccagccagatcatcgccgagatccgggagacccacctgtggtag

SEQ ID NO: 98508 - DNA, 1602 bp, Artificial Sequence
  derived and/or modified sequence
atgttccacaagaagatcaacggcaagcagcaggagaagaagatgacattactgcacgggaagactcaggatacattcctcaaaggatggaagcagaagaatggggttaacttcttcacaccgaaaatccggtcccaattggatatcaacaacaagaagagcgtgactgactctatccgagatgagtatgcatttctccagaagaagtaccctagccttgccaatcggaatggaaccaaatatttagcgagaactctgaatcgcttgctgatgcatcacatccgtgattgtctgccggaactgaaaacacggattaatgttttggcggcacagtaccagtctctcctgaactcctacggcgagccagttgacgataaatctgccactctgctacagctgataaccaagtttgcaacagagtattgtaacacaattgaaggaaccgccaagtatattgagactagcgaattatgcggaggagctcggatatgctatatctttcatgaaacctttgggcgcaccctggagagcgtggaccctctcgggggcctgaatacaatcgacatcctcaccgctattagaaatgccacagggcctcggccagccctctttgtgcccgaagttagctttgagctcttggtcaaacgtcagataaaacgtctggaagaaccatccctccggtgcgtggaactcgtgcacgaagagatgcagcgaatcatccagcactgcagtaattattcaacccaggaattactgagatttcccaagctgcatgatgccatagtggaggtagttacgtgccttttgcgaaagaggctgcctgtgacaaacgaaatggtgcacaatctggtcgccattgaactggcttacatcaatactaagcatcccgactttgcggacgcatgcggcttaatgaataataatatcgaggaacagcgtcggaacaggctggctcgcgaactgccctcagctgtttcccgggacaagtcttcgaaagtgcccagcgctcttgctccagcgtctcaggagcctagcccagcagcttcagccgaggctgacggtaagcttattcaagatagccgtcgggaaaccaaaaatgtagctagcggcggaggaggtgtgggagacggtgttcaagaacctacgacagggaactggcgaggcatgctgaaaacatctaaagccgaggagctactggccgaagaaaaatcaaaacccatccccatcatgcccgcgtcacctcaaaagggccacgccgtgaacctgcttgatgtgcctgtcccagtggcacgaaaactgtccgccagggaacagcgggattgcgaggtgatcgaacgtctgataaagtcctattttttgatcgtgagaaagaacatccaagattccgtgcccaaggccgttatgcattttctcgtaaaccatgtgaaggatactttgcagagtgaactcgtgggacagctatacaagtcatcactcctggatgacctcctgaccgaaagtgaggacatggcacagcgccgcaaagaagcagctgatatgcttaaggctctacagggagcttctcaaatcattgcagagattcgggagactcatctctggtag

SEQ ID NO: 98509 - DNA, 1602 bp, Artificial Sequence
  derived and/or modified sequence
atgttccacaaaaagatcaacgggaaacagcaggaaaagaagatgacactgctccacggcaaaactcaggacacgtttctaaaaggctggaagcagaaaaacggcgtaaacttctttactcccaagataagaagtcagctcgacatcaataataagaagtcggtgaccgactctatcagggatgagtacgcattcctgcaaaaaaaatatccgagccttgctaatagaaacggtactaagtacctcgccagaaccctaaataggctgctgatgcaccacatccgagactgtcttccagaactgaagacaaggatcaacgttcttgcagcacagtatcagtccctcctgaactcttacggagaacccgtcgacgataaaagtgccaccctcctccaacttattactaaatttgctactgagtattgtaatacaatcgaagggaccgccaaatacatcgagacctccgaactttgtgggggagcaagaatatgttacatctttcacgagactttcgggcgtaccctcgaatccgtcgatcctctaggcggactgaatactatagacattctgaccgcgattcgtaacgcaacagggccacgtccggcactttttgtgccagaggtgagcttcgagctgctcgtgaaaaggcagatcaagcgcctagaagaaccttctcttcggtgcgtggaactggtccacgaggaaatgcagcggattatccagcactgttcaaactattctacacaggagcttctacggttccccaaactgcacgatgccattgtcgaggtcgtcacctgcctcttacgcaagagacttcctgtgacaaatgaaatggtgcacaatctggtggccatcgagctggcctacattaacaccaaacaccctgatttcgccgacgcctgcggacttatgaataataacattgaagagcagcgacgtaacaggctggctcgagagttaccatccgcggtgagtagagataaaagcagtaaggtcccgagcgcccttgctcctgcaagccaggagccaagcccagctgcaagtgccgaggccgacggcaagctcatccaagacagccggcgagagacaaagaacgttgccagtggcggaggcggagtgggggacggcgtgcaggagcctacgacaggcaattggcgaggaatgctcaagacctccaaggccgaagagctcctcgccgaggagaagtccaagcccattcccataatgccagcgtcccctcagaaggggcatgccgtgaacctgcttgacgttcctgtgcccgtggccagaaaactatccgcccgtgaacagagagactgcgaggttatagagcgcctgattaagagctacttcctaattgtcagaaaaaacatccaagattcagtgcctaaagcagtcatgcattttctagttaaccatgtgaaggatacactgcagagcgaacttgtgggccagttgtacaagagctccctgctggatgacctcctgaccgagagcgaggatatggcccagcgcaggaaagaggctgcggatatgctgaaggcactgcagggggcatctcagataattgccgagattagggaaacacacctgtggtag

SEQ ID NO: 98510 - DNA, 1602 bp, Artificial Sequence
  derived and/or modified sequence
atgttccacaagaagatcaacggcaagcagcaggagaagaagatgaccctgctgcacggcaagacccaggacaccttcctgaagggctggaagcagaagaacggcgtgaacttcttcacccccaagatcagaagccagctggacatcaacaacaagaagagcgtgaccgacagcatcagagacgagtacgccttcctgcagaagaagtaccccagcctggccaacagaaacggcaccaagtacctggccagaaccctgaacagactgctgatgcaccacatcagagactgcctgcccgagctgaagaccagaatcaacgtgctggccgcccagtaccagagcctgctgaacagctacggcgagcccgtggacgacaagagcgccaccctgctgcagctgatcaccaagttcgccaccgagtactgcaacaccatcgagggcaccgccaagtacatcgagaccagcgagctgtgcggcggcgccagaatctgctacatcttccacgagaccttcggcagaaccctggagagcgtggaccccctgggcggcctgaacaccatcgacatcctgaccgccatcagaaacgccaccggccccagacccgccctgttcgtgcccgaggtgagcttcgagctgctggtgaagagacagatcaagagactggaggagcccagcctgagatgcgtggagctggtgcacgaggagatgcagagaatcatccagcactgcagcaactacagcacccaggagctgctgagattccccaagctgcacgacgccatcgtggaggtggtgacctgcctgctgagaaagagactgcccgtgaccaacgagatggtgcacaacctggtggccatcgagctggcctacatcaacaccaagcaccccgacttcgccgacgcctgcggcctgatgaacaacaacatcgaggagcagagaagaaacagactggccagagagctgcccagcgccgtgagcagagacaagagcagcaaggtgcccagcgccctggcccccgccagccaggagcccagccccgccgccagcgccgaggccgacggcaagctgatccaggacagcagaagagagaccaagaacgtggccagcggcggcggcggcgtgggcgacggcgtgcaggagcccaccaccggcaactggagaggcatgctgaagaccagcaaggccgaggagctgctggccgaggagaagagcaagcccatccccatcatgcccgccagcccccagaagggccacgccgtgaacctgctggacgtgcccgtgcccgtggccagaaagctgagcgccagagagcagagagactgcgaggtgatcgagagactgatcaagagctacttcctgatcgtgagaaagaacatccaggacagcgtgcccaaggccgtgatgcacttcctggtgaaccacgtgaaggacaccctgcagagcgagctggtgggccagctgtacaagagcagcctgctggacgacctgctgaccgagagcgaggacatggcccagagaagaaaggaggccgccgacatgctgaaggccctgcagggcgccagccagatcatcgccgagatcagagagacccacctgtggtag

SEQ ID NO: 98511 - DNA, 2097 bp, Artificial Sequence
  derived and/or modified sequence
attgccgtggccggcgggcactggggccccgtgttttcagagtcatggaggcgctaattcctgtcataaacaagctccaggacgtcttcaacacggtgggcgccgacatcatccagctgcctcaaatcgtcgtagtgggaacgcagagcagcggaaagagctcagtgctagaaagcctggtggggagggacctgcttcccagaggtactggaattgtcacccggagacctctcattctgcaactggtccatgtttcacaagaagataaacggaaaacaacaggagaagaaaatgaccctgctacatggaaaaactcaagacacctttctaaaggggtggaagcagaagaatggggtaaatttcttcacaccaaaaataaggagccagctagatattaacaacaagaagagtgtaactgattcaatccgtgatgagtatgcttttcttcaaaagaaatatccatctctggccaatagaaatggaacaaagtatcttgctaggactctaaacaggttactgatgcatcacatcagagattgtttaccagagttgaaaacaagaataaatgttctagctgctcagtatcagtctcttctaaatagctacggtgaacccgtggatgataaaagtgctactttactccaacttattaccaaatttgccacagaatattgtaacactattgaaggaactgcaaaatatattgaaacttcggagctatgcggtggtgctagaatttgttatattttccatgagacttttgggcgaaccttagaatctgttgatccacttggtggccttaacactattgacattttgactgccattagaaatgctactggtcctcgtcctgctttatttgtgcctgaggtttcatttgagttactggtgaagcggcaaatcaaacgtctagaagagcccagcctccgctgtgtggaactggttcatgaggaaatgcaaaggatcattcagcactgtagcaattacagtacacaggaattgttacgatttcctaaacttcatgatgccatagttgaagtggtgacttgtcttcttcgtaaaaggttgcctgttacaaatgaaatggtccataacttagtggcaattgaactggcttatatcaacacaaaacatccagactttgctgatgcttgtgggctaatgaacaataatatagaggaacaaaggagaaacaggctagccagagaattaccttcagctgtatcacgagacaagtcttctaaagttccaagtgctttggcacctgcctcccaggagccctcccccgctgcttctgctgaggctgatggcaagttaattcaggacagcagaagagaaactaaaaatgttgcatctggaggtggtggggttggagatggtgttcaagaaccaaccacaggcaactggagaggaatgctgaaaacttcaaaagctgaagagttattagcagaagaaaaatcaaaacccattccaattatgccagccagtccacaaaaaggtcatgccgtgaacctgctagatgtgccagttcctgttgcacgaaaactatctgctcgggaacagcgagattgtgaggttattgaacgactcattaaatcatattttctcattgtcagaaagaatattcaagacagtgtgccaaaggcagtaatgcattttttggttaatcatgtgaaagacactcttcagagtgagctagtaggccagctgtataaatcatccttattggatgatcttctgacagaatctgaggacatggcacagcgcaggaaagaagcagctgatatgctaaaggcattacaaggagccagtcaaattattgctgaaatccgggagactcatctttggtgaagagaactatgtaatactgagactttgttgactcaaaacttgctagttactgcctacctgagtagaatcttatttatgaactcctgtgtattgcaatggtatgaatctgctcatgtggagactggctataaactgaaaagtgtattccaaattgcagaacacatcacacatttaatccaaataataaatggctgtttctaaagtttcccagtatatataaaatacatcaagtctgtcttgtgacag

SEQ ID NO: 98512 - protein, 680 aa, Artificial Sequence
  derived and/or modified sequence
MGCGTKEPKITQLCLAAIQRLMSHEVVSETAAGNIINMLWQLMENSLEELKLLQTVLVLLTTNTVVHDEALSKAIVLCFRLHFTKDNITNNTAAATVRQVVTVVFERMVAEDERHRDIIEQPVLVQGNSNRRSVSTLKPCAKDAYMLFQDLCQLVNADAPYWLVGMTEMTRTFGLELLESVLNDFPQVFLQHQEFSFLLKERVCPLVIKLFSPNIKFRQGSSTSSSPAPVEKPYFPICMRLLRVVSVLIKQFYSLLVTECEIFLSLLVKFLDADKPQWLRAVAVESIHRFCVQPQLLRSFCQSYDMKQHSTKVFRDIVNALGSFIQSLFLVPPTGNPATSNQAGNNNLGGSVSAPANSGMVGIGGGVTLLPAFEYRGTWIPILTITVQGSAKATYLEMLDKVEPPTIPEGYAMSVAFHCLLDLVRGITSMIEGELGELETECQTTTEEGSSPTQSTEQQDLQSTSDQMDKEIVSRAVWEEMVNACWCGLLAALSLLLDASTDEAATENILKAELTMAALCGRLGLVTSRDAFITAICKGSLPPHYALTVLNTTTAATLSNKSYSVQGQSVMMISPSSESHQQVVAVGQPLAVQPQGTVMLTSKNIQCMRTLLNLAHCHGAVLGTSWQLVLATLQHLVWILGLKPSSGGALKPGRAVEGPSTVPFKDFMQPPASRVQNGES

SEQ ID NO: 98513 - protein, 1676 aa, Artificial Sequence
  derived and/or modified sequence
MSGTSSPEAVKKLLENMQSDLRALSLECKKKFPPVKEAAESGIIKVKTIAARNTEILAALKENSSEVVQPFLMGCGTKEPKITQLCLAAIQRLMSHEVVSETAAGNIINMLWQLMENSLEELKLLQTVLVLLTTNTVVHDEALSKAIVLCFRLHFTKDNITNNTAAATVRQVVTVVFERMVAEDERHRDIIEQPVLVQGNSNRRSVSTLKPCAKDAYMLFQDLCQLVNADAPYWLVGMTEMTRTFGLELLESVLNDFPQVFLQHQEFSFLLKERVCPLVIKLFSPNIKFRQGSSTSSSPAPVEKPYFPICMRLLRVVSVLIKQFYSLLVTECEIFLSLLVKFLDADKPQWLRAVAVESIHRFCVQPQLLRSFCQSYDMKQHSTKVFRDIVNALGSFIQSLFLVPPTGNPATSNQAGNNNLGGSVSAPANSGMVGIGGGVTLLPAFEYRGTWIPILTITVQGSAKATYLEMLDKVEPPTIPEGYAMSVAFHCLLDLVRGITSMIEGELGELETECQTTTEEGSSPTQSTEQQDLQSTSDQMDKEIVSRAVWEEMVNACWCGLLAALSLLLDASTDEAATENILKAELTMAALCGRLGLVTSRDAFITAICKGSLPPHYALTVLNTTTAATLSNKSYSVQGQSVMMISPSSESHQQVVAVGQPLAVQPQGTVMLTSKNIQCMRTLLNLAHCHGAVLGTSWQLVLATLQHLVWILGLKPSSGGALKPGRAVEGPSTVLTTAVMTDLPVISNILSRLFESSQYLDDVSLHHLINALCSLSLEAMDMAYGNNKEPSLFAVAKLLETGLVNMHRIEILWRPLTGHLLEKVCQHPNSRMREWGAEALTSLIKAGLTFNHDPPLSQNQRLQLLLLNPLKEMSNINHPDIRLKQLECVLQILQSQGDSLGPGWPLVLGVMGAIRNDQGESLIRTAFQCLQLVVTDFLPTMPCTCLQIVVDVAGSFGLHNQELNISLTSIGLLWNISDYFFQRGETIEKELNKEEAAQQKQAEEKGVVLNRPFHPAPPFDCLWLCLYAKLGELCVDPRPAVRKSAGQTLFSTIGAHGTLLQHSTWHTVIWKVLFHLLDRVRESSTTADKEKIESGGGNILIHHSRDTAEKQWAETWVLTLAGVARIFNTRRYLLQPLGDFSRAWDVLLDHIQSAALSKNNEVSLAALKSFQEILQIVSPVRDSDKPETPPVVNVPVPVLIGPISGMSRPFVRTDSIGEKLGRYSSSEPPIVTDELEDLNLWWAAWNTWYRIGSESTKPPITFDKLTFIPSQPFLTALIQIFPALYQHIKTGFNMDDLQKLGVILHSAISVPISSDASPFILPSYTEAVLTSLQEAVLTALDVLQKAICVGPENMQIMYPAIFDQLLAFVEFSCKPPQYGQLETKHIANAKYNQIQLFAPAEWVALNYVPFAERSLEVVVDLYQKTACHKAVVNEKVLQNIIKTLRVPLSLKYSCPSESTWKLAVSSLLRVLSIGLPVARQHASSGKFDSMWPELANTFEDFLFTKSIPPDNLSIQEFQRNENIDVEVVQLISNEILPYANFIPKEFVGQIMTMLNKGSIHSQSSSFTEAEIDIRLREEFSKMCFETLLQFSFSNKVTTPQEGYISRMALSVLLKRSQDVLHRYIEDERLSGKCPLPRQQVTEIIFVLKAVSTLIDSLKKTQPENACISLFGIPPYF

SEQ ID NO: 98514 - protein, 1675 aa, Artificial Sequence
  derived and/or modified sequence
MSGTSSPEAVKKLLENMQSDLRALSLECKKKFPPVKEAAESGIIKVKTIAARNTEILAALKENSSEVVQPFLMGCGTKEPKITQLCLAAIQRLMSHEVVSETAAGNIINMLWQLMENSLEELKLLQTVLVLLTTNTVVHDEALSKAIVLCFRLHFTKDNITNNTAAATVRQVVTVVFERMVAEDERHRDIIEQPVLVQGNSNRRSVSTLKPCAKDAYMLFQDLCQLVNADAPYWLVGMTEMTRTFGLELLESVLNDFPQVFLQHQEFSFLLKERVCPLVIKLFSPNIKFRQGSSTSSSPAPVEKPYFPICMRLLRVVSVLIKQFYSLLVTECEIFLSLLVKFLDADKPQWLRAVAVESIHRFCVQPQLLRSFCQSYDMKQHSTKVFRDIVNALGSFIQSLFLVPPTGNPATSNQAGNNNLGGSVSAPANSGMVGIGGGVTLLPAFEYRGTWIPILTITVQGSAKATYLEMLDKVEPPTIPEGYAMSVAFHCLLDLVRGITSMIEGELGELETECQTTTEEGSSPTQSTEQQDLQSTSDQMDKEIVSRAVWEEMVNACWCGLLAALSLLLDASTDEAATENILKAELTMAALCGRLGLVTSRDAFITAICKGSLPPHYALTVLNTTTAATLSNKSYSVQGQSVMMISPSSESHQQVVAVGQPLAVQPQGTVMLTSKNIQCMRTLLNLAHCHGAVLGTSWQLVLATLQHLVWILGLKPSSGGALKPGRAVEGPSTVLTTAVMTDLPVISNILSRLFESSQYLDDVSLHHLINALCSLSLEAMDMAYGNNKEPSLFAVAKLLETGLVNMHRIEILWRPLTGHLLEVCQHPNSRMREWGAEALTSLIKAGLTFNHDPPLSQNQRLQLLLLNPLKEMSNINHPDIRLKQLECVLQILQSQGDSLGPGWPLVLGVMGAIRNDQGESLIRTAFQCLQLVVTDFLPTMPCTCLQIVVDVAGSFGLHNQELNISLTSIGLLWNISDYFFQRGETIEKELNKEEAAQQKQAEEKGVVLNRPFHPAPPFDCLWLCLYAKLGELCVDPRPAVRKSAGQTLFSTIGAHGTLLQHSTWHTVIWKVLFHLLDRVRESSTTADKEKIESGGGNILIHHSRDTAEKQWAETWVLTLAGVARIFNTRRYLLQPLGDFSRAWDVLLDHIQSAALSKNNEVSLAALKSFQEILQIVSPVRDSDKPETPPVVNVPVPVLIGPISGMSRPFVRTDSIGEKLGRYSSSEPPIVTDELEDLNLWWAAWNTWYRIGSESTKPPITFDKLTFIPSQPFLTALIQIFPALYQHIKTGFNMDDLQKLGVILHSAISVPISSDASPFILPSYTEAVLTSLQEAVLTALDVLQKAICVGPENMQIMYPAIFDQLLAFVEFSCKPPQYGQLETKHIANAKYNQIQLFAPAEWVALNYVPFAERSLEVVVDLYQKTACHKAVVNEKVLQNIIKTLRVPLSLKYSCPSESTWKLAVSSLLRVLSIGLPVARQHASSGKFDSMWPELANTFEDFLFTKSIPPDNLSIQEFQRNENIDVEVVQLISNEILPYANFIPKEFVGQIMTMLNKGSIHSQSSSFTEAEIDIRLREEFSKMCFETLLQFSFSNKVTTPQEGYISRMALSVLLKRSQDVLHRYIEDERLSGKCPLPRQQVTEIIFVLKAVSTLIDSLKKTQPENACISLFGIPPYF

SEQ ID NO: 98515 - DNA, 5031 bp, Artificial Sequence
  derived and/or modified sequence
atgagcggcaccagcagccccgaggccgtgaagaagctgctggagaacatgcagagcgacctgagagccctgagcctggagtgcaagaagaagttcccccccgtgaaggaggccgccgagagcggcatcatcaaggtgaagaccatcgccgccagaaacaccgagatcctggccgccctgaaggagaacagcagcgaggtggtgcagcccttcctgatgggctgcggcaccaaggagcccaagatcacccagctgtgcctggccgccatccagagactgatgagccacgaggtggtgagcgagaccgccgccggcaacatcatcaacatgctgtggcagctgatggagaacagcctggaggagctgaagctgctgcagaccgtgctggtgctgctgaccaccaacaccgtggtgcacgacgaggccctgagcaaggccatcgtgctgtgcttcagactgcacttcaccaaggacaacatcaccaacaacaccgccgccgccaccgtgagacaggtggtgaccgtggtgttcgagagaatggtggccgaggacgagagacacagagacatcatcgagcagcccgtgctggtgcagggcaacagcaacagaagaagcgtgagcaccctgaagccctgcgccaaggacgcctacatgctgttccaggacctgtgccagctggtgaacgccgacgccccctactggctggtgggcatgaccgagatgaccagaaccttcggcctggagctgctggagagcgtgctgaacgacttcccccaggtgttcctgcagcaccaggagttcagcttcctgctgaaggagagagtgtgccccctggtgatcaagctgttcagccccaacatcaagttcagacagggcagcagcaccagcagcagccccgcccccgtggagaagccctacttccccatctgcatgagactgctgagagtggtgagcgtgctgatcaagcagttctacagcctgctggtgaccgagtgcgagatcttcctgagcctgctggtgaagttcctggacgccgacaagccccagtggctgagagccgtggccgtggagagcatccacagattctgcgtgcagccccagctgctgagaagcttctgccagagctacgacatgaagcagcacagcaccaaggtgttcagagacatcgtgaacgccctgggcagcttcatccagagcctgttcctggtgccccccaccggcaaccccgccaccagcaaccaggccggcaacaacaacctgggcggcagcgtgagcgcccccgccaacagcggcatggtgggcatcggcggcggcgtgaccctgctgcccgccttcgagtacagaggcacctggatccccatcctgaccatcaccgtgcagggcagcgccaaggccacctacctggagatgctggacaaggtggagccccccaccatccccgagggctacgccatgagcgtggccttccactgcctgctggacctggtgagaggcatcaccagcatgatcgagggcgagctgggcgagctggagaccgagtgccagaccaccaccgaggagggcagcagccccacccagagcaccgagcagcaggacctgcagagcaccagcgaccagatggacaaggagatcgtgagcagagccgtgtgggaggagatggtgaacgcctgctggtgcggcctgctggccgccctgagcctgctgctggacgccagcaccgacgaggccgccaccgagaacatcctgaaggccgagctgaccatggccgccctgtgcggcagactgggcctggtgaccagcagagacgccttcatcaccgccatctgcaagggcagcctgcccccccactacgccctgaccgtgctgaacaccaccaccgccgccaccctgagcaacaagagctacagcgtgcagggccagagcgtgatgatgatcagccccagcagcgagagccaccagcaggtggtggccgtgggccagcccctggccgtgcagccccagggcaccgtgatgctgaccagcaagaacatccagtgcatgagaaccctgctgaacctggcccactgccacggcgccgtgctgggcaccagctggcagctggtgctggccaccctgcagcacctggtgtggatcctgggcctgaagcccagcagcggcggcgccctgaagcccggcagagccgtggagggccccagcaccgtgctgaccaccgccgtgatgaccgacctgcccgtgatcagcaacatcctgagcagactgttcgagagcagccagtacctggacgacgtgagcctgcaccacctgatcaacgccctgtgcagcctgagcctggaggccatggacatggcctacggcaacaacaaggagcccagcctgttcgccgtggccaagctgctggagaccggcctggtgaacatgcacagaatcgagatcctgtggagacccctgaccggccacctgctggagaaggtgtgccagcaccccaacagcagaatgagagagtggggcgccgaggccctgaccagcctgatcaaggccggcctgaccttcaaccacgacccccccctgagccagaaccagagactgcagctgctgctgctgaaccccctgaaggagatgagcaacatcaaccaccccgacatcagactgaagcagctggagtgcgtgctgcagatcctgcagagccagggcgacagcctgggccccggctggcccctggtgctgggcgtgatgggcgccatcagaaacgaccagggcgagagcctgatcagaaccgccttccagtgcctgcagctggtggtgaccgacttcctgcccaccatgccctgcacctgcctgcagatcgtggtggacgtggccggcagcttcggcctgcacaaccaggagctgaacatcagcctgaccagcatcggcctgctgtggaacatcagcgactacttcttccagagaggcgagaccatcgagaaggagctgaacaaggaggaggccgcccagcagaagcaggccgaggagaagggcgtggtgctgaacagacccttccaccccgccccccccttcgactgcctgtggctgtgcctgtacgccaagctgggcgagctgtgcgtggaccccagacccgccgtgagaaagagcgccggccagaccctgttcagcaccatcggcgcccacggcaccctgctgcagcacagcacctggcacaccgtgatctggaaggtgctgttccacctgctggacagagtgagagagagcagcaccaccgccgacaaggagaagatcgagagcggcggcggcaacatcctgatccaccacagcagagacaccgccgagaagcagtgggccgagacctgggtgctgaccctggccggcgtggccagaatcttcaacaccagaagatacctgctgcagcccctgggcgacttcagcagagcctgggacgtgctgctggaccacatccagagcgccgccctgagcaagaacaacgaggtgagcctggccgccctgaagagcttccaggagatcctgcagatcgtgagccccgtgagagacagcgacaagcccgagaccccccccgtggtgaacgtgcccgtgcccgtgctgatcggccccatcagcggcatgagcagacccttcgtgagaaccgacagcatcggcgagaagctgggcagatacagcagcagcgagccccccatcgtgaccgacgagctggaggacctgaacctgtggtgggccgcctggaacacctggtacagaatcggcagcgagagcaccaagccccccatcaccttcgacaagctgaccttcatccccagccagcccttcctgaccgccctgatccagatcttccccgccctgtaccagcacatcaagaccggcttcaacatggacgacctgcagaagctgggcgtgatcctgcacagcgccatcagcgtgcccatcagcagcgacgccagccccttcatcctgcccagctacaccgaggccgtgctgaccagcctgcaggaggccgtgctgaccgccctggacgtgctgcagaaggccatctgcgtgggccccgagaacatgcagatcatgtaccccgccatcttcgaccagctgctggccttcgtggagttcagctgcaagcccccccagtacggccagctggagaccaagcacatcgccaacgccaagtacaaccagatccagctgttcgcccccgccgagtgggtggccctgaactacgtgcccttcgccgagagaagcctggaggtggtggtggacctgtaccagaagaccgcctgccacaaggccgtggtgaacgagaaggtgctgcagaacatcatcaagaccctgagagtgcccctgagcctgaagtacagctgccccagcgagagcacctggaagctggccgtgagcagcctgctgagagtgctgagcatcggcctgcccgtggccagacagcacgccagcagcggcaagttcgacagcatgtggcccgagctggccaacaccttcgaggacttcctgttcaccaagagcatcccccccgacaacctgagcatccaggagttccagagaaacgagaacatcgacgtggaggtggtgcagctgatcagcaacgagatcctgccctacgccaacttcatccccaaggagttcgtgggccagatcatgaccatgctgaacaagggcagcatccacagccagagcagcagcttcaccgaggccgagatcgacatcagactgagagaggagttcagcaagatgtgcttcgagaccctgctgcagttcagcttcagcaacaaggtgaccaccccccaggagggctacatcagcagaatggccctgagcgtgctgctgaagagaagccaggacgtgctgcacagatacatcgaggacgagagactgagcggcaagtgccccctgcccagacagcaggtgaccgagatcatcttcgtgctgaaggccgtgagcaccctgatcgacagcctgaagaagacccagcccgagaacgcctgcatcagcctgttcggcatccccccctacttctag

SEQ ID NO: 98516 - DNA, 5028 bp, Artificial Sequence
  derived and/or modified sequence
atgagcggcaccagcagccccgaggccgtgaagaagctgctggagaacatgcagagcgacctgagagccctgagcctggagtgcaagaagaagttcccccccgtgaaggaggccgccgagagcggcatcatcaaggtgaagaccatcgccgccagaaacaccgagatcctggccgccctgaaggagaacagcagcgaggtggtgcagcccttcctgatgggctgcggcaccaaggagcccaagatcacccagctgtgcctggccgccatccagagactgatgagccacgaggtggtgagcgagaccgccgccggcaacatcatcaacatgctgtggcagctgatggagaacagcctggaggagctgaagctgctgcagaccgtgctggtgctgctgaccaccaacaccgtggtgcacgacgaggccctgagcaaggccatcgtgctgtgcttcagactgcacttcaccaaggacaacatcaccaacaacaccgccgccgccaccgtgagacaggtggtgaccgtggtgttcgagagaatggtggccgaggacgagagacacagagacatcatcgagcagcccgtgctggtgcagggcaacagcaacagaagaagcgtgagcaccctgaagccctgcgccaaggacgcctacatgctgttccaggacctgtgccagctggtgaacgccgacgccccctactggctggtgggcatgaccgagatgaccagaaccttcggcctggagctgctggagagcgtgctgaacgacttcccccaggtgttcctgcagcaccaggagttcagcttcctgctgaaggagagagtgtgccccctggtgatcaagctgttcagccccaacatcaagttcagacagggcagcagcaccagcagcagccccgcccccgtggagaagccctacttccccatctgcatgagactgctgagagtggtgagcgtgctgatcaagcagttctacagcctgctggtgaccgagtgcgagatcttcctgagcctgctggtgaagttcctggacgccgacaagccccagtggctgagagccgtggccgtggagagcatccacagattctgcgtgcagccccagctgctgagaagcttctgccagagctacgacatgaagcagcacagcaccaaggtgttcagagacatcgtgaacgccctgggcagcttcatccagagcctgttcctggtgccccccaccggcaaccccgccaccagcaaccaggccggcaacaacaacctgggcggcagcgtgagcgcccccgccaacagcggcatggtgggcatcggcggcggcgtgaccctgctgcccgccttcgagtacagaggcacctggatccccatcctgaccatcaccgtgcagggcagcgccaaggccacctacctggagatgctggacaaggtggagccccccaccatccccgagggctacgccatgagcgtggccttccactgcctgctggacctggtgagaggcatcaccagcatgatcgagggcgagctgggcgagctggagaccgagtgccagaccaccaccgaggagggcagcagccccacccagagcaccgagcagcaggacctgcagagcaccagcgaccagatggacaaggagatcgtgagcagagccgtgtgggaggagatggtgaacgcctgctggtgcggcctgctggccgccctgagcctgctgctggacgccagcaccgacgaggccgccaccgagaacatcctgaaggccgagctgaccatggccgccctgtgcggcagactgggcctggtgaccagcagagacgccttcatcaccgccatctgcaagggcagcctgcccccccactacgccctgaccgtgctgaacaccaccaccgccgccaccctgagcaacaagagctacagcgtgcagggccagagcgtgatgatgatcagccccagcagcgagagccaccagcaggtggtggccgtgggccagcccctggccgtgcagccccagggcaccgtgatgctgaccagcaagaacatccagtgcatgagaaccctgctgaacctggcccactgccacggcgccgtgctgggcaccagctggcagctggtgctggccaccctgcagcacctggtgtggatcctgggcctgaagcccagcagcggcggcgccctgaagcccggcagagccgtggagggccccagcaccgtgctgaccaccgccgtgatgaccgacctgcccgtgatcagcaacatcctgagcagactgttcgagagcagccagtacctggacgacgtgagcctgcaccacctgatcaacgccctgtgcagcctgagcctggaggccatggacatggcctacggcaacaacaaggagcccagcctgttcgccgtggccaagctgctggagaccggcctggtgaacatgcacagaatcgagatcctgtggagacccctgaccggccacctgctggaggtgtgccagcaccccaacagcagaatgagagagtggggcgccgaggccctgaccagcctgatcaaggccggcctgaccttcaaccacgacccccccctgagccagaaccagagactgcagctgctgctgctgaaccccctgaaggagatgagcaacatcaaccaccccgacatcagactgaagcagctggagtgcgtgctgcagatcctgcagagccagggcgacagcctgggccccggctggcccctggtgctgggcgtgatgggcgccatcagaaacgaccagggcgagagcctgatcagaaccgccttccagtgcctgcagctggtggtgaccgacttcctgcccaccatgccctgcacctgcctgcagatcgtggtggacgtggccggcagcttcggcctgcacaaccaggagctgaacatcagcctgaccagcatcggcctgctgtggaacatcagcgactacttcttccagagaggcgagaccatcgagaaggagctgaacaaggaggaggccgcccagcagaagcaggccgaggagaagggcgtggtgctgaacagacccttccaccccgccccccccttcgactgcctgtggctgtgcctgtacgccaagctgggcgagctgtgcgtggaccccagacccgccgtgagaaagagcgccggccagaccctgttcagcaccatcggcgcccacggcaccctgctgcagcacagcacctggcacaccgtgatctggaaggtgctgttccacctgctggacagagtgagagagagcagcaccaccgccgacaaggagaagatcgagagcggcggcggcaacatcctgatccaccacagcagagacaccgccgagaagcagtgggccgagacctgggtgctgaccctggccggcgtggccagaatcttcaacaccagaagatacctgctgcagcccctgggcgacttcagcagagcctgggacgtgctgctggaccacatccagagcgccgccctgagcaagaacaacgaggtgagcctggccgccctgaagagcttccaggagatcctgcagatcgtgagccccgtgagagacagcgacaagcccgagaccccccccgtggtgaacgtgcccgtgcccgtgctgatcggccccatcagcggcatgagcagacccttcgtgagaaccgacagcatcggcgagaagctgggcagatacagcagcagcgagccccccatcgtgaccgacgagctggaggacctgaacctgtggtgggccgcctggaacacctggtacagaatcggcagcgagagcaccaagccccccatcaccttcgacaagctgaccttcatccccagccagcccttcctgaccgccctgatccagatcttccccgccctgtaccagcacatcaagaccggcttcaacatggacgacctgcagaagctgggcgtgatcctgcacagcgccatcagcgtgcccatcagcagcgacgccagccccttcatcctgcccagctacaccgaggccgtgctgaccagcctgcaggaggccgtgctgaccgccctggacgtgctgcagaaggccatctgcgtgggccccgagaacatgcagatcatgtaccccgccatcttcgaccagctgctggccttcgtggagttcagctgcaagcccccccagtacggccagctggagaccaagcacatcgccaacgccaagtacaaccagatccagctgttcgcccccgccgagtgggtggccctgaactacgtgcccttcgccgagagaagcctggaggtggtggtggacctgtaccagaagaccgcctgccacaaggccgtggtgaacgagaaggtgctgcagaacatcatcaagaccctgagagtgcccctgagcctgaagtacagctgccccagcgagagcacctggaagctggccgtgagcagcctgctgagagtgctgagcatcggcctgcccgtggccagacagcacgccagcagcggcaagttcgacagcatgtggcccgagctggccaacaccttcgaggacttcctgttcaccaagagcatcccccccgacaacctgagcatccaggagttccagagaaacgagaacatcgacgtggaggtggtgcagctgatcagcaacgagatcctgccctacgccaacttcatccccaaggagttcgtgggccagatcatgaccatgctgaacaagggcagcatccacagccagagcagcagcttcaccgaggccgagatcgacatcagactgagagaggagttcagcaagatgtgcttcgagaccctgctgcagttcagcttcagcaacaaggtgaccaccccccaggagggctacatcagcagaatggccctgagcgtgctgctgaagagaagccaggacgtgctgcacagatacatcgaggacgagagactgagcggcaagtgccccctgcccagacagcaggtgaccgagatcatcttcgtgctgaaggccgtgagcaccctgatcgacagcctgaagaagacccagcccgagaacgcctgcatcagcctgttcggcatccccccctacttctag

SEQ ID NO: 98517 - DNA, 5031 bp, Artificial Sequence
  derived and/or modified sequence
atgagcggcacctcctcacctgaggccgtgaagaaactgctggaaaacatgcagtctgacctccgggcgctgagccttgaatgcaagaagaaatttcccccagtcaaggaagcggcagaatctgggatcatcaaagtaaaaactattgcagcgcgcaacaccgagatactcgcagcgttaaaagagaacagctctgaagtggtgcagccgttcctcatgggttgtggcacaaaggaacccaagataacccaactctgtctggccgcaatccagaggctcatgagccatgaagtggtctctgaaacggctgctgggaatatcattaacatgctctggcagctcatggaaaatagcctggaagagctcaaactgctgcaaaccgtgctcgtgctcctaaccacaaatactgttgtgcatgacgaagcacttagcaaagctatcgtgctgtgcttccggctgcactttactaaggacaatataaccaacaacacagcggcagcaacagtacgccaggtggtcaccgtcgtgtttgaacgcatggttgcggaggatgagcgccatcgagacataattgagcaacccgtgctcgtccagggtaactcaaacagacgctccgtgtctaccttaaagccatgtgccaaggatgcatacatgctattccaggacctgtgtcagctggtgaatgccgatgccccttattggctggtgggcatgaccgagatgactcgcaccttcggattggaacttctggagagcgtcttgaacgacttccctcaggtcttcctccagcatcaagagttctcttttcttttaaaggaaagagtgtgtccgttagtcatcaagctattctctcccaacattaagttcaggcagggctcgagcacatctagtagcccagcacctgtggagaagccctattttccgatctgtatgaggctgttgcgggtggtcagcgttctgataaaacagttctacagtctgcttgtcaccgagtgtgagattttcctgtcgctgctcgtgaagttcctggatgccgataagccgcagtggttgcgcgcagtggcagtcgaaagcatacatagattctgtgtgcagccacagctgctgaggagtttctgccaaagctacgatatgaaacaacattccacgaaagttttccgggacattgtgaatgctctgggatcttttatccagtcgctgtttcttgtgcctccgactgggaatccggccacctctaaccaggccggcaataacaaccttggcgggtccgtctccgcacctgccaatagtggcatggttggcattggagggggggtcaccttgctgccagcttttgaatacagaggcacatggatccccatccttaccattaccgtccaaggctcggccaaagcaacctacctagagatgctggataaagttgaaccccccaccatcccagaaggttacgccatgtccgttgcatttcactgtctgctagaccttgtgagaggtatcacatcgatgattgaaggcgagctaggcgagcttgaaaccgagtgccagacaaccacagaggagggatcttctcccacacagtcgaccgaacagcaggacttacagtctacctctgaccagatggataaagaaatcgtgagtagagccgtatgggaggaaatggtgaacgcctgttggtgcgggttgctagccgccctttcgctccttctagacgcctcaacagatgaggctgcaaccgagaacattctgaaagccgaactgaccatggccgccctgtgcgggcggctgggccttgtaacttccagagacgcatttatcacagctatatgcaaaggatcactgcctcctcattacgcccttacagtcttgaatactacaaccgccgccactctcagcaacaagtcttattccgtccaggggcaatccgtgatgatgattagcccctcgtcggaatctcatcagcaggtggtcgctgtcgggcaaccactggccgtccaaccccaggggactgtaatgttgacctctaagaatatacagtgtatgaggaccctgctgaatctggctcattgccatggagcagtgctgggcactagctggcagctggtccttgctaccctgcaacacctggtgtggatcttgggccttaagccatccagcggcggagccttgaagcctgggcgggccgtggaggggccctctacagtgctgacaactgctgtcatgaccgacctgcccgtgatctctaacatcttgtccaggctcttcgagtcgagtcagtatcttgacgatgtaagtcttcaccatctaatcaacgctctgtgctccctctcccttgaggccatggacatggcatacggaaacaacaaagaaccttctttgtttgcggtcgccaagctgcttgagactggactggtcaacatgcacaggatcgaaatcctgtggcggcccctgaccgggcatctgctggaaaaagtgtgtcagcacccaaacagccggatgagggagtggggagctgaagctctgacttctctgattaaggcgggacttacattcaatcacgaccccccactgagtcagaaccagcggttacagttgctacttctgaatcccctgaaagaaatgtccaatattaatcatcctgacattcggttgaagcagttggagtgtgtgctgcagattctgcagtcgcagggagactcgctcggaccagggtggccactggtcttaggagtaatgggtgccatcaggaacgaccagggggaatcacttatcaggaccgccttccaatgcctccagctggtggtgactgattttcttcccacaatgccttgcacatgcctgcagatcgtggttgacgtcgcaggctcttttggtctccacaaccaggagctcaatatctcgctgacttcaatcggtctgctgtggaatatctccgattactttttccagcggggtgaaacaatcgagaaggagctcaacaaggaagaggccgcccagcagaaacaggccgaggagaagggcgtggtcctgaaccgcccattccatccagcgccaccattcgactgtttgtggctatgcctctacgcaaagctgggggagttgtgcgtcgatccccgacccgccgtcaggaagtcagctggccaaactctcttctctacaattggggctcatgggacattgcttcaacactctacatggcacacagtcatttggaaggtgcttttccatctgctggacagagtgcgagagtcttctacaacagccgataaagaaaagattgaatcaggaggaggtaatattctgattcaccatagtagggatactgcagagaaacagtgggccgaaacctgggtgttaactctggcaggagtcgcgcgaatcttcaatactcgccggtatcttttgcagccgctcggagacttcagtagagcatgggacgtcctgctggaccacatacagtccgcagccctctccaaaaataatgaagtctcccttgctgcacttaagagcttccaagaaatcctccagatcgtgtctccggtgcgcgattctgataaaccggagaccccacctgtagtgaacgtccccgtgcccgtgttaatcggtccgatctctggtatgtccaggccatttgtgcgtaccgacagcattggcgagaagttagggcggtactccagctctgaaccaccgatcgtgactgacgaactggaggacctgaacctttggtgggctgcttggaacacgtggtatcgcatcggaagtgagtctaccaaacccccaatcaccttcgataaactcaccttcatcccctctcagccatttctgactgctctgatccagattttcccggccctgtaccagcatattaagacagggttcaacatggacgacctgcagaagcttggggtgatcctgcactcagccatctcagtgcccatttcatcagatgctagccccttcatactaccctcttatacagaggccgtcttaacctcactgcaggaagctgtgcttactgccctcgacgtgctacagaaggctatatgcgttggccccgaaaacatgcagattatgtatcctgctatctttgatcagctgcttgcttttgtcgagtttagttgtaaaccaccgcagtacgggcagctagaaaccaaacatatcgccaacgccaagtacaatcagatccaattgttcgcacctgctgagtgggtcgccttaaattacgttcccttcgcggagaggtctctggaggtcgtggtcgatctgtaccagaaaaccgcttgtcataaggcagttgtgaatgagaaggtgttgcagaatatcattaagaccctccgtgtgcccctgagccttaagtatagctgtccctctgaatctacttggaagttagccgttagctcactcctccgcgtacttagcattggactgcccgtggccaggcaacacgcgtcttcaggtaaattcgattctatgtggcccgaactggccaatacatttgaggacttcttgttcacaaaatccataccgcctgataatttatccatccaggagtttcagcgcaatgaaaatatagatgtggaggtcgtccagcttatttccaatgagatcctgccctatgcgaacttcatccctaaagaattcgtgggacagatcatgaccatgctaaacaaggggtccatccactcccagtctagtagtttcacggaggccgaaatagatattcggcttcgagaagaattctccaagatgtgtttcgagaccctcctccaattctccttttcgaataaagtgactacacctcaggaaggatacatctccaggatggctttgtctgtgttgctgaaacggagtcaggacgtgcttcataggtacattgaggacgagcgcctgagtgggaagtgtccactccccagacaacaggtcaccgaaattattttcgtactcaaggcagtgagtactttgatagattctctgaagaagacacaaccggagaacgcctgcatttcccttttcggcattcctccctacttctag

SEQ ID NO: 98518 - DNA, 5028 bp, Artificial Sequence
  derived and/or modified sequence
atgtctggcacctcaagtcctgaggctgtgaaaaaactgctggagaacatgcagtcggatctgcgcgctctgagcctggaatgtaaaaagaaattcccacccgtgaaggaagctgctgagagcgggattattaaagttaagactatagcggctcggaacaccgagatactagctgctctaaaggaaaactcctctgaggtggtacagcctttcctcatgggctgtggcaccaaagaacctaagatcacgcagctgtgcctggcagccatccaacgacttatgtcacatgaggtggtatccgagaccgcggcgggcaatattatcaacatgctctggcagcttatggaaaactccctggaggaacttaaattgcttcagacggtcttggtgctgcttacgacaaacactgtcgtgcacgacgaggccctttcaaaagccatagtcctctgctttcggttgcactttaccaaagacaacattactaacaatacggcagccgccacagttcgccaggtggtgaccgtagtcttcgaacgcatggttgctgaggatgaacggcaccgggatataatcgaacaacccgtcctggttcaaggtaatagcaacagacgatctgttagtaccctcaaaccgtgtgccaaggacgcttacatgctcttccaagacctctgccagctggtcaacgcagatgccccttactggttggtgggaatgaccgagatgacgcgcaccttcggcctggagctgctggagtcagtgctgaacgatttcccacaagtcttcctgcagcatcaggagttcagctttttgctgaaagaacgggtctgccctctcgtgattaaactgttcagccctaacattaagttccggcagggatcatccacaagtagcagccctgcacctgtagagaagccgtatttccccatctgtatgcgactgctgagggtcgtaagcgtgctgataaaacaattctactcacttcttgtcaccgagtgcgagatctttctcagtctgcttgtgaagttcctcgacgccgacaaaccacagtggctgagggccgttgccgttgaatcaatccataggttttgcgtgcagcctcagctgctaagaagcttctgccagtcttatgacatgaagcagcacagtacaaaggtgttccgtgacattgtgaacgctctgggctccttcatacagtcgcttttcttggtgccgcctacagggaaccccgcaacttctaaccaagcaggtaacaacaaccttgggggaagtgtgtccgcaccagccaattcagggatggtcgggatcggaggtggcgttacactcctgcccgcctttgagtataggggcacttggattccaatcctgacaatcaccgtgcagggaagcgccaaggcaacttacttggagatgctggataaggtggaaccccctaccatccccgagggatacgccatgagcgtcgcatttcactgcctgctggacctcgtgagggggatcaccagtatgattgaaggagagctgggagaactcgagaccgaatgtcagaccactactgaagaggggtcttcacccacccagagcactgaacagcaggatctccagtctacctcagaccagatggacaaagagatcgtgagtcgtgctgtgtgggaagaaatggtgaacgcctgctggtgcgggctgctggcagctctgtcactgttgctggatgcgagcaccgacgaggctgccaccgagaatattctgaaggcggaactcaccatggcagccctttgtgggcggctgggattggtcacctcaagagacgccttcataacagccatctgtaaggggagtctgccacctcattatgcactgacagtgctgaatacgacgacagctgctaccctatctaataagtcctactccgtgcagggacaaagtgtcatgatgatcagtccgagttccgagtcccaccaacaggtcgttgcggtggggcaacccctggcggtgcaacctcaaggcaccgtaatgctaaccagcaaaaacattcagtgcatgaggactctactgaacctcgcccactgtcatggggccgtcctgggaaccagttggcagttagtgttagccacgctccagcacctggtatggattcttggtctcaaaccttctagcgggggagcactaaagcctgggcgggccgttgagggcccgtccactgtgctgaccaccgccgttatgactgatcttcctgtgatctcgaatatcctgagtcggctctttgaaagctcccagtatctggacgacgttagtttgcaccacctcatcaatgctttgtgtagcctgtccctcgaggcaatggatatggcgtatggcaataacaaagagcccagtctttttgctgtggctaaactcttagagacaggcctcgtgaacatgcaccgaatcgaaatactttggcgaccgttgacaggccatctgctggaggtgtgtcagcatccgaactcccgcatgcgcgagtggggagctgaggccctgacttcccttatcaaggccgggctgactttcaatcatgacccccctctgtcacagaatcagagattgcagctgcttctgctcaatcccctcaaggagatgagtaatatcaatcatccagatatccggctaaaacaactggagtgtgttcttcagatccttcagagccagggcgattccctaggccctggctggccactggtgctgggtgttatgggcgcaattcgcaatgaccagggtgaatccctcattaggaccgcgttccagtgtctgcagcttgtcgtcacggacttcctccccaccatgccctgcacgtgtcttcagatcgtggttgacgtagctggtagttttggtctccacaatcaggagctgaatatctccttgacttcgattgggcttttgtggaatatctccgattacttcttccagcggggcgagacaatcgaaaaggaacttaataaggaggaagctgcacagcagaaacaggcggaagaaaagggggtggttctgaacaggccctttcatcccgcacctccatttgactgcctgtggctgtgtctctatgctaaactcggggaactgtgtgtcgacccaaggccagctgtccgcaaatccgccggacagactctgttcagtacgattggtgcacacggaacactgctgcagcatagcacatggcacacagtgatatggaaagttctgttccacctcctggaccgggtgcgagagagctctactacagccgacaaagaaaagatagagtctggaggtggcaacattcttattcaccactctcgagataccgcggaaaagcaatgggctgagacttgggtgctcacacttgcaggggttgcccgcatcttcaataccaggaggtacctactccagccactgggcgactttagccgagcttgggatgtgctcctcgaccacatccagtcagccgctctttctaaaaacaatgaggtgtcgctcgccgctctgaaaagcttccaggagattctccagatcgtgtcacctgtgcgcgactcagataagcctgagactccacccgtggtaaatgtacccgtccccgtcctgatcgggcccataagtgggatgagccgtccattcgtgcgcaccgatagcatcggcgaaaagctcgggaggtactctagcagcgaacctccaatcgtgaccgacgagcttgaggatttaaacctttggtgggccgcctggaatacctggtaccgtatcgggtcagagtcgaccaaacctcccattacatttgataaactgaccttcatccctagtcaaccatttttgacggccctgattcagattttccctgctttgtatcagcacattaagaccggattcaacatggacgacctccagaagttaggcgtgatcctgcactctgctattagcgtccctatttcaagcgatgcctccccattcatccttccttcctacactgaagccgttctgacctcactgcaggaggctgtcctcacagccctagatgtcctccagaaagcaatctgcgttgggcctgagaatatgcaaatcatgtatccagcaatcttcgatcagctgctcgcctttgtggaattctcttgcaaacctccacaatacgggcaactggaaacaaaacatatagcaaatgcaaagtataaccaaattcaactgttcgccccagctgagtgggtggctctcaactatgtgcctttcgcagaacgatccttggaagtggtggtcgacctctaccagaaaaccgcctgtcataaggccgtcgtgaatgagaaagtcctccagaacatcatcaagacactgcgggtgccgctgtcactgaagtattcttgtccgtctgaatctacctggaagctagccgtgagttcactgctgcgcgtcctctccatcgggttgcctgtagccagacaacacgcaagtagcggcaaattcgattctatgtggcctgaactggcgaataccttcgaggatttcctcttcacaaagtccatccctccggacaacctaagcattcaggagttccaacggaacgagaacatcgacgtagaggtagtccagctcatttctaatgagattctgccatacgccaacttcatcccaaaagagttcgttggacagattatgactatgttgaataaagggtccattcattcgcagtcaagctccttcacagaggctgagatcgatatccgactgcgtgaggagtttagcaaaatgtgttttgaaacactcctccagttttctttttccaacaaggtcaccaccccacaggaaggttatatctctcgtatggccctgtctgtgctgctaaagcggtcccaggacgtcctccaccggtacatcgaggatgagagactaagcggaaagtgccctctgccacgccagcaggtcaccgaaatcatctttgttctgaaggctgtgtccacactgatagatagcctgaaaaagactcagcccgaaaacgcttgcatatctctgttcggtattcccccttatttttag

SEQ ID NO: 98519 - DNA, 5031 bp, Artificial Sequence
  derived and/or modified sequence
atgagcggcaccagcagccctgaggccgtgaagaagctgctggagaacatgcagagcgacctgcgggccctgagcctggagtgcaagaagaagtttcctcctgtgaaggaggccgctgagagcggcatcatcaaggtgaagaccatcgccgccaggaacacagagatcctggccgccctgaaggagaacagcagcgaggtggtgcagcccttcctgatgggctgcggcaccaaggagcccaagatcacccagctgtgcctggccgccatccagaggctgatgagccatgaggtggtgtctgaaacagctgctggcaacatcatcaacatgctgtggcagctgatggagaacagcctggaggagctgaagctgctgcagacagtgctggtgctgctgaccaccaacacagtggtgcatgatgaggccctgagcaaggccatcgtgctgtgcttccggctgcacttcaccaaggacaacatcaccaacaacacagctgctgccaccgtgcggcaggtggtgacagtggtgtttgagaggatggtggctgaagatgagcggcaccgggacatcatcgagcagcctgtgctggtgcagggcaacagcaacagaagatctgtgtccaccctgaagccctgtgccaaggatgcctacatgctgttccaggacctgtgccagctggtgaatgctgatgccccctactggctggtgggcatgacagagatgaccaggaccttcggcctggagctgctggagagcgtgctgaatgacttcccccaggtgttcctgcagcaccaggagttctccttcctgctgaaggagcgggtgtgccccctggtgatcaagctgttcagccccaacatcaagttccggcagggcagcagcaccagcagcagccctgcccctgtggagaagccctacttccccatctgcatgaggctgctgcgggtggtgtctgtgctgatcaagcagttctacagcctgctggtgacagaatgtgagatcttcctgagcctgctggtgaagttcctggatgctgacaagccccagtggctgcgggctgtggccgtggagagcatccaccgcttctgtgtgcagccccagctgctgcgctccttctgccagagctatgacatgaagcagcacagcaccaaggtgttccgggacatcgtgaatgccctgggcagcttcatccagagcctcttcctggtgccccccaccggcaacccagccaccagcaaccaggccggcaacaacaacctgggcggctctgtgtctgccccagccaacagcggcatggtgggcattggaggcggcgtgaccctgctgcctgcctttgagtaccggggcacctggatccccatcctgaccatcaccgtgcagggcagcgccaaggccacctacctggagatgctggacaaggtggagccccccaccatccctgagggctacgccatgtctgtggccttccactgcctgctggacctggtgcggggcatcacctccatgattgaaggagagctgggggagctggagacagagtgccagaccaccacagaggagggcagcagccccacccagagcacagagcagcaggacctgcagagcaccagtgaccagatggacaaggagatcgtgtccagagctgtgtgggaggagatggtgaatgcctgctggtgtggcctgctggccgccctgagcctgctgctggatgccagcacagatgaggccgccacagagaacatcctgaaggccgagctgaccatggccgccctgtgtggccgcctgggcctggtgaccagcagagatgccttcatcacagccatctgcaagggcagcctgcccccccactacgccctgactgtgctgaacaccaccacagctgccaccctgagcaacaagagctacagcgtgcagggccagagcgtgatgatgatcagccccagcagcgagagccaccagcaggtggtggccgtgggccagcccctggccgtgcagccccagggcaccgtgatgctgaccagcaagaacatccagtgcatgaggaccctgctgaacctggcccactgccacggggctgtgctgggcacctcctggcagctggtgctggccaccctgcagcacctggtgtggatcctgggcctgaagcccagcagcggcggggccctgaagccaggccgggctgtggagggccccagcacagtgctgaccacagctgtgatgacagacctgcccgtcatcagcaacatcctgagccggctgtttgagagcagccagtacctggatgatgtgtccctgcaccacctgatcaatgccctgtgcagcctgagcctggaggccatggacatggcctacggcaacaacaaggagcccagcctgtttgctgtggccaagctgctggagaccggcctggtgaacatgcacagaattgagatcctgtggaggcccctgaccggccacctgctggagaaggtgtgccagcaccccaacagcaggatgagggagtggggcgctgaggccctgaccagcctcatcaaggccggcctgaccttcaaccacgacccccccctgagccagaaccagaggctgcagctgctgctgctgaaccccctgaaggagatgagcaacatcaaccacccagacatccggctgaagcagctggagtgtgtgctgcagatcctgcagagccagggcgacagcctgggccctggctggcccctggtgctgggcgtgatgggcgccatcagaaatgaccagggcgagagcctcatcagaacagccttccagtgcctgcagctggtggtgacagacttcctgcccaccatgccctgcacctgcctgcagatcgtggtggatgtggccggcagctttggcctgcacaaccaggagctgaacatcagcctgaccagcatcggcctgctgtggaacatcagtgactacttcttccagagaggagagaccatcgagaaggagctgaacaaggaggaggccgcccagcagaagcaggccgaggagaagggcgtggtgctgaaccggcccttccacccagcccccccatttgactgcctgtggctgtgcctgtatgccaagctgggggagctgtgtgtggaccccaggcctgctgtgaggaagtctgctggccagaccctcttcagcaccatcggggcccacggcaccctgctgcagcacagcacctggcacacagtcatctggaaggtgctcttccacctgctggacagagtgcgggagagcagcaccacagctgacaaggagaagattgagagcggcggcggcaacatcctgatccaccacagccgggacacagctgagaagcagtgggccgagacctgggtgctgaccctggccggcgtggcccgcatcttcaacacccggcgctacctgctgcagcccctgggggacttcagccgggcctgggatgtgctgctggaccacatccagagcgctgccctgagcaagaacaatgaggtgtccctggccgccctgaagagcttccaggagatcctgcagatcgtgtcccctgtgcgggacagcgacaagccagagaccccacctgtggtgaatgtgcctgtgcctgtgctgattggccccatcagcggcatgagccggccctttgtgaggacagacagcatcggggagaagctgggccgctacagcagcagcgagccccccatcgtgacagatgagctggaggacctgaacctgtggtgggccgcctggaacacctggtacagaattggcagcgagagcaccaagccacccatcacctttgacaagctgaccttcatccccagccagcccttcctgacagccctgatccagatcttccctgccctgtaccagcacatcaagacaggcttcaacatggatgacctgcagaagctgggcgtcatcctgcacagcgccatctctgtgcccatcagcagtgatgccagccccttcatcctgcccagctacacagaagctgtgctgaccagcctgcaggaggccgtgctgacagccctggatgtgctgcagaaggccatctgtgtgggccctgagaacatgcagatcatgtacccagccatctttgaccagctgctggcctttgtggagttcagctgcaagccaccccagtatggccagctggagaccaagcacatcgccaatgccaagtacaaccagatccagctgtttgccccagctgagtgggtggccctgaactacgtgccctttgctgagaggagcctggaggtggtggtggacctgtaccagaagacagcctgccacaaggctgtggtgaatgagaaggtgctgcagaacatcatcaagaccctgcgggtgcccctgagcctgaagtacagctgccccagcgagagcacctggaagctggccgtgagcagcctgctgcgggtgctgagcatcggcctgcctgtggcccggcagcacgccagcagcggcaagtttgacagcatgtggccagagctggccaacacctttgaggacttcctgttcaccaagagcatccccccagacaacctgagcatccaggagttccagagaaatgaaaatattgatgtggaggtggtgcagctgatcagcaatgagatcctgccctatgccaacttcatccccaaggagtttgtgggccagatcatgaccatgctgaacaagggcagcatccacagccagagcagcagcttcacagaagctgagattgacatccggctgcgggaggagttcagcaagatgtgctttgagaccctgctgcagttctccttcagcaacaaggtgaccaccccccaggagggctacatcagcaggatggccctgtctgtgctgctgaagaggagccaggatgtgctgcaccgctacattgaagatgagcggctgagcggcaagtgccccctgccccggcagcaggtgacagagatcatctttgtgctgaaggctgtgtccaccctgattgacagcctgaagaagacccagccagaaaatgcctgcatcagcctgtttggcatccccccctacttctag

SEQ ID NO: 98520 - DNA, 5028 bp, Artificial Sequence
  derived and/or modified sequence
atgagcggcaccagcagccctgaggccgtgaagaagctgctggagaacatgcagagcgacctgcgggccctgagcctggagtgcaagaagaagtttcctcctgtgaaggaggccgctgagagcggcatcatcaaggtgaagaccatcgccgccaggaacacagagatcctggccgccctgaaggagaacagcagcgaggtggtgcagcccttcctgatgggctgcggcaccaaggagcccaagatcacccagctgtgcctggccgccatccagaggctgatgagccatgaggtggtgtctgaaacagctgctggcaacatcatcaacatgctgtggcagctgatggagaacagcctggaggagctgaagctgctgcagacagtgctggtgctgctgaccaccaacacagtggtgcatgatgaggccctgagcaaggccatcgtgctgtgcttccggctgcacttcaccaaggacaacatcaccaacaacacagctgctgccaccgtgcggcaggtggtgacagtggtgtttgagaggatggtggctgaagatgagcggcaccgggacatcatcgagcagcctgtgctggtgcagggcaacagcaacagaagatctgtgtccaccctgaagccctgtgccaaggatgcctacatgctgttccaggacctgtgccagctggtgaatgctgatgccccctactggctggtgggcatgacagagatgaccaggaccttcggcctggagctgctggagagcgtgctgaatgacttcccccaggtgttcctgcagcaccaggagttctccttcctgctgaaggagcgggtgtgccccctggtgatcaagctgttcagccccaacatcaagttccggcagggcagcagcaccagcagcagccctgcccctgtggagaagccctacttccccatctgcatgaggctgctgcgggtggtgtctgtgctgatcaagcagttctacagcctgctggtgacagaatgtgagatcttcctgagcctgctggtgaagttcctggatgctgacaagccccagtggctgcgggctgtggccgtggagagcatccaccgcttctgtgtgcagccccagctgctgcgctccttctgccagagctatgacatgaagcagcacagcaccaaggtgttccgggacatcgtgaatgccctgggcagcttcatccagagcctcttcctggtgccccccaccggcaacccagccaccagcaaccaggccggcaacaacaacctgggcggctctgtgtctgccccagccaacagcggcatggtgggcattggaggcggcgtgaccctgctgcctgcctttgagtaccggggcacctggatccccatcctgaccatcaccgtgcagggcagcgccaaggccacctacctggagatgctggacaaggtggagccccccaccatccctgagggctacgccatgtctgtggccttccactgcctgctggacctggtgcggggcatcacctccatgattgaaggagagctgggggagctggagacagagtgccagaccaccacagaggagggcagcagccccacccagagcacagagcagcaggacctgcagagcaccagtgaccagatggacaaggagatcgtgtccagagctgtgtgggaggagatggtgaatgcctgctggtgtggcctgctggccgccctgagcctgctgctggatgccagcacagatgaggccgccacagagaacatcctgaaggccgagctgaccatggccgccctgtgtggccgcctgggcctggtgaccagcagagatgccttcatcacagccatctgcaagggcagcctgcccccccactacgccctgactgtgctgaacaccaccacagctgccaccctgagcaacaagagctacagcgtgcagggccagagcgtgatgatgatcagccccagcagcgagagccaccagcaggtggtggccgtgggccagcccctggccgtgcagccccagggcaccgtgatgctgaccagcaagaacatccagtgcatgaggaccctgctgaacctggcccactgccacggggctgtgctgggcacctcctggcagctggtgctggccaccctgcagcacctggtgtggatcctgggcctgaagcccagcagcggcggggccctgaagccaggccgggctgtggagggccccagcacagtgctgaccacagctgtgatgacagacctgcccgtcatcagcaacatcctgagccggctgtttgagagcagccagtacctggatgatgtgtccctgcaccacctgatcaatgccctgtgcagcctgagcctggaggccatggacatggcctacggcaacaacaaggagcccagcctgtttgctgtggccaagctgctggagaccggcctggtgaacatgcacagaattgagatcctgtggaggcccctgaccggccacctgctggaggtgtgccagcaccccaacagcaggatgagggagtggggcgctgaggccctgaccagcctcatcaaggccggcctgaccttcaaccacgacccccccctgagccagaaccagaggctgcagctgctgctgctgaaccccctgaaggagatgagcaacatcaaccacccagacatccggctgaagcagctggagtgtgtgctgcagatcctgcagagccagggcgacagcctgggccctggctggcccctggtgctgggcgtgatgggcgccatcagaaatgaccagggcgagagcctcatcagaacagccttccagtgcctgcagctggtggtgacagacttcctgcccaccatgccctgcacctgcctgcagatcgtggtggatgtggccggcagctttggcctgcacaaccaggagctgaacatcagcctgaccagcatcggcctgctgtggaacatcagtgactacttcttccagagaggagagaccatcgagaaggagctgaacaaggaggaggccgcccagcagaagcaggccgaggagaagggcgtggtgctgaaccggcccttccacccagcccccccatttgactgcctgtggctgtgcctgtatgccaagctgggggagctgtgtgtggaccccaggcctgctgtgaggaagtctgctggccagaccctcttcagcaccatcggggcccacggcaccctgctgcagcacagcacctggcacacagtcatctggaaggtgctcttccacctgctggacagagtgcgggagagcagcaccacagctgacaaggagaagattgaaagtggcggcggcaacatcctgatccaccacagccgggacacagctgagaagcagtgggccgagacctgggtgctgaccctggccggcgtggcccgcatcttcaacacccggcgctacctgctgcagcccctgggggacttcagccgggcctgggatgtgctgctggaccacatccagagcgctgccctgagcaagaacaatgaggtgtccctggccgccctgaagagcttccaggagatcctgcagatcgtgtcccctgtgcgggacagcgacaagccagagaccccacctgtggtgaatgtgcctgtgcctgtgctgattggccccatcagcggcatgagccggccctttgtgaggacagacagcattggagagaagctgggccgctacagcagcagcgagccccccatcgtgacagatgagctggaggacctgaacctgtggtgggccgcctggaacacctggtaccgcatcggcagcgagagcaccaagccacccatcacctttgacaagctgaccttcatccccagccagcccttcctgacagccctgatccagatcttccctgccctgtaccagcacatcaagacaggcttcaacatggatgacctgcagaagctgggcgtcatcctgcacagcgccatctctgtgcccatcagcagtgatgccagccccttcatcctgcccagctacacagaggccgtgctgaccagcctgcaggaggccgtgctgacagccctggatgtgctgcagaaggccatctgtgtgggccctgagaacatgcagatcatgtacccagccatctttgaccagctgctggcctttgtggagttcagctgcaagccaccccagtatggccagctggagaccaagcacatcgccaatgccaagtacaaccagatccagctgtttgccccagctgagtgggtggccctgaactacgtgccctttgctgagaggagcctggaggtggtggtggacctgtaccagaagacagcctgccacaaggctgtggtgaatgagaaggtgctgcagaacatcatcaagaccctgcgggtgcccctgagcctgaagtacagctgccccagcgagagcacctggaagctggccgtgagcagcctgctgcgggtgctgagcatcggcctgcctgtggcccggcagcacgccagcagcggcaagtttgacagcatgtggccagagctggccaacacctttgaggacttcctgttcaccaagagcatccccccagacaacctgagcatccaggagttccagagaaatgaaaatattgatgtggaggtggtgcagctgatcagcaatgagatcctgccctatgccaacttcatccccaaggagtttgtgggccagatcatgaccatgctgaacaagggcagcatccacagccagagcagcagcttcacagaggccgagattgacatccggctgcgggaggagttcagcaagatgtgctttgagaccctgctgcagttctccttcagcaacaaggtgaccaccccccaggagggctacatcagcaggatggccctgtctgtgctgctgaagaggagccaggatgtgctgcaccgctacattgaagatgagcggctgtctggaaaatgtcccctgccccggcagcaggtgacagagatcatctttgtgctgaaggctgtgtccaccctgattgacagcctgaagaagacccagccagaaaatgcctgcatcagcctgtttggcatccccccctacttctag

SEQ ID NO: 98521 - DNA, 5031 bp, Artificial Sequence
  derived and/or modified sequence
atgagcggcaccagcagccccgaggccgtgaagaagctgctggagaacatgcaatctgaccttagagccttatccctggagtgtaagaaaaagtttccacccgtcaaggaggctgcggagagtggcattatcaaggttaaaaccatagccgctcggaacactgaaattcttgctgcattgaaggagaattcgagcgaggtcgtgcagcctttcttgatgggatgcggaactaaagagcctaagattacacaattgtgtctggccgccattcaacgcctgatgagccacgaagtggtgagtgagacagctgctggaaacataataaatatgctctggcagctgatggagaactctctggaggaattgaagttattgcagactgttctcgtcctgttgactactaacactgtagtacacgacgaagccctctcgaaggccattgtgctttgtttcaggctccattttacgaaagataatattactaacaacactgccgccgcaacggtgcgtcaggtcgtgaccgtggtgtttgaacgtatggtcgcagaggatgagaggcatagagacattatcgagcaaccggtccttgtacagggcaactccaatagacgcagcgtatccaccctcaagccttgtgcgaaggacgcctacatgttattccaagatctttgtcagcttgttaacgccgatgccccttactggctcgtgggtatgaccgagatgaccaggacattcggcctcgagctcttggagagcgtgctaaacgacttccctcaggtgtttctgcagcatcaggagttttcttttttactaaaggaacgcgtctgtcctttagtgatcaagctgtttagccctaatatcaagtttaggcagggctcttctacatcaagcagtccagcacctgtcgaaaagccatactttccgatctgcatgagactgctgagggtggttagcgtgcttattaaacagttttactcccttcttgtgacagagtgcgaaatatttctctcactgttagtaaagttcctggatgccgacaagccacagtggctgcgcgccgtggcagttgagagcattcatcggttttgcgtgcagccccagttgctgcgctcattttgccagtcctatgatatgaagcaacactcaaccaaggtcttcagagatatagttaacgctctcggcagttttatccagtccctgttcctagttccaccaacaggaaaccctgcgacgagcaatcaagccggaaataataatttgggcggttctgtcagtgcccccgccaatagcggcatggtcgggattggcggaggagtcaccctcctaccagccttcgaatatcgcgggacatggattcctatactgacgattaccgttcaaggaagtgccaaggccacatacctcgagatgctagacaaggttgaacctccaaccatccctgaaggatacgctatgagtgtcgcctttcattgcctcctcgacctcgttcgcgggatcacttcaatgatcgaaggggagctcggcgagctagagacagagtgccagacgaccacagaggaaggctcctctcctactcagtctactgagcagcaggacctacagagcacgagcgaccagatggacaaggaaatagtttcccgcgccgtgtgggaggagatggtgaatgcctgttggtgtgggctcctggcagccctgagcctgctgctggacgcatcaactgatgaagctgccactgaaaatatcttgaaagctgagttgaccatggctgcgttgtgtggccggctggggctcgtgacatcacgagatgccttcattacggccatctgtaagggtagcctgcctcctcactacgccctgacggtactgaataccacaacagctgctactctcagtaacaagtcgtacagcgtgcaggggcagtccgtcatgatgattagcccgtcatctgagtcacatcagcaggtggttgcagtgggtcaacccctggctgtgcaacctcaaggaaccgttatgctgacttcgaaaaacatccaatgtatgcggaccctgcttaacttggctcactgccacggagccgttttggggaccagctggcagctggtgctcgcaacactccagcaccttgtgtggattctgggtctgaaacctagtagcggaggggcactgaaacccggaagagctgtcgagggtccttccactgtcttgactaccgccgtgatgaccgatctgccagtcatttctaatatcctgagtaggctgttcgaatcttcccagtatctggatgacgtgtctctgcatcatttgattaatgccttatgtagcctgtccctggaagccatggatatggcttatggtaataacaaagagcccagcctttttgctgtcgcaaagcttctggagacgggcctagtgaatatgcataggattgaaatactgtggaggcctctcacgggccatctcctggaaaaggtgtgtcagcacccaaactcacgaatgcgagagtggggtgccgaggctcttacttctctcatcaaagctggcttaacctttaaccatgatcctcctctgtcccaaaaccagcgcctccaacttctgttgttaaatccgctgaaggaaatgagcaacattaaccatcctgacattcgccttaagcaactggagtgcgtgctgcagatactgcagagccagggcgacagcctgggaccaggctggccattggtgttgggtgtcatgggcgctatacgaaacgatcagggggagtctctgattcgtaccgcgtttcaatgtctgcagctggtcgtcaccgattttttacctacaatgccttgcacctgtctccagatcgttgtcgacgtggccggctcattcgggctccataatcaggagctgaacatcagtctcacgagtatcggtctgttatggaacatttccgattacttcttccaaaggggcgagactatcgaaaaagagttgaacaaagaagaagctgctcaacagaagcaagcagaagagaagggcgttgtcctcaatcgccccttccaccctgcaccaccctttgactgtctctggctgtgtctgtacgcaaaactgggtgagctctgcgtggacccgcgccctgctgtgagaaaatcagccggccagaccctttttagtaccatcggagctcacggcactctcctccagcactccacctggcatacagtgatatggaaggttctattccaccttttggaccgcgtcagggagtcatccaccacggctgacaaggaaaagatcgaatcagggggtgggaacatattaatacaccactcccgggacacagctgaaaaacagtgggcagagacctgggtgctcactctggcaggcgtcgccagaattttcaacacccgtcggtacttgctgcagccgctcggcgacttcagcagggcatgggatgttttactcgaccacatacagtccgcagccctctcgaaaaacaacgaggtctctctggcagccctgaaaagctttcaagaaattttacagatcgtaagtccagtgcgggattcagacaagcctgaaactccccccgtagttaatgtacctgttccggtactgattggtccaattagcggcatgtcacgacccttcgtgaggacggactccatcggtgaaaagttagggcgatatagctcttctgagcctcccatcgttaccgacgaactggaagatctgaacctttggtgggccgcttggaatacctggtaccgcatcggatccgagtctaccaagcctcctatcactttcgataagttaacctttatcccttctcagcctttccttaccgctttaattcaaattttcccagctctatatcagcacatcaagacaggattcaacatggatgatctccaaaagctgggagttatcctgcattccgctatctcagttccgatttctagcgacgcaagtccttttatcctgccgtcttacaccgaggctgtactgacatctctccaagaagcggttcttactgcattagacgttctccagaaagccatctgcgtgggcccagaaaacatgcaaatcatgtaccccgccatctttgatcagctacttgcctttgtcgaattttcttgcaaaccaccgcaatacggccaactggaaactaaacatattgccaacgcgaaatacaatcagattcagctgtttgcccctgctgaatgggtcgccctcaattatgtacctttcgccgaaagatcattggaggtggtggtggatctgtaccagaagacagcctgccacaaagccgtggtcaacgagaaagtgctgcagaacatcattaagactcttagagtacccctgagtctgaagtatagctgcccaagcgaatccacttggaaactggccgtgagctccctgctgcgggtcctctccatcggcctgcctgtcgcccggcaacacgcgtcctcaggcaagtttgactcaatgtggcctgaactggccaacacgttcgaggacttcctctttactaagagcatcccgcccgacaacctgagcatccaagagttccaacggaatgaaaatatcgatgttgaggttgttcaactgatcagtaacgagatcctcccctacgccaacttcattccaaaggaattcgtgggccaaattatgacaatgctgaacaaaggctccattcattcacagagtagttccttcaccgaagccgagatcgacatcaggctacgggaagagttctccaagatgtgcttcgaaaccctcctccagttttctttctccaataaggtcacaacaccgcaggaaggctacatttcaagaatggcgcttagcgtcctccttaaacgcagccaagatgttctgcacaggtacattgaggatgaaagactgtccgggaaatgtcccctgcctagacagcaggtgaccgagattatatttgtgcttaaggccgtgtccacactgatcgactccctcaagaaaacacagccggagaatgcctgtatctccctgtttggcatcccaccatacttctag

SEQ ID NO: 98522 - DNA, 5028 bp, Artificial Sequence
  derived and/or modified sequence
atgagcggcaccagcagccccgaggccgtgaagaagctgctggagaatatgcagtccgatctgcgagctctgtccctggagtgcaagaaaaaattccccccagtcaaagaggccgccgaaagcgggatcatcaaggtcaagaccattgcggcaagaaataccgagatcctcgcggctctcaaagagaattccagcgaggtggttcagccctttcttatgggatgcggcactaaagagccaaaaattactcagctatgtctcgccgcaatccagcgcctcatgtcacatgaagtggtttccgagaccgcagccggcaatatcatcaacatgctctggcagctcatggaaaactctctggaggagttgaaacttttacagacggtcctggtgctgttaacaaccaacacagttgtgcacgatgaagctctctcaaaagccatagtgctgtgtttcaggctgcacttcactaaggacaatattaccaacaacacagctgccgccaccgttcgtcaggtggtgaccgtggtcttcgagcgaatggtggcggaggacgaacgccatagggatattatcgagcagcccgtgctggtgcaggggaacagtaaccgccgatcagtttctacactgaaaccctgtgcgaaggacgcatatatgctttttcaggatttatgtcagctagtgaatgcagatgccccctactggctagtgggaatgacagaaatgacgcggaccttcggcctggagctgctcgagtcagttctgaatgacttcccccaggtgtttctacagcaccaggagtttagctttcttctgaaggagcgagtttgtcccctggtcatcaaattattctctccaaacataaaatttcgccaaggttcttccacctcctcgagtccagcccctgtagagaaaccgtacttcccaatctgcatgagactcttacgagttgtctccgtgctgatcaagcagttctatagcctgcttgtcaccgaatgcgaaatcttcctttcactgcttgtgaagtttcttgatgccgacaaacctcagtggctgcgggctgtcgctgtagagtccattcatcgtttttgcgtgcagcctcaattactgagaagtttttgccaatcttatgacatgaagcaacactccaccaaggtgttcagggatattgtgaatgcgctgggctcctttattcagtcattgttcctggtgccacctacaggcaacccggctacaagtaaccaggccggcaacaataatctcggaggcagcgttagtgcccctgccaacagcggaatggttgggataggtggcggcgtgactctgctcccagcatttgagtacagaggtacgtggataccgattttgaccattaccgtccagggctcggccaaggccacctacctcgagatgttagacaaggttgaacccccaaccatccccgagggttatgccatgtcggtggccttccactgtctcctggacctcgtcagagggatcacatccatgatcgagggtgagttgggggagcttgaaaccgagtgtcaaactacaactgaagagggcagctcacccactcaaagcactgagcagcaagatcttcaatccaccagcgaccagatggacaaagagatagtgtcacgagcggtatgggaagagatggtaaacgcctgctggtgtgggctgctcgctgcccttagtctgcttctcgatgcgagcactgatgaagcagcaaccgaaaacattctgaaagccgaattgactatggccgctctttgcggccgcttgggcctggtaacctcacgggacgccttcatcacagccatctgcaaaggaagtttgccgccgcactacgctcttactgtgctcaataccaccaccgcagccacactgtctaacaaatcatatagcgtccagggccaatcggtgatgatgatatcccccagctctgagagtcatcagcaagtggtagccgtcggtcagcctttagcagtccagccgcagggcacagtaatgctcacgtccaagaatattcagtgcatgcgtacacttctcaatctggcccactgccacggtgcagtgctcggaacgtcctggcaattagttctcgccactctgcagcacttggtgtggattctcggtttaaagcctagttctggtggggccctgaaacctggccgggccgtggaggggccctctaccgtgctcacgacggccgtgatgacagacttacccgtgatatcgaacattctgtcgagactcttcgagagttcccagtatcttgacgacgtatctctccatcatctcatcaatgcactctgctcactgagcctggaggccatggatatggcttacgggaataataaggagccctcattgtttgcagtcgcaaaactgcttgagacgggactagtgaatatgcatcgcatcgagatactttggcgccctctgaccggccaccttctggaagtgtgccagcacccgaattccagaatgagagaatggggggcagaggctctcactagcctcattaaagcgggcttaacattcaaccacgacccacctctttcccagaatcagcgtctacagctccttctcctgaaccctctgaaggaaatgtcaaacataaaccatcctgacatccgtctgaagcagttagagtgcgttctgcaaatccttcagagtcagggggactccctgggtcccgggtggccgctcgtgctgggcgtgatgggcgccatccgcaacgatcagggggaatccctgatccggactgccttccagtgcctccagctggtggtgaccgacttcttgcccacaatgccttgtacttgtcttcagattgtcgtagatgtagctggaagctttgggctccataaccaggaactgaatatttccctgacatctataggattattgtggaatatcagcgactacttcttccagcggggcgaaacaatcgagaaggaactcaacaaggaagaagcagcccagcagaagcaggcggaggagaagggagttgtgctgaatagaccatttcatcctgctccaccgttcgactgcttatggctgtgtctgtatgctaagctgggagagctgtgcgtggaccctagaccggccgtaaggaaatccgctggacagactcttttctccacaataggagctcacggcaccctgctgcaacatagtacttggcacaccgtgatctggaaggtacttttccacctgctggatcgggtgcgggagagctccacaactgccgataaggagaagattgaaagtggaggcggcaacatactcatccaccactcccgcgacacagctgagaagcagtgggcagaaacctgggtcctgactctcgcgggtgtcgcacgcatcttcaatactcgcagatatctgttgcagcctctgggtgactttagccgcgcctgggatgtacttttggatcatatccagtccgcggctctctccaaaaataacgaggtatcactggctgccctgaagagctttcaggagatccttcagatcgtctctcctgttcgggactctgacaaaccggaaaccccccctgtcgtcaacgtgcccgtcccagtgttgataggacccatatcagggatgtcacgccctttcgttagaacagactctatcggcgaaaagcttggccggtattcctcctccgagccacctatagtcaccgatgaactggaagaccttaacctgtggtgggctgcctggaatacttggtacaggataggcagcgagagtactaaaccccctatcacgttcgataagttaacattcattcccagtcagcccttcctgacagccctcattcagatattccctgctctataccagcatatcaagaccggctttaacatggatgatctccagaagttgggagtgatccttcattccgccatcagtgtgcccatctctagcgatgcctcccctttcattctgcctagttatactgaagccgttcttaccagcctccaggaggcagtgctgactgcactagatgtgctgcaaaaagccatctgtgtggggccggaaaatatgcagatcatgtaccccgcaattttcgatcaattgctcgcattcgttgaattttcttgcaagccaccacaatatgggcagctagagaccaagcatatcgccaatgccaagtataaccagattcaattgttcgcgcccgccgagtgggtagccttgaactatgtaccgttcgcggaacgctcccttgaagtggttgtcgacctctaccaaaagaccgcctgtcacaaagcggtcgtcaatgagaaggtgctacagaatatcattaaaacactgcgggttccattgagtctcaaatactcctgcccttctgagagtacgtggaaattggcggttagcagtctcttgcgggtcctctctatcgggctgccagtggcccgccagcacgcgtccagtggaaaatttgacagcatgtggcctgagctggccaacacattcgaagatttcttgttcacaaagtccatccctccggacaacctgagcatccaggagtttcaaagaaatgaaaacatagacgtcgaagtcgttcagctaatttcaaacgagattctcccctacgcaaattttattcccaaggaattcgtcggccagattatgactatgcttaacaagggttcgatacactcgcaatcctcaagctttaccgaagccgaaattgatataagactacgcgaggaatttagtaagatgtgctttgaaacactcctccagttctctttttccaataaagtgaccactccacaggaaggatatatttctcggatggctctgtccgtgctgctgaagagatcacaagacgtcctccatcgttatatcgaggacgagcgtttatccgggaagtgtccactgcctcggcaacaggttaccgagataatcttcgtgctcaaggccgttagtacacttatcgatagcctcaagaaaactcagccggagaacgcttgtattagtttgttcggtatccctccgtatttctag

SEQ ID NO: 98523 - DNA, 5422 bp, Artificial Sequence
  derived and/or modified sequence
attgtgggcgactcggctaatggcgtcggcgagtcttaggggcctggggagctggcgctgaagcttcttgccaggttggctggtgacacccggtgtggctgggccccgcggcagcggagggacctgcccgccttgtgggtttctcggccagagtcggcggagcctagcgggacggtgcgactgcggggggcgcctccgagaaaagccagaggtgttgcggggaagctgctgggggacgctcgagcaggctccgggttcgcagcccagggcccaagaagcgggctgctgaaggaccagagacaccgggagggagctgcctgtggccctaaggagctgaccgtgccagagcttgtttgtacctctcggaaattggctgggaccttggaggatcatgtccggcaccagcagccccgaggcggtgaagaagctgctggagaatatgcagagcgacttgcgcgccttgtcactggagtgcaagaagaaattcccacctgtcaaagaggctgctgaatcaggaataataaaagttaaaacaattgctgcacgaaacactgaaattttggcagcactgaaagagaacagctcagaggttgtacagccttttttaatgggttgtggaaccaaggaaccgaagatcactcagctatgtttggctgctattcagagactcatgtcacatgaagtcgtgtctgagactgcagctggaaatataattaacatgctttggcagctaatggagaatagtcttgaagaacttaagctacttcaaacagttcttgttcttttaacaaccaatacagtagttcatgatgaggcactttctaaggcaatcgttctttgttttcgactacacttcacaaaagataatattacaaataatacagctgctgctacagtgcgacaagttgttactgttgtttttgagaggatggttgctgaagatgaacgacacagagatattatagaacaaccagtactggtacaaggaaatagtaacagaagatctgtcagtaccctcaaaccttgtgctaaagatgcatatatgcttttccaggatctttgtcagttggttaatgctgatgctccttattggctagtgggcatgacagaaatgactcggacgtttggcctcgaattacttgagtcagtcctcaatgattttccgcaggtctttttacaacaccaagaatttagtttcctcctcaaagaaagggtatgtcctcttgtgataaagctcttttctccaaatataaagttcagacaaggttccagcacctcatcttctccagcaccagttgaaaaaccatattttcctatctgcatgcgtttgctgagagtagtatctgttctgattaagcagttttacagtcttttggtaactgaatgtgagatatttctgtcacttctggtgaaatttctggatgcagataaaccacagtggctacgagctgttgcggtggaatcaatacacagattctgtgtgcagcctcaactattaaggtcattttgtcagtcctatgatatgaaacagcattctaccaaggtttttcgtgatattgtaaatgcactgggatcttttatacagtccttgtttcttgtcccccctactggaaatcctgcaacaagcaaccaagctggaaacaataatttaggtggctcagtctcagcaccagctaactcaggaatggtggggattggtggaggtgttactttgctaccagcatttgaatataggggaacctggatacctattctgacaatcacagttcaaggcagtgctaaagccacctacttagaaatgttggacaaagttgagcctccaactatacctgaaggttacgccatgtctgtggcattccattgtttgctagaccttgttcgtggaatcacaagtatgattgaaggagagctaggagagcttgaaacagaatgtcaaaccaccactgaagaaggttcttcaccaacacagtcgacagaacagcaggatttacagtcaacatcagaccaaatggataaggaaattgttagtagggctgtttgggaagaaatggtgaatgcctgctggtgtggtcttcttgctgcactctcactccttcttgatgccagcacagatgaagctgccactgagaatattttaaaagctgaactgactatggctgctctttgtggaagactgggccttgtaacttcaagagatgcctttataactgcaatatgcaaaggttccctgcctccccattatgctcttactgtattgaataccaccactgcagctacactttccaacaaatcatattccgttcagggccaaagtgttatgatgataagtccatcaagtgaatctcaccaacaagttgtggcagtgggtcaacctttagcagtccagcctcaagggacagtaatgctgacttccaaaaatatccagtgtatgaggactttacttaacttggcgcattgccatggggctgttcttggaacatcatggcaacttgtcttggcaactcttcagcatcttgtgtggattctgggattaaagcctagtagtggcggtgccttgaaacctgggagagctgtagaaggacccagtacagttctaacaacagcagtgatgacagatttaccagtgatttccaatatactttcaagattgtttgaaagctcacagtatcttgatgatgtatcactgcatcatttaataaatgcactttgctccttgtctctagaagcaatggatatggcctatggaaataataaggaaccatctctttttgctgttgccaaattgttagaaactggtttagttaatatgcaccgaatagaaattctgtggagacctctgactggccatctacttgagaaggtctgccagcatccaaactctcgaatgagagaatggggagcagaagctttaacttctcttattaaagcaggattaacatttaaccatgatcctccactctcacaaaaccagaggctgcagttgcttttattgaacccgttaaaggagatgtccaatattaatcatccagatattcgactcaagcagttagaatgcgtgttgcagattctgcagagtcagggagacagtcttgggcctggatggccattagtgcttggagtcatgggagcaatcagaaatgatcaaggagaatccttgatacgaactgcattccagtgtcttcagttggttgtgacagattttctaccaacaatgccttgtacttgcctgcaaatagttgtagatgttgcaggtagctttggcctccataaccaagaactcaatattagtttaacttcaataggtttattgtggaatatttcagattattttttccaaagaggggaaactattgaaaaagaactaaataaggaagaggcagcacagcaaaagcaggcagaagagaaaggagttgttttaaatcggccattccaccctgcaccgccatttgattgcttgtggttatgtctttatgcaaaattgggtgaactatgtgtggatccccgtcctgctgtcaggaagagtgcagggcaaactctgttttctacaattggtgcgcatggaactttattacagcattcaacctggcacactgttatctggaaggtactctttcatctactggacagagttcgagagtcctctaccactgcagacaaagaaaagattgagtctggaggtggcaatattctcattcatcattcaagggacaccgccgagaagcaatgggctgagacgtgggtattaacattggctggagtagcaaggatcttcaacactagaagatatttgctgcagcctttaggagatttttcaagagcttgggatgttcttcttgaccatatacagtcagcagcactcagcaaaaacaatgaagtatctctggctgctctgaaaagcttccaggaaattttacagattgtgtcccctgtcagagactcagataagcctgagacaccacctgtagttaatgtacctgtgcctgttcttatagggcccatatcaggcatgagcaggccatttgtaagaacagattccattggagaaaaactaggaagatatagtagctctgagccacccattgttactgatgagcttgaagatttgaatctatggtgggctgcgtggaatacctggtatagaattggatctgaaagtactaagcctcctattacttttgataaactaacttttattcctagccagccttttcttacagctttaattcagatatttccagctctctaccaacacataaaaactggtttcaatatggatgacttgcaaaagttgggagtcatattgcacagtgctatttcagtcccaataagttcagatgcatccccttttattcttccatcttataccgaagcagttttgacaagtttacaggaagctgtacttacagctttagatgttctccaaaaggccatttgtgtaggaccagaaaacatgcagataatgtatccagctatatttgaccagttgttggcatttgtagaattttcctgtaaacctccacagtatggacagctggaaacaaagcacattgcaaatgcaaaatataatcagatccaactatttgcaccggcggaatgggtagccttgaattatgtgccgtttgctgaaaggtctttagaagtagttgtggatttataccaaaaaacagcgtgtcacaaagcagtggtgaatgagaaagtgctccagaatattattaagactcttagggttcctctcagtttgaagtattcctgcccttctgaaagcacatggaaactagcagtatcctctctcctcagagttctttctattgggctacctgttgcccggcagcatgcttcttctggaaaatttgacagtatgtggccagaactagccaatacttttgaagattttctctttactaaaagcatacctccagataatctctctattcaagagtttcaaagaaatgaaaatattgatgtcgaggtagttcaacttatcagcaatgagatactaccttatgccaattttattcctaaggaatttgttggtcaaataatgacaatgcttaacaagggctcaatacattctcagtcatcttcatttacagaagcagagattgatattcgtttgagagaggaattttctaaaatgtgttttgaaacattactccagttttccttcagtaataaagtcacaacacctcaagaaggctacatctcacgaatggcactctcagtgcttttaaagaggtcccaagatgtactacatcgctatatagaggatgaaagattaagtggtaaatgccctcttccaaggcaacaagtaacagaaattatatttgttttaaaagcagtcagtactcttattgattcacttaagaaaactcagcctgagaatgcttgtatcagcctatttggaataccaccctacttttaa

SEQ ID NO: 98524 - DNA, 6130 bp, Artificial Sequence
  derived and/or modified sequence
gggcgactcggctaatggcgtcggcgagtcttaggggcctggggagctggcgctgaagcttcttgccaggttggctggtgacacccggtgtggctgggccccgcggcagcggagggacctgcccgccttgtgggtttctcggccagagtcggcggagcctagcgggacggtgcgactgcggggggcgcctccgagaaaagccagaggtgttgcggggaagctgctgggggacgctcgagcaggctccgggttcgcagcccagggcccaagaagcgggctgctgaaggaccagagacaccgggagggagctgcctgtggccctaaggagctgaccgtgccagagcttgtttgtacctctcggaaattggctgggaccttggaggatcatgtccggcaccagcagccccgaggcggtgaagaagctgctggagaatatgcagagcgacttgcgcgccttgtcactggagtgcaagaagaaattcccacctgtcaaagaggctgctgaatcaggaataataaaagttaaaacaattgctgcacgaaacactgaaattttggcagcactgaaagagaacagctcagaggttgtacagccttttttaatgggttgtggaaccaaggaaccgaagatcactcagctatgtttggctgctattcagagactcatgtcacatgaagtcgtgtctgagactgcagctggaaatataattaacatgctttggcagctaatggagaatagtcttgaagaacttaagctacttcaaacagttcttgttcttttaacaaccaatacagtagttcatgatgaggcactttctaaggcaatcgttctttgttttcgactacacttcacaaaagataatattacaaataatacagctgctgctacagtgcgacaagttgttactgttgtttttgagaggatggttgctgaagatgaacgacacagagatattatagaacaaccagtactggtacaaggaaatagtaacagaagatctgtcagtaccctcaaaccttgtgctaaagatgcatatatgcttttccaggatctttgtcagttggttaatgctgatgctccttattggctagtgggcatgacagaaatgactcggacgtttggcctcgaattacttgagtcagtcctcaatgattttccgcaggtctttttacaacaccaagaatttagtttcctcctcaaagaaagggtatgtcctcttgtgataaagctcttttctccaaatataaagttcagacaaggttccagcacctcatcttctccagcaccagttgaaaaaccatattttcctatctgcatgcgtttgctgagagtagtatctgttctgattaagcagttttacagtcttttggtaactgaatgtgagatatttctgtcacttctggtgaaatttctggatgcagataaaccacagtggctacgagctgttgcggtggaatcaatacacagattctgtgtgcagcctcaactattaaggtcattttgtcagtcctatgatatgaaacagcattctaccaaggtttttcgtgatattgtaaatgcactgggatcttttatacagtccttgtttcttgtcccccctactggaaatcctgcaacaagcaaccaagctggaaacaataatttaggtggctcagtctcagcaccagctaactcaggaatggtggggattggtggaggtgttactttgctaccagcatttgaatataggggaacctggatacctattctgacaatcacagttcaaggcagtgctaaagccacctacttagaaatgttggacaaagttgagcctccaactatacctgaaggttacgccatgtctgtggcattccattgtttgctagaccttgttcgtggaatcacaagtatgattgaaggagagctaggagagcttgaaacagaatgtcaaaccaccactgaagaaggttcttcaccaacacagtcgacagaacagcaggatttacagtcaacatcagaccaaatggataaggaaattgttagtagggctgtttgggaagaaatggtgaatgcctgctggtgtggtcttcttgctgcactctcactccttcttgatgccagcacagatgaagctgccactgagaatattttaaaagctgaactgactatggctgctctttgtggaagactgggccttgtaacttcaagagatgcctttataactgcaatatgcaaaggttccctgcctccccattatgctcttactgtattgaataccaccactgcagctacactttccaacaaatcatattccgttcagggccaaagtgttatgatgataagtccatcaagtgaatctcaccaacaagttgtggcagtgggtcaacctttagcagtccagcctcaagggacagtaatgctgacttccaaaaatatccagtgtatgaggactttacttaacttggcgcattgccatggggctgttcttggaacatcatggcaacttgtcttggcaactcttcagcatcttgtgtggattctgggattaaagcctagtagtggcggtgccttgaaacctgggagagctgtagaaggacccagtacagttctaacaacagcagtgatgacagatttaccagtgatttccaatatactttcaagattgtttgaaagctcacagtatcttgatgatgtatcactgcatcatttaataaatgcactttgctccttgtctctagaagcaatggatatggcctatggaaataataaggaaccatctctttttgctgttgccaaattgttagaaactggtttagttaatatgcaccgaatagaaattctgtggagacctctgactggccatctacttgaggtctgccagcatccaaactctcgaatgagagaatggggagcagaagctttaacttctcttattaaagcaggattaacatttaaccatgatcctccactctcacaaaaccagaggctgcagttgcttttattgaacccgttaaaggagatgtccaatattaatcatccagatattcgactcaagcagttagaatgcgtgttgcagattctgcagagtcagggagacagtcttgggcctggatggccattagtgcttggagtcatgggagcaatcagaaatgatcaaggagaatccttgatacgaactgcattccagtgtcttcagttggttgtgacagattttctaccaacaatgccttgtacttgcctgcaaatagttgtagatgttgcaggtagctttggcctccataaccaagaactcaatattagtttaacttcaataggtttattgtggaatatttcagattattttttccaaagaggggaaactattgaaaaagaactaaataaggaagaggcagcacagcaaaagcaggcagaagagaaaggagttgttttaaatcggccattccaccctgcaccgccatttgattgcttgtggttatgtctttatgcaaaattgggtgaactatgtgtggatccccgtcctgctgtcaggaagagtgcagggcaaactctgttttctacaattggtgcgcatggaactttattacagcattcaacctggcacactgttatctggaaggtactctttcatctactggacagagttcgagagtcctctaccactgcagacaaagaaaagattgagtctggaggtggcaatattctcattcatcattcaagggacaccgccgagaagcaatgggctgagacgtgggtattaacattggctggagtagcaaggatcttcaacactagaagatatttgctgcagcctttaggagatttttcaagagcttgggatgttcttcttgaccatatacagtcagcagcactcagcaaaaacaatgaagtatctctggctgctctgaaaagcttccaggaaattttacagattgtgtcccctgtcagagactcagataagcctgagacaccacctgtagttaatgtacctgtgcctgttcttatagggcccatatcaggcatgagcaggccatttgtaagaacagattccattggagaaaaactaggaagatatagtagctctgagccacccattgttactgatgagcttgaagatttgaatctatggtgggctgcgtggaatacctggtatagaattggatctgaaagtactaagcctcctattacttttgataaactaacttttattcctagccagccttttcttacagctttaattcagatatttccagctctctaccaacacataaaaactggtttcaatatggatgacttgcaaaagttgggagtcatattgcacagtgctatttcagtcccaataagttcagatgcatccccttttattcttccatcttataccgaagcagttttgacaagtttacaggaagctgtacttacagctttagatgttctccaaaaggccatttgtgtaggaccagaaaacatgcagataatgtatccagctatatttgaccagttgttggcatttgtagaattttcctgtaaacctccacagtatggacagctggaaacaaagcacattgcaaatgcaaaatataatcagatccaactatttgcaccggcggaatgggtagccttgaattatgtgccgtttgctgaaaggtctttagaagtagttgtggatttataccaaaaaacagcgtgtcacaaagcagtggtgaatgagaaagtgctccagaatattattaagactcttagggttcctctcagtttgaagtattcctgcccttctgaaagcacatggaaactagcagtatcctctctcctcagagttctttctattgggctacctgttgcccggcagcatgcttcttctggaaaatttgacagtatgtggccagaactagccaatacttttgaagattttctctttactaaaagcatacctccagataatctctctattcaagagtttcaaagaaatgaaaatattgatgtcgaggtagttcaacttatcagcaatgagatactaccttatgccaattttattcctaaggaatttgttggtcaaataatgacaatgcttaacaagggctcaatacattctcagtcatcttcatttacagaagcagagattgatattcgtttgagagaggaattttctaaaatgtgttttgaaacattactccagttttccttcagtaataaagtcacaacacctcaagaaggctacatctcacgaatggcactctcagtgcttttaaagaggtcccaagatgtactacatcgctatatagaggatgaaagattaagtggtaaatgccctcttccaaggcaacaagtaacagaaattatatttgttttaaaagcagtcagtactcttattgattcacttaagaaaactcagcctgagaatgcttgtatcagcctatttggaataccaccctacttttaaaccttgtttttaatctcttaaagttgatggaaatacctgggcacaagtaattgccttatacccaactttagtagaatgcatcacctgttcttcttcagaagtctgttctgcacttaaagaggcactagttccttttaaggatttcatgcagccaccagcatccagagttcaaaatggagaatcttgaccggctacaatatatttgaaagcaggaagatagtctaaaaaatgtttgctcctaattgagtcttctgtgagaaggacatttcttactgcagataattcttggcagctgttgttggcctcctttaaattctacttacctgagttcagtaattcatattacaggcttgcacatcaacaaaggctcctgaatgaacagcagtgtaaggctttaataaattaaactgatgggagggataattaacactacagtatacatgctaccatatctccagttggtgatttaaagtgagcttatgtacagtttgtggtgtatgtgttaatgatgtactttttaaaaagaaagaagagatatttcaattcagtcagatttattagtctggtgtttttgcaccctttttcaagtacaaaatcgtactagaattttatgcaagatggtactgtaacattccatattatctataaccagcctttgttaacaaagggaactgatatacttgtgtgtataataaatggtacagttctgtataaaa

SEQ ID NO: 98525 - DNA, 5031 bp, Artificial Sequence
  derived and/or modified sequence
atgagcggcacttctagcccggaagcagtgaagaagttgctggagaacatgcagtccgaccttagagctttgtcattagagtgtaaaaaaaagttcccgccagtgaaagaggctgccgaaagcggcatcatcaaagtgaagaccattgcagcacgaaatacagaaatactggccgcacttaaagagaatagttctgaggtggtacagccctttctgatgggctgcggtacaaaggaaccaaagataacacagctgtgtctggccgctatccagcggctgatgtctcacgaagtggtgtctgagacagcagctggaaatatcatcaatatgttatggcagcttatggagaactctctggaagagctaaagctcctgcagacagtgctagtgctgcttactacaaacaccgtggtccatgacgaagccctaagcaaggccatcgtcctgtgcttccgactccacttcacaaaggacaatattaccaataatacggccgctgctactgtgcgtcaggttgttaccgtggtctttgaacgtatggtggctgaagatgaaaggcatagggacattatagagcagcctgtgctggttcaggggaacagcaaccggagatccgtgagcactttgaagccttgtgccaaagacgcgtatatgctattccaggacctatgccagctggtgaatgctgacgccccatattggctggtcggtatgactgaaatgacccgcactttcggcctcgaacttttagaaagcgttctgaacgattttcctcaggtgttcctccagcatcaggagtttagttttttgctgaaggaacgggtctgccccctcgtgataaaactgttctctcccaacatcaagttcagacagggaagttctacctcctcctcgccagctcccgtggagaagccctactttcctatctgcatgagattgctgcgggttgtatctgttcttattaagcagttttactctcttctggtcacggaatgcgaaatttttctgagtctccttgttaagttcttggacgctgataagccgcagtggctgcgcgcagtcgcagtggaatctatccataggttctgtgtccagccccagcttctgcgctccttttgtcagtcctacgatatgaaacagcattccaccaaggtattcagggatatcgtcaacgcacttggaagcttcatccagagcctgttcctggtcccacccaccggcaatcccgcaacctctaaccaggctggaaataacaacctcggtggaagcgtgtccgcaccagcaaactccggcatggtggggatcggcggtggcgtcactttactccctgcctttgagtacagaggtacttggatccctatcctgaccattactgtgcagggatcagcgaaggctacatacctcgagatgctcgataaggttgagcccccaacaattccagagggatacgccatgtccgtggctttccattgcctgctcgacttggttagggggattacatccatgatcgaaggagagcttggcgaactggagactgagtgtcaaaccacaaccgaggagggatctagcccaacccaaagcacggaacagcaagacctgcagtcaacttcagaccagatggacaaagaaattgtctctcgtgctgtatgggaggaaatggtgaatgcttgttggtgtggtcttcttgctgctctgagcctcctgctcgatgcctccacagatgaggccgctacagagaacatcttaaaggccgaactgacgatggccgctctgtgcgggaggctcggcctggtgacctcgcgcgacgcatttatcaccgccatatgtaaagggtctcttcctccccattatgccctcacggtattgaataccactacagctgccacattatcaaataagagctattcggtgcagggccagtccgtcatgatgattagcccgagcagcgaatcccatcagcaggtcgtggctgttgggcagccacttgccgtccagccacagggtacagtcatgttgaccagcaagaacattcagtgtatgcggacactgctcaatttggctcactgccacggggcagtcctaggaaccagctggcagttggtgctggccacacttcagcatcttgtctggattttaggtctcaagccttctagcggcggtgccctaaagcctgggagagccgtggagggtccgtcaacagtactcaccactgccgttatgacagatcttcctgtgattagcaatatcctgagccggctcttcgaatcaagccagtaccttgatgacgtgagtttgcaccacctcattaatgcgttatgttccctgagtttggaggccatggacatggcttacggcaataataaggagcccagcctatttgcagtggccaagctgctcgaaaccggcctggtcaatatgcatcggattgagatcctctggaggccccttaccggacatctgttggaaaaggtgtgtcagcaccctaattcccgaatgcgcgagtggggcgctgaggcactaacttccctcattaaagcgggactgacattcaaccacgaccccccactctctcaaaatcagaggctgcagctgctgctgctcaatcctctcaaggagatgagtaacataaatcatcccgacatccgcttaaagcagctcgaatgcgtgctccagattctccagtcgcagggggactccctgggacccggatggccgctggtgctcggtgtcatgggtgccatacggaatgaccagggagagtcacttataaggactgccttccagtgcctgcagctcgtggtcactgacttcctgccaaccatgccctgtacatgtttacaaatcgttgttgacgtagctggctcattcggcctgcataaccaagaactcaatattagcttgactagcatcggattattatggaatatcagtgactacttctttcaaagaggggagacaattgagaaggagcttaataaggaagaagccgcacagcagaaacaggcagaagaaaagggcgtggtgctcaatcgaccctttcaccctgccccaccctttgattgcctatggctctgtctatatgcaaaattaggcgaactctgtgtggaccccagacccgctgttcgaaagtcggcaggacagacactgttttcgaccatcggggctcacggaacgctgctgcagcacagcacatggcatactgtgatttggaaggtgctctttcatcttcttgacagggtccgggagtcttctactactgccgacaaagagaagatcgagagcggaggcggtaatatcctgattcaccacagccgagatacagctgaaaagcaatgggcagagacttgggtgctaactctggccggagtcgccagaattttcaatacaaggcgctatcttctgcagcccttgggggatttttcacgggcttgggatgtgctactagaccatattcagtcagctgccttgtccaaaaataatgaggtaagcctggcggcattgaaaagtttccaagagattctgcaaatcgtgagtcccgtgagagactccgacaagcccgagacaccacctgttgtgaacgtgccagtacctgtgctcattggacccatatcggggatgagccgcccatttgtgcgtacagattctatcggtgagaagcttggcaggtacagctcaagcgaaccacctatcgtgaccgatgagctagaggatctgaacctctggtgggcggcatggaacacctggtatagaatcggttcagagagcacgaagccgcctatcacctttgacaagctgactttcatccccagccaaccatttctgaccgccttaattcagatttttccagctctgtatcagcatatcaaaaccggattcaacatggacgatctccaaaagctgggtgtgatccttcatagcgcgattagtgtaccaatctcatccgatgcatctcccttcattttaccgtcttatacagaagccgttctgacatcactccaggaggcagtgctgaccgcccttgacgtccttcagaaggccatatgcgtggggcctgaaaacatgcagatcatgtatcctgctatttttgatcagttactcgctttcgtggagttctcttgtaagcctccacagtacgggcaactggagaccaagcatattgcgaacgccaagtataatcaaattcagctgtttgctccagcggaatgggttgccctgaattacgtgccatttgctgagcggtcacttgaggtcgttgtagatctgtatcagaagacagcctgtcacaaagccgtggttaatgagaaagtcctgcagaatataatcaagactctcagagtgccactgtccctaaagtatagctgtccctcagagtctacctggaagctggctgtgagttcactgctacgagtgctatccatcggcttacccgtcgcgagacaacacgcttccagcgggaagttcgactccatgtggccagaattggccaataccttcgaagacttcctctttacaaagtcaatccctccagacaatctgtcaattcaggagttccagcggaacgagaatatcgacgttgaggtcgtgcagttaatctccaatgaaatcctcccatatgctaactttattcctaaagagttcgttggccagatcatgacaatgctgaataagggctcaattcatagccaatcaagtagcttcacagaggcagagatcgacatcaggctgagagaggagttttcaaagatgtgcttcgaaaccttgctccaattttccttttctaataaggtgactactcctcaagaggggtatatatctaggatggcgcttagtgtcctgctaaaaagatcgcaggacgtgctccaccgttatatcgaggacgagagactgtctggcaaatgtcccttgccacgccagcaggtgaccgaaattatttttgttctcaaagccgtgagcaccctgatagactcactcaagaagacacagcctgaaaatgcgtgtatctccctgtttggaattccaccttatttctag

SEQ ID NO: 98526 - DNA, 5027 bp, Artificial Sequence
  derived and/or modified sequence
atgtcaggcacctcgtcgccggaggctgtcaaaaagttactggagaacatgcagagcgacttacgagccctgtccctcgagtgtaagaagaagtttccccctgtcaaggaggcagctgagagcggtatcattaaggttaaaactattgccgctaggaacacagaaatccttgccgctctgaaagagaactcatcagaggtagtccagccatttctgatgggctgcggcactaaggaacctaagattactcagttgtgtctcgccgcaatccagaggttgatgagccatgaggtagtttcagaaacggccgcaggaaacattattaacatgctctggcagctgatggagaactccctcgaggagctaaaattattacaaaccgtgctggttcttcttacaaccaatacagtggtccatgatgaggctctcagcaaggccattgtcctgtgttttcggcttcacttcaccaaggataatatcacgaacaacactgctgccgctaccgtgcgtcaggtcgtgaccgtggtgtttgagcgtatggtcgccgaggatgaaagacaccgcgacataattgagcagccagtgcttgtacagggtaattctaatcgcagatccgtgagtaccttgaagccttgcgctaaagacgcctacatgcttttccaagatctgtgtcagctggtgaacgccgatgcgccttactggctggtgggcatgaccgagatgactcgcaccttcggactggagttgctcgagtcagtactcaatgatttcccgcaggtttttctgcagcaccaagagttttcctttctcctgaaggagagggtgtgccccctggtgattaaattattctcacctaatatcaaatttcgccagggcagctccactagctccagcccagcacctgtggaaaaaccctactttccaatttgcatgaggctgctgcgggtcgtatccgtgctgatcaagcagttctactctctcctggtcaccgagtgcgaaatttttctgagcctgctagtgaaattcttagatgctgacaagccgcaatggctgagggctgtggctgtggagagcattcatagattctgcgtgcagccgcagcttcttcgtagcttttgtcagtcttacgatatgaagcagcacagtactaaggtttttcgggacatcgtcaacgcccttggatctttcattcagtccctctttcttgtcccccctaccggcaatcctgccacctcgaaccaggctggcaacaacaatctgggcggaagcgtgtcagcaccagcgaacagtgggatggtcggtattggtggaggagtgaccctgctgccggcttttgaatacagggggacttggatccccatactgactatcactgtgcagggatccgctaaagctacctatctcgagatgcttgacaaagtggagcccccaaccattccagagggttacgctatgagcgtagccttccactgtttactagacctcgtccgtggtatcacgagcatgattgagggagagctgggtgagttggagactgagtgtcagacaacaacagaggagggatcctctcccacccagagcacggagcagcaggacttacaatctactagcgatcagatggacaaagaaattgtgtctcgagcggtgtgggaggagatggtaaacgcctgttggtgtggcctgttagccgctctgtctctcctgctagacgcctctaccgacgaagccgcaacagagaacatactgaaagctgaactgacgatggcagccttgtgcggcaggctgggtttagtcactagccgggacgcatttatcaccgctatctgtaagggctctctgcccccacactacgctttaacggtcctaaacactacgacagccgctactctctccaataaaagctacagcgtgcaggggcagtcagtgatgatgatctcaccctcctctgagagtcatcaacaggtggtcgctgtagggcagcctctggcagtccagcctcagggcactgtgatgctgacttctaagaacattcagtgcatgcgcactctattgaatctggctcattgccacggggctgtgctgggcacctcatggcaactggtcctagctacactgcagcacctggtgtggatactcggcttgaaacctagcagtggcggagccttgaaacctggtagagctgtcgaaggaccaagcactgtcctgacaacagctgttatgacagacctgccagttatctctaatatattgtccagactcttcgaaagttctcagtatcttgacgacgtgtctctgcatcatcttatcaatgccctctgcagcctctcattggaggcgatggacatggcctatggtaataacaaggagccatctctcttcgccgtagcaaaactactggagacgggcctggtcaatatgcacagaatagaaattctgtggcgccctctaacaggacatctactggaggtgtgtcagcacccgaacagcaggatgagagaatggggcgcagaggctctgacaagtcttattaaggccggacttaccttcaatcatgaccctcccctgtctcagaatcagaggctccagcttctgttactcaatccccttaaggaaatgtctaatattaaccaccccgacatcagactcaagcagttagaatgcgtgctccagatactccagagccagggtgacagcctcgggccaggctggcctctggtcctgggagtcatgggggcaattcggaatgatcagggtgagtccctgattagaaccgcctttcaatgcctgcaattggtggtgacagattttctacctaccatgccctgtacatgcctgcaaatagtagtagacgttgcaggctccttcgggctgcacaaccaggaattgaacatatcacttaccagcatcggacttctctggaacatttcagactacttttttcagagaggagagacgattgagaaagagctaaacaaggaagaagccgctcagcaaaaacaggctgaagagaaaggcgtggttttgaatcggccatttcacccggctcccccattcgactgcctgtggctgtgcctgtacgcaaagctcggtgaattgtgcgtggaccctcgtccagctgtcagaaagtctgcaggtcagacactcttcagcactatcggagctcacggaaccctgttgcagcacagcacttggcacaccgtaatatggaaagttcttttccatctgctagatcgcgtgagggaatccagtactactgccgataaagagaagattgagtccggaggcggtaacatattgatccatcatagtcgggacaccgctgagaaacagtgggccgagacttgggtcctgactctggcaggcgtcgctaggatcttcaataccagaaggtatctcctgcaacctctaggcgatttttctagggcatgggatgtactgctggatcacattcagtctgctgccttgtcaaaaaataatgaggttagtttagctgctctgaagtctttccaagagattttgcagattgtctcacctgtgcgggactccgacaaacccgagacacctcctgtggtcaacgtccctgtgcccgtcctgatcgggccaataagcggcatgtcacggcctttcgtgcgcactgactcaatcggggagaaacttggcaggtactcctcctcagaaccccctattgtgaccgatgagctggaagatctaaatctgtggtgggccgcttggaatacttggtaccggatcggctccgagtcaacaaagcccccaattacgtttgacaaactgaccttcattccaagccagccattcctgacggcacttatccagatattccctgccctgtatcagcatatcaagaccggcttcaatatggatgaccttcagaaactgggagtcattctgcatagcgccatttctgtgcccatcagtagtgacgcgtcccctttcattctgccctcctacaccgaggcagtccttacctcgcttcaagaggctgtgctcacagccctagacgttctgcaaaaagcaatttgcgtcggccctgaaaacatgcaaataatgtaccccgcaatcttcgaccagctcctcgccttcgtggaattttcttgcaagccccctcaatacggacagctggaaactaagcacatagctaatgccaagtataaccaaattcagctgtttgcgccagctgagtgggtggctctcaattacgttccgtttgccgaaaggagtcttgaggtcgtggtggatctgtatcagaagacagcctgccataaggctgttgtcaatgagaaggttctccagaatatcatcaaaactctgagggttcctctaagtctgaagtactcgtgcccatccgaatctacttggaagctcgctgtctccagcctgctgagagttttgtctatcgggctcccggtagccaggcaacacgcgtcttccggaaagtttgactccatgtggccagagctggcaaacacatttgaagactttctgtttacaaaaagcatccctcccgacaatttaagcatacaggagttccagagaaacgagaatattgacgtggaggtcgttcagctcatctcgaatgaaatcctaccatacgctaactttattcctaaggaatttgtggggcaaatcatgacgatgctgaataaaggctccattcatagtcaatcatccagcttcacagaggccgagatcgacatccgccttcgggaggaattctctaagatgtgcttcgagactctcctccagttttcgttttccaacaaggtcaccacaccacaagaaggttatatatctagaatggcactctctgtactcctcaaacgaagccaggatgttttgcaccgatacatcgaagatgaacgcctgtccgggaagtgcccattgcctagacaacaagtcactgagattattttcgttttgaaagcagtctctacactaatcgacagcctcaaaaagactcagcccgaaaatgcgtgcatatcccttttcggaatccccccatatttcta

SEQ ID NO: 98527 - DNA, 2043 bp, Artificial Sequence
  derived and/or modified sequence
atgggctgcggcaccaaggagcccaagatcacccagctgtgcctggccgccatccagagactgatgagccacgaggtggtgagcgagaccgccgccggcaacatcatcaacatgctgtggcagctgatggagaacagcctggaggagctgaagctgctgcagaccgtgctggtgctgctgaccaccaacaccgtggtgcacgacgaggccctgagcaaggccatcgtgctgtgcttcagactgcacttcaccaaggacaacatcaccaacaacaccgccgccgccaccgtgagacaggtggtgaccgtggtgttcgagagaatggtggccgaggacgagagacacagagacatcatcgagcagcccgtgctggtgcagggcaacagcaacagaagaagcgtgagcaccctgaagccctgcgccaaggacgcctacatgctgttccaggacctgtgccagctggtgaacgccgacgccccctactggctggtgggcatgaccgagatgaccagaaccttcggcctggagctgctggagagcgtgctgaacgacttcccccaggtgttcctgcagcaccaggagttcagcttcctgctgaaggagagagtgtgccccctggtgatcaagctgttcagccccaacatcaagttcagacagggcagcagcaccagcagcagccccgcccccgtggagaagccctacttccccatctgcatgagactgctgagagtggtgagcgtgctgatcaagcagttctacagcctgctggtgaccgagtgcgagatcttcctgagcctgctggtgaagttcctggacgccgacaagccccagtggctgagagccgtggccgtggagagcatccacagattctgcgtgcagccccagctgctgagaagcttctgccagagctacgacatgaagcagcacagcaccaaggtgttcagagacatcgtgaacgccctgggcagcttcatccagagcctgttcctggtgccccccaccggcaaccccgccaccagcaaccaggccggcaacaacaacctgggcggcagcgtgagcgcccccgccaacagcggcatggtgggcatcggcggcggcgtgaccctgctgcccgccttcgagtacagaggcacctggatccccatcctgaccatcaccgtgcagggcagcgccaaggccacctacctggagatgctggacaaggtggagccccccaccatccccgagggctacgccatgagcgtggccttccactgcctgctggacctggtgagaggcatcaccagcatgatcgagggcgagctgggcgagctggagaccgagtgccagaccaccaccgaggagggcagcagccccacccagagcaccgagcagcaggacctgcagagcaccagcgaccagatggacaaggagatcgtgagcagagccgtgtgggaggagatggtgaacgcctgctggtgcggcctgctggccgccctgagcctgctgctggacgccagcaccgacgaggccgccaccgagaacatcctgaaggccgagctgaccatggccgccctgtgcggcagactgggcctggtgaccagcagagacgccttcatcaccgccatctgcaagggcagcctgcccccccactacgccctgaccgtgctgaacaccaccaccgccgccaccctgagcaacaagagctacagcgtgcagggccagagcgtgatgatgatcagccccagcagcgagagccaccagcaggtggtggccgtgggccagcccctggccgtgcagccccagggcaccgtgatgctgaccagcaagaacatccagtgcatgagaaccctgctgaacctggcccactgccacggcgccgtgctgggcaccagctggcagctggtgctggccaccctgcagcacctggtgtggatcctgggcctgaagcccagcagcggcggcgccctgaagcccggcagagccgtggagggccccagcaccgtgcccttcaaggacttcatgcagccccccgccagcagagtgcagaacggcgagagctag

SEQ ID NO: 98528 - DNA, 2043 bp, Artificial Sequence
  derived and/or modified sequence
atggggtgcggaaccaaagaacccaagataacccagttatgtttggcagccattcaacgcctcatgtctcacgaggtggtttctgagacagccgccggtaacatcatcaacatgttgtggcagctgatggaaaacagcctggaggaacttaaactgctacaaacagtccttgtactcctgactacaaatacagttgttcacgacgaggctctttctaaggcaatcgtgttgtgctttcgattgcacttcacgaaggacaacatcaccaacaacacagcggccgctactgtacggcaagttgtgaccgtggtattcgagcggatggtggccgaggatgaaagacacagagacatcatcgagcagccagtacttgttcaaggaaatagcaacagaagatctgtgtctacactgaaaccttgtgcaaaggatgcttatatgctctttcaggacctgtgccagctagtcaacgccgacgccccctattggctggtcggcatgaccgaaatgactagaacgttcggcctagagctactggagtcagttctcaatgacttccctcaggtgttcttgcagcaccaggaattctcctttctgctgaaagaacgagtgtgtcccctggtgatcaaacttttctcccccaacatcaagttcaggcaggggagtagcacctccagctcacccgcacccgtggagaagccatacttccccatctgcatgcggctgctcagggtggtcagcgtcttaattaaacagttctattctcttcttgttactgaatgtgagattttcctcagcctcctggtgaagtttctcgacgccgataaaccccaatggctgcgagctgtagcagtagaaagcatccacagattctgtgtgcagcctcagctactgagatctttttgtcagagctacgatatgaagcagcactcaaccaaagtgtttagggacattgtgaacgccttaggatcattcatccaaagcctcttccttgtgccgcccactggcaatcctgcgacaagtaaccaggctggtaacaataatctcgggggctctgtttccgctccggccaacagcggaatggtgggtatcggcggtggagtgacgttactaccggccttcgaatatcggggcacgtggattcccattctgacaataaccgtgcaaggttcagcaaaagctacctatttggagatgctggacaaggttgaacctcctacaattcctgagggctacgcaatgtcagtggcatttcattgtttacttgatctggtccgtggaatcacatccatgatcgagggcgagttgggtgaactagagaccgagtgtcagaccacaacagaggaagggtcttcccccacacagagcaccgaacaacaggatctacagtccacatccgatcagatggacaaggaaattgtttcacgggccgtatgggaagagatggtgaacgcctgctggtgcggcctcctcgccgccctaagcctcctgctggacgcctcgacggatgaagcggcgaccgaaaatatccttaaggctgagttaacaatggccgctctctgtgggcggttgggcctggtgacctccagagacgcatttatcaccgccatctgtaaggggtccctgcctccccactatgctctcacagtcctgaacactacgaccgccgctaccctgtccaacaaatcctacagtgtccaggggcagtcagtcatgatgatatccccaagttctgaatcccatcaacaagtcgtcgcggtcggccaaccgcttgccgtccagcctcagggcacggttatgctgactagcaagaatattcagtgtatgagaacactacttaacctggctcattgccacggggctgttctaggaacatcgtggcagttagtgctggccacccttcaacacctggtttggatcctgggattgaaaccttcctctggtggcgccctgaagccagggcgcgcggtggaaggtccatccactgtaccctttaaggactttatgcaaccacccgcttcacgtgtgcagaatggagaaagctag

SEQ ID NO: 98529 - DNA, 2043 bp, Artificial Sequence
  derived and/or modified sequence
atgggctgcggcaccaaggagcccaagatcacccagctgtgcctggccgccatccagaggctgatgagccatgaggtggtgtctgaaacagctgctggcaacatcatcaacatgctgtggcagctgatggagaacagcctggaggagctgaagctgctgcagacagtgctggtgctgctgaccaccaacacagtggtgcatgatgaggccctgagcaaggccatcgtgctgtgcttccggctgcacttcaccaaggacaacatcaccaacaacacagctgctgccaccgtgcggcaggtggtgacagtggtgtttgagaggatggtggctgaagatgagcggcaccgggacatcatcgagcagcctgtgctggtgcagggcaacagcaacagaagatctgtgtccaccctgaagccctgtgccaaggatgcctacatgctgttccaggacctgtgccagctggtgaatgctgatgccccctactggctggtgggcatgacagagatgaccaggaccttcggcctggagctgctggagagcgtgctgaatgacttcccccaggtgttcctgcagcaccaggagttctccttcctgctgaaggagcgggtgtgccccctggtgatcaagctgttcagccccaacatcaagttccggcagggcagcagcaccagcagcagccctgcccctgtggagaagccctacttccccatctgcatgaggctgctgcgggtggtgtctgtgctgatcaagcagttctacagcctgctggtgacagaatgtgagatcttcctgagcctgctggtgaagttcctggatgctgacaagccccagtggctgcgggctgtggccgtggagagcatccaccgcttctgtgtgcagccccagctgctgcgctccttctgccagagctatgacatgaagcagcacagcaccaaggtgttccgggacatcgtgaatgccctgggcagcttcatccagagcctcttcctggtgccccccaccggcaacccagccaccagcaaccaggccggcaacaacaacctgggcggctctgtgtctgccccagccaacagcggcatggtgggcattggaggcggcgtgaccctgctgcctgcctttgagtaccggggcacctggatccccatcctgaccatcaccgtgcagggcagcgccaaggccacctacctggagatgctggacaaggtggagccccccaccatccctgagggctacgccatgtctgtggccttccactgcctgctggacctggtgcggggcatcacctccatgattgaaggagagctgggggagctggagacagagtgccagaccaccacagaggagggcagcagccccacccagagcacagagcagcaggacctgcagagcaccagtgaccagatggacaaggagatcgtgtccagagctgtgtgggaggagatggtgaatgcctgctggtgtggcctgctggccgccctgagcctgctgctggatgccagcacagatgaggccgccacagagaacatcctgaaggccgagctgaccatggccgccctgtgtggccgcctgggcctggtgaccagcagagatgccttcatcacagccatctgcaagggcagcctgcccccccactacgccctgactgtgctgaacaccaccacagctgccaccctgagcaacaagagctacagcgtgcagggccagagcgtgatgatgatcagccccagcagcgagagccaccagcaggtggtggccgtgggccagcccctggccgtgcagccccagggcaccgtgatgctgaccagcaagaacatccagtgcatgaggaccctgctgaacctggcccactgccacggggctgtgctgggcacctcctggcagctggtgctggccaccctgcagcacctggtgtggatcctgggcctgaagcccagcagcggcggggccctgaagccaggccgggctgtggagggccccagcacagtgcccttcaaggacttcatgcagcccccagccagccgggtgcagaatggagagagctag

SEQ ID NO: 98530 - DNA, 2043 bp, Artificial Sequence
  derived and/or modified sequence
atgggctgcggcaccaaggagcccaagatcacccagctgtgcctggccgcaatccagaggctgatgagccacgaagttgtctctgagacggctgctggtaacattatcaacatgctgtggcaactcatggagaatagcctggaggaattgaaactgctgcagactgtgctggttttgctgacaaccaataccgtggtgcacgacgaagcgctctcaaaagcaatcgtgctgtgctttcgtctgcactttaccaaggacaacatcacaaataatactgctgctgccaccgttcggcaggtggtaaccgttgtgtttgaacgcatggtggccgaagacgaacggcatagggatataatcgaacagcccgtcctggtgcagggcaactccaatcgccgcagcgtgtcaactctgaaaccatgcgcaaaggatgcctatatgctttttcaggatctttgccagctggtcaacgcagacgccccatactggcttgtgggcatgaccgaaatgacccgaactttcggattagaactgctagaatccgtcttgaacgattttcctcaagttttcctccagcatcaagaattctccttcctcctgaaggagcgggtttgtcctctggtcattaagctgttctcacctaacatcaaattccgacaaggaagcagtacttcttcgtctcccgcaccagttgaaaaaccctacttccccatctgcatgcgcctcctgagagtggtgtccgtgctcattaaacagttctattctctcttagtgaccgagtgtgagattttcttgagcctgctcgtaaagttcctggatgccgacaaacctcagtggctacgggcagtggcagttgagtccatacaccggttttgcgtccagccccaattattgcgaagcttctgtcagtcatatgacatgaagcagcacagtacaaaagtcttccgagatattgtcaatgccctcggaagtttcatccagtcactgtttctggtcccaccaactggaaaccctgcaacctctaatcaggccggaaacaacaacctggggggcagtgtttcagctccagccaactccgggatggtgggcattggtggaggggtgaccctgctcccagcctttgagtaccggggcacttggataccaattttgactatcaccgtgcagggcagcgccaaggcaacctatctggagatgctggataaggtcgaaccacctaccatacctgaaggatacgccatgagtgtggccttccactgtctccttgacctggttagaggaatcacgtccatgatagaaggagagcttggggaactggagactgaatgccaaacaaccacggaggagggctcgtcgccaacccagtcaacagaacagcaggacttgcagtccaccagcgaccagatggacaaggaaatcgtttctagagccgtgtgggaggaaatggtgaatgcctgttggtgcggtctcctcgccgccctgtctctcttattggacgcctccaccgacgaagctgctaccgaaaatatcctcaaagctgagctcaccatggcagccttgtgcggtcggctaggccttgttacttctcgagacgcattcattaccgccatatgtaaaggcagcctgccgccccactacgcactgactgttctgaataccacaacagccgccacactctcaaataaatcttactctgtgcaggggcagtcagtgatgatgatttcacctagctccgagagccaccaacaggtagtggcagttggacagcccctcgccgtgcaaccacagggcaccgtgatgctgacatcaaagaacatacagtgtatgaggacgctgctgaatcttgcccactgccacggcgctgttcttggcacttcttggcagctcgttctggcaacattgcagcatctggtgtggattctgggcctaaaaccatccagcggcggcgcacttaaaccagggagagctgttgagggcccaagtactgtgccttttaaggatttcatgcagccacccgcctcacgggtccagaatggagagtcctag

SEQ ID NO: 98531 - DNA, 4046 bp, Artificial Sequence
  derived and/or modified sequence
gactcggctaatggcgtcggcgagtcttaggggcctggggagctggcgctgaagcttcttgccaggttggctggtgacacccggtgtggctgggccccgcggcagcggagggacctgcccgccttgtgggtttctcggccagagtcggcggagcctagcgggacggtgcgactgcggggggcgcctccgagaaaagccagaggtgttgcggggaagctgctgggggacgctcgagcaggctccgggttcgcagcccagggcccaagaagcgggctgctgaaggaccagagacaccgggagggagctgcctgtggccctaaggagctgaccgtgccagagcttgtttgtacctctcggaaattggctgggaccttggaggatcatgtccggcaccagcagccccgaggcggtgaagaagctgctggagaatatgcagagcgacttgcgcgccttgtcactggagtgcaagaagaaattcccacctgtcaaagaggctgctgaatcaggaataataaaagttaaaacaattgctgcacgaaacactgaaattttggcagcactgaaagagaacagctcagaggttgtacagccttttttaatgggttgtggaaccaaggaaccgaagatcactcagctatgtttggctgctattcagagactcatgtcacatgaagtcgtgtctgagactgcagctggaaatataattaacatgctttggcagctaatggagaatagtcttgaagaacttaagctacttcaaacagttcttgttcttttaacaaccaatacagtagttcatgatgaggcactttctaaggcaatcgttctttgttttcgactacacttcacaaaagataatattacaaataatacagctgctgctacagtgcgacaagttgttactgttgtttttgagaggatggttgctgaagatgaacgacacagagatattatagaacaaccagtactggtacaaggaaatagtaacagaagatctgtcagtaccctcaaaccttgtgctaaagatgcatatatgcttttccaggatctttgtcagttggttaatgctgatgctccttattggctagtgggcatgacagaaatgactcggacgtttggcctcgaattacttgagtcagtcctcaatgattttccgcaggtctttttacaacaccaagaatttagtttcctcctcaaagaaagggtatgtcctcttgtgataaagctcttttctccaaatataaagttcagacaaggttccagcacctcatcttctccagcaccagttgaaaaaccatattttcctatctgcatgcgtttgctgagagtagtatctgttctgattaagcagttttacagtcttttggtaactgaatgtgagatatttctgtcacttctggtgaaatttctggatgcagataaaccacagtggctacgagctgttgcggtggaatcaatacacagattctgtgtgcagcctcaactattaaggtcattttgtcagtcctatgatatgaaacagcattctaccaaggtttttcgtgatattgtaaatgcactgggatcttttatacagtccttgtttcttgtcccccctactggaaatcctgcaacaagcaaccaagctggaaacaataatttaggtggctcagtctcagcaccagctaactcaggaatggtggggattggtggaggtgttactttgctaccagcatttgaatataggggaacctggatacctattctgacaatcacagttcaaggcagtgctaaagccacctacttagaaatgttggacaaagttgagcctccaactatacctgaaggttacgccatgtctgtggcattccattgtttgctagaccttgttcgtggaatcacaagtatgattgaaggagagctaggagagcttgaaacagaatgtcaaaccaccactgaagaaggttcttcaccaacacagtcgacagaacagcaggatttacagtcaacatcagaccaaatggataaggaaattgttagtagggctgtttgggaagaaatggtgaatgcctgctggtgtggtcttcttgctgcactctcactccttcttgatgccagcacagatgaagctgccactgagaatattttaaaagctgaactgactatggctgctctttgtggaagactgggccttgtaacttcaagagatgcctttataactgcaatatgcaaaggttccctgcctccccattatgctcttactgtattgaataccaccactgcagctacactttccaacaaatcatattccgttcagggccaaagtgttatgatgataagtccatcaagtgaatctcaccaacaagttgtggcagtgggtcaacctttagcagtccagcctcaagggacagtaatgctgacttccaaaaatatccagtgtatgaggactttacttaacttggcgcattgccatggggctgttcttggaacatcatggcaacttgtcttggcaactcttcagcatcttgtgtggattctgggattaaagcctagtagtggcggtgccttgaaacctgggagagctgtagaaggacccagtacagttccttttaaggatttcatgcagccaccagcatccagagttcaaaatggagaatcttgaccggctacaatatatttgaaagcaggaagatagtctaaaaaatgtttgctcctaattgagtcttctgtgagaaggacatttcttactgcagataattcttggcagctgttgttggcctcctttaaattctacttacctgagttcagtaattcatattacaggcttgcacatcaacaaaggctcctgaatgaacagcagtgtaaggctttaataaattaaactgatgggagggataattaacactacagtatacatgctaccatatctccagttggtgatttaaagtgagcttatgtacagtttgtggtgtatgtgttaatgatgtactttttaaaaagaaagaagagatatttcaattcagtcagatttattagtctggtgtttttgcaccctttttcaagtacaaaatcgtactagaattttatgcaagatggtactgtaacattccatattatctataaccagcctttgttaacaaagggaactgatatacttgtgtgtataataaatggtacagttctgtataaaatagtgcatttatttaaattttaaaagtattgataatgttaaatgcttaaagctctatttattattaatacaaaattgtttgcttacatttttacttataatttgccttcatatgtggcggataagctcaccatatgatcatgcagttagcttcatgcttattttaaatgtattattagtgaccattaaacatctgaccagtaaggtcatgtgaacacagcagcaaatagtttatgatttgctgattttggagctttgaaatataggttcttaatacattgatacatattgtagcactatgacttcatcatacctcatttctttaaacagctctccaagctttcactgaagtctgtctgttttttatattggctgtctggattttaaagacttttcatattttatatttctactgattttgtttcccctaacaacatttgtcactgtctttgaattatgacccaggcaagatgatttcagattttctaaaatcttgcctgtgaggttttgttcatatcagtgcttcattttgtaatgtcttctcaagaaaaatacctatgttaactcacaagtataaaatatgtgtgtattataaaacaatgaaaagtgtatttttggagatagtcaagcatttagaagtgcagtgaacttgctgtcacggagtaaaatgctaattatgtttcactttcctagcctagtgaaaaagaaaagtgctcttgagtacaataccttaattatttcttaaaatactgactttgacctagctcactgtattttttatttaatggattatggattacagtatttttcttctgagttaaattttcataatttatgtgaagacacaaagatgtttaaaacaatgattattcataag

SEQ ID NO: 98532 - DNA, 2043 bp, Artificial Sequence
  derived and/or modified sequence
atgggttgtggtaccaaggagccaaaaattacgcagctttgcctcgctgcgattcaaagactcatgtcacacgaagtggtgtcagagactgccgctgggaatattatcaatatgctgtggcaactgatggaaaattcattggaggaactcaagttgttacaaacagtgctggtgctgcttaccaccaacactgttgtgcacgacgaggcacttagtaaggccatagtgctttgtttccggctgcatttcacaaaagacaacataacaaataacactgccgctgcgaccgtccgccaagtggtgaccgtcgtgttcgaacgcatggttgctgaagacgaaaggcacagggatattatagagcaacctgtccttgtgcaggggaattccaataggaggtcagtcagcactctgaagccttgtgcaaaggacgcgtacatgctgtttcaggatctttgtcagttggtgaatgcagacgcaccctactggttggtggggatgaccgaaatgactaggacattcggactcgagctcctcgagagcgttctgaatgacttccctcaggtttttcttcagcaccaggaatttagcttcctgctgaaggagcgggtctgcccattagtgattaagttattttcaccgaacatcaagttcagacagggcagctctacctcgtcctccccagctccagtggagaaaccctattttccaatatgcatgagattgttacgcgtggtcagcgtgctcataaaacagttctattctttgttggtgaccgagtgtgagatatttttgagcctgctagtgaaatttctcgacgccgacaaaccgcagtggttgagggctgttgccgtcgaatccatacaccggttctgtgtccagcctcagctactgcggagcttttgtcagtcctatgacatgaagcagcattctaccaaggtatttcgggatatcgtgaacgcgctcgggtcctttatacagtcactctttttggtgccccctacaggcaaccccgcaacaagcaaccaagcgggaaacaataatctgggtgggagcgtcagtgcaccggcaaacagcggcatggtcggaatcggaggcggagttaccttacttcctgcttttgaatacagaggtacctggatccctattctgacgataacagttcaaggatccgcaaaagctacttatctcgagatgctggataaagtagagcctcctactattcccgaaggctacgccatgagcgtcgcctttcactgtctactggacctggtgcgtggtattaccagcatgatcgagggtgagttaggagaactcgagaccgagtgtcaaaccacaaccgaggaggggtccagccctacccagtccactgagcaacaggacctgcagagtacttcagaccagatggacaaagagattgttagcagagccgtgtgggaagagatggtgaacgcttgctggtgtggacttctggcagccctgtctctcctgctggacgcctcaacggacgaagcagccacggagaatattctcaaagcagagctcaccatggctgcgctgtgcgggagactggggctggtgacctcccgggatgctttcattactgcgatctgcaaggggagcctaccacctcattatgccctcacagttctaaacactactaccgcggctacattgtccaataagtcctactccgtgcagggccagagcgtgatgatgattagtccctcttcagagtcgcaccagcaagtcgtcgccgttgggcagcctctcgccgttcagcctcagggcacagttatgcttacaagtaagaacattcagtgcatgcgcaccctgctgaatttggcccattgtcacggggctgtgctcggcactagctggcagctcgtgttggccaccctccaacacctggtttggattctcggtctcaagccttcatctggaggtgccctgaagccaggaagagccgtagaaggtccctcgacagtgccattcaaggacttcatgcagccgcctgcttctagagtgcagaatggagaaagctag

SEQ ID NO: 98533 - protein, 485 aa, Artificial Sequence
  derived and/or modified sequence
MRIPVDPSTSRRFSPPSSSLQPGKMSDVSPVVAAQQQQQQQQQQQQQQQQQQQQQQQEAAAAAAAAAAAAAAAAAVPRLRPPHDNRTMVEIIADHPAELVRTDSPNFLCSVLPSHWRCNKTLPVAFKVVALGEVPDGTVVTVMAGNDENYSAELRNASAVMKNQVARFNDLRFVGRSGRGKSFTLTITVFTNPPQVATYHRAIKVTVDGPREPRRHRQKLDDSKPSLFSDRLSDLGRIPHPSMRVGVPPQNPRPSLNSAPSPFNPQGQSQITDPRQAQSSPPWSYDQSYPSYLSQMTSPSIHSTTPLSSTRGTGLPAITDVPRRISGASELGPFSDPRQFPSISSLTESRFSNPRMHYPATFTYTPPVTSGMSLGMSATTHYHTYLPPPYPGSSQSQSGPFQTSSTPYLYYGTSSGSYQFPMVPGGDRSPSRMLPPCTTTSNGSTLLNPNLPNQNDGVDADGSHSSSPTVLNSSGRMDESVWRPY

SEQ ID NO: 98534 - DNA, 1458 bp, Artificial Sequence
  derived and/or modified sequence
atgagaatccccgtggaccccagcaccagcagaagattcagcccccccagcagcagcctgcagcccggcaagatgagcgacgtgagccccgtggtggccgcccagcagcagcagcagcagcagcagcagcagcagcagcagcagcagcagcagcagcagcagcagcagcaggaggccgccgccgccgccgccgccgccgccgccgccgccgccgccgccgccgccgtgcccagactgagacccccccacgacaacagaaccatggtggagatcatcgccgaccaccccgccgagctggtgagaaccgacagccccaacttcctgtgcagcgtgctgcccagccactggagatgcaacaagaccctgcccgtggccttcaaggtggtggccctgggcgaggtgcccgacggcaccgtggtgaccgtgatggccggcaacgacgagaactacagcgccgagctgagaaacgccagcgccgtgatgaagaaccaggtggccagattcaacgacctgagattcgtgggcagaagcggcagaggcaagagcttcaccctgaccatcaccgtgttcaccaaccccccccaggtggccacctaccacagagccatcaaggtgaccgtggacggccccagagagcccagaagacacagacagaagctggacgacagcaagcccagcctgttcagcgacagactgagcgacctgggcagaatcccccaccccagcatgagagtgggcgtgcccccccagaaccccagacccagcctgaacagcgcccccagccccttcaacccccagggccagagccagatcaccgaccccagacaggcccagagcagccccccctggagctacgaccagagctaccccagctacctgagccagatgaccagccccagcatccacagcaccacccccctgagcagcaccagaggcaccggcctgcccgccatcaccgacgtgcccagaagaatcagcggcgccagcgagctgggccccttcagcgaccccagacagttccccagcatcagcagcctgaccgagagcagattcagcaaccccagaatgcactaccccgccaccttcacctacaccccccccgtgaccagcggcatgagcctgggcatgagcgccaccacccactaccacacctacctgccccccccctaccccggcagcagccagagccagagcggccccttccagaccagcagcaccccctacctgtactacggcaccagcagcggcagctaccagttccccatggtgcccggcggcgacagaagccccagcagaatgctgcccccctgcaccaccaccagcaacggcagcaccctgctgaaccccaacctgcccaaccagaacgacggcgtggacgccgacggcagccacagcagcagccccaccgtgctgaacagcagcggcagaatggacgagagcgtgtggagaccctactag

SEQ ID NO: 98535 - DNA, 1458 bp, Artificial Sequence
  derived and/or modified sequence
atgcgcatccccgttgatccctctacctcacggcgcttctccccaccaagtagctcactccagcctggcaaaatgtcagatgtgagcccggtggtcgcagcgcagcagcaacaacagcagcagcagcagcagcaacagcagcagcagcaacagcagcagcagcaacagcaggaggcagcagctgccgccgctgctgcggcagccgcagcagcagccgccgcagctgtaccaaggttacgcccaccccacgataaccgtaccatggtggagattattgccgaccaccccgctgagctggtccggacagactcccccaacttcctatgttctgtgctgcctagtcactggcgatgtaacaagactctgccggtggctttcaaagtggtcgcgctgggcgaagtgccagacggaactgttgtgaccgtgatggccggcaatgacgagaactacagtgcagagcttagaaatgcctccgccgtgatgaagaaccaggtggcaaggttcaatgaccttcgcttcgtgggaaggagtggtaggggtaaatcctttacgctgactattaccgtgtttactaatcctccgcaagtggccacctatcaccgggccatcaaggtgactgtcgatgggcccagggagcctcgacggcaccggcagaaattggacgactccaaacccagtctattcagcgacaggttatctgacctcggccgcattccacatcccagcatgagggtaggcgtccctccccaaaatccgaggccatcactgaattcagctccaagtcctttcaatccccagggccagtcgcagatcactgatcctaggcaggcccagtccagtcccccgtggagctatgatcagtcttacccatcatacctgagccagatgacaagtccaagcatacactctacaacccctctcagttccactaggggaacaggcctccccgctataactgacgttccccggagaatcagtggcgcctccgagctagggcctttttcagatccaagacagttcccaagcatctcaagcctgaccgaatccagattcagcaatccccgcatgcattatcccgctacatttacctatacacctcccgttacaagcgggatgtctctgggtatgtccgccactacgcactatcacacctatctccccccaccctaccccggaagctctcagtcacagagcgggccgttccagacttcaagtaccccatacttgtattacgggacttcttctggaagctatcaatttccaatggtccctggtggggaccgttctccgtcccggatgctgcccccatgtaccaccaccagcaacgggtctaccctcctcaatccaaaccttcccaatcagaacgatggagttgatgctgacgggtcacactcttcttctcctaccgtgcttaacagttctgggcggatggatgaatccgtgtggcggccatactag

SEQ ID NO: 98536 - DNA, 1458 bp, Artificial Sequence
  derived and/or modified sequence
atgagaattcctgtggaccccagcaccagccgccgcttcagcccccccagcagcagcctgcagcccgggaagatgtctgatgtgtcccctgtggtggccgcccagcagcagcagcagcagcagcagcagcagcagcagcagcagcagcagcagcagcagcagcagcagcaggaggccgctgctgctgctgctgctgctgctgctgctgctgctgctgctgctgctgtgccccggctgcggccccctcatgacaacagaaccatggtggagatcatcgctgaccaccctgctgagctggtgaggacagacagccccaacttcctgtgcagcgtgctgcccagccactggcgctgcaacaagaccctgcctgtggccttcaaggtggtggccctgggggaggtgcctgatggcaccgtggtgacagtgatggctggaaatgatgagaactacagcgctgagctgagaaatgccagcgctgtgatgaagaaccaggtggcccgcttcaatgacctgcgctttgtgggccgcagcggccggggcaagagcttcaccctgaccatcaccgtcttcaccaaccccccccaggtggccacctaccaccgggccatcaaggtgacagtggatggcccccgggagccccggcggcaccggcagaagctggatgacagcaagcccagcctcttcagtgaccggctgagtgacctgggccgcatcccccaccccagcatgagggtgggcgtgcccccccagaacccccggcccagcctgaacagcgcccccagccccttcaacccccagggccagagccagatcacagacccccggcaggcccagagcagccccccctggagctatgaccagagctaccccagctacctgagccagatgaccagccccagcatccacagcaccacccccctgagcagcacccggggcaccggcctgcctgccatcacagatgtgccccggcgcatcagcggggccagcgagctgggccccttcagtgacccccggcagttccccagcatcagcagcctgacagagagccgcttcagcaaccccaggatgcactacccagccaccttcacctacaccccacctgtgaccagcggcatgagcctgggcatgtctgccaccacccactaccacacctacctgcccccaccctacccaggcagcagccagagccagagcggccccttccagaccagcagcaccccctacctgtactacggcaccagcagcggcagctaccagttccccatggtgcctggaggagacaggagccccagcaggatgctgcccccctgcaccaccaccagcaatggcagcaccctgctgaaccccaacctgcccaaccagaatgatggagtggatgctgatggcagccacagcagcagccccaccgtgctgaacagcagcggccgcatggatgagagcgtgtggaggccctactag

SEQ ID NO: 98537 - DNA, 1458 bp, Artificial Sequence
  derived and/or modified sequence
atgcggatccccgtggaccccagcaccagccggcggttcagccccccatccagctccctccagcccggtaagatgtcggatgtgtccccagtcgttgcagcccagcagcaacagcaacagcagcaacagcagcagcagcaacaacagcagcagcagcaacagcagcagcaggaggccgcggcagcagctgctgctgccgctgccgctgccgcagctgccgccgcagttccacgccttcggccccctcatgataatagaactatggtggagataatcgcagaccaccccgccgagctggtgagaactgatagtcctaactttctctgttcagtgctcccttcgcactggcggtgtaataagactctgcccgttgcattcaaagtggtagccctgggagaggtcccagatggcaccgtggtgacagtcatggctggcaacgatgagaattattctgccgagctgagaaatgcctccgcagttatgaaaaatcaggtcgcccgattcaatgatctgcggttcgtgggcaggtcaggtaggggaaaatcctttacactgactatcacagtgttcacaaacccaccccaggttgcaacataccatagggctattaaggtgacggtggacgggccccgggagccacgcagacaccgccagaaactagatgacagtaaacccagtctgttctcagatagattatccgatcttggacgaattccccacccttccatgcgagtaggggtcccaccccagaaccccaggcctagcctgaactctgcaccatcgcctttcaacccccagggtcagagccagattaccgaccctcggcaggcccagagctcacctccctggagctacgaccagtcatacccttcttatctgtctcagatgacgtctcccagcatacactcaaccactcccctctcttcgacacgaggcaccggcctcccagccattaccgatgtgcccaggcgcatctctggggcttctgagttgggtccattcagtgatccccgacagttccctagcatttcttccttgactgagagccggttctccaatccgaggatgcactaccccgctaccttcacctacactccacccgtgacaagcggaatgtcgctcggaatgagtgccaccacgcactatcacacttatttgcctccgccttaccccggcagttctcaatcccagagcggaccattccaaactagtagtacaccatacctgtactatgggactagctccgggagttaccagttccctatggtcccaggcggcgaccgctccccaagtcggatgttacccccctgtacaactacctcaaacggttctacattactgaatccgaacctgcccaaccagaacgatggtgtggacgccgacggcagccattcttcctctcccacagtgctgaactcttctgggcggatggatgagagcgtgtggaggccctactag

SEQ ID NO: 98538 - DNA, 1458 bp, Artificial Sequence
  derived and/or modified sequence
atgcgaatcccggtagacccttccacgtcaaggaggttctcccccccttccagcagtctgcagccgggaaaaatgtccgatgtttcaccggtggttgccgcacagcaacagcaacagcagcagcagcagcaacaacagcagcagcaacagcagcagcagcagcagcagcaggaagcagcagcagccgcagctgctgcggcagcagcagccgcagccgctgctgctgtgcctcggctgcggcctcctcacgacaaccggacaatggtggaaatcattgctgatcacccagccgagctggtcaggacggacagcccaaacttcctgtgctcggtactcccttcacactggcgctgtaacaaaacactgcccgtggcattcaaggttgtggcgctcggcgaggtcccagatgggacggtggtgacggtgatggcgggaaacgacgaaaattatagtgccgagctgaggaatgcttctgctgtcatgaagaatcaagtggctagatttaacgatttgaggtttgtgggtcggtcaggcaggggaaaatcgttcaccttaaccattactgtgttcaccaatcctcctcaggtggcgacatatcatcgggctatcaaagttacagtcgatggaccaagggagcctcgtcgacatagacagaagctcgacgattctaagccttcgctgttctccgacaggttgagcgacctgggaaggataccacacccaagtatgcgcgtgggagtgccccctcaaaatcctcgcccatcccttaatagcgcaccctccccctttaacccacaggggcaatcacagattactgaccccagacaggcccagtcttcacctccatggtcgtatgatcagtcctatccatcatacctcagccaaatgacatccccaagcatccattccaccacaccactttccagcactcggggtaccggcctccctgcaattacggacgtgccacgtcgtatctcaggcgcttccgagctaggccctttctcagaccctcggcagttcccatcgatctcaagcctgacggagtctcgcttcagtaatcccaggatgcactaccctgcaactttcacttatacaccacctgttacctctggaatgtcgctgggcatgagcgccacaacacactaccatacctatcttccaccaccctatccaggctcaagccagagccagagcggacctttccagacttcttcaactccatatttatactatgggacgtctagtggaagttaccagttccccatggtgccaggaggagatcgtagccctagccgaatgcttcccccatgtacaaccacgagtaatggctcaactttgctgaaccctaacctccccaatcagaacgatggcgttgacgccgacggatcacacagcagcagccctaccgtcctgaattccagcggaagaatggacgaaagcgtgtggcggccatattag

SEQ ID NO: 98539 - DNA, 5634 bp, Artificial Sequence
  derived and/or modified sequence
ggactccaactgggagggggcgccagcgcacccaggacgcggtgccccaagggaccccattccaagctgcaaactcaagtcccccgcctccccaggccaaacacacccccgcgcccgttcgcagctgccaccccgggtgttccaaagactccggcaaagatctgcgcctcccgggtctccctacccgccagcccgactgcgccgcatcgccagactctgttggcccatcagactccgcccggcagtcggcctcatcaaacttgatttctcacctcctcagccccatcacctccatcctctttccccccgtctcgccttcacccccccaatttcctccttgcccctcatttccaccctcctccccctcccccggccacttcgctaacttgtggctgttgtgatgcgtattcccgtagatccgagcaccagccggcgcttcagccccccctccagcagcctgcagcccggcaaaatgagcgacgtgagcccggtggtggctgcgcaacagcagcagcaacagcagcagcagcaacagcagcagcagcagcagcaacagcagcagcagcagcaggaggcggcggcggcggctgcggcggcggcggcggctgcggcggcggcagctgcagtgccccggttgcggccgccccacgacaaccgcaccatggtggagatcatcgccgaccacccggccgaactcgtccgcaccgacagccccaacttcctgtgctcggtgctgccctcgcactggcgctgcaacaagaccctgcccgtggccttcaaggtggtagccctcggagaggtaccagatgggactgtggttactgtcatggcgggtaacgatgaaaattattctgctgagctccggaatgcctctgctgttatgaaaaaccaagtagcaaggttcaacgatctgagatttgtgggccggagtggacgaggcaagagtttcaccttgaccataaccgtcttcacaaatcctccccaagtagctacctatcacagagcaattaaagttacagtagatggacctcgggaacccagaaggcacagacagaagcttgatgactctaaacctagtttgttctctgaccgcctcagtgatttagggcgcattcctcatcccagtatgagagtaggtgtcccgcctcagaacccacggccctccctgaactctgcaccaagtccttttaatccacaaggacagagtcagattacagaccccaggcaggcacagtcttccccgccgtggtcctatgaccagtcttacccctcctacctgagccagatgacgtccccgtccatccactctaccaccccgctgtcttccacacggggcactgggcttcctgccatcaccgatgtgcctaggcgcatttcaggtgcttcagaactgggccctttttcagaccccaggcagttcccaagcatttcatccctcactgagagccgcttctccaacccacgaatgcactatccagccacctttacttacaccccgccagtcacctcaggcatgtccctcggtatgtccgccaccactcactaccacacctacctgccaccaccctaccccggctcttcccaaagccagagtggacccttccagaccagcagcactccatatctctactatggcacttcgtcaggatcctatcagtttcccatggtgccggggggagaccggtctccttccagaatgcttccgccatgcaccaccacctcgaatggcagcacgctattaaatccaaatttgcctaaccagaatgatggtgttgacgctgatggaagccacagcagttccccaactgttttgaattctagtggcagaatggatgaatctgtttggcgaccatattgaaattcctcagcagtggcccagtggtatctgggggccacatcccacacgtatcaatatatacatatatagagagagtgcatatatatgtatatcgattagctatctacaaagtgcctattttttagaagatttttcattcactcactcagtcatgatcttgcagccataagagggtagatattgagaagcagaaggctcaagagagacaattgcaatcgagcttcagattgtttactatttaagatgtacttttacaaaggaacaaagaagggaaaaggtatttttgtttttgttgtttggtctgttatcatcaataacctgttcatatgccaattcagagaggtggactccaggttcaggagggagaagagcaaagccgcttcctctctgtgctttgaaacttcacaccctcacggtggcagctgtgtatggaccagtgccctccgcagacagctcacaaaaccagttgaggtgcactaaagggacatgaggtagaatggatgcttccatcacagtaccatcattcagaataactcttccaatttctgctttcagacatgctgcaggtcctcatctgaactgttgggttcgtttttttttttttttttcctgctccaagaaagtgacttcaaaaataactgatcaggatagattattttattttactttttaacactccttctccccttttcccactgaaccaaaaagaaatcccatccctaaaacctgccttctccttttatgcaaaactgaaaatggcaatacattattatagccataatggtatagatagtgattgcgtttggctatgtgttgttttctttttttttaaattatgaatatgtgtaaaatctgaggtaacttgctaacgtgaatggtcatataactttaaagatatatttataattatttaatgacatttggacccttgaaacatttcttagtgtattgatatgttgacttcggtctctaaaagtgctctttattaaataacaaatttcttcagtggtctagagccatatctgaaatattgctaagcaatttcagttcatccaggcacaatgtgattttaaaaaatacttccatctccaaatattttagatatagattgtttttgtgatgtatgaaggaaatgttatgtttagttctttcagatctttgaatgcctctaacacagctttgccttctaaagcggtaattagggatttaaaaaacaacctttagccctttatcagcatgaaatgctggagtgatgtggttttctaatttctttggggtaattatgactcttgtcatattaaaaagacaagcacaagtaaatcattgaactacagaaaaatgttctgtggtttcatagttaagcaaaactctaaatcgccaggcttcatagcaaagacatagtcagctaaaagccgcacatgtggatagagggttcaattatgagacacctagtacaggagagcaaaattgcaccagagattcttaaccaaccagccttaccaaacaacacaacaggggaaccccaatctgccttacccaaggccccactggcagctttccacagaatttgcatttagaggagcagaatgacatcactgtcctttgggagtaggtcctctgaaaaggcagcaggttccagcaggtagctgagctgagaggacatatggcccacggggacctacagacagcctttgacatttgtatttcttacaatggagggccaaggagggcaaggggctgtggagtttggtgtctactagtgtgtatgaatttgagctagagtccttctgtggcatgcactttgaccactcctggcagtcacatggcagatttccaagtgcaaatccttaatccaaacaaggatcatctaatgacaccaccaggccaatccctgctctcctccccgaaaagtcagggtcccttcattggaatcctccacccacccaagcagaatttagcagagatttgccttcaaaccctaacggcccccttgttctctggtccttctcaaacccacctttgtaggccacccagcattgcaggacagcgtgtggggcagctggacctgtgcttcctgcctgggagtctcccttggaattcatcctgactccttctaataaaaatggatgggaaagcaaaacactttgccttctaaaggccgtataccaagtatgcttagataaataagccacttttctattacttaagtaagaaggaagtagtaattgatactatttattgtttgtgtgtggtagcttgaagcacaccactgtccatttatttgtaagtgtaaaatatgtgtgtttgtttcagcagcacttaaaaaagccagtgtctggttacacatttcaattttaattaattgacataaaaatgctaccgccagtgccagctgcatcctatttaattaaaaaggtactatatttgtacattattttttaatgttaaaagggcttttttaagtttacagtacacataccgagtgactttagggatgcttttgtgttgaaatgttactatagtggctgcaggcagcaacccagaaacactttagaagctttttttccttgggaaaaattcaagcacttcttccctccaccctcactccaaccaccccaatgggggtaattcacatttcttagaacaaattctgcccttttttggtctagggattaaaattttgtttttctttctttctttttttttttttttcactgaacccttaatttgcactgggtcatgtgtttgatttgtgatttcaagaccaaagcaaagtcttactactactgtggaaccatgtactagttcctgggaattaaaatagcgtggttctctttgtagcacaaacattgctggaatttgcagtcttttcaatgcagccacatttttatccatttcagttgtctcacaaattttaacccatatcagagttccagaacaggtaccacagctttggttttagattagtggaataacattcagcccagaactgagaaactcaacagattaactatcgtttgctctttagacggtctcactgcctctcacttgccagagccctttcaaaatgagcagagaagtccacaccattagggaccatctgtgataaattcagaagggaggagatgtgtgtacagctttaaggattccctcaattccgaggaaagggactggcccagaatccaggttaatacatggaaacacgaagcattagcaaaagtaataattatacctatggtatttgaaagaacaataataaaagacacttcttccaaaccttgaatttgttgtttttagaaaacgaatgcatttaaaaatattttctatgtgagaattttttagatgtgtgtttacttcatgtttacaaataactgtttgctttttaatgcagtactttgaaatatatcagccaaaaccataacttacaataatttcttaggtattctgaataaaattccatttcttttggatatgctttaccattcttaggtttctgtggaacaaaaatatttgtagcattttgtgtaaatacaagctttcatttttattttttccaattgctattgcccaagaattgctttccatgcacatattgtaaaaattccgctttgtgccacaggtcatgattgtggatgagtttactcttaacttcaaagggactatttgtattgtatgttgcaactgtaaattgaattatttggcatttttctcatgattgtaatattaatttgaagtttgaatttaattttcaataaaatggcttttttggttttgtt

SEQ ID NO: 98540 - protein, 412 aa, Artificial Sequence
  derived and/or modified sequence
MPIMGSSVYITVELAIAVLAILGNVLVCWAVWLNSNLQNVTNYFVVSLAAADIAVGVLAIPFAITISTGFCAACHGCLFIACFVLVLTQSSIFSLLAIAIDRYIAIRIPLRYNGLVTGTRAKGIIAICWVLSFAIGLTPMLGWNNCGQPKEGKNHSQGCGEGQVACLFEDVVPMNYMVYFNFFACVLVPLLLMLGVYLRIFLAARRQLKQMESQPLPGERARSTLQKEVHAAKSLAIIVGLFALCWLPLHIINCFTFFCPDCSHAPLWLMYLAIVLSHTNSVVNPFIYAYRIREFRQTFRKIIRSHVLRQQEPFKAAGTSARVLAAHGSDGEQVSLRLNGHPPGVWANGSAPHPERRPNGYALGLVSGGSAQESQGNTGLPDVELLSHELKGVCPEPPGLDDPLAQDGAGVS

SEQ ID NO: 98541 - protein, 88 aa, Artificial Sequence
  derived and/or modified sequence
MPIMGSSVYITVELAIAVLAILGNVLVCWAVWLNSNLQNVTNYFVVSLAAADIAVGVLAIPFAITISTGFCAACHGCLFIACFVLVLT

SEQ ID NO: 98542 - protein, 64 aa, Artificial Sequence
  derived and/or modified sequence
MPIMGSSVYITVELAIAVLAILGNVLVCWAVWLNSNLQNVTNYFVVSLAAADIAVGVLAIPFAI

SEQ ID NO: 98543 - protein, 76 aa, Artificial Sequence
  derived and/or modified sequence
MPIMGSSVYITVELAIAVLAILGNVLVCWAVWLNSNLQNVTNYFVVSLAAADIAVGVLAIPFAITISTGFCAACHG

SEQ ID NO: 98544 - protein, 365 aa, Artificial Sequence
  derived and/or modified sequence
MPIMGSSVYITVELAIAVLAILGNVLVCWAVWLNSNLQNVTNYFVVSLAAADIAVGVLAIPFAITISTGFCAACHGCLFIACFVLVLTQSSIFSLLAIAIDRYIAIRIPLRYNGLVTGTRAKGIIAICWVLSFAIGLTPMLGWNNCGQPKEGKNHSQGCGEGQVACLFEDVVPMNYMVYFNFFACVLVPLLLMLGVYLRIFLAARRQLKQMESQPLPGERARSTLQKEVHAAKSLAIIVGLFALCWLPLHIINCFTFFCPDCSHAPLWLMYLAIVLSHTNSVVNPFIYAYRIREFRQTFRKIIRSHVLRQQEPFKAAGTSARVLAAHGSDGEQVSLRLNGHPPGVWANGSAPHPERRPNGYALGL

SEQ ID NO: 98545 - DNA, 1239 bp, Artificial Sequence
  derived and/or modified sequence
atgcctattatgggtagcagtgtctatatcactgttgagctggccatcgctgtcttggctatattaggcaatgttttggtttgttgggccgtttggctcaactctaatcttcagaacgtaaccaattattttgtggtatcactcgctgctgctgatatcgccgtgggcgtgttggctatcccattcgccattactatcagtactgggttttgcgccgcatgccatggctgcctttttatagcttgcttcgtgttggtcctgactcagagcagcatcttttccttgctggcaattgctattgatcgatacatcgctattcgcattccgctgagatacaatggactcgtgaccggcacccgagccaaggggataatcgcaatttgttgggtgctctcttttgcgattggacttaccccgatgttagggtggaacaattgcggccagccgaaggaaggcaagaatcacagccagggctgcggagaagggcaggtagcatgtctttttgaagatgttgttccaatgaattacatggtgtacttcaactttttcgcctgtgtactggtccctctgcttcttatgttaggagtctacctgcggatatttttagcagctagacgccaactgaaacagatggagagccagccacttccgggggaacgcgcacggagcacgctccagaaagaagtccatgccgcaaagtctttggctattatagtgggtctgtttgccctgtgctggctccccttgcatatcatcaactgcttcaccttcttttgcccggattgctcacacgcaccactatggctcatgtatctagccattgtactgtcacacacgaacagcgtcgtcaacccattcatctatgcttaccgcatcagggagtttagacagaccttcaggaagataattagatcacatgtcctacgtcagcaagagccattcaaagctgctggcacatctgctagggtgctggctgcccatgggtcagatggagagcaggtcagccttcggctgaacggtcatccaccaggcgtgtgggcgaatggctctgcaccccaccctgagaggaggccaaacggctatgctctgggattggtaagcggcggtagcgcccaggaaagtcaaggtaacacgggactgccagacgtagagctgctcagtcatgaactgaaaggcgtgtgtccagagcccccaggcctagacgatccgctggcccaggacggcgccggggtgagctag

SEQ ID NO: 98546 - DNA, 1239 bp, Artificial Sequence
  derived and/or modified sequence
atgcccattatgggatcaagcgtttatatcaccgtggaactggcgatcgcagtgcttgctattcttggaaatgtgctggtttgctgggccgtgtggctgaattccaaccttcagaatgtgacaaattacttcgtagtctctctggctgctgctgatatagccgttggcgtgctcgccatcccatttgctataacaatctcaaccggcttctgtgccgcctgtcacggatgcctttttattgcatgttttgtgctggtactgacacaatccagtatattcagcctgcttgctatagcaatcgatagatacatcgccattagaatcccactgcggtataacggccttgtgacggggacacgcgccaaaggaatcattgcgatctgttgggtgctttcctttgccattggcctcactcccatgctgggatggaataattgtggccagcctaaagaaggcaagaaccacagccaggggtgcggcgaggggcaggtcgcatgtcttttcgaggacgtcgtgcctatgaactacatggtttactttaacttttttgcctgcgtgctggtgccccttctgctgatgctgggagtgtatcttcggatcttcctcgcggcgagacgacaacttaagcaaatggagtcgcagcccttgcctggcgagcgtgctcggtcaacgttgcagaaggaggtgcacgccgcaaagtctcttgccatcatagtcggactgtttgccctgtgttggctgcccctccacattatcaattgctttactttcttctgtcccgactgttctcacgcgccactttggctgatgtatctcgctatagtcctaagtcacactaactctgttgtgaaccccttcatatatgcctatcgtatacgggagttcagacagacattcaggaagatcattagaagtcacgttcttcgccagcaggagccctttaaggccgcggggacttctgcgagggtcctggcagcccacggaagtgatggagagcaggtatcgctccggctgaacggacatcctccaggtgtgtgggctaatggaagcgctccgcacccggagaggaggccgaacgggtatgccctgggcctagtgagcggtggctccgctcaggaatcacaagggaatacgggtctaccggatgtcgagttgttgtcacacgagttaaaaggcgtgtgtccggaacccccaggactcgatgaccctttggcgcaggacggtgctggggtaagttag

SEQ ID NO: 98547 - DNA, 267 bp, Artificial Sequence
  derived and/or modified sequence
atgcccatcatggggtccagtgtgtacatcaccgtcgaacttgcaatcgctgtgctggctatcctaggaaacgttctggtctgctgggcagtctggctgaactctaatttacaaaatgtcactaactatttcgtggtatccctggccgcagccgacattgctgtgggggttctggccattccctttgctattacaatttccactggcttctgtgccgcttgtcacgggtgtttattcatcgcgtgctttgtgctggtcctgacctag

SEQ ID NO: 98548 - DNA, 195 bp, Artificial Sequence
  derived and/or modified sequence
atgcccattatgggttcctcagtgtacatcacggtcgaactggcaatcgccgtcttggccattctgggaaacgtgttagtatgctgggcagtctggttgaattccaatctgcagaacgtgactaactatttcgtggtgtcgctagccgcggccgatattgcagtgggagtccttgccatccctttcgccatctag

SEQ ID NO: 98549 - DNA, 231 bp, Artificial Sequence
  derived and/or modified sequence
atgccaattatgggatcaagtgtttacattaccgtcgaactcgcaatcgccgtactggctattttgggaaatgtcttagtatgctgggccgtatggctcaattccaacctccagaacgtgaccaattattttgtagttagtctggccgccgcggacattgctgtgggggtcctcgcgataccattcgcgattactatttccacaggtttttgcgctgcatgccatgggtag

SEQ ID NO: 98550 - DNA, 1098 bp, Artificial Sequence
  derived and/or modified sequence
atgcctatcatgggaagcagcgtgtatataaccgttgagttagcgattgccgtcctcgcaattctgggcaatgtactggtgtgttgggcagtatggctgaactccaatcttcagaacgtcacaaattattttgtggtgtccctagcagcggcggacatcgccgtcggcgtacttgcgattccatttgctataacaatatcgacaggcttttgtgctgcgtgccacggctgcctcttcatcgcctgcttcgtgcttgtactgacacaaagcagcatttttagtctgttagctattgccatcgacagatatatagccatacggatccccctacggtataatgggctggtgactggcacgcgggcaaagggtattatagccatctgctgggtattaagcttcgctattggactgaccccgatgctcggctggaacaactgcgggcaacccaaggaaggaaagaatcacagccaagggtgtggggagggccaggtggcctgtctatttgaagatgtagtccctatgaactacatggtatacttcaattttttcgcttgtgttctggtgccgttgttgctgatgctgggcgtgtacctgcgcattttcctagctgctaggaggcagttgaagcagatggagtcccagccacttccaggtgagcgggcgcgatcaaccttgcaaaaggaagtccacgcagccaaatccttggcaatcatcgtgggcctcttcgccctctgttggctgcctcttcacatcatcaactgttttactttcttttgccctgattgcagccatgcccctctgtggttgatgtatctcgctatagtgctgtcacatacaaatagtgtcgtgaacccatttatttacgcttacaggatcagggagtttcgacagacattccgcaaaatcatccggtctcacgtcctacggcaacaggagccgtttaaggcggctggtacatccgctagggttctggcagcccacggatcagacggcgagcaggtctctctgcgtttgaacggccaccctcctggagtctgggccaatggctcagcaccccacccagagcggagacctaatgggtacgcactcggcctctag

SEQ ID NO: 98551 - DNA, 1239 bp, Artificial Sequence
  derived and/or modified sequence
atgcccatcatgggatcgagtgtctacattactgtagagctggctatcgctgtactcgctatactgggtaacgtcttggtctgctgggccgtgtggctaaacagcaatctccagaatgttactaattacttcgttgtgtccttagcagcagccgatattgctgttggggtgctggcaatcccgttcgccattacgatctctaccggtttttgcgccgcgtgccatgggtgcttgttcattgcttgcttcgtactcgtcctgacccagtcaagcattttctcactgcttgccattgccatcgaccgctatatagctataaggattccattaagatataatgggttagttacgggcacacgtgcaaagggaattattgccatctgctgggtcctcagctttgcgattggcctgacgcccatgcttggctggaacaactgcgggcaacctaaggaaggcaaaaaccattcacagggctgcggtgagggtcaagtggcttgtctcttcgaagacgttgtgccaatgaactacatggtttacttcaattttttcgcctgcgtgctggtcccactgctcttaatgcttggcgtgtacttgcggatcttcctggccgcccgacggcaactgaaacagatggaatcccaacccctgcccggtgagcgcgcacgctctaccttgcaaaaggaagtgcacgcagccaagagtctggcaattattgtcggcctattcgcgctgtgttggcttcctctgcacattataaattgctttaccttcttctgccctgactgcagccatgcacctctttggctcatgtatttagcaattgtcctgtcccacaccaactcagtggtcaatccattcatttacgcctacaggatccgggagtttcgccaaacatttagaaagatcatccgatcccatgtgttaaggcagcaggaacccttcaaagccgctggcacctcagcccgcgtgctggccgcccatggctccgatggcgaacaagtctcactgcggctgaacggccacccaccaggagtttgggcgaacggttcagccccacatcccgaacgacgccccaatggctatgccctcggcttggtgtcagggggctcagcccaggaaagtcagggcaacacggggcttccagatgtggagctgctgagccacgagctcaaaggtgtgtgtcctgaaccaccaggcttggatgatccgttagcccaggatggcgccggagtctcttag

SEQ ID NO: 98552 - DNA, 2560 bp, Artificial Sequence
  derived and/or modified sequence
gtacatgtgagcagccgcgtgcagaggggaagctctgcctgggcctcagggactgtgacatggagcaggagccgcccccagccaagctgctttcagcacagcgtgggcccccagcaccttggtgcggggtgcggcccctcggaggagggctgtcaggtgaagcctcgtgtgagggggtgcctcaggaaccctgaagctgggctgagccatgatgctgctgccagaacccctgcagagggcctggtttcaggagactcagagtcctctgtgaaaaagcccttggagagcgccccagcagggctgcacttggctcctgtgaggaaggggctcaggggtctgggcccctccgcctgggccgggctgggagccaggcgggcggctgggctgcagcaatggaccgtgagctggcccagcccgcgtccgtgctgagcctgcctgtcgtctgtggccatgcccatcatgggctcctcggtgtacatcacggtggagctggccattgctgtgctggccatcctgggcaatgtgctggtgtgctgggccgtgtggctcaacagcaacctgcagaacgtcaccaactactttgtggtgtcactggcggcggccgacatcgcagtgggtgtgctcgccatcccctttgccatcaccatcagcaccgggttctgcgctgcctgccacggctgcctcttcattgcctgcttcgtcctggtcctcacgcagagctccatcttcagtctcctggccatcgccattgaccgctacattgccatccgcatcccgctccggtacaatggcttggtgaccggcacgagggctaagggcatcattgccatctgctgggtgctgtcgtttgccatcggcctgactcccatgctaggttggaacaactgcggtcagccaaaggagggcaagaaccactcccagggctgcggggagggccaagtggcctgtctctttgaggatgtggtccccatgaactacatggtgtacttcaacttctttgcctgtgtgctggtgcccctgctgctcatgctgggtgtctatttgcggatcttcctggcggcgcgacgacagctgaagcagatggagagccagcctctgccgggggagcgggcacggtccacactgcagaaggaggtccatgctgccaagtcactggccatcattgtggggctctttgccctctgctggctgcccctacacatcatcaactgcttcactttcttctgccccgactgcagccacgcccctctctggctcatgtacctggccatcgtcctctcccacaccaattcggttgtgaatcccttcatctacgcctaccgtatccgcgagttccgccagaccttccgcaagatcattcgcagccacgtcctgaggcagcaagaacctttcaaggcagctggcaccagtgcccgggtcttggcagctcatggcagtgacggagagcaggtcagcctccgtctcaacggccacccgccaggagtgtgggccaacggcagtgctccccaccctgagcggaggcccaatggctatgccctggggctggtgagtggagggagtgcccaagagtcccaggggaacacgggcctcccagacgtggagctccttagccatgagctcaagggagtgtgcccagagccccctggcctagatgaccccctggcccaggatggagcaggagtgtcctgatgattcatggagtttgccccttcctaagggaaggagatctttatctttctggttggcttgaccagtcacgttgggagaagagagagagtgccaggagaccctgagggcagccggttcctactttggactgagagaagggagccccaggctggagcagcatgaggcccagcaagaagggcttgggttctgaggaagcagatgtttcatgctgtgaggccttgcaccaggtgggggccacagcaccagcagcatctttgctgggcagggcccagccctccactgcagaagcatctggaagcaccaccttgtctccacagagcagcttgggcacagcagactggcctggccctgagactggggagtggctccaacagcctcctgccacccacacaccactctccctagactctcctagggttcaggagctgctgggcccagaggtgacatttgacttttttccaggaaaaatgtaagtgtgaggaaaccctttttattttattacctttcactctctggctgctgggtctgccgtcggtcctgctgctaacctggcaccagagcctctgcccggggagcctcaggcagtcctctcctgctgtcacagctgccatccacttctcagtcccagggccatctcttggagtgacaaagctgggatcaaggacagggagttgtaacagagcagtgccagagcatgggcccaggtcccaggggagaggttggggctggcaggccactggcatgtgctgagtagcgcagagctacccagtgagaggccttgtctaactgcctttccttctaaagggaatgtttttttctgagataaaataaaaacgagccacatcgtgttttaagcttgtccaaatgagaa

SEQ ID NO: 98553 - DNA, 1963 bp, Artificial Sequence
  derived and/or modified sequence
gagggcgtgggaggagggaggtgaggcagctccctccgagtggaagctcacagtcagctgcagcgccgcccctgccctgactgcagctgactggcaggggcacctggaggcagcgggttcgggcgcagtatgagagggcttaccctctgcggcagtgggagacaggaccaggcagctccccacatccttccacatccgagctccaggggtctctggcttgtcctttcacagggcggctggtgtcccttaggaaaaaaacagaccacatctgatccttggccctgagtccagagtgggaggcaccgtgacaacaatgcgcagagcagggaatgcagggagccatggatagtgctggggtgcctcaggaaccctgaagctgggctgagccatgatgctgctgccagaacccctgcagagggcctggtttcaggagactcagagtcctctgtgaaaaagcccttggagagcgccccagcagggctgcacttggctcctgtgaggaaggggctcaggggtctgggcccctccgcctgggccgggctgggagccaggcgggcggctgggctgcagcaatggaccgtgagctggcccagcccgcgtccgtgctgagcctgcctgtcgtctgtggccatgcccatcatgggctcctcggtgtacatcacggtggagctggccattgctgtgctggccatcctgggcaatgtgctggtgtgctgggccgtgtggctcaacagcaacctgcagaacgtcaccaactactttgtggtgtcactggcggcggccgacatcgcagtgggtgtgctcgccatcccctttgccatcaccatcagcaccgggttctgcgctgcctgccacggctgcctcttcattgcctgcttcgtcctggtcctcacgcagagctccatcttcagtctcctggccatcgccattgaccgctacattgccatccgcatcccgctccggtacaatggcttggtgaccggcacgagggctaagggcatcattgccatctgctgggtgctgtcgtttgccatcggcctgactcccatgctaggttggaacaactgcggtcagccaaaggagggcaagaaccactcccagggctgcggggagggccaagtggcctgtctctttgaggatgtggtccccatgaactacatggtgtacttcaacttctttgcctgtgtgctggtgcccctgctgctcatgctgggtgtctatttgcggatcttcctggcggcgcgacgacagctgaagcagatggagagccagcctctgccgggggagcgggcacggtccacactgcagaaggaggtccatgctgccaagtcactggccatcattgtggggctctttgccctctgctggctgcccctacacatcatcaactgcttcactttcttctgccccgactgcagccacgcccctctctggctcatgtacctggccatcgtcctctcccacaccaattcggttgtgaatcccttcatctacgcctaccgtatccgcgagttccgccagaccttccgcaagatcattcgcagccacgtcctgaggcagcaagaacctttcaaggcagctggcaccagtgcccgggtcttggcagctcatggcagtgacggagagcaggtcagcctccgtctcaacggccacccgccaggagtgtgggccaacggcagtgctccccaccctgagcggaggcccaatggctatgccctggggctggtgagtggagggagtgcccaagagtcccaggggaacacgggcctcccagacgtggagctccttagccatgagctcaagggagtgtgcccagagccccctggcctagatgaccccctggcccaggatggagcaggagtgtcctgatgattcatggagtttgccccttcctaagggaaggagatctttatctttctggttggcttgaccagtcacgttgggagaagagagagagtgccag

SEQ ID NO: 98554 - DNA, 569 bp, Artificial Sequence
  derived and/or modified sequence
gactcccaggcccgaggactcctggaagggaggtgcctcaggaaccctgaagctgggctgagccatgatgctgctgccagaacccctgcagagggcctggtttcaggagactcagagtcctctgtgaaaaagcccttggagagcgccccagcagggctgcacttggctcctgtgaggaaggggctcaggggtctgggcccctccgcctgggccgggctgggagccaggcgggcggctgggctgcagcaatggaccgtgagctggcccagcccgcgtccgtgctgagcctgcctgtcgtctgtggccatgcccatcatgggctcctcggtgtacatcacggtggagctggccattgctgtgctggccatcctgggcaatgtgctggtgtgctgggccgtgtggctcaacagcaacctgcagaacgtcaccaactactttgtggtgtcactggcggcggccgacatcgcagtgggtgtgctcgccatcccctttgccatcaccatcagcaccgggttctgcgctgcctgccacggctgcctcttcattgcctgcttcgtcctggtcctcac

SEQ ID NO: 98555 - DNA, 669 bp, Artificial Sequence
  derived and/or modified sequence
cacagtcagctgcagcgccgcccctgccctgactgcagctgactggcaggggcacctggaggcagcgggttcgggcgcagtatgagagggcttaccctctgcggcagtgggagacaggaccaggcagctccccacatccttccacatccgagctccaggggtctctggcttgtcctttcacagggcggctggtgtcccttaggtgcctcaggaaccctgaagctgggctgagccatgatgctgctgccagaacccctgcagagggcctggtttcaggagactcagagtcctctgtgaaaaagcccttggagagcgccccagcagggctgcacttggctcctgtgaggaaggggctcaggggtctgggcccctccgcctgggccgggctgggagccaggcgggcggctgggctgcagcaatggaccgtgagctggcccagcccgcgtccgtgctgagcctgcctgtcgtctgtggccatgcccatcatgggctcctcggtgtacatcacggtggagctggccattgctgtgctggccatcctgggcaatgtgctggtgtgctgggccgtgtggctcaacagcaacctgcagaacgtcaccaactactttgtggtgtcactggcggcggccgacatcgcagtgggtgtgctcgccatcccctttgccatca

SEQ ID NO: 98556 - DNA, 560 bp, Artificial Sequence
  derived and/or modified sequence
attggaccaggggaaccagccttgctcagtgacttctctgggtgtcctcctctaaagtgcctcaggaaccctgaagctgggctgagccatgatgctgctgccagaacccctgcagagggcctggtttcaggagactcagagtcctctgtgaaaaagcccttggagagcgccccagcagggctgcacttggctcctgtgaggaaggggctcaggggtctgggcccctccgcctgggccgggctgggagccaggcgggcggctgggctgcagcaatggaccgtgagctggcccagcccgcgtccgtgctgagcctgcctgtcgtctgtggccatgcccatcatgggctcctcggtgtacatcacggtggagctggccattgctgtgctggccatcctgggcaatgtgctggtgtgctgggccgtgtggctcaacagcaacctgcagaacgtcaccaactactttgtggtgtcactggcggcggccgacatcgcagtgggtgtgctcgccatcccctttgccatcaccatcagcaccgggttctgcgctgcctgccacggctg

SEQ ID NO: 98557 - DNA, 1517 bp, Artificial Sequence
  derived and/or modified sequence
ccgcgcgctcgcatgaaccttcgcgagctcctccagcagggatggaccgggggcgcagaggcgcttcctgaggggtggcgggccgggccccggggcgagggagattccccaggtggaggagccgggcggagaccggttccccgggaaggtgcctcaggaaccctgaagctgggctgagccatgatgctgctgccagaacccctgcagagggcctggtttcaggagactcagagtcctctgtgaaaaagcccttggagagcgccccagcagggctgcacttggctcctgtgaggaaggggctcaggggtctgggcccctccgcctgggccgggctgggagccaggcgggcggctgggctgcagcaatggaccgtgagctggcccagcccgcgtccgtgctgagcctgcctgtcgtctgtggccatgcccatcatgggctcctcggtgtacatcacggtggagctggccattgctgtgctggccatcctgggcaatgtgctggtgtgctgggccgtgtggctcaacagcaacctgcagaacgtcaccaactactttgtggtgtcactggcggcggccgacatcgcagtgggtgtgctcgccatcccctttgccatcaccatcagcaccgggttctgcgctgcctgccacggctgcctcttcattgcctgcttcgtcctggtcctcacgcagagctccatcttcagtctcctggccatcgccattgaccgctacattgccatccgcatcccgctccggtacaatggcttggtgaccggcacgagggctaagggcatcattgccatctgctgggtgctgtcgtttgccatcggcctgactcccatgctaggttggaacaactgcggtcagccaaaggagggcaagaaccactcccagggctgcggggagggccaagtggcctgtctctttgaggatgtggtccccatgaactacatggtgtacttcaacttctttgcctgtgtgctggtgcccctgctgctcatgctgggtgtctatttgcggatcttcctggcggcgcgacgacagctgaagcagatggagagccagcctctgccgggggagcgggcacggtccacactgcagaaggaggtccatgctgccaagtcactggccatcattgtggggctctttgccctctgctggctgcccctacacatcatcaactgcttcactttcttctgccccgactgcagccacgcccctctctggctcatgtacctggccatcgtcctctcccacaccaattcggttgtgaatcccttcatctacgcctaccgtatccgcgagttccgccagaccttccgcaagatcattcgcagccacgtcctgaggcagcaagaacctttcaaggcagctggcaccagtgcccgggtcttggcagctcatggcagtgacggagagcaggtcagcctccgtctcaacggccacccgccaggagtgtgggccaacggcagtgctccccaccctgagcggaggcccaatggctatgccctggggctg

SEQ ID NO: 98558 - DNA, 2460 bp, Artificial Sequence
  derived and/or modified sequence
gtgtacatgtgagcagccgcgtgcagaggggaagctctgcctgggcctcagggactgtgacatggagcaggagccgcccccagccaagctgctttcagcacagcgtgggcccccagcaccttggtgcggggtgcggcccctcggaggagggctgtcaggtgcctcaggaaccctgaagctgggctgagccatgatgctgctgccagaacccctgcagagggcctggtttcaggagactcagagtcctctgtgaaaaagcccttggagagcgccccagcagggctgcacttggctcctgtgaggaaggggctcaggggtctgggcccctccgcctgggccgggctgggagcctgcctgtcgtctgtggccatgcccatcatgggctcctcggtgtacatcacggtggagctggccattgctgtgctggccatcctgggcaatgtgctggtgtgctgggccgtgtggctcaacagcaacctgcagaacgtcaccaactactttgtggtgtcactggcggcggccgacatcgcagtgggtgtgctcgccatcccctttgccatcaccatcagcaccgggttctgcgctgcctgccacggctgcctcttcattgcctgcttcgtcctggtcctcacgcagagctccatcttcagtctcctggccatcgccattgaccgctacattgccatccgcatcccgctccggtacaatggcttggtgaccggcacgagggctaagggcatcattgccatctgctgggtgctgtcgtttgccatcggcctgactcccatgctaggttggaacaactgcggtcagccaaaggagggcaagaaccactcccagggctgcggggagggccaagtggcctgtctctttgaggatgtggtccccatgaactacatggtgtacttcaacttctttgcctgtgtgctggtgcccctgctgctcatgctgggtgtctatttgcggatcttcctggcggcgcgacgacagctgaagcagatggagagccagcctctgccgggggagcgggcacggtccacactgcagaaggaggtccatgctgccaagtcactggccatcattgtggggctctttgccctctgctggctgcccctacacatcatcaactgcttcactttcttctgccccgactgcagccacgcccctctctggctcatgtacctggccatcgtcctctcccacaccaattcggttgtgaatcccttcatctacgcctaccgtatccgcgagttccgccagaccttccgcaagatcattcgcagccacgtcctgaggcagcaagaacctttcaaggcagctggcaccagtgcccgggtcttggcagctcatggcagtgacggagagcaggtcagcctccgtctcaacggccacccgccaggagtgtgggccaacggcagtgctccccaccctgagcggaggcccaatggctatgccctggggctggtgagtggagggagtgcccaagagtcccaggggaacacgggcctcccagacgtggagctccttagccatgagctcaagggagtgtgcccagagccccctggcctagatgaccccctggcccaggatggagcaggagtgtcctgatgattcatggagtttgccccttcctaagggaaggagatctttatctttctggttggcttgaccagtcacgttgggagaagagagagagtgccaggagaccctgagggcagccggttcctactttggactgagagaagggagccccaggctggagcagcatgaggcccagcaagaagggcttgggttctgaggaagcagatgtttcatgctgtgaggccttgcaccaggtgggggccacagcaccagcagcatctttgctgggcagggcccagccctccactgcagaagcatctggaagcaccaccttgtctccacagagcagcttgggcacagcagactggcctggccctgagactggggagtggctccaacagcctcctgccacccacacaccactctccctagactctcctagggttcaggagctgctgggcccagaggtgacatttgacttttttccaggaaaaatgtaagtgtgaggaaaccctttttattttattacctttcactctctggctgctgggtctgccgtcggtcctgctgctaacctggcaccagagcctctgcccggggagcctcaggcagtcctctcctgctgtcacagctgccatccacttctcagtcccagggccatctcttggagtgacaaagctgggatcaaggacagggagttgtaacagagcagtgccagagcatgggcccaggtcccaggggagaggttggggctggcaggccactggcatgtgctgagtagcgcagagctacccagtgagaggccttgtctaactgcctttccttctaaagggaatgtttttttctgagataaaataaaaacgagccacatcgtgtttt

SEQ ID NO: 98559 - DNA, 1239 bp, Artificial Sequence
  derived and/or modified sequence
atgcccatcatgggcagctctgtgtacatcaccgtggagctggccatcgctgtgctggccatcctgggcaatgtgctggtgtgctgggccgtgtggctgaacagcaacctgcagaatgtgaccaactactttgtggtgtccctggccgctgctgacattgctgtgggcgtgctggccatcccctttgccatcaccatcagcacaggcttctgtgccgcctgccacggctgcctcttcatcgcctgctttgtgctggtgctgacccagagcagcatcttcagcctgctggccatcgccatcgaccgctacatcgccatccgcatccccctgcgctacaacggcctggtgacaggcacccgggccaagggcatcatcgccatctgctgggtgctgagctttgccatcggcctgacccccatgctgggctggaacaactgtggccagcccaaggagggcaagaaccacagccagggctgtggggagggccaggtggcctgcctgtttgaagatgtggtgcccatgaactacatggtgtacttcaacttctttgcctgtgtgctggtgcccctgctgctgatgctgggcgtgtacctgcgcatcttcctggccgcccggcggcagctgaagcagatggagagccagcccctgcctggagagcgggcccggagcaccctgcagaaggaggtgcatgctgccaagagcctggccatcatcgtgggcctgtttgccctgtgctggctgcccctgcacatcatcaactgcttcaccttcttctgcccagactgcagccacgcccccctgtggctgatgtacctggccatcgtgctgagccacaccaacagcgtggtgaaccccttcatctatgcctaccgcatccgggagttccggcagaccttcaggaagatcatccgcagccacgtgctgcggcagcaggagcccttcaaggctgctggcaccagcgcccgggtgctggccgcccacggcagtgatggagagcaggtgtccctgcggctgaatggccaccccccaggagtgtgggccaacggcagcgccccccaccctgagcggcggcccaacggctacgccctgggcctggtgtctgggggcagcgcccaggagagccagggcaacacaggcctgcctgatgtggagctgctgagccatgagctgaagggcgtgtgcccagagcccccaggcctggatgaccccctggcccaggatggagctggggtgtcctag

SEQ ID NO: 98560 - DNA, 267 bp, Artificial Sequence
  derived and/or modified sequence
atgcccatcatgggcagctctgtgtacatcaccgtggagctggccatcgctgtgctggccatcctgggcaatgtgctggtgtgctgggccgtgtggctgaacagcaacctgcagaatgtgaccaactactttgtggtgtccctggccgctgctgacattgctgtgggcgtgctggccatcccctttgccatcaccatcagcacaggcttctgtgccgcctgccacggctgcctcttcatcgcctgctttgtgctggtgctgacctag

SEQ ID NO: 98561 - DNA, 195 bp, Artificial Sequence
  derived and/or modified sequence
atgcccatcatgggcagctctgtgtacatcaccgtggagctggccatcgctgtgctggccatcctgggcaatgtgctggtgtgctgggccgtgtggctgaacagcaacctgcagaatgtgaccaactactttgtggtgtccctggccgctgctgacattgctgtgggcgtgctggccatcccctttgccatctag

SEQ ID NO: 98562 - DNA, 231 bp, Artificial Sequence
  derived and/or modified sequence
atgcccatcatgggcagctctgtgtacatcaccgtggagctggccatcgctgtgctggccatcctgggcaatgtgctggtgtgctgggccgtgtggctgaacagcaacctgcagaatgtgaccaactactttgtggtgtccctggccgctgctgacattgctgtgggcgtgctggccatcccctttgccatcaccatcagcacaggcttctgtgccgcctgccacggctag

SEQ ID NO: 98563 - DNA, 1098 bp, Artificial Sequence
  derived and/or modified sequence
atgcccatcatgggcagctctgtgtacatcaccgtggagctggccatcgctgtgctggccatcctgggcaatgtgctggtgtgctgggccgtgtggctgaacagcaacctgcagaatgtgaccaactactttgtggtgtccctggccgctgctgacattgctgtgggcgtgctggccatcccctttgccatcaccatcagcacaggcttctgtgccgcctgccacggctgcctcttcatcgcctgctttgtgctggtgctgacccagagcagcatcttcagcctgctggccatcgccatcgaccgctacatcgccatccgcatccccctgcgctacaacggcctggtgacaggcacccgggccaagggcatcatcgccatctgctgggtgctgagctttgccatcggcctgacccccatgctgggctggaacaactgtggccagcccaaggagggcaagaaccacagccagggctgtggggagggccaggtggcctgcctgtttgaagatgtggtgcccatgaactacatggtgtacttcaacttctttgcctgtgtgctggtgcccctgctgctgatgctgggcgtgtacctgcgcatcttcctggccgcccggcggcagctgaagcagatggagagccagcccctgcctggagagcgggcccggagcaccctgcagaaggaggtgcatgctgccaagagcctggccatcatcgtgggcctgtttgccctgtgctggctgcccctgcacatcatcaactgcttcaccttcttctgcccagactgcagccacgcccccctgtggctgatgtacctggccatcgtgctgagccacaccaacagcgtggtgaaccccttcatctatgcctaccgcatccgggagttccggcagaccttcaggaagatcatccgcagccacgtgctgcggcagcaggagcccttcaaggctgctggcaccagcgcccgggtgctggccgcccacggcagtgatggagagcaggtgtccctgcggctgaatggccaccccccaggagtgtgggccaacggcagcgccccccaccctgagcggcggcccaacggctacgccctgggcctgtag

SEQ ID NO: 98564 - DNA, 1239 bp, Artificial Sequence
  derived and/or modified sequence
atgcccatcatgggcagcagcgtgtacatcaccgtggagctggccattgccgtactcgccatcctcggaaacgtgttagtatgttgggcagtttggttgaatagtaatctgcagaacgtgacaaactatttcgtggtgagcctcgctgctgcagatattgccgtgggggtgctagccatcccttttgcaataaccatctcaacaggtttctgtgccgcgtgccacggatgcttgtttattgcgtgtttcgttctggtcctgacccagagtagtatcttctcgctgcttgccatcgccatcgatcggtacatagccatccgcatcccacttagatacaacgggttagtgactgggactagagccaagggcatcattgctatatgctgggtgctctcgtttgctatcggcctgacgcccatgctcggatggaacaattgtggacagccaaaggaaggaaaaaatcactcccagggatgtggtgaaggccaggtggcctgtttgttcgaggatgtcgtgccaatgaattatatggtgtactttaacttctttgcctgtgttctggtgcccctacttctgatgttaggggtctacctgaggatcttcctggcggcgcggagacaactcaaacagatggaatcccagcccttgcctggcgaacgggcccgttctaccctgcagaaagaagtccacgctgccaagtcgcttgctataatagtagggctgttcgctctgtgctggctgccccttcacattatcaattgctttacttttttttgccccgactgttcacacgcgcctctgtggctgatgtatctggctatcgtattatcacacactaactctgttgtgaatcccttcatctacgcctacaggatcagagagttcagacagactttccgcaagatcattcgtagccacgtactgcgacagcaggagccatttaaagcagctggtacgtccgcccgggtattggcagcccacggatcagacggcgaacaagtcagccttcggctgaatggtcacccacccggtgtgtgggctaatggttctgcgccacacccagaacggcggccaaatggctatgcattggggcttgttagtggcggcagcgcgcaggaatcccagggcaacaccggactccccgacgtggagctactgagccatgagcttaagggggtgtgccccgagccccccggactggacgatccgctagcacaggatggagcaggtgtaagctag

SEQ ID NO: 98565 - DNA, 1239 bp, Artificial Sequence
  derived and/or modified sequence
atgcccatcatgggcagcagcgtgtacatcaccgtggagctggccatcgctgtgttggctattttgggaaacgtgttagtgtgctgggccgtttggctgaattcgaatctgcagaacgtgactaattacttcgttgtgagtctggcagctgcagatatcgccgtgggagttcttgctatcccttttgctatcacaatctctactggattctgtgcagcttgtcacggttgcctgttcattgcatgttttgtcctggtcctcactcagtcatcaatcttttcactgctcgccattgctattgatcggtatatcgcgatcagaatccccctccggtacaatggactcgttactggcaccagggccaaaggtattatcgcaatttgctgggtgctctcatttgctattggtttgacccctatgttgggctggaacaattgtgggcagcctaaggaaggaaagaaccactcccagggatgcggggaggggcaggtggcttgcctattcgaagacgtggttcccatgaactacatggtgtatttcaatttttttgcgtgtgtgctggtgcccctcctcttgatgctgggcgtatacctgcggatattcttagcagcccgacgacagctgaagcagatggagtctcagccactgccgggcgaaagggcccgctcaacactacagaaagaggtccacgcagctaagagtctggctatcattgtcggattgttcgccttatgctggctccctctccatatcattaattgcttcactttcttctgtcctgattgttcccatgcgccgctgtggttgatgtatttggctattgtcctgtcccacactaacagcgttgtgaacccgtttatctacgcataccgcatccgcgaatttaggcagactttcaggaagatcattcggagccatgtactgcgccagcaggagcccttcaaggctgcaggaacttcagctcgcgtgctggctgctcacggctcagacggggagcaggtctctctgcgcttaaacggccaccctcctggcgtgtgggctaacggctccgcccctcatcctgaacgaagaccaaatggttacgcccttggccttgtaagcggcgggtctgctcaggaatctcagggcaacaccggcctccctgacgtggaactcctatcacatgagttgaaaggtgtatgcccagagcctccaggacttgatgacccgctagcccaggacggggccggggtgtcctag

SEQ ID NO: 98566 - DNA, 267 bp, Artificial Sequence
  derived and/or modified sequence
atgcccatcatgggcagcagcgtgtacatcaccgtggagctggccatcgctgtactcgccatcctgggtaatgtgttagtgtgctgggcagtgtggttaaatagcaatttacagaatgtgaccaattatttcgtggttagccttgccgctgcagacattgctgtgggagtgctagcgataccctttgctattaccatctccactggcttttgcgccgcttgccacggctgtctgtttattgcgtgcttcgtgctggtactgacttag

SEQ ID NO: 98567 - DNA, 195 bp, Artificial Sequence
  derived and/or modified sequence
atgcccatcatgggcagcagcgtgtacatcaccgtggagctggccatagcggtcttggccatcttaggtaacgtgcttgtatgttgggctgtctggttaaactccaaccttcaaaacgtcaccaactacttcgtggtgtccctcgccgccgccgatatcgccgtgggcgtgttggctatacccttcgcaatctag

SEQ ID NO: 98568 - DNA, 231 bp, Artificial Sequence
  derived and/or modified sequence
atgcccatcatgggcagcagcgtgtacatcaccgtggagctggccattgctgtgttggctatcctcggcaatgttttagtgtgctgggctgtctggctcaacagcaacctgcaaaacgtgacgaactattttgtggtatccctcgccgcggcagacattgcagtcggagtgctggccattccatttgctatcacaatatctaccggtttttgcgccgcatgtcacggctag

SEQ ID NO: 98569 - DNA, 1098 bp, Artificial Sequence
  derived and/or modified sequence
atgcccatcatgggcagcagcgtgtacatcaccgtggagctggccatagcggtgcttgcaatcctgggaaacgttctggtgtgttgggctgtctggcttaattcaaacctccagaacgtcaccaactacttcgtcgtgagcctagcggcggctgacattgcggtgggggtgctggcaatcccattcgccattacgattagcaccggtttctgcgctgcatgccacggatgtttatttattgcctgtttcgtgcttgtgttgacacaaagctctatcttctccctcttagccatcgctattgataggtatatagctatccgaatcccactgcgatataacgggcttgtcactgggaccagagccaagggcatcatcgctatttgttgggttctctcattcgccattggcctgaccccgatgctaggatggaacaactgtgggcagccaaaggagggcaagaaccatagtcagggatgcggagagggacaagtcgcgtgtctgtttgaggacgtcgttcccatgaactacatggtatacttcaatttcttcgcgtgtgtcttagtacctctgctattgatgctcggcgtctacctccgaatttttctggctgctcgacggcagttgaaacagatggaaagccagcccctccccggcgaaagggcaagaagtacacttcagaaagaagtccacgccgctaaatccctggccattatcgtggggctatttgccctatgctggctcccactgcatatcataaattgttttaccttcttttgtcctgattgttctcatgccccactctggctcatgtatctggccattgtgttgagccatactaactcagttgtgaacccgtttatttatgcgtaccgaataagggagtttagacagacttttcgaaagattatcaggagtcatgtgctgaggcagcaagaaccgttcaaggccgcaggcacctccgctagagtccttgctgctcacggatccgacggggaacaggtgagccttcgcctaaatggacatcctcccggtgtgtgggcaaacgggtcggctccgcacccagagaggcgccctaacggatatgccttgggcctctag

SEQ ID NO: 98570 - DNA, 1239 bp, Artificial Sequence
  derived and/or modified sequence
atgcccatcatgggcagcagcgtgtacatcaccgtggagctggccatcgcggtgctggccattctcgggaacgtgttagtgtgttgggccgtgtggctgaattcaaatcttcaaaatgtcacaaactattttgttgtttctctcgccgccgccgatatcgcagtgggggtcctggccatcccattcgcaatcaccatctcgaccgggttttgcgctgcttgtcatggctgcctgtttatcgcttgcttcgtgctagtgctgactcagtcaagcattttctctttgctcgcaatagccatcgatcgttacatagccatacggattccattacggtataatgggctggtaacgggcacacgggcaaaaggaatcatagcaatctgctgggtgctgtccttcgcaatcggcttaactcccatgctcggatggaataattgcggtcagccaaaagaaggaaagaatcactctcagggatgcggcgaaggacaggttgcctgcctgtttgaggacgttgttcctatgaactatatggtttactttaactttttcgcatgtgttttggtgcccctgctgctgatgttgggagtgtatctaagaatcttcctggctgcccgacgtcagctgaagcagatggaaagccagccattgcccggggaacgcgccagatcaaccctccaaaaggaagtgcatgcagccaagtccttggcgatcatcgtgggactgttcgccctgtgttggctaccactgcatattatcaattgtttcaccttcttctgtccagattgcagtcacgcccccctgtggcttatgtacctggcaatagttctcagccatacaaattccgtggtgaatccttttatatacgcctataggattcgagaattccgccaaaccttccggaaaatcatcaggagccacgtcctgcgccagcaggagccctttaaagccgctggaacgagcgcacgtgtgctggctgcccacggttccgacggcgaacaggtttcgctaaggctaaacggacatccccccggtgtatgggccaatgggtccgccccccaccccgagcgacggcctaatggttatgctctggggctggtttccggtggatctgctcaagagagccagggcaacactggcctgccagacgttgagttgctgtctcatgaacttaagggggtttgtcccgaaccccctggccttgacgatccgcttgcccaggacggtgcaggcgtgtcctag

SEQ ID NO: 98571 - DNA, 1239 bp, Artificial Sequence
  derived and/or modified sequence
atgcccattatggggtctagcgtatacataacggttgaattggctattgccgtcctggccattctggggaacgtgttagtttgttgggcagtctggttgaatagcaacctgcagaacgtcactaactattttgtcgtgagcctggctgctgccgatatcgctgtgggggtccttgccattcctttcgctattacaatctcgacagggttttgtgcagcttgccatggctgcctttttattgcatgttttgtgctggtgctgactcagtctagtatcttctcactgcttgccattgccatagataggtatattgcaatacgcattccgctgcgttataatggtctggttaccggaactagggccaagggaattatagctatatgttgggtattatcatttgccatcggcttaactccaatgcttggatggaacaattgtggccagccaaaggaagggaagaatcattcacaaggctgcggcgagggacaggtcgcctgcctattcgaagacgtggtacctatgaactacatggtgtattttaacttttttgcttgcgtgttggttcctctcctactgatgctgggcgtgtacttacggatttttctggctgctaggagacagcttaaacaaatggaaagccagccccttcccggagagagagctaggtcaacactccagaaagaagtgcatgccgcaaagtctctggctatcattgtcgggctgttcgcactctgttggcttccgttgcacattataaactgttttactttcttttgccctgattgttcccacgccccattgtggctgatgtatctggcgatcgtgctgagtcacactaacagcgttgtgaatccatttatatacgcttaccggatcagggaatttcgacagaccttcagaaaaatcatacggtcccatgtgctgcgacagcaggaaccattcaaggccgcaggcacttcggcaagagtcttggcagcccatggttcagacggagaacaggtctcattgagactgaacggccacccaccgggagtttgggcgaatggatctgccccacatcccgaaaggcgaccgaacggctatgccttggggttggtgagtggcggatccgcacaagagagtcagggaaataccggcctacctgacgtcgagttgttatcacatgagttgaagggggtttgccccgaacccccagggttggacgaccctctggcacaggatggcgctggtgtgtcttag

SEQ ID NO: 98572 - DNA, 1239 bp, Artificial Sequence
  derived and/or modified sequence
atgcctatcatgggatctagtgtttacattacagtagaacttgccattgcagtcctggccatcctgggtaatgtcttggtttgctgggccgtctggctcaattccaacctgcagaatgttacaaattattttgtggtatccctcgcagctgcggacatcgcggtgggagtcctggctatccctttcgcaatcaccattagcacgggtttttgcgctgcctgtcacggatgcttgttcattgcctgcttcgttcttgtgctgactcagagttctatcttttcccttctggccatcgccattgatagatatattgccatccgcatacctctgagatataatggtctcgttaccggcacaagagccaaggggatcatagctatctgctgggtactgtccttcgctattggcctgacgcctatgctgggatggaataactgcggccagccaaaagagggtaaaaaccactcccaaggatgcggagagggacaagtagcctgccttttcgaggatgtggtaccaatgaactatatggtgtactttaatttcttcgcttgcgttttagtgcccttattgctcatgctcggcgtatacctgagaatattcttagctgcgaggcgacaattgaaacaaatggaatctcagccactgcctggtgagcgcgctaggagcactctgcaaaaagaagtgcatgccgctaaaagtctcgccataattgtcggcttgtttgctctgtgctggctgcctctgcatatcatcaactgctttaccttcttctgccccgattgttcgcatgctccactctggctcatgtacctggccatagtactttcccataccaatagcgtcgtgaacccgttcatatatgcttaccggatcagagagtttagacagacatttaggaaaatcataagatcccatgttttgcgccagcaagaacccttcaaagccgctggcacatctgcgagggtgcttgccgcacacggatcagacggggagcaggtatccttacggttgaacggtcaccccccaggagtgtgggcgaatgggagcgcaccgcatcctgagaggagacccaacggctacgcattggggttggtgagcggtggtagcgctcaagaatcccaggggaatactggcttgcccgatgtggaattactgtcccatgagctgaagggagtctgtccagagccacccggtctcgatgaccccctggcgcaagacggggcaggagtctcttag

SEQ ID NO: 98573 - DNA, 267 bp, Artificial Sequence
  derived and/or modified sequence
atgcctattatgggctcaagcgtgtacattacagtggagctggctatagcggtgctggccatcttaggaaacgtgcttgtttgctgggcagtgtggctaaatagtaatttacagaatgtgacgaattactttgtggtatcactcgccgctgccgatatcgctgtgggggtgcttgctatcccttttgctattacaattagcactgggttctgtgccgcatgccacggctgtctgttcattgcatgctttgtcttggtgctcacatag

SEQ ID NO: 98574 - DNA, 195 bp, Artificial Sequence
  derived and/or modified sequence
atgcctattatgggaagctctgtttatatcaccgtggaactggccattgctgttttagctatcctggggaatgttctagtctgttgggctgtgtggctgaactctaatttacaaaatgtcactaactactttgtggtctctctggcggctgcggacatcgcagtgggggttctggccatcccattcgctatctag

SEQ ID NO: 98575 - DNA, 231 bp, Artificial Sequence
  derived and/or modified sequence
atgcctatcatgggaagcagtgtatatattaccgtcgaactcgccatcgccgtgctggcaatcctggggaacgtcctggtctgttgggccgtgtggctgaactctaatttacagaacgttacgaactactttgtggtaagtctcgctgcagcagatattgccgttggggtgctcgctatacctttcgccatcactatatcaaccggtttttgtgccgcttgtcacgggtag

SEQ ID NO: 98576 - DNA, 1098 bp, Artificial Sequence
  derived and/or modified sequence
atgcccattatgggaagcagtgtgtatatcaccgtcgaactcgcaatagctgtgctggctatcctgggtaatgtgctggtgtgctgggccgtgtggttgaactccaatctgcagaatgtcacaaactacttcgttgtgtcactagccgctgccgatattgcagtcggggtccttgccatccccttcgcaattactatttctaccgggttttgcgcggcttgtcatggctgccttttcatcgcctgtttcgtgttggtactcactcagagctcgatcttctctctgctggccatcgcgatcgataggtacatcgcaatccgcattcctcttcggtataatggtctagtcaccggcactagggcgaaaggaattatcgctatttgttgggtccttagttttgccattggcttgacacccatgttgggatggaataactgtggtcaaccaaaagagggaaagaatcactctcagggttgcggggaaggccaggtcgcctgtctgtttgaggatgtcgttcctatgaactatatggtgtactttaatttcttcgcttgcgtgctggtgcctcttctgcttatgctgggcgtgtatttacgcatttttcttgcagctcggagacagctgaaacagatggaaagtcagcctctccctggggagcgcgcacggtcaacactgcagaaggaggttcatgcagcgaagtccctagcgattatcgtcggattgtttgctctgtgctggctgccactgcacatcataaattgctttacgtttttctgccccgactgtagccacgctccactctggctcatgtacctggctatagttctctcacacacgaactctgtcgtcaatccttttatatatgcctaccgcattagagaattccgccagactttccgaaagatcattagatctcatgtgcttaggcaacaggaaccgtttaaagcggcaggcacatccgccagagttcttgctgctcacggcagcgacggggaacaggtttcactgaggctgaacggacaccccccaggagtgtgggccaatggtagcgctccccatccggaacgaagaccaaatgggtacgcactgggtctatag

SEQ ID NO: 98577 - DNA, 1239 bp, Artificial Sequence
  derived and/or modified sequence
atgccgatcatggggtcaagcgtgtacatcacagttgaactggctatagccgttttggctatcctcggaaatgttttggtatgttgggctgtttggctgaattctaacctgcaaaatgtcactaattacttcgtggtgtctctcgctgcagccgacatcgccgtaggagtcttggcgatacccttcgccattactatctcaaccgggttctgtgccgcatgccatggctgcctgttcatcgcctgtttcgtgctggttctgactcagtctagtatcttcagtctgcttgctatcgcaatcgaccgatacattgccatcagaatccctctgcggtacaatggattggttaccggcacacgtgccaaaggcattattgctatctgttgggtcctgtcgtttgccatcggcctcactcctatgctggggtggaataattgtggacagccaaaggaggggaaaaaccactcccaggggtgcggggagggccaggtggcttgcctctttgaggacgtagttcccatgaactacatggtgtatttcaatttttttgcgtgcgtgcttgtgcccctcttgctcatgttaggggtatacctcagaatcttccttgccgcacggagacaacttaagcagatggagtcacaaccactcccgggtgagcgcgcacgctcaacattgcagaaggaggtccacgccgcaaagagcctggccattattgtgggcctttttgccttgtgttggctgcctctgcacatcattaactgcttcacatttttctgtccagactgctcgcatgccccactgtggcttatgtatctggcaattgtcctgagtcacacgaactctgttgtaaatcccttcatctatgcatatagaatccgtgaattcagacagacatttcgaaaaatcatccggtcacacgttcttcggcagcaggaaccatttaaagcagctggaacttccgcccgagtccttgccgctcacgggagcgatggagaacaggtcagtctccggctgaacgggcatcctcccggtgtgtgggctaacggatctgcccctcaccccgagaggaggccaaacgggtacgcactgggcctcgttagtgggggatccgcacaggagtcacagggcaacactggcctccctgatgtggaactgctgtcccatgagctgaaaggcgtctgcccagagccccctggacttgatgatcccctggctcaagatggcgctggtgtgtcatag

SEQ ID NO: 98578 - DNA, 1239 bp, Artificial Sequence
  derived and/or modified sequence
atgcccatcatgggcagcagcgtgtacatcaccgtggagctggccatcgccgtgctggccatcctgggcaacgtgctggtgtgctgggccgtgtggctgaacagcaacctgcagaacgtgaccaactacttcgtggtgagcctggccgccgccgacatcgccgtgggcgtgctggccatccccttcgccatcaccatcagcaccggcttctgcgccgcctgccacggctgcctgttcatcgcctgcttcgtgctggtgctgacccagagcagcatcttcagcctgctggccatcgccatcgacagatacatcgccatcagaatccccctgagatacaacggcctggtgaccggcaccagagccaagggcatcatcgccatctgctgggtgctgagcttcgccatcggcctgacccccatgctgggctggaacaactgcggccagcccaaggagggcaagaaccacagccagggctgcggcgagggccaggtggcctgcctgttcgaggacgtggtgcccatgaactacatggtgtacttcaacttcttcgcctgcgtgctggtgcccctgctgctgatgctgggcgtgtacctgagaatcttcctggccgccagaagacagctgaagcagatggagagccagcccctgcccggcgagagagccagaagcaccctgcagaaggaggtgcacgccgccaagagcctggccatcatcgtgggcctgttcgccctgtgctggctgcccctgcacatcatcaactgcttcaccttcttctgccccgactgcagccacgcccccctgtggctgatgtacctggccatcgtgctgagccacaccaacagcgtggtgaaccccttcatctacgcctacagaatcagagagttcagacagaccttcagaaagatcatcagaagccacgtgctgagacagcaggagcccttcaaggccgccggcaccagcgccagagtgctggccgcccacggcagcgacggcgagcaggtgagcctgagactgaacggccacccccccggcgtgtgggccaacggcagcgccccccaccccgagagaagacccaacggctacgccctgggcctggtgagcggcggcagcgcccaggagagccagggcaacaccggcctgcccgacgtggagctgctgagccacgagctgaagggcgtgtgccccgagccccccggcctggacgaccccctggcccaggacggcgccggcgtgagctag

SEQ ID NO: 98579 - DNA, 267 bp, Artificial Sequence
  derived and/or modified sequence
atgcccatcatgggcagcagcgtgtacatcaccgtggagctggccatcgccgtgctggccatcctgggcaacgtgctggtgtgctgggccgtgtggctgaacagcaacctgcagaacgtgaccaactacttcgtggtgagcctggccgccgccgacatcgccgtgggcgtgctggccatccccttcgccatcaccatcagcaccggcttctgcgccgcctgccacggctgcctgttcatcgcctgcttcgtgctggtgctgacctag

SEQ ID NO: 98580 - DNA, 195 bp, Artificial Sequence
  derived and/or modified sequence
atgcccatcatgggcagcagcgtgtacatcaccgtggagctggccatcgccgtgctggccatcctgggcaacgtgctggtgtgctgggccgtgtggctgaacagcaacctgcagaacgtgaccaactacttcgtggtgagcctggccgccgccgacatcgccgtgggcgtgctggccatccccttcgccatctag

SEQ ID NO: 98581 - DNA, 231 bp, Artificial Sequence
  derived and/or modified sequence
atgcccatcatgggcagcagcgtgtacatcaccgtggagctggccatcgccgtgctggccatcctgggcaacgtgctggtgtgctgggccgtgtggctgaacagcaacctgcagaacgtgaccaactacttcgtggtgagcctggccgccgccgacatcgccgtgggcgtgctggccatccccttcgccatcaccatcagcaccggcttctgcgccgcctgccacggctag

SEQ ID NO: 98582 - DNA, 1098 bp, Artificial Sequence
  derived and/or modified sequence
atgcccatcatgggcagcagcgtgtacatcaccgtggagctggccatcgccgtgctggccatcctgggcaacgtgctggtgtgctgggccgtgtggctgaacagcaacctgcagaacgtgaccaactacttcgtggtgagcctggccgccgccgacatcgccgtgggcgtgctggccatccccttcgccatcaccatcagcaccggcttctgcgccgcctgccacggctgcctgttcatcgcctgcttcgtgctggtgctgacccagagcagcatcttcagcctgctggccatcgccatcgacagatacatcgccatcagaatccccctgagatacaacggcctggtgaccggcaccagagccaagggcatcatcgccatctgctgggtgctgagcttcgccatcggcctgacccccatgctgggctggaacaactgcggccagcccaaggagggcaagaaccacagccagggctgcggcgagggccaggtggcctgcctgttcgaggacgtggtgcccatgaactacatggtgtacttcaacttcttcgcctgcgtgctggtgcccctgctgctgatgctgggcgtgtacctgagaatcttcctggccgccagaagacagctgaagcagatggagagccagcccctgcccggcgagagagccagaagcaccctgcagaaggaggtgcacgccgccaagagcctggccatcatcgtgggcctgttcgccctgtgctggctgcccctgcacatcatcaactgcttcaccttcttctgccccgactgcagccacgcccccctgtggctgatgtacctggccatcgtgctgagccacaccaacagcgtggtgaaccccttcatctacgcctacagaatcagagagttcagacagaccttcagaaagatcatcagaagccacgtgctgagacagcaggagcccttcaaggccgccggcaccagcgccagagtgctggccgcccacggcagcgacggcgagcaggtgagcctgagactgaacggccacccccccggcgtgtgggccaacggcagcgccccccaccccgagagaagacccaacggctacgccctgggcctgtag

SEQ ID NO: 98583 - protein, 705 aa, Artificial Sequence
  derived and/or modified sequence
MTKFGFLRLSYEKQDTLLKLLILSMAAVLSFSTRLFAVLRFESVIHEFDPYFNYRTTRFLAEEGFYKFHNWFDDRAWYPLGRIIGGTIYPGLMITSAAIYHVLHFFHITIDIRNVCVFLAPLFSSFTTIVTYHLTKELKDAGAGLLAAAMIAVVPGYISRSVAGSYDNEGIAIFCMLLTYYMWIKAVKTGSICWAAKCALAYFYMVSSWGGYVFLINLIPLHVLVLMLTGRFSHRIYVAYCTVYCLGTILSMQISFVGFQPVLSSEHMAAFGVFGLCQIHAFVDYLRSKLNPQQFEVLFRSVISLVGFVLLTVGALLMLTGKISPWTGRFYSLLDPSYAKNNIPIIASVSEHQPTTWSSYYFDLQLLVFMFPVGLYYCFSNLSDARIFIIMYGVTSMYFSAVMVRLMLVLAPVMCILSGIGVSQVLSTYMKNLDISRPDKKSKKQQDSTYPIKNEVASGMILVMAFFLITYTFHSTWVTSEAYSSPSIVLSARGGDGSRIIFDDFREAYYWLRHNTPEDAKVMSWWDYGYQITAMANRTILVDNNTWNNTHISRVGQAMASTEEKAYEIMRELDVSYVLVIFGGLTGYSSDDINKFLWMVRIGGSTDTGKHIKENDYYTPTGEFRVDREGSPVLLNCLMYKMCYYRFGQVYTEAKRPPGFDRVRNAEIGNKDFELDVLEEAYTTEHWLVRIYKVKDLDNRGLSRT

SEQ ID NO: 98584 - DNA, 2118 bp, Artificial Sequence
  derived and/or modified sequence
atgaccaagttcggcttcctgagactgagctacgagaagcaggacaccctgctgaagctgctgatcctgagcatggccgccgtgctgagcttcagcaccagactgttcgccgtgctgagattcgagagcgtgatccacgagttcgacccctacttcaactacagaaccaccagattcctggccgaggagggcttctacaagttccacaactggttcgacgacagagcctggtaccccctgggcagaatcatcggcggcaccatctaccccggcctgatgatcaccagcgccgccatctaccacgtgctgcacttcttccacatcaccatcgacatcagaaacgtgtgcgtgttcctggcccccctgttcagcagcttcaccaccatcgtgacctaccacctgaccaaggagctgaaggacgccggcgccggcctgctggccgccgccatgatcgccgtggtgcccggctacatcagcagaagcgtggccggcagctacgacaacgagggcatcgccatcttctgcatgctgctgacctactacatgtggatcaaggccgtgaagaccggcagcatctgctgggccgccaagtgcgccctggcctacttctacatggtgagcagctggggcggctacgtgttcctgatcaacctgatccccctgcacgtgctggtgctgatgctgaccggcagattcagccacagaatctacgtggcctactgcaccgtgtactgcctgggcaccatcctgagcatgcagatcagcttcgtgggcttccagcccgtgctgagcagcgagcacatggccgccttcggcgtgttcggcctgtgccagatccacgccttcgtggactacctgagaagcaagctgaacccccagcagttcgaggtgctgttcagaagcgtgatcagcctggtgggcttcgtgctgctgaccgtgggcgccctgctgatgctgaccggcaagatcagcccctggaccggcagattctacagcctgctggaccccagctacgccaagaacaacatccccatcatcgccagcgtgagcgagcaccagcccaccacctggagcagctactacttcgacctgcagctgctggtgttcatgttccccgtgggcctgtactactgcttcagcaacctgagcgacgccagaatcttcatcatcatgtacggcgtgaccagcatgtacttcagcgccgtgatggtgagactgatgctggtgctggcccccgtgatgtgcatcctgagcggcatcggcgtgagccaggtgctgagcacctacatgaagaacctggacatcagcagacccgacaagaagagcaagaagcagcaggacagcacctaccccatcaagaacgaggtggccagcggcatgatcctggtgatggccttcttcctgatcacctacaccttccacagcacctgggtgaccagcgaggcctacagcagccccagcatcgtgctgagcgccagaggcggcgacggcagcagaatcatcttcgacgacttcagagaggcctactactggctgagacacaacacccccgaggacgccaaggtgatgagctggtgggactacggctaccagatcaccgccatggccaacagaaccatcctggtggacaacaacacctggaacaacacccacatcagcagagtgggccaggccatggccagcaccgaggagaaggcctacgagatcatgagagagctggacgtgagctacgtgctggtgatcttcggcggcctgaccggctacagcagcgacgacatcaacaagttcctgtggatggtgagaatcggcggcagcaccgacaccggcaagcacatcaaggagaacgactactacacccccaccggcgagttcagagtggacagagagggcagccccgtgctgctgaactgcctgatgtacaagatgtgctactacagattcggccaggtgtacaccgaggccaagagaccccccggcttcgacagagtgagaaacgccgagatcggcaacaaggacttcgagctggacgtgctggaggaggcctacaccaccgagcactggctggtgagaatctacaaggtgaaggacctggacaacagaggcctgagcagaacctag

SEQ ID NO: 98585 - DNA, 2118 bp, Artificial Sequence
  derived and/or modified sequence
atgaccaaatttggtttcctacgtctttcttatgagaagcaggatacattgctcaagctactaatcctcagcatggctgccgtgctctctttcagcacccgcctgttcgccgtcctccgcttcgaaagcgtgatccacgaattcgatccctattttaactaccgaacaacaaggttcttggccgaggagggattttacaaattccacaattggtttgacgaccgcgcatggtaccctttgggcagaatcatcggtggcactatctatcccggccttatgattacatctgccgcaatctaccatgtcttacacttcttccacatcacaattgatataagaaatgtttgcgtttttctggctccactctttagcagttttacaacaatcgtgacatatcacctgacgaaggaattgaaggacgccggagcgggtctgcttgcggcggcaatgatcgctgtggttccgggatatatttccagatccgttgctgggagttatgataacgagggaatagcaattttctgcatgcttttgacctactatatgtggattaaggcagtcaagactggttccatatgttgggccgccaagtgtgccctggcttacttttacatggtatccagttggggtgggtatgtgtttctcattaacttgatcccgcttcatgtgctggtgctcatgttaacaggacgattctcacacagaatctatgttgcctactgcaccgtgtactgtctgggcactattctgtccatgcagatatccttcgtcggattccaacctgtgctctcctcagagcacatggcagcctttggtgtgtttgggctgtgccagatccacgcgttcgtggattatctgagatcaaagcttaacccccagcaatttgaagtgctgttcaggtctgtaatctctttggtgggattcgtactgctgaccgtgggggctttgctgatgttgactggcaagatctcgccttggaccgggagattctatagtttgttagacccatcttacgctaagaacaacatccccattatagcaagcgtctcagaacaccagccaacgacctggtcctcgtattacttcgatctacagttgctcgtatttatgtttcccgtgggcctctattattgttttagcaatcttagcgatgcgagaatcttcatcataatgtacggagtgacgagtatgtatttttccgccgttatggtccgactgatgctggtgctggcacccgtcatgtgtatactgtccgggatcggtgttagccaagtgctttctacgtatatgaagaatctcgacatatcgcgccctgacaaaaagtccaagaagcagcaagattccacctaccccattaagaatgaggtggccagcggtatgatcctggtgatggcattttttctgatcacctacacctttcattcaacatgggtgacctccgaagcctattcttccccttcaatcgtgctctctgctcgcggaggcgacggttctagaattattttcgacgatttcagagaggcgtattactggcttagacacaatacacctgaggatgctaaggttatgtcatggtgggactacggataccagattacagcaatggctaatcgtacgattttggttgataacaacacctggaacaacacccacatttcacgggtgggacaggccatggcatcaactgaggaaaaagcctacgagatcatgcgcgagcttgacgtgtcttacgttcttgtcatatttggcgggctgaccggctacagcagcgatgatatcaacaagttcctctggatggtccgcattggagggtccacagatacgggtaaacatattaaggagaacgactactacaccccaactggagaattccgggtcgacagggaaggatctccagtactcctgaattgtctcatgtataagatgtgttactatcggttcggccaagtctataccgaagctaaacgccccccaggcttcgacagggtgaggaacgctgaaataggaaataaagactttgaattggatgtgctagaagaggcctacactacggagcattggctagtgcggatctacaaggtcaaagatctggataataggggtctttcacgaacttag

SEQ ID NO: 98586 - DNA, 2118 bp, Artificial Sequence
  derived and/or modified sequence
atgaccaagttcggctttttgagacttagctacgagaagcaggatacgcttctaaagcttctgatcctcagcatggctgctgtactatcattcagcactagactgtttgccgtgctacggtttgagagtgtgattcacgagttcgacccatattttaactataggactactcgctttctcgctgaagaggggttctacaagtttcataattggtttgacgatagagcgtggtacccactcgggcgaatcatcggaggaaccatttaccctggcctgatgattacctccgctgccatttatcatgtcttgcactttttccatatcacaattgacatcagaaacgtgtgcgtttttctggccccccttttttcctccttcacaactatcgtcacctaccacctcacaaaagaactgaaagacgctggtgctggcctcctggccgccgccatgatagccgtagttcccgggtacattagcaggtcagtggccggtagctatgataatgagggaatagcaatattttgtatgctcctgacttattacatgtggataaaagccgtgaagaccggttccatctgttgggctgcaaaatgcgccttggcttatttttatatggtatcaagctggggcggatatgtttttttgattaatttaatcccgctgcacgtcctggtactgatgctgaccggccggttttcacacagaatatacgtcgcctactgtacagtgtactgccttggaacaattctgtctatgcagatctccttcgtgggattccagccagttttgagttcagaacacatggccgcgttcggcgtctttgggctctgccaaattcacgcattcgtcgattacctgcgatcgaagctcaatccccagcagttcgaggtgctgttccggtctgtgattagtctggtcgggttcgttttactgacagtgggcgcactgctgatgttgactggaaaaatttccccctggactggcaggttttacagcctgctggatccatcttacgcaaaaaacaacatcccgattatcgccagcgtcagcgaacatcagcctacaacctggagctcgtattacttcgatctccagctcttggtctttatgttcccggtgggtttgtactattgcttctcaaacctgtcagacgccagaatctttatcattatgtacggagtgacttctatgtatttctcagccgtgatggtgcgcctgatgctggtgctggctcctgttatgtgtatcttatcagggattggtgtttcccaggtgctgtctacgtatatgaagaatttagatatctccaggcctgataagaagagtaagaaacagcaggacagtacctaccccataaagaacgaagtcgctagcggaatgattctagtgatggcatttttcttaatcacatacacattccattccacatgggtcacaagcgaggcatactcatccccttctattgtgttaagtgcacgcggtggtgacggatccaggatcatatttgacgatttccgcgaggcttattattggctcagacataatactccagaggatgccaaagtgatgagctggtgggattacggatatcaaataacagctatggctaataggacgatcctggtcgacaacaatacgtggaacaatacacacatttcccgcgtcggacaggctatggccagtaccgaggaaaaggcctacgagattatgagggagttagacgtatcttacgttttggttatcttcggcggcttaaccggttattccagtgatgacatcaataaatttctgtggatggtcaggatcggaggatctaccgatacagggaagcatattaaagaaaatgattactacactcctacaggcgagtttagagtggacagggaggggtcccccgtgcttctaaattgcctgatgtataagatgtgttattacaggttcggccaggtctataccgaggccaaacgtccaccaggttttgacagagtgcggaacgcggaaatcggcaacaaggacttcgaactggatgttttagaagaggcatatacaacggagcactggcttgtgaggatttataaagtgaaggacttggataaccggggattatctcggacatag

SEQ ID NO: 98587 - DNA, 2118 bp, Artificial Sequence
  derived and/or modified sequence
atgaccaagtttggcttcctgcggctgtcctatgagaagcaggacaccctgctgaagctgctgatcctgtccatggctgctgtgctgtccttcagcacccggctgtttgctgtgctgcgctttgaatctgtcatccacgagtttgacccctacttcaactaccgcaccacccgcttcctggccgaggagggcttctacaagttccacaactggtttgatgaccgggcctggtaccccctgggccgcatcatcggcggcaccatctacccaggcctgatgatcaccagcgctgccatctaccacgtgctgcacttcttccacatcaccatcgacatcagaaatgtgtgtgtgttcctggcccccctcttcagcagcttcaccaccatcgtgacctaccacctgaccaaggagctgaaggatgctggagctggcctgctggccgccgccatgattgctgtggtgcccggctacatcagccgctctgtggccggcagctatgacaatgaaggaattgccatcttctgcatgctgctgacctactacatgtggatcaaggctgtgaagacaggcagcatctgctgggccgccaagtgtgccctggcctacttctacatggtgtcctcctggggcggctacgtgttcctgatcaacctgatccccctgcacgtgctggtgctgatgctgaccggccgcttcagccaccgcatctacgtggcctactgcaccgtgtactgcctgggcaccatcctgtccatgcagatcagctttgtgggcttccagcctgtgctgagcagcgagcacatggccgcctttggagtgtttggcctgtgccagatccacgcctttgtggactacctgcggagcaagctgaacccccagcagtttgaggtgctcttccgcagcgtcatcagcctggtgggctttgtgctgctgactgtgggcgccctgctgatgctgaccgggaagatcagcccctggacaggccgcttctacagcctgctggaccccagctatgccaagaacaacatccccatcatcgcctctgtgtctgagcaccagcccaccacctggagcagctactactttgacctgcagctgctggtgttcatgtttcctgtgggcctgtactactgcttcagcaacctgagtgatgcccgcatcttcatcatcatgtatggagtgacctccatgtacttctctgctgtgatggtgcggctgatgctggtgctggcccctgtgatgtgcatcctgagcggcatcggcgtgtcccaggtgctgagcacctacatgaagaacctggacatcagcaggccagacaagaagagcaagaagcagcaggacagcacctaccccatcaagaatgaggtggccagcggcatgatcctggtgatggccttcttcctgatcacctacaccttccacagcacctgggtgaccagcgaggcctacagcagccccagcatcgtgctgagcgcccggggaggagatggcagccgcatcatctttgatgacttccgggaggcctactactggctgcggcacaacaccccagaagatgccaaggtgatgtcctggtgggactatggctaccagatcacagccatggccaacagaaccatcctggtggacaacaacacctggaacaacacccacatcagccgggtgggccaggccatggccagcacagaggagaaggcctatgagatcatgagggagctggatgtgtcctatgtgctggtgatctttggaggcctgaccggctacagcagtgatgacatcaacaagttcctgtggatggtgcgcatcggcggcagcacagacaccgggaagcacatcaaggaaaatgactactacacccccactggagagttccgggtggaccgggagggcagccctgtgctgctgaactgcctgatgtacaagatgtgctactacagatttggccaggtgtacacagaggccaagaggcctcctggctttgacagagtgagaaatgctgagatcggcaacaaggactttgagctggatgtgctggaggaggcctacaccacagagcactggctggtgcgcatctacaaggtgaaggacctggacaacagaggcctgagcaggacatag

SEQ ID NO: 98588 - DNA, 2118 bp, Artificial Sequence
  derived and/or modified sequence
atgaccaagttcggcttcctgcggctgagctacgagaagcaggacacactgctgaagctcctgattctatctatggccgccgtgctttcctttagcactcgtctatttgccgtcctgcgctttgagtctgtgattcacgagtttgatccttactttaattacaggaccacaaggtttctggcagaagaaggcttctacaagttccacaactggttcgacgatcgcgcttggtatcccctgggacggattattggcggaactatctatcctggactgatgattaccagcgccgcgatctaccatgttctgcattttttccatattacaattgacataagaaacgtgtgtgtgttcctggcccctctcttcagctccttcaccacaatcgtgacgtaccatctgacgaaggagctgaaagatgctggggccgggctcctcgcggctgctatgatcgctgtggtgcctgggtacatctctagatccgttgccggcagctatgacaatgaagggattgccatcttttgtatgctccttacctattacatgtggatcaaggcggtgaagactggatcaatctgttgggcggctaagtgtgccttagcttatttctacatggtcagttcatggggaggttacgtctttcttatcaacctgatcccgttgcatgtactggttctaatgctcacaggaagattttctcatcgcatttatgtggcgtactgcacagtctactgcctgggcacaatactcagtatgcagatctcattcgtcggttttcaacccgtcctgtcatctgagcacatggcagcttttggggtgtttggactctgtcagatccatgcattcgttgactacctgaggagtaagctgaacccacagcagtttgaggtgctgtttagatccgtgattagcctggtgggattcgtgttgcttaccgtcggagccctgcttatgttaaccgggaaaatttctccctggacgggtagattttactcattgcttgacccgtcctacgccaagaataatattcccattatcgcatctgtgtccgaacaccagcccacgacttggtcatcatactattttgatcttcagttgctcgtgttcatgttcccagtgggtctctattactgcttttctaatctgtccgacgcgcggatttttataattatgtatggcgtcacaagtatgtacttctcagccgttatggttaggcttatgctcgtcttggcgcccgtcatgtgcattttgagcggaattggagtgtcccaggtgctcagtacttacatgaagaacttggacatctccagacctgacaaaaagagtaaaaaacagcaggactctacataccccattaaaaatgaagtcgccagcggcatgattctcgtgatggccttcttcctcattacgtatacgtttcactcaacttgggtaacctccgaagcttacagcagcccttccatcgtactttccgcacgtgggggggacggctcccgcattattttcgatgatttccgcgaggcgtactactggcttcggcacaacactcccgaagacgcaaaagtgatgagctggtgggattacggataccagatcacggcgatggcaaaccggaccatcctggtcgacaataacacttggaataatactcacatctctcgagtgggacaagctatggcctctaccgaggaaaaggcgtatgagataatgagagagcttgatgtctcatacgttctagtaatcttcggtgggctcaccggctactccagcgatgacatcaacaaattcctctggatggtgaggattggaggatccacggataccggcaagcacatcaaagagaatgattactacactcccaccggcgagtttcgcgtggatagagaggggtctcctgtgcttctgaattgcctcatgtacaagatgtgttactacaggttcggccaggtgtatactgaggcaaagcggccaccaggctttgatagagtcagaaacgcagagattggcaataaagacttcgagttagacgtgctagaggaggcatataccacagaacattggcttgtgcgcatctataaggttaaagatcttgacaaccgcggactgtctaggacctag

SEQ ID NO: 98589 - DNA, 2118 bp, Artificial Sequence
  derived and/or modified sequence
atgaccaagttcggcttcctgcggctgagctacgagaagcaggacaccttgctcaagctgcttattctgtccatggctgccgtcctgtcgttctctacacgccttttcgcggttctgagattcgaatcagtgatccatgaattcgacccctacttcaactatcgaactacaaggttcttagctgaggaagggttttataaattccataattggttcgacgatagagcttggtatcctcttggtcgtataatcggaggcaccatttatccaggtctgatgattaccagcgccgccatataccacgtcctgcattttttccacattaccatcgacattcggaatgtctgtgtttttctcgcccccctgtttagcagttttactacgatagttacctatcatttgactaaagaattgaaagacgccggggcgggcctcctggccgctgctatgattgccgtggtgccggggtacatcagccgttcagtcgccgggagctacgacaatgaggggattgccatcttctgtatgctactgacatattacatgtggatcaaagcagtgaagactggatccatctgttgggccgccaaatgcgccttggcctatttctatatggtgtcctcttggggcgggtatgtgtttcttatcaatctgatccccttacacgtgctggtactcatgctcaccgggaggttttctcatcggatatacgtcgcttactgcaccgtgtattgtctgggcacaatcctgtccatgcaaatctcttttgtcggctttcagcccgtgctgagcagtgaacacatggccgcgttcggggtgtttgggctatgtcagatccacgctttcgtagattacttgagatcaaagctgaacccacagcaatttgaagtgttgttccgttctgtgatctccctggtgggctttgtcttgttgacagtgggggcgcttctcatgctgacagggaagattagtccatggactgggagattctactcactgctagacccttcctatgccaaaaacaacataccaattatcgctagtgttagcgaacaccaacccactacatggtcttcctattattttgatcttcagcttttagtttttatgtttccagtaggcttgtactattgcttttccaacttgagtgacgcacgcatttttatcataatgtatggcgttacgagcatgtatttcagcgcagttatggtccggttaatgttggtcctggctccagtgatgtgtattctgtctgggattggcgtctcccaagtgctgagtacctacatgaagaatctggatatctcacggcccgataagaagagcaagaagcagcaagatagcacctaccctattaaaaacgaggtggcttcagggatgatcttggtgatggctttttttctcattacctacacctttcattccacctgggtgacgtccgaggcctactcatccccttctatcgtgctgtctgctcgcggcggagatggatcacgtatcatcttcgacgattttagagaggcctactactggctgcggcataatacgccagaagacgctaaggtgatgagttggtgggattatggttatcagatcaccgcaatggcgaacagaacaattctggtggacaacaatacctggaacaacacgcatatttcacgggtggggcaggcgatggctagcacagaagaaaaagcttacgagataatgcgggagctcgatgtctcctacgtcctggtaatcttcggcgggctaacaggctattcctcagatgatatcaacaagttcctctggatggttcgcatcggaggttccacagacacagggaagcacataaaggagaacgattattatactccaaccggagaatttagagtcgatagggagggatctccagtgctcctaaattgcctgatgtataagatgtgctattacagatttggtcaggtgtacacagaggctaagcgcccaccagggtttgatcgcgtgcgcaacgccgagattggcaataaagattttgaactggatgtactggaagaggcatataccaccgaacactggcttgtccgcatctataaggttaaggacttggacaaccgcggcctgtccagaacctag

SEQ ID NO: 98590 - DNA, 2118 bp, Artificial Sequence
  derived and/or modified sequence
atgacaaaattcggatttctgcgcctgagctatgaaaagcaggacaccctgctgaagttattgattctaagtatggcagctgtactctcttttagcacgcgcctcttcgccgttctgcgatttgagtcagtgatccatgagttcgatccatacttcaattacaggactaccagattcctggccgaagaagggttctataagtttcataactggtttgatgatcgggcatggtatcctctcggccgtataatcggagggacaatctaccctggtctcatgattacatcggcagctatttatcacgtgctccacttctttcatatcacaatagatataaggaacgtatgcgtgttcctcgctcccctcttctcctccttcacaactattgtgacctaccacctgaccaaagagctcaaggatgccggagccggtcttctcgccgcagccatgattgccgttgttcctggctatatatctagaagcgtggctgggtcctatgacaatgagggcattgcaatattttgcatgctgctgacttattacatgtggattaaggccgtcaagactggcagtatttgttgggctgcaaagtgtgccttggcgtacttttacatggtgagctcatggggagggtacgtgtttctcatcaatctgatacctttgcatgtgctcgttttgatgctcacaggtcgcttctcacacaggatctacgtggcctactgtaccgtctactgtttagggaccatcttgtctatgcagatctcattcgtcgggtttcagcctgtcctctcatctgagcacatggccgctttcggagtatttggcctttgtcagatccatgcattcgttgattatcttagaagtaagctgaatccgcagcagtttgaagtgctttttaggtctgtcatcagtttggtgggcttcgttctgctcacagtcggagccctgctgatgctgaccggaaagatcagtccctggacaggccgattctactcattactggaccctagttatgccaagaataatattcccatcatcgctagtgtgtccgagcaccagccgaccacctggtcctcatattacttcgatttacagctcttggtgttcatgttccccgtcggtttgtactactgcttttctaatttatctgacgccagaatctttattattatgtatggggtgacatcgatgtacttctcggcagtgatggtgcgcctgatgcttgtactcgcccctgtaatgtgcattttgtccggtataggggtaagccaggtgctttccacttatatgaagaacttagatatctcccgaccagataaaaaaagcaaaaaacagcaggattccacgtaccctatcaagaacgaagtcgctagcggtatgattctggtgatggctttcttcctgataacttacacgttccactccacatgggtgacgagtgaggcctactcctcccctagtattgtattgtctgctcgtggtggcgatggatcgcgaattattttcgatgattttagagaagcgtactattggctgcgacataatacacccgaggatgcgaaggttatgagttggtgggattacggttatcagattaccgccatggcaaacaggactatcctcgttgacaacaacacttggaacaacacacacatttccagagtagggcaggcaatggcttctactgaggaaaaggcctacgagatcatgagggaactggatgtctcatacgttttggtcattttcggtgggctgacaggctattcgagtgacgatataaataaatttttatggatggtccgcatcggcggtagcacagacacagggaagcatatcaaagaaaatgattattacacccctacaggcgagttcagggtcgacagagaagggtctcctgtgttgctcaattgcctgatgtataagatgtgttattatcgattcggacaagtctatactgaggcaaagaggcctccaggattcgacagagtacgtaacgccgagattggcaataaagacttcgagctggatgtcttagaggaggcttataccacagaacactggctggtccggatctacaaagtgaaggacctcgataacagaggcctctctcggacgtag

SEQ ID NO: 98591 - DNA, 2118 bp, Artificial Sequence
  derived and/or modified sequence
atgaccaagtttgggttcttacgcctgtcttatgaaaagcaggatacacttctgaaactcctgatcctgtctatggcagccgtcctgtcgttctcaacgcgactgttcgccgtcctgaggttcgaatccgtaatacatgaattcgatccctattttaactatagaactactcggtttctcgccgaggagggcttctataaattccataattggttcgatgaccgcgcatggtaccctctcggccgtattatcggagggactatctatccagggcttatgatcaccagcgcagccatttatcatgtgctgcacttctttcatatcacaattgatatccggaatgtttgtgtgttcctggcgccactgttttccagcttcacaacaatagtaacataccatcttacaaaggaactgaaggatgctggagctggcctcttggccgcagcaatgattgctgtcgtccctggttatattagtcgcagtgttgccggaagctacgacaacgaggggattgcaatcttctgtatgttactcacttactatatgtggatcaaagcggtaaagactggttcaatctgctgggcagcaaagtgtgcattggcctatttctacatggtgtcttcttggggcggttatgttttcctcatcaacctcatccccctacacgtgctggtcctcatgctgacagggcgattttcacaccggatttacgtagcctactgcaccgtctactgtcttggcacgatcctatctatgcagatctcctttgttggattccaacccgtactgagcagcgaacacatggccgctttcggcgtgttcgggctgtgccagatccatgcgtttgtggattacttgagatccaaacttaacccccagcagttcgaggttctgtttcgcagtgtgataagcctcgtaggattcgtcctactgactgtgggggcactgcttatgcttaccggaaaaattagcccatggacagggagattttattctcttctggaccccagctatgctaagaacaacattcccattatcgcgtccgtgtctgagcatcagccaactacatggtcttcttattacttcgacctccaactgctcgtcttcatgtttccggtgggcctctattactgcttttccaatctatctgacgctcgcatctttatcattatgtatggcgtcacatcaatgtatttctctgctgtgatggtgagactcatgctggtcctggcaccggtgatgtgtatcctcagcggaatcggcgtgtcccaggtgttgagcacttacatgaagaacctcgacatctctagaccagacaagaagtccaaaaagcagcaggattccacttatcccatcaagaacgaagtagcatccggaatgatactggtcatggctttttttctcatcacatacaccttccacagtacctgggtgacaagtgaagcctactctagtccttctattgtgctcagtgctagaggaggggacggatctcgcatcatcttcgacgacttcagagaggcctactactggctgcgccataacaccccagaggatgcaaaagtgatgtcatggtgggattacggctaccagataacagccatggcaaataggactatactagttgataataatacctggaacaacacacatatcagcagagttggccaggccatggcatccactgaggagaaagcctacgagatcatgagagaactcgacgtctcctacgttctcgtgatttttggtggtctgactggctacagttccgatgacatcaacaagttcctttggatggtgagaatcggcggttctactgacactggcaagcatatcaaggaaaacgattattacacaccaacgggcgaatttcgcgtggatcgtgaaggtagtccagtgctgctcaattgcctcatgtacaaaatgtgttattaccggttcggacaggtgtacaccgaggccaaacggcctcccggatttgacagggttaggaacgcagagataggcaataaggactttgagcttgacgttctggaggaggcttacaccaccgaacattggctcgttagaatctacaaagtgaaggacctggacaaccgcggattgtctcggacttag

SEQ ID NO: 98592 - DNA, 2828 bp, Artificial Sequence
  derived and/or modified sequence
attggcctggagccagccaacgggggagcggtccgggaggcggacccggctcctgccagggttgggtgcgccgctgaacggatggctgagggagccccgcggatcgtttaggaaagccggccagctgatcgtcgtgtgttgccacccattcatgtcaagatgactaagtttggatttttgcgattgtcctatgagaagcaggacacacttttgaagcttctcattctgtcaatggctgctgtattatccttctccactcgtctgtttgctgtcctgagatttgaaagtgttatccatgagtttgatccgtactttaattatcggactaccaggttcctggctgaggaggggttttataaattccataactggtttgatgaccgagcctggtaccctttgggacgaatcattggaggaacaatttacccaggtttaatgatcacctctgctgcaatctaccatgtactccattttttccacatcaccatcgacattcggaatgtctgtgtgttcctggcccctctcttctcctccttcaccaccatcgtcacgtaccaccttaccaaagagctcaaggatgcaggggctgggcttcttgctgctgccatgattgctgtagttcctggatatatctcccgatctgtggctggctcctatgataatgaagggattgccatcttttgcatgctactcacctactacatgtggatcaaggcagtaaagactggttccatctgttgggcagctaagtgtgcccttgcttatttctacatggtctcgtcatggggaggttatgtgttcctgatcaacttaattcctctccacgtcctcgtgctgatgctcacaggccgtttctctcaccggatctatgtggcctactgtactgtttactgcctgggcactatactttctatgcagatctcctttgtgggtttccagcctgtcctttcatcagagcacatggcagcctttggggtctttggtctctgccagatccatgcctttgtggattacctgcgcagcaagttgaatccacaacaatttgaagttcttttccggagcgtcatctctctggtaggctttgtccttctcaccgtgggagctctcctcatgctgacaggaaaaatatctccctggacggggcgtttctactcgctgctggatccctcttatgctaagaacaacatccccatcattgcttctgtgtctgagcatcagcccacaacctggtcctcatactattttgacctgcagctcctcgtcttcatgtttccagttggcctctattactgctttagcaacctgtctgatgcccggatttttatcatcatgtatggtgtgaccagcatgtacttttcagctgtaatggtgcgtctaatgctagtgttggcacctgttatgtgcattctctctggcattggagtctcccaggtgctgtccacatacatgaagaatctggacataagtcgtccagacaagaagagcaagaagcaacaggattccacctaccctattaagaatgaagtggcaagtgggatgatactggtcatggctttctttctcatcacctacacctttcattcaacctgggtgaccagtgaggcctactcttctccgtccattgtactatctgcccgtggtggggatggcagtaggatcatatttgatgacttccgagaagcatattattggcttcgtcataatactccagaggatgcgaaggtcatgtcctggtgggattatggctatcagattacagctatggcaaaccgaacaattttagtggacaataacacatggaataatacccatatttctcgagtagggcaggcaatggcgtccacagaggaaaaagcctatgagatcatgagggagctcgatgtcagctatgtgctggtcatttttggaggcctcactgggtattcctctgatgatatcaacaagtttctttggatggtccggattggagggagcacagatacaggcaaacatatcaaggagaatgactattatactccaactggggagttccgtgtggaccgtgaaggttctccagtgctgctcaactgcctcatgtacaagatgtgttactatcgctttggacaggtttacacagaagccaagcgtcctccaggctttgaccgtgtccgaaatgctgagattgggaataaagactttgagcttgatgtcctggaggaagcatataccacagaacattggctggtcaggatatacaaggtaaaggacctggataatcgaggcttgtcaaggacataaatgtcacgtccagctctgatatgcttcgcactgagcacatcacatttaggacgttgaagatttttttttttttttttttttaatatgcagtttgtaagaacaaaactggatggcatcagaattgtctggaagttttgtcttgggcagtatgggctgggccaaatgaaatgatttttataattctaaacaggttaccaaatgaaatgtcatggctttactttggtcaattaaaggggggaatttttttaaaaaatgtgccttatttgttttgacttataactgatttgagggaggcaaaagctatgctaggctgccagaaggacataagcagaccttgtccattctcttagctccctaaattagccaaatagagacttctttctcaaatcaggaaaactatcaaagaccaattcagatcctacatttacagacagttttgtcataaccctttgcattgcagcacctagtacaattccttggaaacagcgtggctcaataaatttttattgaatgaataaatgtgggaccagaagagtgctagaagagtgcct

SEQ ID NO: 98593 - DNA, 2402 bp, Artificial Sequence
  derived and/or modified sequence
ggacccggctcctgccagggttgggtgcgccgctgaacggatggctgagggagccccgcggatcgtttaggaaagccggccaggcattccagaaaacagctgcaaaccctgagagatatggctggattgttgacctcctggagtagttaggcctttatttttagttgcaaactgatcgtcgtgtgttgccacccattcatgtcaagatgactaagtttggatttttgcgattgtcctatgagaagcaggacacacttttgaagcttctcattctgtcaatggctgctgtattatccttctccactcgtctgtttgctgtcctgagatttgaaagtgttatccatgagtttgatccgtactttaattatcggactaccaggttcctggctgaggaggggttttataaattccataactggtttgatgaccgagcctggtaccctttgggacgaatcattggaggaacaatttacccaggtttaatgatcacctctgctgcaatctaccatgtactccattttttccacatcaccatcgacattcggaatgtctgtgtgttcctggcccctctcttctcctccttcaccaccatcgtcacgtaccaccttaccaaagagctcaaggatgcaggggctgggcttcttgctgctgccatgattgctgtagttcctggatatatctcccgatctgtggctggctcctatgataatgaagggattgccatcttttgcatgctactcacctactacatgtggatcaaggcagtaaagactggttccatctgttgggcagctaagtgtgcccttgcttatttctacatggtctcgtcatggggaggttatgtgttcctgatcaacttaattcctctccacgtcctcgtgctgatgctcacaggccgtttctctcaccggatctatgtggcctactgtactgtttactgcctgggcactatactttctatgcagatctcctttgtgggtttccagcctgtcctttcatcagagcacatggcagcctttggggtctttggtctctgccagatccatgcctttgtggattacctgcgcagcaagttgaatccacaacaatttgaagttcttttccggagcgtcatctctctggtaggctttgtccttctcaccgtgggagctctcctcatgctgacaggaaaaatatctccctggacggggcgtttctactcgctgctggatccctcttatgctaagaacaacatccccatcattgcttctgtgtctgagcatcagcccacaacctggtcctcatactattttgacctgcagctcctcgtcttcatgtttccagttggcctctattactgctttagcaacctgtctgatgcccggatttttatcatcatgtatggtgtgaccagcatgtacttttcagctgtaatggtgcgtctaatgctagtgttggcacctgttatgtgcattctctctggcattggagtctcccaggtgctgtccacatacatgaagaatctggacataagtcgtccagacaagaagagcaagaagcaacaggattccacctaccctattaagaatgaagtggcaagtgggatgatactggtcatggctttctttctcatcacctacacctttcattcaacctgggtgaccagtgaggcctactcttctccgtccattgtactatctgcccgtggtggggatggcagtaggatcatatttgatgacttccgagaagcatattattggcttcgtcataatactccagaggatgcgaaggtcatgtcctggtgggattatggctatcagattacagctatggcaaaccgaacaattttagtggacaataacacatggaataatacccatatttctcgagtagggcaggcaatggcgtccacagaggaaaaagcctatgagatcatgagggagctcgatgtcagctatgtgctggtcatttttggaggcctcactgggtattcctctgatgatatcaacaagtttctttggatggtccggattggagggagcacagatacaggcaaacatatcaaggagaatgactattatactccaactggggagttccgtgtggaccgtgaaggttctccagtgctgctcaactgcctcatgtacaagatgtgttactatcgctttggacaggtttacacagaagccaagcgtcctccaggctttgaccgtgtccgaaatgctgagattgggaataaagactttgagcttgatgtcctggaggaagcatataccacagaacattggctggtcaggatatacaaggtaaaggacctggataatcgaggcttgtcaaggacataaatgtcacgtccagctctgatatgcttcgcactgagcacatcacatttaggacgttgaagatttttttttttttttttt

SEQ ID NO: 98594 - protein, 309 aa, Artificial Sequence
  derived and/or modified sequence
MEEVPHDCPGADSAQAGRGASCQGCPNQRLCASGAGATPDTAIEEIKEKMKTVKHKILVLSGKGGVGKSTFSAHLAHGLAEDENTQIALLDIDICGPSIPKIMGLEGEQYVEDNLGVMSVGFLLSSPDDAVIWRGPKKNGMIKQFLRDVDWGEVDYLIVDTPPGTSDEHLSVVRYLATAHIDGAVIITTPQEVSLQDVRKEINFCRKVKLPIIGVVENMSGFICPKCKKESQIFPPTTGGAELMCQDLEVPLLGRVPLDPLIGKNCDKGQSFFIDAPDSPATLAYRSIIQRIQEFCNLHQSKEENLISS

SEQ ID NO: 98595 - DNA, 930 bp, Artificial Sequence
  derived and/or modified sequence
atggaagaggtgccccatgactgtccaggcgcagactctgctcaagctggtcgaggagcgtcgtgccaaggctgccccaatcagagattatgtgcaagcggcgccggggccactccagacacggcgatcgaagaaatcaaagagaaaatgaagacagttaagcataaaattctggtgctgtccggcaagggaggggtcggcaaatcaaccttctctgcccacctggcccatgggttagcagaagacgagaatactcaaattgccctactggatattgatatatgtgggcctagtattcctaagattatgggcttagagggagagcaatatgtggaggataacctgggcgttatgtctgtagggtttttgttgtccagtcccgatgatgccgtgatctggcgcggcccaaagaagaacgggatgatcaagcagttcctgcgggatgtggactggggggaagtagactacctgattgttgacactccaccagggaccagcgacgagcatctgagcgtagtaaggtacctggcaaccgcgcatattgacggagccgttattatcactacgccacaggaagtgagtttgcaagacgtgcggaaagagatcaacttctgtagaaaagttaagttgccaatcataggtgtggttgagaacatgtccggattcatatgccctaaatgtaagaaggaaagtcagatcttccctcccacaactgggggagctgagctgatgtgtcaggatttagaggtgccattacttgggagagtgcccctggaccctttgatcgggaaaaattgtgataagggccagagcttcttcatcgacgcccctgactcacccgccacccttgcttacaggtcaattatccagcgcattcaggagttttgtaatcttcaccagagcaaagaggaaaacttaatcagtagttag

SEQ ID NO: 98596 - DNA, 930 bp, Artificial Sequence
  derived and/or modified sequence
atggaggaggtgccccatgactgccctggagctgacagcgcccaggccggccgcggggccagctgccagggctgccccaaccagaggctgtgtgccagcggggccggggccaccccagacacagccatcgaggagatcaaggagaagatgaagacagtgaagcacaagatcctggtgctgtctggaaaaggaggagtgggcaagagcaccttcagcgcccacctggcccacggcctggctgaagatgagaacacccagatcgccctgctggacatcgacatctgtggccccagcatccccaagatcatgggcctggagggggagcagtatgtggaggacaacctgggcgtgatgtctgtgggcttcctgctgagcagcccagatgatgctgtgatctggaggggccccaagaagaatggcatgatcaagcagttcctgagagatgtggactggggcgaggtggactacctgattgtggacaccccacctggcaccagtgatgagcacctgtctgtggtgcgctacctggccacagcccacattgatggagctgtgatcatcaccaccccccaggaggtgtccctgcaggatgtgaggaaggagatcaacttctgcaggaaggtgaagctgcccatcattggagtggtggagaacatgagcggcttcatctgccccaagtgcaagaaggagagccagatcttcccccccaccaccggcggcgctgagctgatgtgccaggacctggaggtgcccctgctgggccgggtgcccctggaccccctcatcggcaagaactgtgacaagggccagagcttcttcattgatgccccagacagccctgccaccctggcctaccgcagcatcatccagaggatccaggagttctgcaacctgcaccagagcaaggaggagaacctgatcagcagctag

SEQ ID NO: 98597 - DNA, 930 bp, Artificial Sequence
  derived and/or modified sequence
atggaggaggtgccccacgactgccccggcgccgacagcgcccaggcgggaagaggcgcctcatgccagggttgtcccaaccagcgactgtgtgcctccggtgcaggagccaccccagacactgctattgaggagatcaaggaaaagatgaaaaccgttaaacacaagatcctcgtgttaagcggaaaaggcggcgtggggaaatcaactttttccgcccacctggctcacggacttgctgaagacgagaacactcagatcgcgctgctagatattgatatttgtggtccatctatccctaaaatcatgggcttggagggcgagcagtacgtggaagataacctgggcgtgatgtccgtcgggttccttctttccagcccggatgacgctgtaatttggcgagggcctaaaaagaatggcatgataaaacagttcctccgggatgttgactggggagaggtggactatctaatagttgacactccaccgggaacctccgatgaacatctgtcagtggttcgctacctagccactgctcatatcgacggtgcggtaataattacaacaccacaggaagtatccctgcaggacgtccgcaaggagatcaacttctgtaggaaggtcaaactcccaatcattggcgtagtcgagaacatgagtgggttcatctgccccaaatgcaaaaaagaaagccagatctttcctccgactacagggggcgccgaacttatgtgtcaggacctggaggtcccacttctcgggagggtgcccctggatccgctcattgggaagaactgcgacaaagggcagtctttcttcatcgacgctccagatagtcccgcaaccctggcctaccgaagcataatccagcgaatccaggaattctgtaatctgcaccagtccaaagaggaaaacctgatttcgagctag

SEQ ID NO: 98598 - DNA, 1195 bp, Artificial Sequence
  derived and/or modified sequence
aggcggcaaaggcgacggaatggaggaggtgcctcacgactgtccaggggccgacagcgcccaggcgggcagaggggcttcatgtcagggatgccccaaccagcggctgtgcgcttctggagcgggggccactccggacacggctatagaggaaatcaaagagaaaatgaagactgtaaaacacaaaatcttggtattgtctgggaaaggcggtgttgggaaaagcacattcagcgcccaccttgcccatggcctagcagaggatgaaaacacacagattgctcttctagacatcgatatatgtgggccatcgattcccaagataatgggattggaaggagagcagtacgtggaagacaacctgggggtgatgtcagtgggcttcctgctcagcagtcctgatgatgctgttatctggaggggacccaagaaaaacggcatgatcaagcagttcctccgagatgtggactggggagaggtcgactacctcattgtggacaccccacctgggacgtcggatgaacacctctcggtcgtccggtacctggccacagcacacatcgatggagcagtgatcatcaccactccccaggaggtgtcactccaggatgtccggaaagaaatcaacttctgccgcaaggtgaagctgcccatcatcggggtggtggagaacatgagtggcttcatctgtcctaagtgcaagaaagaatctcagatattccctcccacaaccgggggcgcggagctcatgtgccaggacttggaggtccctctcctcggcagagtgcccctggatccgctcataggtaagaattgtgacaaaggccagtcttttttcattgacgccccagattccccagccacgttagcctacagaagtataattcagagaatccaagagttttgtaatctccatcagtcaaaagaagagaacctcatcagttcctgaaacgagagaatgttcaggaccaagcagttaccgagcgaggcactcactgggcagcacatccagccagacccgaccagctccgggatggggtgggtcacagcaaaaggaccagatgctggtgtggtccgaagccactttctcagagacactttaatcattgagtatttgtacacttttctttagaacatatataaagggcattctctacaaatgtgccgttttaagaataaaaccccctcaaatctc

SEQ ID NO: 98599 - DNA, 930 bp, Artificial Sequence
  derived and/or modified sequence
atggaggaagttcctcacgactgccccggagctgactcagcccaggcaggtaggggcgcttcctgccagggctgtcctaaccagagattatgcgcgagtggagcaggcgctacaccagacaccgctatcgaggaaattaaagaaaaaatgaagaccgtcaagcacaaaatcctggttctgtctgggaagggcggagtcggcaagtccaccttcagcgcccatctggctcatggactcgcggaggatgagaacacccagatcgccctcctggacattgatatatgcggcccttcaatccctaagattatgggtctggaaggcgagcagtatgtcgaggacaacctgggcgtcatgagtgtcgggttcctcctgagtagtccagacgacgccgtgatctggagaggccctaaaaaaaacgggatgataaagcaattcctgcgggacgtggattggggtgaagtggactatctgatcgttgacacccccccaggcaccagcgatgaacatctgagcgttgtgaggtatctggccacagctcacatcgatggggctgtcatcattaccacccctcaagaggtcagcctgcaggacgttcgcaaggaaataaacttttgtcggaaagtgaaattgccgattataggcgttgtggagaatatgtccggatttatatgtcccaagtgcaaaaaagagagccagattttccccccaacgactggaggagccgaactgatgtgccaagacttagaggtccccctgttggggcgagtgcctctcgaccccttgatagggaaaaactgtgataaggggcaatcgttcttcattgacgcgcctgattccccagcaaccctagcttacaggtccatcatacagaggatacaggagttttgcaatcttcaccagtccaaggaagaaaatttaatttcttcctag

SEQ ID NO: 98600 - DNA, 930 bp, Artificial Sequence
  derived and/or modified sequence
atggaggaggtgccccacgactgccccggcgccgacagcgcccaggccggcagaggcgccagctgccagggctgccccaaccagagactgtgcgccagcggcgccggcgccacccccgacaccgccatcgaggagatcaaggagaagatgaagaccgtgaagcacaagatcctggtgctgagcggcaagggcggcgtgggcaagagcaccttcagcgcccacctggcccacggcctggccgaggacgagaacacccagatcgccctgctggacatcgacatctgcggccccagcatccccaagatcatgggcctggagggcgagcagtacgtggaggacaacctgggcgtgatgagcgtgggcttcctgctgagcagccccgacgacgccgtgatctggagaggccccaagaagaacggcatgatcaagcagttcctgagagacgtggactggggcgaggtggactacctgatcgtggacaccccccccggcaccagcgacgagcacctgagcgtggtgagatacctggccaccgcccacatcgacggcgccgtgatcatcaccaccccccaggaggtgagcctgcaggacgtgagaaaggagatcaacttctgcagaaaggtgaagctgcccatcatcggcgtggtggagaacatgagcggcttcatctgccccaagtgcaagaaggagagccagatcttcccccccaccaccggcggcgccgagctgatgtgccaggacctggaggtgcccctgctgggcagagtgcccctggaccccctgatcggcaagaactgcgacaagggccagagcttcttcatcgacgcccccgacagccccgccaccctggcctacagaagcatcatccagagaatccaggagttctgcaacctgcaccagagcaaggaggagaacctgatcagcagctag
